United States Patent Application Publication US 2011/0183924 A1 - sequence listing, part 83

SEQ ID NO: 287048 - DNA, 5290 bp, Homo sapiens
acgcccggcttccgccccgcagccccgaggggtctgggcgcgctgaagaccccttcggctgctgggccaacgcccccacccttggtcacctactcctgccgccgagcggttcgcgggaggtggcctcgggggtcgtagctactcaccggcggggcgctccgagtccatctgccccgtagcccggcagccggggcgggagggctgcgagcccggggcgcggtccgcctgaggcctgagacccggggccgcctgcgctcagggccgcggtgccggccgcgcgggagcctggcggggacggcgcggtcagtgttcggctcctccgcagtgactcaccagcgtcctgaagcttttgatcaccattggctgggaaggaaaaacagaatcagctgttccctgcgaaaggtgggacttgggccgcttttttcttagaatctaggttggaaacgtcgcatgatggtctttacgtaaacagccgtctcaacgctctacagaaagcgctaaccgcgcatttgaagcccacctagagtaaatcaagagcgtgaaagcattttttttttctgtgtaggttaacattcctgctccttcctttaaaaaggaagctcaaggccaggcgcggtggctcacgcctgtaatcccaacactttgggaggccgaggccgacgtatcacgagattaggaggtcgagaccagcctggccaacatggtgaaaccctgtctttactaaaaatacaaaaactagccgggcgtggcggcgcgcgcctgtaacccatgctactcggaaggctgaggcaggagaatcgcttgaacccgggaggcggaggttgcagtgagccgagatcgcgcctctgcactccagcctgggacagagcgagcctccgtctccaaaaaaaaataaggaagctcaagatgaagagtcagaagtggtaacttgtttgttgcacaagaaacaaatttagcattctatttaggggatccagattaccaaaaaaaaaaaagaagtgaagttatttctgcattaagtatattaataaaactttatcactaaaaacaattctgtaagaggaacgccaaggaaaaaaatatttgagtttttagagaagtcattttttaaacttttagaggttgtgacatttaagtaacataattttatttagtacctagtatgcaaagacattgtactgggcatggcagcaaatagaaagctttgtaaatcgcagtgtcccatctaattaacccgcattctaacaggtggttttattttgctggaccgcaccacagtcaggtaacaccaagaatatcgctaatgtaattttttaagttgatatatttaggattccataaaagtcactgaaaataactgagagcatgacatgtcacaaaacaagggaaagaaatcattttgaggatcagtcgctttacatcttttgtaactaatttaatccccaaaggaatccaataaagtaaaagttattctaaattgaattttaagcatgagaatgtggaaattactcgtcaaaagtcaaaaataatcgtgcagcagggcaaagactaaaggctggcatcagaatccatattcttttcactgttgatgtgctagggctgcaggaacaaaatactgcaaactaggcagcttaaacaaatttattgtcagaggtctgactggaagtcccaaatcaaggtattggcagggttgattccttctgagagctgtgatgggagcctgttaatgcatctcagcgtctaggcattccttggcttgtggcagcatgcccccgccagtcttcacatgacgttttccatgtccgtgtctgtctgcacacttagcgttctttttatgaggacatcagtcatattggagtacagtagacgctactttaatatgacctcatgttaactaatcatatccacaacaaccctgtttccaaataaggtcacattataaaatactggaagtgaggtctttaacacatgaatttgaaagggggacacaatttaacccataacacactgtatcctgaaataactatccaatgtaatttttttaaaagacacaaaactagccgaaattataaaaggttatgattgcaatcctggtatccagttacattctccctcctgcagaagctgtggagaatcctgtctcagaaaaccaatttctattttgtcacatgtccatctatgcaaaatacatgtactttgtccctgacatagggcaacaatgctgaatttactaagactcatttttgcgcatggtttgatagggaattaagatttactaggtattctgtcattgtcctcattactgattattttaactgtgtctcaaacacttggatagtacactatagtgttataagctgtttgacatgtcgcttcctaaattctcaagttatatatatgtgtgtatatatgtcatgtaacaggcacaactgttttcatgtgtatcactttattgcacttcacaggtatcatatgtttcttacaaagtggaggtttgtggcagccctgcatggagcaagtctgtcagcaccatctttctaacaaaactgcaacagccaccccaactttcaagcactgtctttgtggtgtttacgtgttctcgccacacctgcataggttttctctgggtgctgcagttcttgccacatcccagaggtgtgcacgtgaggtgaactggtgtgtcttcactgtcccagtctgagtgtgggtgtgtgagtggccctgtgatggaatggcgtcctgtccagggctggttccctctttgtgccctgagctactgaaacaggcttcagctacacatgacccagaactggaataattaagtaataattatctttttattcatctttcttaaatgtatgtatagctcacatttatttcaatgtttaatattagaatactttggcctttagaagcttagtgattttttttttccttggccagaagtatgctttaggaacttaatccttattttttagcctctggtaaaattggttttgctatacgttgtttcacttaaaagtcctgattcccaagaacgcactgacagcagtgaggacttgctgcgcatgcgggaggccagattttcttatctgtgtgaagccagacatgaaagagatctgtcaacacataaaacaaaatcaaagtctgttttttgtctggaaaagatttttaataaaaatataacttatgttagtgtcgtgtgttttttaagtgaatattttaatatgtttaatttctatgttagtaaatagcagtagtaaacaacagtgagcaaaagcttttaggtgtcctcagtacattttaagagagtgcaagcgtcctgtgaccaagaagtttgagaactggtgcccaccaggttcatctcacaagttcagtattttaaattccacacaaaaggtagaggaaatagctgaattcgcttcagctgcgcatacatttcacgattatttaaaagtttagagggctaggcgcggtggctcacacccggaatctcagcacttcggtaagctgagccaggtggatcacttgaggtcaggagttccagaccagcctgaccaacatgcggaaacccgtctctactaaaaatacgaaataagcccgggcgtggtggcgcatgcctgtaattccagctacttgggaggctgagacgggaccattgcctgaacccggtcggcggaggtttctgtgagtggagactgcaccattgcactcaagcctgggcaacacagaatgaaactgtctccaaaataaaaatttagaacgtagtcatgtacctcgaaagcgaacactcccaacatagcgtggaacaccccacacccccggcgactttgctccgccttggtcccggtcgcagacaccgcagaaaggccatcgttctagacatacgagaactccccgtgcagccaaacgctgtagtcccagcggcggaactcgggggggggaggggggggagtgcccaaccagccagtcagcagtgacgtcccgcctttcctccgtttccattggtccagccatgcggaggtcgctcccatgggacgccgagcttccggctgcagggcttggcgcccgggcgctttcggattgggagggcttcctccatggaacgcgagcctcgagacgtctgacgttaggcaccgttcgcagcgcctcgggctcgcacggcaggatcgaaagcgtgattggctggcggcgtctgtggtctcgggcaccgcccagtcgcgggacgctgcctctgcggaactgggggtggggcgtgttgacccccttaaaggcgccagagcccgcggtcacggctcaggttcccggtgcttcgcgcgtctgccgttgtcacaggccagggaggtggcaccaccaggcgaagcttggcgagattgtgtcgtcaagcgcgtacgggcgccaattggccgggcgatgtggcgtggactggcgctggcgcgagcgattggctgcgcggcccgggggcggggccagtgggcggtgcgcgccgcagactgtgctcaaagcgggcgccatccgggaccggcggttgtctgtggccggaggctgatcagtgttctagaacagatcagacattttgtaatgatgcctgaaataaacactaaccacctcgacaagcaacaggttcaactcctggcagagatgtgtatccttattgatgaaaatgacaataaaattggagctgagaccaagaagaattgtcacctgaacgagaacattgagaaaggattattgcatcgagcttttagtgtcttcttattcaacaccgaaaataagcttctgctacagcaaagatcagatgctaagattacctttccaggttgttttacgaatacgtgttgtagtcatccattaagcaatccagccgagcttgaggaaagtgacgcccttggagtgaggcgagcagcacagagacggctgaaagctgagctaggaattcccttggaagaggttcctccagaagaaattaattatttaacacgaattcactacaaagctcagtctgatggtatctggggtgaacatgaaattgattacattttgttggtgaggaagaatgtaactttgaatccagatcccaatgagattaaaagctattgttatgtgtcaaaggaagaactaaaagaacttctgaaaaaagcagccagtggtgaaattaagataacgccatggtttaaaattattgcagcgacttttctctttaaatggtgggataacttaaatcatttgaatcagtttgttgaccatgagaaaatatacagaatgtgattcgcgcatgggatcctctagt

SEQ ID NO: 287049 - DNA, 1166 bp, Homo sapiens
aacaaaacatcttactcctagctataaccacacacctctcaacgcacactgaacatctttttccttttaaatttagttctatcattaatttatcattaaatttagttctatcatttggtactatcattaatgtattatatacactgatactttaaaacttgtgtggaaaaaactaacttataattttgtatcacacaccctggatatgtgttctgtttctaagcgacatttgtgagagattattgtaaaatgagagcgagcaaataaaacttaatttaatctttgcagatacatacttatgggaaatttgaacaaatgagtgaaactctgtgtttttagtaggctgtgataaacatttccggagcacttgcagaggacttgctatttgccaggtgctttatgtatcattaaatttttctcatagttcagaaaaatgtgcaaaggaaactattgtctcgctccttcaaaacagtcttaattaactttcatattagcagattaaactagcagagcaggttcaagggaaattaaatgatatggaccctaatttgtatcattctgagttgattgtgtggtttattcattctggaaacatgttgatacttacagtcagccactgcttttgataagtgatattgattaggttgaatcttcttgtaaatagtatttaccagttagcaaagtctgtgttttcagaattacagtgagcacagaggtgttcataaaatgggaattgagtcccactcggtaagagttgcttaaacttgacactgttgacatttgggctggataaaacccctgtggtggggtctgtgctgtgcattgcaggatggtgagcagcgtccctctcatgtgacacccacagttatgccggatgttgccagatgcccctaggggacagagtcaacccccaactgaggaccactgtcctacagagtcaggaaatattgtagggagaaaaaaataacaacaacaaaggcctgtgttaatgttaaatagatgagattatggaatgtgtatattaatgttaaaaattgtaccttgatcaatgtactttttataaacttgccatagatatctcagatttgaaacctcaagacagatttattattcttaaatgctgtatgataatgaagaaaaataaaaatttatttcttgcaaagtta

SEQ ID NO: 287050 - DNA, 5368 bp, Homo sapiens
acgcccggcttccgccccgcagccccgaggggtctgggcgcgctgaagaccccttcggctgctgggccaacgcccccacccttggtcacctactcctgccgccgagcggttcgcgggaggtggcctcgggggtcgtagctactcaccggcggggcgctccgagtccatctgccccgtagcccggcagccggggcgggagggctgcgagcccggggcgcggtccgcctgaggcctgagacccggggccgcctgcgctcagggccgcggtgccggccgcgcgggagcctggcggggacggcgcggtcagtgttcggctcctccgcagtgactcaccagcgtcctgaagcttttgatcaccattggctgggaaggaaaaacagaatcagctgttccctgcgaaaggtgggacttgggccgcttttttcttagaatctaggttggaaacgtcgcatgatggtctttacgtaaacagccgtctcaacgctctacagaaagcgctaaccgcgcatttgaagcccacctagagtaaatcaagagcgtgaaagcattttttttttctgtgtaggttaacattcctgctccttcctttaaaaaggaagctcaaggccaggcgcggtggctcacgcctgtaatcccaacactttgggaggccgaggccgacgtatcacgagattaggaggtcgagaccagcctggccaacatggtgaaaccctgtctttactaaaaatacaaaaactagccgggcgtggcggcgcgcgcctgtaacccatgctactcggaaggctgaggcaggagaatcgcttgaacccgggaggcggaggttgcagtgagccgagatcgcgcctctgcactccagcctgggacagagcgagcctccgtctccaaaaaaaaataaggaagctcaagatgaagagtcagaagtggtaacttgtttgttgcacaagaaacaaatttagcattctatttaggggatccagattaccaaaaaaaaaaaagaagtgaagttatttctgcattaagtatattaataaaactttatcactaaaaacaattctgtaagaggaacgccaaggaaaaaaatatttgagtttttagagaagtcattttttaaacttttagaggttgtgacatttaagtaacataattttatttagtacctagtatgcaaagacattgtactgggcatggcagcaaatagaaagctttgtaaatcgcagtgtcccatctaattaacccgcattctaacaggtggttttattttgctggaccgcaccacagtcaggtaacaccaagaatatcgctaatgtaattttttaagttgatatatttaggattccataaaagtcactgaaaataactgagagcatgacatgtcacaaaacaagggaaagaaatcattttgaggatcagtcgctttacatcttttgtaactaatttaatccccaaaggaatccaataaagtaaaagttattctaaattgaattttaagcatgagaatgtggaaattactcgtcaaaagtcaaaaataatcgtgcagcagggcaaagactaaaggctggcatcagaatccatattcttttcactgttgatgtgctagggctgcaggaacaaaatactgcaaactaggcagcttaaacaaatttattgtcagaggtctgactggaagtcccaaatcaaggtattggcagggttgattccttctgagagctgtgatgggagcctgttaatgcatctcagcgtctaggcattccttggcttgtggcagcatgcccccgccagtcttcacatgacgttttccatgtccgtgtctgtctgcacacttagcgttctttttatgaggacatcagtcatattggagtacagtagacgctactttaatatgacctcatgttaactaatcatatccacaacaaccctgtttccaaataaggtcacattataaaatactggaagtgaggtctttaacacatgaatttgaaagggggacacaatttaacccataacacactgtatcctgaaataactatccaatgtaatttttttaaaagacacaaaactagccgaaattataaaaggttatgattgcaatcctggtatccagttacattctccctcctgcagaagctgtggagaatcctgtctcagaaaaccaatttctattttgtcacatgtccatctatgcaaaatacatgtactttgtccctgacatagggcaacaatgctgaatttactaagactcatttttgcgcatggtttgatagggaattaagatttactaggtattctgtcattgtcctcattactgattattttaactgtgtctcaaacacttggatagtacactatagtgttataagctgtttgacatgtcgcttcctaaattctcaagttatatatatgtgtgtatatatgtcatgtaacaggcacaactgttttcatgtgtatcactttattgcacttcacaggtatcatatgtttcttacaaagtggaggtttgtggcagccctgcatggagcaagtctgtcagcaccatctttctaacaaaactgcaacagccaccccaactttcaagcactgtctttgtggtgtttacgtgttctcgccacacctgcataggttttctctgggtgctgcagttcttgccacatcccagaggtgtgcacgtgaggtgaactggtgtgtcttcactgtcccagtctgagtgtgggtgtgtgagtggccctgtgatggaatggcgtcctgtccagggctggttccctctttgtgccctgagctactgaaacaggcttcagctacacatgacccagaactggaataattaagtaataattatctttttattcatctttcttaaatgtatgtatagctcacatttatttcaatgtttaatattagaatactttggcctttagaagcttagtgattttttttttccttggccagaagtatgctttaggaacttaatccttattttttagcctctggtaaaattggttttgctatacgttgtttcacttaaaagtcctgattcccaagaacgcactgacagcagtgaggacttgctgcgcatgcgggaggccagattttcttatctgtgtgaagccagacatgaaagagatctgtcaacacataaaacaaaatcaaagtctgttttttgtctggaaaagatttttaataaaaatataacttatgttagtgtcgtgtgttttttaagtgaatattttaatatgtttaatttctatgttagtaaatagcagtagtaaacaacagtgagcaaaagcttttaggtgtcctcagtacattttaagagagtgcaagcgtcctgtgaccaagaagtttgagaactggtgcccaccaggttcatctcacaagttcagtattttaaattccacacaaaaggtagaggaaatagctgaattcgcttcagctgcgcatacatttcacgattatttaaaagtttagagggctaggcgcggtggctcacacccggaatctcagcacttcggtaagctgagccaggtggatcacttgaggtcaggagttccagaccagcctgaccaacatgcggaaacccgtctctactaaaaatacgaaataagcccgggcgtggtggcgcatgcctgtaattccagctacttgggaggctgagacgggaccattgcctgaacccggtcggcggaggtttctgtgagtggagactgcaccattgcactcaagcctgggcaacacagaatgaaactgtctccaaaataaaaatttagaacgtagtcatgtacctcgaaagcgaacactcccaacatagcgtggaacaccccacacccccggcgactttgctccgccttggtcccggtcgcagacaccgcagaaaggccatcgttctagacatacgagaactccccgtgcagccaaacgctgtagtcccagcggcggaactcgggggggggaggggggggagtgcccaaccagccagtcagcagtgacgtcccgcctttcctccgtttccattggtccagccatgcggaggtcgctcccatgggacgccgagcttccggctgcagggcttggcgcccgggcgctttcggattgggagggcttcctccatggaacgcgagcctcgagacgtctgacgttaggcaccgttcgcagcgcctcgggctcgcacggcaggatcgaaagcgtgattggctggcggcgtctgtggtctcgggcaccgcccagtcgcgggacgctgcctctgcggaactgggggtggggcgtgttgacccccttaaaggcgccagagcccgcggtcacggctcaggttcccggtgcttcgcgcgtctgccgttgtcacaggccagggaggtggcaccaccaggcgaagcttggcgagattgtgtcgtcaagcgcgtacgggcgccaattggccgggcgatgtggcgtggactggcgctggcgcgagcgattggctgcgcggcccgggggcggggccagtgggcggtgcgcgccgcagactgtgctcaaagcgggcgccatccgggaccggcggttgtctgtggccggaggctgatcaggattattgcatcgagcttttagtgtcttcttattcaacaccgaaaataagcttctgctacagcaaagatcagatgctaagattacctttccaggttgttttacgaatacgtgttgtagtcatccattaagcaatccagccgagcttgaggaaagtgacgcccttggagtgaggcgagcagcacagagacggctgaaagctgagctaggaattcccttggaagaggttcctccagaagaaattaattatttaacacgaattcactacaaagctcagtctgatggtatctggggtgaacatgaaattgattacattttgttggtgaggaagaatgtaactttgaatccagatcccaatgagattaaaagctattgttatgtgtcaaaggaagaactaaaagaacttctgaaaaaagcagccagtggtgaaattaagataacgccatggtttaaaattattgcagcgacttttctctttaaatggtgggataacttaaatcatttgaatcagtttgttgaccatgagaaaatatacagaatgtgaatatgtaggtaaatgattacagaaaaatttatctgcttaacaaacttagaatgactttttccttttaaatttagttctatcattaatttatcattaaatttagttctatcatttggtactatcattaatgtattatatacactgatactttaaaacttgtgtggaaaaaactaacttataattttgtatcacacaccctggatatgtgttctgtttctaagcgacatttgtgagagctcttgtcagggggggcatactattaccttgcgaacc

SEQ ID NO: 287051 - DNA, 5060 bp, Homo sapiens
  misc_feature (5015)..(5015): n is a, c, g, or t
  misc_feature (5057)..(5057): n is a, c, g, or t
acgcccggcttccgccccgcagccccgaggggtctgggcgcgctgaagaccccttcggctgctgggccaacgcccccacccttggtcacctactcctgccgccgagcggttcgcgggaggtggcctcgggggtcgtagctactcaccggcggggcgctccgagtccatctgccccgtagcccggcagccggggcgggagggctgcgagcccggggcgcggtccgcctgaggcctgagacccggggccgcctgcgctcagggccgcggtgccggccgcgcgggagcctggcggggacggcgcggtcagtgttcggctcctccgcagtgactcaccagcgtcctgaagcttttgatcaccattggctgggaaggaaaaacagaatcagctgttccctgcgaaaggtgggacttgggccgcttttttcttagaatctaggttggaaacgtcgcatgatggtctttacgtaaacagccgtctcaacgctctacagaaagcgctaaccgcgcatttgaagcccacctagagtaaatcaagagcgtgaaagcattttttttttctgtgtaggttaacattcctgctccttcctttaaaaaggaagctcaaggccaggcgcggtggctcacgcctgtaatcccaacactttgggaggccgaggccgacgtatcacgagattaggaggtcgagaccagcctggccaacatggtgaaaccctgtctttactaaaaatacaaaaactagccgggcgtggcggcgcgcgcctgtaacccatgctactcggaaggctgaggcaggagaatcgcttgaacccgggaggcggaggttgcagtgagccgagatcgcgcctctgcactccagcctgggacagagcgagcctccgtctccaaaaaaaaataaggaagctcaagatgaagagtcagaagtggtaacttgtttgttgcacaagaaacaaatttagcattctatttaggggatccagattaccaaaaaaaaaaaagaagtgaagttatttctgcattaagtatattaataaaactttatcactaaaaacaattctgtaagaggaacgccaaggaaaaaaatatttgagtttttagagaagtcattttttaaacttttagaggttgtgacatttaagtaacataattttatttagtacctagtatgcaaagacattgtactgggcatggcagcaaatagaaagctttgtaaatcgcagtgtcccatctaattaacccgcattctaacaggtggttttattttgctggaccgcaccacagtcaggtaacaccaagaatatcgctaatgtaattttttaagttgatatatttaggattccataaaagtcactgaaaataactgagagcatgacatgtcacaaaacaagggaaagaaatcattttgaggatcagtcgctttacatcttttgtaactaatttaatccccaaaggaatccaataaagtaaaagttattctaaattgaattttaagcatgagaatgtggaaattactcgtcaaaagtcaaaaataatcgtgcagcagggcaaagactaaaggctggcatcagaatccatattcttttcactgttgatgtgctagggctgcaggaacaaaatactgcaaactaggcagcttaaacaaatttattgtcagaggtctgactggaagtcccaaatcaaggtattggcagggttgattccttctgagagctgtgatgggagcctgttaatgcatctcagcgtctaggcattccttggcttgtggcagcatgcccccgccagtcttcacatgacgttttccatgtccgtgtctgtctgcacacttagcgttctttttatgaggacatcagtcatattggagtacagtagacgctactttaatatgacctcatgttaactaatcatatccacaacaaccctgtttccaaataaggtcacattataaaatactggaagtgaggtctttaacacatgaatttgaaagggggacacaatttaacccataacacactgtatcctgaaataactatccaatgtaatttttttaaaagacacaaaactagccgaaattataaaaggttatgattgcaatcctggtatccagttacattctccctcctgcagaagctgtggagaatcctgtctcagaaaaccaatttctattttgtcacatgtccatctatgcaaaatacatgtactttgtccctgacatagggcaacaatgctgaatttactaagactcatttttgcgcatggtttgatagggaattaagatttactaggtattctgtcattgtcctcattactgattattttaactgtgtctcaaacacttggatagtacactatagtgttataagctgtttgacatgtcgcttcctaaattctcaagttatatatatgtgtgtatatatgtcatgtaacaggcacaactgttttcatgtgtatcactttattgcacttcacaggtatcatatgtttcttacaaagtggaggtttgtggcagccctgcatggagcaagtctgtcagcaccatctttctaacaaaactgcaacagccaccccaactttcaagcactgtctttgtggtgtttacgtgttctcgccacacctgcataggttttctctgggtgctgcagttcttgccacatcccagaggtgtgcacgtgaggtgaactggtgtgtcttcactgtcccagtctgagtgtgggtgtgtgagtggccctgtgatggaatggcgtcctgtccagggctggttccctctttgtgccctgagctactgaaacaggcttcagctacacatgacccagaactggaataattaagtaataattatctttttattcatctttcttaaatgtatgtatagctcacatttatttcaatgtttaatattagaatactttggcctttagaagcttagtgattttttttttccttggccagaagtatgctttaggaacttaatccttattttttagcctctggtaaaattggttttgctatacgttgtttcacttaaaagtcctgattcccaagaacgcactgacagcagtgaggacttgctgcgcatgcgggaggccagattttcttatctgtgtgaagccagacatgaaagagatctgtcaacacataaaacaaaatcaaagtctgttttttgtctggaaaagatttttaataaaaatataacttatgttagtgtcgtgtgttttttaagtgaatattttaatatgtttaatttctatgttagtaaatagcagtagtaaacaacagtgagcaaaagcttttaggtgtcctcagtacattttaagagagtgcaagcgtcctgtgaccaagaagtttgagaactggtgcccaccaggttcatctcacaagttcagtattttaaattccacacaaaaggtagaggaaatagctgaattcgcttcagctgcgcatacatttcacgattatttaaaagtttagagggctaggcgcggtggctcacacccggaatctcagcacttcggtaagctgagccaggtggatcacttgaggtcaggagttccagaccagcctgaccaacatgcggaaacccgtctctactaaaaatacgaaataagcccgggcgtggtggcgcatgcctgtaattccagctacttgggaggctgagacgggaccattgcctgaacccggtcggcggaggtttctgtgagtggagactgcaccattgcactcaagcctgggcaacacagaatgaaactgtctccaaaataaaaatttagaacgtagtcatgtacctcgaaagcgaacactcccaacatagcgtggaacaccccacacccccggcgactttgctccgccttggtcccggtcgcagacaccgcagaaaggccatcgttctagacatacgagaactccccgtgcagccaaacgctgtagtcccagcggcggaactcgggggggggaggggggggagtgcccaaccagccagtcagcagtgacgtcccgcctttcctccgtttccattggtccagccatgcggaggtcgctcccatgggacgccgagcttccggctgcagggcttggcgcccgggcgctttcggattgggagggcttcctccatggaacgcgagcctcgagacgtctgacgttaggcaccgttcgcagcgcctcgggctcgcacggcaggatcgaaagcgtgattggctggcggcgtctgtggtctcgggcaccgcccagtcgcgggacgctgcctctgcggaactgggggtggggcgtgttgacccccttaaaggcgccagagcccgcggtcacggctcaggttcccggtgcttcgcgcgtctgccgttgtcacaggccagggaggtggcaccaccaggcgaagcttggcgagattgtgtcgtcaagcgcgtacgggcgccaattggccgggcgatgtggcgtggactggcgctggcgcgagcgattggctgcgcggcccgggggcggggccagtgggcggtgcgcgccgcagactgtgctcaaagcgggcgccatccgggaccggcggttgtctgtggccggaggctgatcaggattattgcatcgagcttttagtgtcttcttattcaacaccgaaaataagcttctgctacagcaaagatcagatgctaagattacctttccaggttgttttacgaatacgtgttgtagtcatccattaagcaatccagccgagcttgaggaaagtgacgcccttggagtgaggcgagcagcacagagacggctgaaagctgagctaggaattcccttggaagaggttcctccagaagaaattaattatttaacacgaattcactacaaagctcagtctgatggtatctggggtgaacatgaaattgattacattttgttggtgaggaagaatgtaactttgaatccagatcccaatgagattaaaagctattgttatgtgtcaaaggaagaactaaaagaacttctgaaaaaagcagccagtggtgaaattaagataacgccatggtttatgcgcgacttcncttaatggtggctaatcttgatcgttgtgaccagagttacgngtg

SEQ ID NO: 287052 - DNA, 2963 bp, Homo sapiens
acgcccggcttccgccccgcagccccgaggggtctgggcgcgctgaagaccccttcggctgctgggccaacgcccccacccttggtcacctactcctgccgccgagcggttcgcgggaggtggcctcgggggtcgtagctactcaccggcggggcgctccgagtccatctgccccgtagcccggcagccggggcgggagggctgcgagcccggggcgcggtccgcctgaggcctgagacccggggccgcctgcgctcagggccgcggtgccggccgcgcgggagcctggcggggacggcgcggtcagtgttcggctcctccgcagtgactcaccagcgtcctgaagcttttgatcaccattggctgggaaggaaaaacagaatcagctgttccctgcgaaaggtgggacttgggccgcttttttcttagaatctaggttggaaacgtcgcatgatggtctttacgtaaacagccgtctcaacgctctacagaaagcgctaaccgcgcatttgaagcccacctagagtaaatcaagagcgtgaaagcattttttttttctgtgtaggttaacattcctgctccttcctttaaaaaggaagctcaaggccaggcgcggtggctcacgcctgtaatcccaacactttgggaggccgaggccgacgtatcacgagattaggaggtcgagaccagcctggccaacatggtgaaaccctgtctttactaaaaatacaaaaactagccgggcgtggcggcgcgcgcctgtaacccatgctactcggaaggctgaggcaggagaatcgcttgaacccgggaggcggaggttgcagtgagccgagatcgcgcctctgcactccagcctgggacagagcgagcctccgtctccaaaaaaaaataaggaagctcaagatgaagagtcagaagtggtaacttgtttgttgcacaagaaacaaatttagcattctatttaggggatccagattaccaaaaaaaaaaaagaagtgaagttatttctgcattaagtatattaataaaactttatcactaaaaacaattctgtaagaggaacgccaaggaaaaaaatatttgagtttttagagaagtcattttttaaacttttagaggttgtgacatttaagtaacataattttatttagtacctagtatgcaaagacattgtactgggcatggcagcaaatagaaagctttgtaaatcgcagtgtcccatctaattaacccgcattctaacaggtggttttattttgctggaccgcaccacagtcaggtaacaccaagaatatcgctaatgtaattttttaagttgatatatttaggattccataaaagtcactgaaaataactgagagcatgacatgtcacaaaacaagggaaagaaatcattttgaggatcagtcgctttacatcttttgtaactaatttaatccccaaaggaatccaataaagtaaaagttattctaaattgaattttaagcatgagaatgtggaaattactcgtcaaaagtcaaaaataatcgtgcagcagggcaaagactaaaggctggcatcagaatccatattcttttcactgttgatgtgctagggctgcaggaacaaaatactgcaaactaggcagcttaaacaaatttattgtcagaggtctgactggaagtcccaaatcaaggtattggcagggttgattccttctgagagctgtgatgggagcctgttaatgcatctcagcgtctaggcattccttggcttgtggcagcatgcccccgccagtcttcacatgacgttttccatgtccgtgtctgtctgcacacttagcgttctttttatgaggacatcagtcatattggagtacagtagacgctactttaatatgacctcatgttaactaatcatatccacaacaaccctgtttccaaataaggtcacattataaaatactggaagtgaggtctttaacacatgaatttgaaagggggacacaatttaacccataacacactgtatcctgaaataactatccaatgtaatttttttaaaagacacaaaactagccgaaattataaaaggttatgattgcaatcctggtatccagttacattctccctcctgcagaagctgtggagaatcctgtctcagaaaaccaatttctattttgtcacatgtccatctatgcaaaatacatgtactttgtccctgacatagggcaacaatgctgaatttactaagactcatttttgcgcatggtttgatagggaattaagatttactaggtattctgtcattgtcctcattactgattattttaactgtgtctcaaacacttggatagtacactatagtgttataagctgtttgacatgtcgcttcctaaattctcaagttatatatatgtgtgtatatatgtcatgtaacaggcacaactgttttcatgtgtatcactttattgcacttcacaggtatcatatgtttcttacaaagtggaggtttgtggcagccctgcatggagcaagtctgtcagcaccatctttctaacagtatgtgctcacttcatgtctctctcacattttggtaattcttggaatgtttccgttattaaatcagttatagtgatctgtgattagtgatctttgatattactgtcataattgcttggggggcaccatgaaccacccctatataagacagcaaactgagtcgataaatgttttatgtgttctgaccactgcactgaccagctgcctccctatctctctccttctgctcagacctccctatccttgagacacagcaatactgaaattaggggccaggcatggtggtggctcatgcctgtagtcccagctacttgggagactgaagcaggaggattgcttgagcctaggagttcgaggctgcagtgagctgtgatcacgccactgcacttcagcatgggcagcaaagcaagaccctgactc

SEQ ID NO: 287053 - DNA, 5538 bp, Homo sapiens
acgcccggcttccgccccgcagccccgaggggtctgggcgcgctgaagaccccttcggctgctgggccaacgcccccacccttggtcacctactcctgccgccgagcggttcgcgggaggtggcctcgggggtcgtagctactcaccggcggggcgctccgagtccatctgccccgtagcccggcagccggggcgggagggctgcgagcccggggcgcggtccgcctgaggcctgagacccggggccgcctgcgctcagggccgcggtgccggccgcgcgggagcctggcggggacggcgcggtcagtgttcggctcctccgcagtgactcaccagcgtcctgaagcttttgatcaccattggctgggaaggaaaaacagaatcagctgttccctgcgaaaggtgggacttgggccgcttttttcttagaatctaggttggaaacgtcgcatgatggtctttacgtaaacagccgtctcaacgctctacagaaagcgctaaccgcgcatttgaagcccacctagagtaaatcaagagcgtgaaagcattttttttttctgtgtaggttaacattcctgctccttcctttaaaaaggaagctcaaggccaggcgcggtggctcacgcctgtaatcccaacactttgggaggccgaggccgacgtatcacgagattaggaggtcgagaccagcctggccaacatggtgaaaccctgtctttactaaaaatacaaaaactagccgggcgtggcggcgcgcgcctgtaacccatgctactcggaaggctgaggcaggagaatcgcttgaacccgggaggcggaggttgcagtgagccgagatcgcgcctctgcactccagcctgggacagagcgagcctccgtctccaaaaaaaaataaggaagctcaagatgaagagtcagaagtggtaacttgtttgttgcacaagaaacaaatttagcattctatttaggggatccagattaccaaaaaaaaaaaagaagtgaagttatttctgcattaagtatattaataaaactttatcactaaaaacaattctgtaagaggaacgccaaggaaaaaaatatttgagtttttagagaagtcattttttaaacttttagaggttgtgacatttaagtaacataattttatttagtacctagtatgcaaagacattgtactgggcatggcagcaaatagaaagctttgtaaatcgcagtgtcccatctaattaacccgcattctaacaggtggttttattttgctggaccgcaccacagtcaggtaacaccaagaatatcgctaatgtaattttttaagttgatatatttaggattccataaaagtcactgaaaataactgagagcatgacatgtcacaaaacaagggaaagaaatcattttgaggatcagtcgctttacatcttttgtaactaatttaatccccaaaggaatccaataaagtaaaagttattctaaattgaattttaagcatgagaatgtggaaattactcgtcaaaagtcaaaaataatcgtgcagcagggcaaagactaaaggctggcatcagaatccatattcttttcactgttgatgtgctagggctgcaggaacaaaatactgcaaactaggcagcttaaacaaatttattgtcagaggtctgactggaagtcccaaatcaaggtattggcagggttgattccttctgagagctgtgatgggagcctgttaatgcatctcagcgtctaggcattccttggcttgtggcagcatgcccccgccagtcttcacatgacgttttccatgtccgtgtctgtctgcacacttagcgttctttttatgaggacatcagtcatattggagtacagtagacgctactttaatatgacctcatgttaactaatcatatccacaacaaccctgtttccaaataaggtcacattataaaatactggaagtgaggtctttaacacatgaatttgaaagggggacacaatttaacccataacacactgtatcctgaaataactatccaatgtaatttttttaaaagacacaaaactagccgaaattataaaaggttatgattgcaatcctggtatccagttacattctccctcctgcagaagctgtggagaatcctgtctcagaaaaccaatttctattttgtcacatgtccatctatgcaaaatacatgtactttgtccctgacatagggcaacaatgctgaatttactaagactcatttttgcgcatggtttgatagggaattaagatttactaggtattctgtcattgtcctcattactgattattttaactgtgtctcaaacacttggatagtacactatagtgttataagctgtttgacatgtcgcttcctaaattctcaagttatatatatgtgtgtatatatgtcatgtaacaggcacaactgttttcatgtgtatcactttattgcacttcacaggtatcatatgtttcttacaaagtggaggtttgtggcagccctgcatggagcaagtctgtcagcaccatctttctaacaaaactgcaacagccaccccaactttcaagcactgtctttgtggtgtttacgtgttctcgccacacctgcataggttttctctgggtgctgcagttcttgccacatcccagaggtgtgcacgtgaggtgaactggtgtgtcttcactgtcccagtctgagtgtgggtgtgtgagtggccctgtgatggaatggcgtcctgtccagggctggttccctctttgtgccctgagctactgaaacaggcttcagctacacatgacccagaactggaataattaagtaataattatctttttattcatctttcttaaatgtatgtatagctcacatttatttcaatgtttaatattagaatactttggcctttagaagcttagtgattttttttttccttggccagaagtatgctttaggaacttaatccttattttttagcctctggtaaaattggttttgctatacgttgtttcacttaaaagtcctgattcccaagaacgcactgacagcagtgaggacttgctgcgcatgcgggaggccagattttcttatctgtgtgaagccagacatgaaagagatctgtcaacacataaaacaaaatcaaagtctgttttttgtctggaaaagatttttaataaaaatataacttatgttagtgtcgtgtgttttttaagtgaatattttaatatgtttaatttctatgttagtaaatagcagtagtaaacaacagtgagcaaaagcttttaggtgtcctcagtacattttaagagagtgcaagcgtcctgtgaccaagaagtttgagaactggtgcccaccaggttcatctcacaagttcagtattttaaattccacacaaaaggtagaggaaatagctgaattcgcttcagctgcgcatacatttcacgattatttaaaagtttagagggctaggcgcggtggctcacacccggaatctcagcacttcggtaagctgagccaggtggatcacttgaggtcaggagttccagaccagcctgaccaacatgcggaaacccgtctctactaaaaatacgaaataagcccgggcgtggtggcgcatgcctgtaattccagctacttgggaggctgagacgggaccattgcctgaacccggtcggcggaggtttctgtgagtggagactgcaccattgcactcaagcctgggcaacacagaatgaaactgtctccaaaataaaaatttagaacgtagtcatgtacctcgaaagcgaacactcccaacatagcgtggaacaccccacacccccggcgactttgctccgccttggtcccggtcgcagacaccgcagaaaggccatcgttctagacatacgagaactccccgtgcagccaaacgctgtagtcccagcggcggaactcgggggggggaggggggggagtgcccaaccagccagtcagcagtgacgtcccgcctttcctccgtttccattggtccagccatgcggaggtcgctcccatgggacgccgagcttccggctgcagggcttggcgcccgggcgctttcggattgggagggcttcctccatggaacgcgagcctcgagacgtctgacgttaggcaccgttcgcagcgcctcgggctcgcacggcaggatcgaaagcgtgattggctggcggcgtctgtggtctcgggcaccgcccagtcgcgggacgctgcctctgcggaactgggggtggggcgtgttgacccccttaaaggcgccagagcccgcggtcacggctcaggttcccggtgcttcgcgcgtctgccgttgtcacaggccagggaggtggcaccaccaggcgaagcttggcgagattgtgtcgtcaagcgcgtacgggcgccaattggccgggcgatgtggcgtggactggcgctggcgcgagcgattggctgcgcggcccgggggcggggccagtgggcggtgcgcgccgcagactgtgctcaaagcgggcgccatccgggaccggcggttgtctgtggccggaggctgatcaggtactgtggacgggcggcggagttcgggagacaggggcagggcggcatcggggagctgcgggacggggcggggaggaggcccgaggtctgagccacccgtgaggtctcggcgcggaggcctggacagctgggggtggcggcgttggtctcccgaactggagggaggccgggccttcccgggctgtggtgggcgcccgcgccccgtggaaggcggaggcgtgagtcggggcgtcagagacgttgccattctttgtcagcggaaaagatcgtcgtctgcgcacagtcacctgaggtttaggaactcgtggaactggaaaccgagtcgcaggagactaagagttgcgagtctccccttagagaattcagaaacaagcgtagacagcatcgtcagaaacacgagcgtgacgacaccggcctccccgtgccgagtccacgcgtgtgacgcgggtgcatacacctgcgtccgtgcaagagggtgacagcaacacactcaaggcgcttctcctgggaatggagcaggagaagagatggggagcatcgcatagatggaactagacctttttcttgggttggatgatgtgttcccgcgtctactacatggattattgcatcgagcttttagtgtcttcttattcaacaccgaaaataagcttctgctacagcaaagatcagatgctaagattacctttccaggttgttttacgaatacgtgttgtagtcatccattaagcaatccagccgagcttgaggaaagtgacgcccttggagtgaggcgagcagcacagagacggctgaaagctgagctaggaattcccttggaagaggtaaccagctctcctacacaaccatacaagctgaaacctaaacatactataaaaaggtttttaataaaatttttaaattcaaatgtagttctctgcttggtaacctccggagttatgagttagccccacaaaccatcttgaataaagattatttaaatttt

SEQ ID NO: 287054 - DNA, 3440 bp, Homo sapiens
acgcccggcttccgccccgcagccccgaggggtctgggcgcgctgaagaccccttcggctgctgggccaacgcccccacccttggtcacctactcctgccgccgagcggttcgcgggaggtggcctcgggggtcgtagctactcaccggcggggcgctccgagtccatctgccccgtagcccggcagccggggcgggagggctgcgagcccggggcgcggtccgcctgaggcctgagacccggggccgcctgcgctcagggccgcggtgccggccgcgcgggagcctggcggggacggcgcggtcagtgttcggctcctccgcagtgactcaccagcgtcctgaagcttttgatcaccattggctgggaaggaaaaacagaatcagctgttccctgcgaaaggtgggacttgggccgcttttttcttagaatctaggttggaaacgtcgcatgatggtctttacgtaaacagccgtctcaacgctctacagaaagcgctaaccgcgcatttgaagcccacctagagtaaatcaagagcgtgaaagcattttttttttctgtgtaggttaacattcctgctccttcctttaaaaaggaagctcaaggccaggcgcggtggctcacgcctgtaatcccaacactttgggaggccgaggccgacgtatcacgagattaggaggtcgagaccagcctggccaacatggtgaaaccctgtctttactaaaaatacaaaaactagccgggcgtggcggcgcgcgcctgtaacccatgctactcggaaggctgaggcaggagaatcgcttgaacccgggaggcggaggttgcagtgagccgagatcgcgcctctgcactccagcctgggacagagcgagcctccgtctccaaaaaaaaataaggaagctcaagatgaagagtcagaagtggtaacttgtttgttgcacaagaaacaaatttagcattctatttaggggatccagattaccaaaaaaaaaaaagaagtgaagttatttctgcattaagtatattaataaaactttatcactaaaaacaattctgtaagaggaacgccaaggaaaaaaatatttgagtttttagagaagtcattttttaaacttttagaggttgtgacatttaagtaacataattttatttagtacctagtatgcaaagacattgtactgggcatggcagcaaatagaaagctttgtaaatcgcagtgtcccatctaattaacccgcattctaacaggtggttttattttgctggaccgcaccacagtcaggtaacaccaagaatatcgctaatgtaattttttaagttgatatatttaggattccataaaagtcactgaaaataactgagagcatgacatgtcacaaaacaagggaaagaaatcattttgaggatcagtcgctttacatcttttgtaactaatttaatccccaaaggaatccaataaagtaaaagttattctaaattgaattttaagcatgagaatgtggaaattactcgtcaaaagtcaaaaataatcgtgcagcagggcaaagactaaaggctggcatcagaatccatattcttttcactgttgatgtgctagggctgcaggaacaaaatactgcaaactaggcagcttaaacaaatttattgtcagaggtctgactggaagtcccaaatcaaggtattggcagggttgattccttctgagagctgtgatgggagcctgttaatgcatctcagcgtctaggcattccttggcttgtggcagcatgcccccgccagtcttcacatgacgttttccatgtccgtgtctgtctgcacacttagcgttctttttatgaggacatcagtcatattggagtacagtagacgctactttaatatgacctcatgttaactaatcatatccacaacaaccctgtttccaaataaggtcacattataaaatactggaagtgaggtctttaacacatgaatttgaaagggggacacaatttaacccataacacactgtatcctgaaataactatccaatgtaatttttttaaaagacacaaaactagccgaaattataaaaggttatgattgcaatcctggtatccagttacattctccctcctgcagaagctgtggagaatcctgtctcagaaaaccaatttctattttgtcacatgtccatctatgcaaaatacatgtactttgtccctgacatagggcaacaatgctgaatttactaagactcatttttgcgcatggtttgatagggaattaagatttactaggtattctgtcattgtcctcattactgattattttaactgtgtctcaaacacttggatagtacactatagtgttataagctgtttgacatgtcgcttcctaaattctcaagttatatatatgtgtgtatatatgtcatgtaacaggcacaactgttttcatgtgtatcactttattgcacttcacaggtatcatatgtttcttacaaagtggaggtttgtggcagccctgcatggagcaagtctgtcagcaccatctttctaacaaaactgcaacagccaccccaactttcaagcaccaccttgatcaacagccatcaacattgaggcaaaaccctccaccagcaaaaagattatgactcattgaaggctcagctgatggttagcagtaaaaaatattaactttaatcatctcgaccattcagtactcatctaatattctctataacaaaatgggaaatgcacataaagcacttctgctacatgctgaattatgattgttgtctccaggaaaagaacttgtgggaacgtttgagttgtaagctgaactaactagctgcttttttcatgaaataccgcttttactggaaagaactgacagataaactgaggtattcaaacctagatatttggcagacattttcgtgaaaataaatatgttcgtgccacttcaaggaacataattctcagtacttgttgccaataatgttggaattttcatgcaaaaattcaaataaaaaacaaacttaaaaccatcaagaacttggtgactttatgtggaagccagtgctacaatactttagcttcccaatacttaaaaacttttctgatgagattactagtgatattaacaatgtgattgatattgaataatgaaatgttttagcatttggaagatctgtttaattcagtaaatcagtattttccaaatgaccaatgcatgacatttcaacatcacgcacaggaaaataggcattcgaggtacagtcaaaaataatgagttttaatgtaacaagtacaaaatgtccattgaagtggtttcaaattccaaatagtaattggaaaatccaccactcgtgttttggggtagtagtatcgaaaaagaataaccaagataatttgaaaaggctattaaaaaatacttctcaattttcaaactgcata

SEQ ID NO: 287055 - DNA, 294 bp, Homo sapiens
actcgatccgctgatcagcatggttcatgacacctaagtgtcatatacaagtcctattcacagcgtcaggaaatattgtagggagaaaaaaataacaacaacaaaggcctgtgttaatgttaaatagatgagattatggaatgtgtatattaatgttaaaaattgtaccttgatcaatgtactttttataaacttgccatagatatctcagatttgaaacctcaagacagatttattattcttaaatgctgtatgataatgaagaaaaataaaaatttatttcttgcaaagtta

SEQ ID NO: 287056 - DNA, 317 bp, Homo sapiens
attacacaggacaggcatgtgaagacacagcaagaggtctgcagccaaggagagtaggcttacgtagataagctaaccctgtaggcatattcatcttggacttccagcctccagaacagtgagaacaataaatatttgataagccaactagaggaactactgtacaaaaatttaaagaaatggtctatagtctctttaaggtaagcatacccattcatatgttgctagtgtgaagtgggactctttagaggaattggcaggacctcatcctaagccattaaagtgttgatattctttgacctctatcagattctcca

SEQ ID NO: 287057 - DNA, 4710 bp, Homo sapiens
  misc_feature (3798)..(3798): n is a, c, g, or t
  misc_feature (3950)..(3950): n is a, c, g, or t
  misc_feature (4418)..(4418): n is a, c, g, or t
gggcggggagcccggccgccagcgctcgggtccgcctctgactgcagcgcggcggggcgatgtgtgattaccatggcgaggagtctctgtccgggggcctggctaaggaaaccctattacctccaggctcgcttctcatatgtgcggatgaaatatcttttcttttcctggttagtggtttttgttggaagctggattatatatgtgcagtattctacctatacagaattatgcagaggaaaggactgtaagaaaataatatgtgacaagtacaagactggagttattgatgggcctgcatgtaacagcctttgtgttacagaaactctttactttggaaaatgtttatccaccaagcccaacaatcagatgtatttagggatttgggataatctaccaggtgttgtgaaatgtcaaatggaacaagcgcttcatcttgattttggaactgaattggaaccaagaaaagaaatagtgctatttgataagccaactagaggaactactgtacaaaaatttaaagaaatggtctatagtctctttaaggcaaaattgggtgaccaaggaaacctctctgaactggttaatctcatcttgacggtggctgatggagacaaagatggccaggtttccttgggagaagcaaagtcggcatgggcacttcttcaactgaatgaatttcttctcatggtgatacttcaagataaagaacatacccccaaattaatgggattctgtggtgacctctatgtgatggaaagtgttgaatatacctctctttatggaataagccttccttgggtcattgaactttttattccatctgggttcagaagaagcatggatcagctgttcacaccatcatggccaagaaaggccaaaatagccataggacttctagaatttgtggaagatgttttccatggcccctacggaaatttcctcatgtgcgatactagtgccaaaaacctaggatataatgataagtatgatttgaaaatggtggatatgagaaaaattgtgccagagacaaacctgaaagaacttattaaggatcgtcactgtgagtctgatttggactgtgtctatggcacagattgtagaactagctgtgatcagagtacaatgaagtgtacttcagaagtgatacaaccaaacttggcaaaagcttgtcagttactcaaagactacctactgcgtggtgctccaagtgaaattcgtgaagaattagaaaagcagctttattcttgtattgctctcaaagtcacagcaaatcaaatggaaatggaacattctttgatactaaataacctaaaaacattattgtggaagaaaatttcctacactaatgactcttagttcatttggacataattaccattttaagaaacctgccacttttaaagaacaattttgagcattaaaaaaaaatggcttcaaattcctgccagttacacaaaactccttccccccaggcctgagaagccatcagtatgtgattactgaagtaatggcaggtgtaggatcaacaggtccccaagatgtcattcctgcccttttagaagccctgttacatctccgaagtacattcattgtgtaactattttgactgactttaaaaaccaatgctgtgaaaagcttcattccataaacatcaacagtgagtgatttgtagatttaccttagccaaaataccaatgctggaagcattgtgtttgcattgaagctgctgttcaacaagaaaatttataaatttactaatgtcttagcatggtaaagtttgcacattaacagaaattaagactgcaaagcaggttaaacttgcttctttataaaacagatgttgggttaatagcatggtttactgtattaaagacttatacacccatttttaacctcattcagacatcaagttatgtgtagcttcacaatggttcaagtggcttacttcaagaaatcttatacttgacagtacaccaattttattgactaaaaatggatgaactttcctaaagattcaaagggcccatcttagtatcacgcagctgactgagcccttcaaaactgacatcttaaggcccaatcaagatccacatatcctgattttgaactatgtgaaagtgggactgttaagtgcaagactaaaataaattatagcagactttttagtaataactttccattttcaaacagtatatcctgtgggccaaagggctatttcttaaagaggcatgtaaatgtatttatttatctaatgtttttttccccatgtaaacttgatatacaaggtttagtatttgctcctctttcatattattttcacacgtatactcagatttggcatgtacctttcaacatctccataaaattaaacaccttttggagaaaagatccactattttctgctcaaaggtttcgcctacctaaagtggaacatgttaaaaatctatgtgaccatcactggacagctttctctcaaaactttccttcaacgccatggattagcaccagttttgtttactttaaggtacttttcccattcatcatctggttataataaatggatggaagaatatttcccactgatggttggtctgttgcttgccaaatttttagggagagctgttcatcatacaacataagggataatgactcctgtcaggtaaaacagaagcccaagaaataacaactttttttcttaaaaagttagttacacttgttttcttggagaaaaaaacctgtcaactcctttgcttttccaaaatatttcagggtatttcctataaggttcataagaataagagcttaacacagaaatagttgctgttcataagtttattatctatatctgaaaaaatcatagaaaattgctgggtttagctctcagcagcccgctcctgagctctgaggaagcttgccttcttttgagctacccgatccttcttctgagcaagggacattttgggacggttccacctacaaaagataggaatatatattttttaaactataactgaagagaatagaatatttaatttaaaattttaataaaatttaattttgatagagaatatttaagactttgcaatcagaaggttaaataatccaagttcaaatacatttacttatgtatgatcttaagctaactttcccaaaccccaacttctgtgatgtcctactaccatagggccaaaagtcaaatagaagacatgttagattcagtaataccacttctaggtatttgcccaaatgttttgaaatcagtttgtccaagagagtggcactcccatgttcattgcagcactatatattaatagcaacagataaatggataaaggaaatgtggtatacatatacataatggattattacccagtctttaaaaatgatggaaattctgtcatttgcaacatgaatgaagtggagaatattgtgctcagtgaaataagccaggcacaaaaagacaaatacttcatattcatatagaatctaaaacaatggaactcacagaagcagagagcagaatggtggttacagaggctggtgggtgcaaagaatgggcagatgatagtcaagtataaaatctccaacaggaggagtatgattttgtttttagttctattgcacagcatgatgaatatagaatatcgtacatttcacaattaagagaataaatttcaaatgttgttgccacaaagtgttaagtatttgaggtgaatatgttaaatacattgatttaattactatacattgtatttgtgggccatcacatcactttatgcttacatgttcattaantattactttctattccatttaaagattcaaaacatgaaaattcaacaaaaagcaacttgtcagccaataaaaaaatgcagtaaccagtacttagactgtactaagatagaaagaaccacctccgttatgtctgaggctaacacattccatcnccacagttacttttgcaaacctggttcccttcgcttctgccacatcacgcagagctagtgatcgagtttgcacaattacaccaacagtctgccccacgtgggaaccattcccaacctgttttcttgaaaagacaaaaaaaaagacgacatacctcttctttttaacttctttcttgggcttcttttcatagactggattctctcgtatagcagcatgagctttcttatacatctcctccatctgaaacaaaggaaagcaaacagtacttggtttcatttcatgtgccctactatattaatgcaaccataacttatcttgtccttctaagccagattctcaaaaggaactaaactaaatcaatgttggtaaacactttaacttctaaatgtaactcaccttttcctaacaaattcccaattttcaccttatgcaatgtgaattatcactacagaactccatcttactcnagaaaaaatcaggccagtgtggtggttcatgcctgtatctcagcactttgggagtctgaagtgggaggatcacttcagcccaggagtttgagaccagctaagcaacacagtgagacctgtctccataaaaaaactaattagccaggtggcaattattaatggtggcatgcacctgtagtcccagctacaggactacacgtgagtccaggaggtcaaggctgcagtggcacaatcacagctcactggaccccagcctagatgacagaatgagacctcatctctaccaaaaatt

SEQ ID NO: 287058 - DNA, 4533 bp, Homo sapiens
  misc_feature (3621)..(3621): n is a, c, g, or t
  misc_feature (3773)..(3773): n is a, c, g, or t
  misc_feature (4241)..(4241): n is a, c, g, or t
gggcggggagcccggccgccagcgctcgggtccgcctctgactgcagcgcggcggggcgatgtgtgattaccatggcgaggagtctctgtccgggggcctggctaaggaaaccctattacctccaggctcgcttctcatatgtgcggatgaaatatcttttcttttcctggttagtggtttttgttggaagctggattatatatgtgcagtattctacctatacagaattatgcagaggaaaggactgtaagaaaataatatgtgacaagtacaagactggagttattgatgggcctgcatgtaacagcctttgtgttacagaaactctttactttggaaaatgtttatccaccaagcccaacaatcaggcaaaattgggtgaccaaggaaacctctctgaactggttaatctcatcttgacggtggctgatggagacaaagatggccaggtttccttgggagaagcaaagtcggcatgggcacttcttcaactgaatgaatttcttctcatggtgatacttcaagataaagaacatacccccaaattaatgggattctgtggtgacctctatgtgatggaaagtgttgaatatacctctctttatggaataagccttccttgggtcattgaactttttattccatctgggttcagaagaagcatggatcagctgttcacaccatcatggccaagaaaggccaaaatagccataggacttctagaatttgtggaagatgttttccatggcccctacggaaatttcctcatgtgcgatactagtgccaaaaacctaggatataatgataagtatgatttgaaaatggtggatatgagaaaaattgtgccagagacaaacctgaaagaacttattaaggatcgtcactgtgagtctgatttggactgtgtctatggcacagattgtagaactagctgtgatcagagtacaatgaagtgtacttcagaagtgatacaaccaaacttggcaaaagcttgtcagttactcaaagactacctactgcgtggtgctccaagtgaaattcgtgaagaattagaaaagcagctttattcttgtattgctctcaaagtcacagcaaatcaaatggaaatggaacattctttgatactaaataacctaaaaacattattgtggaagaaaatttcctacactaatgactcttagttcatttggacataattaccattttaagaaacctgccacttttaaagaacaattttgagcattaaaaaaaaatggcttcaaattcctgccagttacacaaaactccttccccccaggcctgagaagccatcagtatgtgattactgaagtaatggcaggtgtaggatcaacaggtccccaagatgtcattcctgcccttttagaagccctgttacatctccgaagtacattcattgtgtaactattttgactgactttaaaaaccaatgctgtgaaaagcttcattccataaacatcaacagtgagtgatttgtagatttaccttagccaaaataccaatgctggaagcattgtgtttgcattgaagctgctgttcaacaagaaaatttataaatttactaatgtcttagcatggtaaagtttgcacattaacagaaattaagactgcaaagcaggttaaacttgcttctttataaaacagatgttgggttaatagcatggtttactgtattaaagacttatacacccatttttaacctcattcagacatcaagttatgtgtagcttcacaatggttcaagtggcttacttcaagaaatcttatacttgacagtacaccaattttattgactaaaaatggatgaactttcctaaagattcaaagggcccatcttagtatcacgcagctgactgagcccttcaaaactgacatcttaaggcccaatcaagatccacatatcctgattttgaactatgtgaaagtgggactgttaagtgcaagactaaaataaattatagcagactttttagtaataactttccattttcaaacagtatatcctgtgggccaaagggctatttcttaaagaggcatgtaaatgtatttatttatctaatgtttttttccccatgtaaacttgatatacaaggtttagtatttgctcctctttcatattattttcacacgtatactcagatttggcatgtacctttcaacatctccataaaattaaacaccttttggagaaaagatccactattttctgctcaaaggtttcgcctacctaaagtggaacatgttaaaaatctatgtgaccatcactggacagctttctctcaaaactttccttcaacgccatggattagcaccagttttgtttactttaaggtacttttcccattcatcatctggttataataaatggatggaagaatatttcccactgatggttggtctgttgcttgccaaatttttagggagagctgttcatcatacaacataagggataatgactcctgtcaggtaaaacagaagcccaagaaataacaactttttttcttaaaaagttagttacacttgttttcttggagaaaaaaacctgtcaactcctttgcttttccaaaatatttcagggtatttcctataaggttcataagaataagagcttaacacagaaatagttgctgttcataagtttattatctatatctgaaaaaatcatagaaaattgctgggtttagctctcagcagcccgctcctgagctctgaggaagcttgccttcttttgagctacccgatccttcttctgagcaagggacattttgggacggttccacctacaaaagataggaatatatattttttaaactataactgaagagaatagaatatttaatttaaaattttaataaaatttaattttgatagagaatatttaagactttgcaatcagaaggttaaataatccaagttcaaatacatttacttatgtatgatcttaagctaactttcccaaaccccaacttctgtgatgtcctactaccatagggccaaaagtcaaatagaagacatgttagattcagtaataccacttctaggtatttgcccaaatgttttgaaatcagtttgtccaagagagtggcactcccatgttcattgcagcactatatattaatagcaacagataaatggataaaggaaatgtggtatacatatacataatggattattacccagtctttaaaaatgatggaaattctgtcatttgcaacatgaatgaagtggagaatattgtgctcagtgaaataagccaggcacaaaaagacaaatacttcatattcatatagaatctaaaacaatggaactcacagaagcagagagcagaatggtggttacagaggctggtgggtgcaaagaatgggcagatgatagtcaagtataaaatctccaacaggaggagtatgattttgtttttagttctattgcacagcatgatgaatatagaatatcgtacatttcacaattaagagaataaatttcaaatgttgttgccacaaagtgttaagtatttgaggtgaatatgttaaatacattgatttaattactatacattgtatttgtgggccatcacatcactttatgcttacatgttcattaantattactttctattccatttaaagattcaaaacatgaaaattcaacaaaaagcaacttgtcagccaataaaaaaatgcagtaaccagtacttagactgtactaagatagaaagaaccacctccgttatgtctgaggctaacacattccatcnccacagttacttttgcaaacctggttcccttcgcttctgccacatcacgcagagctagtgatcgagtttgcacaattacaccaacagtctgccccacgtgggaaccattcccaacctgttttcttgaaaagacaaaaaaaaagacgacatacctcttctttttaacttctttcttgggcttcttttcatagactggattctctcgtatagcagcatgagctttcttatacatctcctccatctgaaacaaaggaaagcaaacagtacttggtttcatttcatgtgccctactatattaatgcaaccataacttatcttgtccttctaagccagattctcaaaaggaactaaactaaatcaatgttggtaaacactttaacttctaaatgtaactcaccttttcctaacaaattcccaattttcaccttatgcaatgtgaattatcactacagaactccatcttactcnagaaaaaatcaggccagtgtggtggttcatgcctgtatctcagcactttgggagtctgaagtgggaggatcacttcagcccaggagtttgagaccagctaagcaacacagtgagacctgtctccataaaaaaactaattagccaggtggcaattattaatggtggcatgcacctgtagtcccagctacaggactacacgtgagtccaggaggtcaaggctgcagtggcacaatcacagctcactggaccccagcctagatgacagaatgagacctcatctctaccaaaaatt

SEQ ID NO: 287059 - DNA, 2573 bp, Homo sapiens
gggcggggagcccggccgccagcgctcgggtccgcctctgactgcagcgcggcggggcgatgtgtgattaccatggcgaggagtctctgtccgggggcctggctaaggaaaccctattacctccaggctcgcttctcatatgtgcggatgaaatatcttttcttttcctggttagtggtttttgttggaagctggattatatatgtgcagtattctacctatacagaattatgcagaggaaaggactgtaagaaaataatatgtgacaagtacaagactggagttattgatgggcctgcatgtaacagcctttgtgttacagaaactctttactttggaaaatgtttatccaccaagcccaacaatcagatgtatttagggatttgggataatctaccaggtgttgtgaaatgtcaaatggaacaagcgcttcatcttgattttggaactgaattggaaccaagaaaagaaatagtgctatttgataagccaactagaggaactactgtacaaaaatttaaagaaatggtctatagtctctttaaggcaaaattgggtgaccaaggaaacctctctgaactggttaatctcatcttgacggtggctgatggagacaaagatggccaggtttccttgggagaagcaaagtcggcatgggcacttcttcaactgaatgaatttcttctcatggtgatacttcaagataaagaacatacccccaaattaatgggattctgtggtgacctctatgtgatggaaagtgttgaatatacctctctttatggaataagccttccttgggtcattgaactttttattccatctgggttcagaagaagcatggatcagctgttcacaccatcatggccaagaaaggccaaaatagccataggacttctagaatttgtggaagatgttttccatggcccctacggaaatttcctcatgtgcgatactagtgccaaaaacctaggatataatgataagtatgatttgaaaatggtggatatgagaaaaattgtgccagagacaaacctgaaagaacttattaaggatcgtcactgtgagtctgatttggactgtgtctatggcacagattgtagaactagctgtgatcagagtacaatgaagtgtacttcagaagtgatacaaccaaacttggcaaaagcttgtcagttactcaaagactacctactgcgtggtgctccaagtgaaattcgtgaagaattagaaaagcagctttattcttgtattgctctcaaagtcacagcaaatcaaatggaaatggaacattctttgatactaaataacctaaaaacattattgtggaagaaaatttcctacactaatgactcttagttcatttggacataattaccattttaagaaacctgccacttttaaagaacaattttgagcattaaaaaaaaatggcttcaaattcctgccagttacacaaaactccttccccccaggcctgagaagccatcagtatgtgattactgaagtaatggcaggtgtaggatcaacaggtccccaagatgtcattcctgcccttttagaagccctgttacatctccgaagtacattcattgtgtaactattttgactgactttaaaaaccaatgctgtgaaaagcttcattccataaacatcaacagtgagtgatttgtagatttaccttagccaaaataccaatgctggaagcattgtgtttgcattgaagctgctgttcaacaagaaaatttataaatttactaatgtcttagcatggtaaagtttgcacattaacagaaattaagactgcaaagcaggttaaacttgcttctttataaaacagatgttgggttaatagcatggtttactgtattaaagacttatacacccatttttaacctcattcagacatcaagttatgtgtagcttcacaatggttcaagtggcttacttcaagaaatcttatacttgacagtacaccaattttattgactaaaaatggatgaactttcctaaagattcaaagggcccatcttagtatcacgcagctgactgagcccttcaaaactgacatcttaaggcccaatcaagatccacatatcctgattttgaactatgtgaaagtgggactgttaagtgcaagactaaaataaattatagcagactttttagtaataactttccattttcaaacagtatatcctgtgggccaaagggctatttcttaaagaggcatgtaaatgtatttatttatctaatgtttttttccccatgtaaacttgatatacaaggtttagtatttgctcctctttcatattattttcacacgtatactcagatttggcatgtacctttcaacatctccataaaattaaacaccttttggagaaaagatccactattttctgctcaaaggtttcgcctacctaaagtggaacatgttaaaaatctatgtgaccatcactggacagctttctctcaaaactttccttcaacgccatggattagcaccagttttgtttactttaaggtacttttcccattcatcatctggttataataaatggatggaagaa

SEQ ID NO: 287060 - DNA, 2386 bp, Homo sapiens
gggcggggagcccggccgccagcgctcgggtccgcctctgactgcagcgcggcggggcgatgtgtgattaccatggcgaggagtctctgtccgggggcctggctaaggaaaccctattacctccaggctcgcttctcatatgtgcggatgaaatatcttttcttttcctggttagtggtttttgttggaagctggattatatatgtgcagtattctacctatacagaattatgcagaggaaaggactgtaagaaaataatatgtgacaagtacaagactggagttattgatgggcctgcatgtaacagcctttgtgttacagaaactctttactttggaaaatgtttatccaccaagcccaacaatcagatgtatttagggatttgggataatctaccaggtgttgtgaaatgtcaaatggaacaagcgcttcatcttgattttggaactgaattggaaccaagaaaagaaatagtgctatttgataagccaactagaggaactactgtacaaaaatttaaagaaatggtctatagtctctttaaggcaaaattgggtgaccaaggaaacctctctgaactggttaatctcatcttgacggtggctgatggagacaaagatggccaggtttccttgggagaagcaaagtcggcatgggcacttcttcaactgaatgaatttcttctcatggtgatacttcaagataaagaacatacccccaaattaatgggattctgtggtgacctctatgtgatggaaagtgttgaatatacctctctttatggaataagccttccttgggtcattgaactttttattccatctgggttcagaagaagcatggatcagctgttcacaccatcatggccaagaaaggccaaaatagccataggacttctagaatttgtggaagatgttttccatggcccctacggaaatttcctcatgtgcgatactagtgccaaaaacctaggatataatgataagtatgatttgaaaatggtggatatgagaaaaattgtgccagagacaaacctgaaagaacttattaaggatcgtcactgtgagtctgatttggactgtgtctatggcacagattgtagaactagctgtgatcagagtacaatgaagtgtacttcagaagtgatacaaccaaacttggcaaaagcttgtcagttactcaaagactacctactgcgtggtgctccaagtgaaattcgtgaagaattagaaaagcagctttattcttgtattgctctcaaagtcacagcaaatcaaatggaaatggaacattctttgatactaaataacctaaaaacattattgtggaagaaaatttcctacactaatgactcttagttcatttggacataattaccattttaagaaacctgccacttttaaagaacaattttgagcattaaaaaaaaatggcttcaaattcctgccagttacacaaaactccttccccccaggcctgagaagccatcagtatgtgattactgaagtaatggcaggtgtaggatcaacaggtccccaagatgtcattcctgcccttttagaagccctgttacatctccgaagtacattcattgtgtaactattttgactgactttaaaaaccaatgctgtgaaaagcttcattccataaacatcaacagtgagtgatttgtagatttaccttagccaaaataccaatgctggaagcattgtgtttgcattgaagctgctgttcaacaagaaaatttataaatttactaatgtcttagcatggtaaagtttgcacattaacagaaattaagactgcaaagcaggttaaacttgcttctttataaaacagatgttgggttaatagcatggtttactgtattaaagacttatacacccatttttaacctcattcagacatcaagttatgtgtagcttcacaatggttcaagtggcttacttcaagaaatcttatacttgacagtacaccaattttattgactaaaaatggatgaactttcctaaagattcaaagggcccatcttagtatcacgcagctgactgagcccttcaaaactgacatcttaaggcccaatcaagatccacatatcctgattttgaactatgtgaaagtgggactgttaagtgcaagactaaaataaattatagcagactttttagtaataactttccattttcaaacagtatatcctgtgggccaaagggctatttcttaaagaggcatgtaaatgtatttatttatctaatgtttttttccccatgtaaacttgatatacaaggtttagtatttgctcctctttcatattattttcacacgtatactcagatttggcatgtacctttcaacatctccataaaattaaacaccttttggaga

SEQ ID NO: 287061 - DNA, 2174 bp, Homo sapiens
gggcggggagcccggccgccagcgctcgggtccgcctctgactgcagcgcggcggggcgatgtgtgattaccatggcgaggagtctctgtccgggggcctggctaaggaaaccctattacctccaggctcgcttctcatatgtgcggatgaaatatcttttcttttcctggttagtggtttttgttggaagctggattatatatgtgcagtattctacctatacagaattatgcagaggaaaggactgtaagaaaataatatgtgacaagtacaagactggagttattgatgggcctgcatgtaacagcctttgtgttacagaaactctttactttggaaaatgtttatccaccaagcccaacaatcagatgtatttagggatttgggataatctaccaggtgttgtgaaatgtcaaatggaacaagcgcttcatcttgattttggaactgaattggaaccaagaaaagaaatagtgctatttgataagccaactagaggaactactgtacaaaaatttaaagaaatggtctatagtctctttaaggcaaaattgggtgaccaaggaaacctctctgaactggttaatctcatcttgacggtggctgatggagacaaagatggccaggtttccttgggagaagcaaagtcggcatgggcacttcttcaactgaatgaatttcttctcatggtgatacttcaagataaagaacatacccccaaattaatgggattctgtggtgacctctatgtgatggaaagtgttgaatatacctctctttatggaataagccttccttgggtcattgaactttttattccatctgggttcagaagaagcatggatcagctgttcacaccatcatggccaagaaaggccaaaatagccataggacttctagaatttgtggaagatgttttccatggcccctacggaaatttcctcatgtgcgatactagtgccaaaaacctaggatataatgataagtatgatttgaaaatggtggatatgagaaaaattgtgccagagacaaacctgaaagaacttattaaggatcgtcactgtgagtctgatttggactgtgtctatggcacagattgtagaactagctgtgatcagagtacaatgaagtgtacttcagaagtgatacaaccaaacttggcaaaagcttgtcagttactcaaagactacctactgcgtggtgctccaagtgaaattcgtgaagaattagaaaagcagctttattcttgtattgctctcaaagtcacagcaaatcaaatggaaatggaacattctttgatactaaataacctaaaaacattattgtggaagaaaatttcctacactaatgactcttagttcatttggacataattaccattttaagaaacctgccacttttaaagaacaattttgagcattaaaaaaaaatggcttcaaattcctgccagttacacaaaactccttccccccaggcctgagaagccatcagtatgtgattactgaagtaatggcaggtgtaggatcaacaggtccccaagatgtcattcctgcccttttagaagccctgttacatctccgaagtacattcattgtgtaactattttgactgactttaaaaaccaatgctgtgaaaagcttcattccataaacatcaacagtgagtgatttgtagatttaccttagccaaaataccaatgctggaagcattgtgtttgcattgaagctgctgttcaacaagaaaatttataaatttactaatgtcttagcatggtaaagtttgcacattaacagaaattaagactgcaaagcaggttaaacttgcttctttataaaacagatgttgggttaatagcatggtttactgtattaaagacttatacacccatttttaacctcattcagacatcaagttatgtgtagcttcacaatggttcaagtggcttacttcaagaaatcttatacttgacagtacaccaattttattgactaaaaatggatgaactttcctaaagattcaaagggcccatcttagtatcacgcagctgactgagcccttcaaaactgacatcttaaggcccaatcaagatccacatatcctgattttgaactatgtgaaagtgggactgttaagtgcaagactaaaataaattatagcagactttttagtaata

SEQ ID NO: 287062 - DNA, 2253 bp, Homo sapiens
ttggtgaagaaaagcaaaagtgcagaaaaccatcttttcgaaagagctttccatcattcaggcaacaggtcactcagtgaagaaactgtgccaggagactgggaatatcttctaaatccttaagcaaactgtgctgaaaacaaactgctgaaagaaaataagcatttgactttaaaacgatgcctctggaaaaaagggacatgcagcagctgccagatgttcatgatcccacctcccctacttaacaaaggcacctatatttcaccagaaataaaattttattagtaacatgtcaaatgttttaaaatacaattacctttcttcttcctctcagtttaaaaaacaatccaataaaaactctaaatcatgacccaaatatttttaaatgtgaaaaagacatatttcagattatgtaacagatacacattttcccaaataaatgttgtagaacaccatctgcttgatatttgagtgcattcccacagaaataaatttctgcttctcttccttcattaatggcttatgacaaatttatgacactatatttcacaatagctataccaaaattttatgaccaaaagaggctgacaaaaatcacttggcatgctcaaattagacaatttatgtgactgtctcatttacaccaatcctccaccccttactgagaccccagcgactgaggagaaacagaaaaaatcactgtaggggaagatctctcacagaataaagctcaaaaaagagttcaagacaagaagttacagatccaggtgccattttcagctcaggttttccataatcttcagcttatgcagctacccaaaattctgaatttaatgtaggatgtttttgtaaggttgtctcagaatttgccaagcaagaagttgctaattcttgtaactgtgaacagaatttcatctttgttaccaaatggagctcccttatgtgagtataatcaagaggaaaatcaagaagagaaatttaccacgtgtcatctcctgactgataagaatggtacaagactctacccatgttcctttcctgcacttgatacagagaaaacttgtaacaggaataatctttgcattttactctacagagtattacagtatttgtggcaaatttggaaaaccagtgttatggttttctgattttactttatgcagtttatttcttaaaagaaaaaattcttgcagaacacagacatgaacacagagtctttgaaagtttaagagtataggcttcagtgtggatatttctcaaaagatgtagaatctcccaactcaaagtgtggtcgatggactggcagcatccacatcacctgggagatttgagagatgaagaccttcattcctcatcccaaacctactaaaaggaatctgtattttcacaagatccctagtgacttgtatgctcaagaagcactaatgtaatgtttttaatccacccaaccctaaaggataatccttgagaaagacaaaactactttaatggggaaattttgtccataatattcaaccaggaatgtaacaacttttagacatggcccacttaataaaaaaacaaaaaacctgaaatttatcttgttgctgctgtatagtaatgaagtatgagaatgggaacatataaattaaaatgccatatgttaaataaatattcatgacctgattgaattaattatacacaaccttccattgtttccaacctaagtagtttcttttgtgagacatatacagctgttaactattacactgaattccagaaacatgaaaattgccttagtaaacaattatttaatgactaagtacaatagtctcaaaaagaattttgttcagccagtaacgaccatgttactatgatgaattcttatttgatacactccagaaactttcccaaaggagttcagccagtactgcaaattgttactttcttctaagtatcaatgatagggagcaaggtgtgggtgaagaatagagctataacttccacttacaatggactataaagactggggtcaggctgtgatttaaagaggaaaccagagggagagaaagaaggtgggctccagtacctggtgttaagaaataccgaagttcattcaagcaattcaccagcacaaggcaaattgaagaagactgcccctctgagcttgcacacaacatacacaactttcaggctgtgatttattgattctctttctcctttaaagctctccttaacattagtattaatctgatttgttccataaaagaacat

SEQ ID NO: 287063 - DNA, 2199 bp, Homo sapiens
ttggtgaagaaaagcaaaagtgcagaaaaccatcttttcgaaagagctttccatcattcaggcaacaggtcactcagtgaagaaactgtgccaggagactgggaatatcttctaaatccttaagcaaactgtgctgaaaacaaactgctgaaagaaaataagcatttgactttaaaacgatgcctctggaaaaaagggacatgcagcagctgccagatgttcatgatcccacctcccctacttaacaaaggcacctatatttcaccagaaataaaattttattagtaacatgtcaaatgttttaaaatacaattacctttcttcttcctctcagtttaaaaaacaatccaataaaaactctaaatcatgacccaaatatttttaaatgtgaaaaagacatatttcagattatgtaacagatacacattttcccaaataaatgttgtagaacaccatctgcttgatatttgagtgcattcccacagaaataaatttctgcttctcttccttcattaatggcttatgacaaatttatgacactatatttcacaatagctataccaaaattttatgaccaaaagaggctgacaaaaatcacttggcatgctcaaattagacaatttatgtgactgtctcatttacaccaatcctccaccccttactgagaccccagcgactgaggagaaacagaaaaaatcactgtaggggaagatctctcacagaataaagctcaaaaaagagttcaagacaagaagttacagatccaggtgccattttcagctcaggttttccataatcttcagcttatgcagctacccaaaattctgaatttaatgtaggatgtttttgtaaggttgtctcagaatttgccaagcaagaagttgctaattcttgtaactgtgaacagaatttcatctttgttaccaaatggagctcccttatgtgagtataatcaagaggaaaatcaagaagagaaatttaccacgtgtcatctcctgactgataagaatggtacaagactctacccatgttcctttcctgcacttgatacagagaaaacttgtaacaggaataatctttgcattttactctacagagtattacagtatttgtggcaaatttggaaaaccagtgttatggttttctgattttactttatgcagtttatttcttaaaagaaaaaattcttgcagaacacagacatgaacacagagtctttgaaagtttaagagtataggcttcagtgtggatatttctcaaaagatgtagaatctcccaactcaaagtgtggtcgatggactggcagcatccacatcacctgggagatttgagagatgaagaccttcattcctcatcccaaacctactaaaaggaatctgtattttcacaagatccctagtgacttgtatgctcaagaagcactaatgtaatgtttttaatccacccaaccctaaaggataatccttgagaaagacaaaactactttaatggggaaattttgtccataatattcaaccaggaatgtaacaacttttagacatggcccacttaataaaaaaacaaaaaacctgaaatttatcttgttgctgctgtatagtaatgaagtatgagaatgggaacatataaattaaaatgccatatgttaaataaatattcatgacctgattgaattaattatacacaaccttccattgtttccaacctaagtagtttcttttgtgagacatatacagctgttaactattacactgaattccagaaacatgaaaattgttcagccagtaacgaccatgttactatgatgaattcttatttgatacactccagaaactttcccaaaggagttcagccagtactgcaaattgttactttcttctaagtatcaatgatagggagcaaggtgtgggtgaagaatagagctataacttccacttacaatggactataaagactggggtcaggctgtgatttaaagaggaaaccagagggagagaaagaaggtgggctccagtacctggtgttaagaaataccgaagttcattcaagcaattcaccagcacaaggcaaattgaagaagactgcccctctgagcttgcacacaacatacacaactttcaggctgtgatttattgattctctttctcctttaaagctctccttaacattagtattaatctgatttgttccataaaagaacat

SEQ ID NO: 287064 - DNA, 636 bp, Homo sapiens
gcagttgggaaaagttaattttgataaatgtgtaataaggtgggagaagagttatgaggaatttatataattggatgaaagtaaaggaattaagagtatataagaagattaaggaagtagggattagagaaggataggtgaaagagtagcaggggaagatgaagaaggtgatagtgcaggtggtgaaaaaggttattctgtaattaatggatgatagggaccttggaaagttattaatgttaggcactgcaggaatttgggcagaagcactcaccaggcagtgcccaggaccccaaacatctccccccacttcccagaacataccctcagaacctgggtcttttacctaactatgggggctacgtgccagggtataagttccagtttggccacacatttggccatctcacccatgatgctctgggcctcagcaccttccagaagcagctcttggcttaggccactggacatcaagttcccttcccttttcatcctatcccagccatccttttggaagggagagaggtgggtgggagggtgggagggtgggggaacacaaagagaaaatggtttggaggctgagcaccttttttattaataggtataataaataaataaataaatacataaacagac

SEQ ID NO: 287065 - DNA, 997 bp, Homo sapiens
cagagccttggctcaaaggcaaacaaaaggaaatgcccggctccccatggctgtggccagcaccttcataccagggctcaaccctcagaaccctcattatatcccagggtacactggacactgcccactacttcggttcagcgtgggccagacctatgggcaggtgactggtcagctacttcgaggccctcctggcctagcctggccccctgtccaccgcacacttctgcctcccattcggcctccaagatctcctgaggttcccagggagagtctacctgtcaggcgtgggcaagaaaggctcagctccagcatgatccctgggtacacaggttttgtaccccgggcacagttcatctttgccaagaactgcagccaggtctgggccgaggctctgagtgactttactcacttgcatgagaaggaccaggtgccagagccggaggggcagctggaggagccgacactggaggtggtggaacaagcttctccctactccatggatgacagggaccctcggaagttcttcatgtcaggcttcactggctatgtgccctgcgcccgcttcctcttcggctccagctttcctgtgctcaccaaccaggcactgcaggaatttgggcagaagcactcaccaggcagtgcccaggaccccaaacatctccccccacttcccagaacataccctcagaacctgggtcttttacctaactatgggggctacgtgccagggtataagttccagtttggccacacatttggccatctcacccatgatgctctgggcctcagcaccttccagaagcagctcttggcttaggccactggacatcaagttcccttcccttttcatcctatcccagccatccttttggaagggagagaggtgggtgggagggtgggagggtgggggaacacaaagagaaaatggtttggaggctgagcaccttttttattaataggtataataaataaataaataaatacataaacagac

SEQ ID NO: 287066 - DNA, 1000 bp, Homo sapiens
  misc_feature (903)..(903): n is a, c, g, or t
  misc_feature (984)..(984): n is a, c, g, or t
cagagccttggctcaaaggcaaacaaaaggaaatgcccggctccccatggctgtggccagcaccttcataccagggctcaaccctcagaaccctcattatatcccagggtacactggacactgcccactacttcggttcagcgtgggccagacctatgggcaggtgactggtcagctacttcgaggccctcctggcctagcctggccccctgtccaccgcacacttctgcctcccattcggcctccaagatctcctgaggttcccagggagagtctacctgtcaggcgtgggcaagaaaggctcagctccagcatgatccctgggtacacaggttttgtaccccgggcacagttcatctttgccaagaactgcagccaggtctgggccgaggctctgagtgactttactcacttgcatgagaaggaccaggtgccagagccggaggggcagctggaggagccgacactggaggtggtggaacaagcttctccctactccatggatgacagggaccctcggaagttcttcatgtcaggcttcactggctatgtgccctgcgcccgcttcctcttcggctccagctttcctgtgctcaccaaccaggcactgcaggaatttgggcagaagcactcaccaggcagtgcccaggaccccaaacatctccccccacttcccagaacataccctcagaacctgggtcttttacctaactatgggggctacgtgccagggtataagttccagtttggccacacatttggccatctcacccatgatgctctgggcctcagcaccttccagaagcagctcttggcttaggccactggacatcaagttcccttcccttttcatcctatcccagccatccttttggaagggagagaggtgggtggttttctgcntctccttctttctcttcccctgtgtctttcttcttcctcctttttcgtttctggtgtgttctccttttcctcggttccccncctctttgcctctccg

SEQ ID NO: 287067 - DNA, 773 bp, Homo sapiens
cagagccttggctcaaaggcaaacaaaaggaaatgcccggctccccatggctgtggccagcaccttcataccagggctcaaccctcagaaccctcattatatcccagggttttgtaccccgggcacagttcatctttgccaagaactgcagccaggtctgggccgaggctctgagtgactttactcacttgcatgagaaggaccaggtgccagagccggaggggcagctggaggagccgacactggaggtggtggaacaagcttctccctactccatggatgacagggaccctcggaagttcttcatgtcaggcttcactggctatgtgccctgcgcccgcttcctcttcggctccagctttcctgtgctcaccaaccaggcactgcaggaatttgggcagaagcactcaccaggcagtgcccaggaccccaaacatctccccccacttcccagaacataccctcagaacctgggtcttttacctaactatgggggctacgtgccagggtataagttccagtttggccacacatttggccatctcacccatgatgctctgggcctcagcaccttccagaagcagctcttggcttaggccactggacatcaagttcccttcccttttcatcctatcccagccatccttttggaagggagagaggtgggtgggagggtgggagggtgggggaacacaaagagaaaatggtttggaggctgagcaccttttttattaataggtataataaataaataaataaatacataaacagac

SEQ ID NO: 287068 - DNA, 1228 bp, Homo sapiens
cagagccttggctcaaaggcaaacaaaaggaaatgcccggctccccatggctgtggccagcaccttcataccagggctcaaccctcagaaccctcattatatcccagggtacactggacactgcccactacttcggttcagcgtgggccagacctatgggcaggtgactggtcagctacttcgaggccctcctggcctagcctggccccctgtccaccgcacacttctgcctcccattcggcctccaagatctcctgaggttcccagggagagtctacctgtcaggcgtgggcaagaaaggctcagctccagcatgatccctgggtacacaggttttgtaccccgggcacagttcatctttgccaagaactgcagccaggtctgggccgaggctctgagtgactttactcacttgcatgagaaggaccaggtgccagagccggaggggcagctggaggagccgacactggaggtggtggaacaagcttctccctactccatggatgacagggaccctcggaagttcttcatgtcaggcactgcaggaatttgggcagaagcactcaccaggcagtgcccaggaccccaaacatctccccccacttcccagaacataccctcagaacctgggtcttttacctaactatgggggctacgtgccagggtataagttccagtttggccacacatttggccatctcacccatgatgctctgggcctcagcaccttccagaagcagctcttggcttaggccactggacatcaagttcccttcccttttcatcctatcccagccatccttttggaagggagagaggtgggtgggagggtgggagggtgggggaacacaaagagaaaatggtttggaggctgagcaccttttttatttattcggctgttcctttcctcgcctcgctcttccgctgggctcctgggtctctcgcgttttgcgtctctcgctcctggctcgggccttgctgcgccgtcctgttgctctctgcggcgccccctcctgcgtcgtgccctccctcgctcggctcgctcgctgtgcggtcgttctctcgcttcctctctgtcttgcgctgttggcgcccgttcctgccttgggtctgtcttgctgtcctcctgtgctgccgtgcgccgctctcggctcgctgccttcttcgctcgtcttcggttctgtcctcccgggctgtgccgtttcctgtcgttctcttgcgctccccg

SEQ ID NO: 287069 - DNA, 972 bp, Homo sapiens
cagagccttggctcaaaggcaaacaaaaggaaatgcccggctccccatggctgtggccagcaccttcataccagggctcaaccctcagaaccctcattatatcccaggcgtgggccagacctatgggcaggtgactggtcagctacttcgaggccctcctggcctagcctggccccctgtccaccgcacacttctgcctcccattcggcctccaagatctcctgaggttcccagggagagtctacctgtcaggcgtgggcaagaaaggctcagctccagcatgatccctgggtacacaggttttgtaccccgggcacagttcatctttgccaagaactgcagccaggtctgggccgaggctctgagtgactttactcacttgcatgaaaagcaagggagtgaagagctaccaaaggaggccaagggaagaaaggacacagagaaggaccaggtgccagagccggaggggcagctggaggagccgacactggaggtggtggaacaagcttctccctactccatggatgacagggaccctcggaagttcttcatgtcagctttcctgtgctcaccaaccaggcactgcaggaatttgggcagaagcactcaccaggcagtgcccaggaccccaaacatctccccccacttcccagaacataccctcagaacctgggtcttttacctaactatgggggctacgtgccagggtataagttccagtttggccacacatttggccatctcacccatgatgctctgggcctcagcaccttccagaagcagctcttggcttaggccactggacatcaagttcccttcccttttcatcctatcccagccatccttttggaagggagagaggtgggtgggagggtgggagggtgggggaacacaaagagaaaatggtttggaggctgagcaccttttttattaataggtataataaataaataaataaatacataaacagac

SEQ ID NO: 287070 - DNA, 1603 bp, Homo sapiens
cagagccttggctcaaaggcaaacaaaaggaaatgcccggctccccatggctgtggccagcaccttcataccagggctcaaccctcagaaccctcattatatcccagggtaagactcccacttagcgctccccgcttgctgctgggagtaggggtatagggtggaggaattaagctgcttagagcatggggccaagcggacaggttggtttgggaggctgaggtctctatggtggtggatggtgttctctccatgggaacagggtaacagcagaggaaggatcgaaagcccaggcagagaacttagaaatgcctgctccaaatatatacactgctgagtccagaaagatcagggcttcagaggtctccgcttctgcctctggggatggcggggcagggcgattctggtgagtgggagagtctgtgctgcaggtacactggacactgcccactacttcggttcagcgtgggccagacctatgggcaggtgactggtcagctacttcgaggccctcctggcctagcctggccccctgtccaccgcacacttctgcctcccattcggcctccaagatctcctgaggttcccagggagagtctacctgtcaggcgtgggcaagaaaggctcagctccagcatgatccctgggtacacaggttttgtaccccgggcacagttcatctttgccaagaactgcagccaggtctgggccgaggctctgagtgactttactcacttgcatgaaaagcaagggagtgaagagctaccaaaggaggccaagggaagaaaggacacagagaaggaccaggtgccagagccggaggggcagctggaggagccgacactggaggtggtggaacaagcttctccctactccatggatgacagggaccctcggaagttcttcatgtcaggtgagagctggggggtcaggatcagaggcgtggggaggccccaggatgccttggctcagtgtccccatcctcaggcttcactggctatgtgccctgcgcccgcttcctcttcggctccagctttcctgtgctcaccaaccaggcactgcaggaatttgggcagaagcactcaccaggcagtgcccaggaccccaaacatctccccccacttcccagaacataccctcagaacctgggtcttttacctaactatgggggctacgtgccaggtgagaagagcccccggggaggctttggggactggaatgtttgtttgtatgggtatggggtgggttgggtggtttgtgggggttgaaactaatagatatgggagggctcagatcatgtggttcagctttattatcaggcagaaaaggaaaccgaggtagctacccacagtggggaattagggccagattttagagggctgtttggaggtctagccaactggcttctattagggtataaagtctcattttcgccaacattcgttccactcactcataatgttctgggcttagtaccttccataatcagcttttgccttatggcacttgacatcaagtttccctgctctttccattcctatgcaaccatcctattcgtaaggtacaaatgttgactgtaagtttctcatacctctaacttacg

SEQ ID NO: 287071 - DNA, 375 bp, Homo sapiens
ggaaatgcccggctccccatggctgtggccagcaccttcataccagggctcaaccctcagaaccctcattatatcccagggtaagactcccacttagcgctccccgcttgctgctgggagtaggggtatagggtggaggaattaagctgcttagagcatggggccaagcggacaggttggtttgggaggctgaggtctctatggtggtggatggaaaaggagaagcaagggactagtgagacaccgggtctgccccaaagctttgtgttgttctctccatgggaacagggtaacagcagaggaaggatcgaaagcccaggcagagaacttagaaatgcctgctccaaatatatacactgctgagtccagaaagat

SEQ ID NO: 287072 - DNA, 939 bp, Homo sapiens
gccttggctcaaaggcaaaccaaccctcagaaccctcattatatcccagggtacactggacactgcccactacttcggttcagcgtgggccagacctatgggcaggtgactggtcagctacttcgaggccctcctggcctagcctggccccctgtccaccgcacacttctgcctcccattcggcctccaagatctcctgaggttcccagggagagtctacctgtcaggcgtgggcaagaaaggctcagctccagcatgatccctgggtacacaggttttgtaccccgggcacagttcatctttgccaagaactgcagccaggtctgggccgaggctctgagtgactttactcacttgcatgagaaggaccaggtgccagagccggaggggcagctggaggagccgacactggaggtggtggaacaagcttctccctactccatggatgacagggaccctcggaagttcttcatgtcaggcttcactggctatgtgccctgcgcccgcttcctcttcggctccagctttcctgtgctcaccaaccaggcactgcaggaatttgggcagaagcactcaccaggcagtgcccaggaccccaaacatctccccccacttcccagaacataccctcagaacctgggtcttttacctaactatgggggctacgtgccagggtataagttccagtttggccacacatttggccatctcacccatgatgctctgggcctcagcaccttccagaagcagctcttggcttaggccactggacatcaagttcccttcccttttcatcctatcccagccatccttttggaagggagagaggtgggtgggagggtgggagggtgggggaacacaaagagaaaatggtttggaggctgagcaccttttttattaataggtataataaataaataaataaatacataaacagac

SEQ ID NO: 287073 - DNA, 1320 bp, Homo sapiens
cagagccttggctcaaaggcaaacaaaaggaaatgcccggctccccatggctgtggccagcaccttcataccagggctcaaccctcagaaccctcattatatcccagggtaagactcccacttagcgctccccgcttgctgctgggagtaggggtatagggtggaggaattaagctgcttagagcatggggccaagcggacaggttggtttgggaggctgaggtctctatggtggtggatggtgttctctccatgggaacagggtaacagcagaggaaggatcgaaagcccaggcagagaacttagaaatgcctgctccaaatatatacactgctgagtccagaaagatcagggcttcagaggtctccgcttctgcctctggggatggcggggcagggcgattctggtgagtgggagagtctgtgctgcaggtacactggacactgcccactacttcggttcagcgtgggccagacctatgggcaggtgactggtcagctacttcgaggccctcctggcctagcctggccccctgtccaccgcacacttctgcctcccattcggcctccaagatctcctgaggttcccagggagagtctacctgtcaggcgtgggcaagaaaggctcagctccagcatgatccctgggtacacaggttttgtaccccgggcacagttcatctttgccaagaactgcagccaggtctgggccgaggctctgagtgactttactcacttgcatgagaaggaccaggtgccagagccggaggggcagctggaggagccgacactggaggtggtggaacaagcttctccctactccatggatgacagggaccctcggaagttcttcatgtcaggcttcactggctatgtgccctgcgcccgcttcctcttcggctccagctttcctgtgctcaccaaccaggcactgcaggaatttgggcagaagcactcaccaggcagtgcccaggaccccaaacatctccccccacttcccagaacataccctcagaacctgggtcttttacctaactatgggggctacgtgccagggtataagttccagtttggccacacatttggccatctcacccatgatgctctgggcctcagcaccttccagaagcagctcttggcttaggccactggacatcaagttcccttcccttttcatcctatcccagccatccttttggaagggagagaggtgggtgggagggtgggagggtgggggaacacaaagagaaaatggtttggaggctgagcaccttttttattaataggtataataaataaataaataaatacataaacagac

SEQ ID NO: 287074 - DNA, 929 bp, Homo sapiens
cagagccttggctcaaaggcaaacaaaaggaaatgcccggctccccatggctgtggccagcaccttcataccagggctcaaccctcagaaccctcattatatcccagggtacactggacactgcccactacttcggttcagcgtgggccagacctatgggcaggtgactggtcagctacttcgaggccctcctggcctagcctggccccctgtccaccgcacacttctgcctcccattcggcctccaagatctcctgaggttcccagggagagtctacctgtcaggcgtgggcaagaaaggctcagctccagcatgatccctgggtacacaggttttgtaccccgggcacagttcatctttgccaagaactgcagccaggtctgggccgaggctctgagtgactttactcacttgcatgagaaggaccaggtgccagagccggaggggcagctggaggagccgacactggaggtggtggaacaagcttctccctactccatggatgacagggaccctcggaagttcttcatgtcaggcactgcaggaatttgggcagaagcactcaccaggcagtgcccaggaccccaaacatctccccccacttcccagaacataccctcagaacctgggtcttttacctaactatgggggctacgtgccagggtataagttccagtttggccacacatttggccatctcacccatgatgctctgggcctcagcaccttccagaagcagctcttggcttaggccactggacatcaagttcccttcccttttcatcctatcccagccatccttttggaagggagagaggtgggtgggagggtgggagggtgggggaacacaaagagaaaatggtttggaggctgagcaccttttttattaataggtataataaataaataaataaatacataaacagac

SEQ ID NO: 287075 - DNA, 1226 bp, Homo sapiens
cagagccttggctcaaaggcaaacaaaaggaaatgcccggctccccatggctgtggccagcaccttcataccagggctcaaccctcagaaccctcattatatcccagggtacactggacactgcccactacttcggttcagcgtgggccagacctatgggcaggtgactggtcagctacttcgaggccctcctggcctagcctggccccctgtccaccgcacacttctgcctcccattcggcctccaagatctcctgaggttcccagggagagtctacctgtcaggcgtgggcaagaaaggctcagctccagcatgatccctgggtacacaggttttgtaccccgggcacagttcatctttgccaagaactgcagccaggtctgggccgaggctctgagtgactttactcacttgcatgagaaggaccaggtgccagagccggaggggcagctggaggagccgacactggaggtggtggaacaagcttctccctactccatggatgacagggaccctcggaagttcttcatgtcaggtgagagctggggggtcaggatcagaggcgtggggaggccccaggatgccttggctcagtgtccccatcctcaggcttcactggctatgtgccctgcgcccgcttcctcttcggctccagctttcctgtgctcaccaaccaggcactgcaggaatttgggcagaagcactcaccaggcagtgcccaggaccccaaacatctccccccacttcccagaacataccctcagaacctgggtcttttacctaactatgggggctacgtgccaggtgagaagagcccccggggaggctttggggactggaatgtttgtttgtatgggtatggggtgggttgggtggtttgtgggggttgaaactaatagatatgggagggctcagatcatgtggttcagctttattatcaggcagaaaaggaaaccgaggtagctacccacagtggggaattagggccagattttagagggctgtttggaggtctagccaactggcttctattagggtataaagtctcattttcgccaacattcgttccactcactcataatgttctgggcttagtaccttccataatcagcttttgccttatggcacttgacatcaagtttccctgctctttccattcctatgcaaccatcctattcgtaaggtacaaatgttgactgtaagtttctcatacctctaacttacg

SEQ ID NO: 287076 - DNA, 2800 bp, Homo sapiens
cgagcaactagccataggtggcctgggtctgaatggcagaggcagcgcgtccggcgggctgctcgctgcatctctgggcgtctttggctcgccacgctgggcagtgcctgcctgcgcctttcgcaacctcctcggccctgcgtggtctcgagctgggtgagcgagcgggcgggctggtaggctggcctgggctgcgaccggcggctacgactattctttggccgggtcggtgcgagtggtcggctgggcagagtgcacgctgcttggcgccgcaggctgatcccgccgtccactcccgggagcagtgatgttgggcaactctgcgccggggcctgcgacccgcgaggcgggctcggcgctgctagcattgcagcagacggcgctccaagaggaccaggagaatatcaacccggaaaaggcagcgcccgtccaacaaccgcggacccgggccgcgctggcggtactgaagtccgggaacccgcggggtctagcgcagcagcagaggccgaagacgagacgggttgcaccccttaaggatcttcctgtaaatgatgagcatgtcaccgttcctccttggaaagcaaacagtaaacagcctgcgttcaccattcatgtggatgaagcagaaaaagaagctcagaagaagccagctgaatctcaaaaaatagagcgtgaagatgccctggcttttaattcagccattagtttacctggacccagaaaaccattggtccctcttgattatccaatggatggtagttttgagtcaccacatactatggacatgtcaattgtattagaagatgaaaagccagtgagtgttaatgaagtaccagactaccatgaggatattcacacataccttagggaaatggaggttaaatgtaaacctaaagtgggttacatgaagaaacagccagacatcactaacagtatgagagctatcctcgtggactggttagttgaagtaggagaagaatataaactacagaatgagaccctgcatttggctgtgaactacattgataggttcctgtcttccatgtcagtgctgagaggaaaacttcagcttgtgggcactgctgctatgctgttagcctcaaagtttgaagaaatataccccccagaagtagcagagtttgtgtacattacagatgatacctacaccaagaaacaagttctgagaatggagcatctagttttgaaagtccttacttttgacttagctgctccaacagtaaatcagtttcttacccaatactttctgcatcagcagcctgcaaactgcaaagttgaaagtttagcaatgtttttgggagaattaagtttgatagatgctgacccatacctcaagtatttgccatcagttattgctggagctgcctttcatttagcactctacacagtcacgggacaaagctggcctgaatcattaatacgaaagactggatataccctggaaagtcttaagccttgtctcatggaccttcaccagacctacctcaaagcaccacagcatgcacaacagtcaataagagaaaagtacaaaaattcaaagtatcatggtgtttctctcctcaacccaccagagacactaaatctgtaacaatgaaagactgcctttgttttctaagatgtaaatcactcaaagtatatggtgtacagtttttaacttaggttttaattttacaatcatttctgaatacagaagttgtggccaagtacaaattatggtatctattactttttaaatggttttaatttgtatatcttttgtatatgtatctgtcttagatatttggctaattttaagtggttttgttaaagtattaatgatgccagctgtcaggataataaattgatttggaaaactttgcaagtcaaatttaacttcttcaggattttgcttagtaaagaagtttacttggtttactatataatgggaagtgaaaagccttcctctaaaattaaagtaggtttaggaaaacagaccctcaaattctgacattcattttcctaagcaactggatcaatttgctgacttgggcataatctaatctaagcatatctgaatacagtattcagagatagatacagtagagattccccagactttttcgctctttgtaaaacctgtttgtttaggttttgcgaggtaaactcaacagaggttgggagtggaagagggtgggaagcttatatgcaaattaacagacgagaaatgctccagaaggtttattattttaaagcacattaaaaacaaaaaactatttttaaaatcctgctagattttataatggatttgtgaataaaaaatacccagggttctcagaatggaataaatatcccttttaatagttatatatacagatatacaactgttagctttaattggcagctctcttcttttttcttcttttcactggctttttacttggtgctttttcttgttttgcactggtggtctgtgttctgtgaataaagcaaagtaagaatttactaagagtatgttaagttttggattattgaaataagaggcatttcttagttttccagtaggatctaaaatgtgtcagctatgagtaagactggcatccaagaagtttatattatagatttaggtcctaatttttataaatcacaaggtaaaaaaatcacagaacagatggatctctaatgaaaaagggatgtctttttgtttatagtcatgtggcaagatgagagtaaaaccagagagcaaacctctataagtgttgagtatatgtatacatttgaaataaaccagaaatttgttacctta

SEQ ID NO: 287077 - DNA, 2925 bp, Homo sapiens
ggacgcgtgggtcgcccacgcgtcgcccacgcgtcgttcaatagtcgcgggatacttgaactgcaagaacagccgccgctccggcgggctgctcgctgcatctctgggcgtctttggctcgccacgctgggcagtgcctgcctgcgcctttcgcaacctcctcggccctgcgtggtctcgagctgggtgagcgagcgggcgggctggtaggctggcctgggctgcgaccggcggctacgactattctttggccgggtcggtgcgagtggtcggctgggcagagtgcacgctgcttggcgccgcaggctgatcccgccgtccactcccgggagcagtgatgttgggcaactctgcgccggggcctgcgacccgcgaggcgggctcggcgctgctagcattgcagcagacggcgctccaagaggaccaggagaatatcaacccggaaaaggcagcgcccgtccaacaaccgcggacccgggccgcgctggcggtactgaagtccgggaacccgcggggtctagcgcagcagcagaggccgaagacgagacgggttgcaccccttaaggatcttcctgtaaatgatgagcatgtcaccgttcctccttggaaagcaaacagtaaacagcctgcgttcaccattcatgtggatgaagcagaaaaagaagctcagaagaagccagctgaatctcaaaaaatagagcgtgaagatgccctggcttttaattcagccattagtttacctggacccagaaaaccattggtccctcttgattatccaatggatggtagttttgagtcaccacatactatggacatgtcaattgtattagaagatgaaaagccagtgagtgttaatgaagtaccagactaccatgaggatattcacacataccttagggaaatggaggttaaatgtaaacctaaagtgggttacatgaagaaacagccagacatcactaacagtatgagagctatcctcgtggactggttagttgaagtaggagaagaatataaactacagaatgagaccctgcatttggctgtgaactacattgataggttcctgtcttccatgtcagtgctgagaggaaaacttcagcttgtgggcactgctgctatgctgttagcctcaaagtttgaagaaatataccccccagaagtagcagagtttgtgtacattacagatgatacctacaccaagaaacaagttctgagaatggagcatctagttttgaaagtccttacttttgacttagctgctccaacagtaaatcagtttcttacccaatactttctgcatcagcagcctgcaaactgcaaagttgaaagtttagcaatgtttttgggagaattaagtttgatagatgctgacccatacctcaagtatttgccatcagttattgctggagctgcctttcatttagcactctacacagtcacgggacaaagctggcctgaatcattaatacgaaagactggatataccctggaaagtcttaagccttgtctcatggaccttcaccagacctacctcaaagcaccacagcatgcacaacagtcaataagagaaaagtacaaaaattcaaagtatcatggtgtttctctcctcaacccaccagagacactaaatctgtaacaatgaaagactgcctttgttttctaagatgtaaatcactcaaagtatatggtgtacagtttttaacttaggttttaattttacaatcatttctgaatacagaagttgtggccaagtacaaattatggtatctattactttttaaatggttttaatttgtatatcttttgtatatgtatctgtcttagatatttggctaattttaagtggttttgttaaagtattaatgatgccagctgtcaggataataaattgatttggaaaactttgcaagtcaaatttaacttcttcaggattttgcttagtaaagaagtttacttggtttactatataatgggaagtgaaaagccttcctctaaaattaaagtaggtttaggaaaacagaccctcaaattctgacattcattttcctaagcaactggatcaatttgctgacttgggcataatctaatctaagcatatctgaatacagtattcagagatagatacagtagagattccccagactttttcgctctttgtaaaacctgtttgtttaggttttgcgaggtaaactcaacagaggttgggagtggaagagggtgggaagcttatatgcaaattaacagacgagaaatgctccagaaggtttattattttaaagcacattaaaaacaaaaaactatttttaaaatcctgctagattttataatggatttgtgaataaaaaatacccagggttctcagaatggaataaatatcccttttaatagttatatatacagatatacaactgttagctttaattggcagctctcttcttttttcttcttttcactggctttttacttggtgctttttcttgttttgcactggtggtctgtgttctgtgaataaagcaaagtaagaatttactaagagtatgttaagttttggattattgaaataagaggcatttcttagttttccagtaggatctaaaatgtgtcagctatgagtaagactggcatccaagaagtttatattatagatttaggtcctaatttttataaatcacaaggtaaaaaaatcacagaacagatggatctctaatgaaaaagggatgtctttttgtttatagtcatgtggcaagatgagagtaaaaccagagagcaaacctctataagtgttgagtatatgtatacatttgaaataaaccagaaatttgttaccttattttctttggattcttgtctggttccaaaatgatcatttcttcttcttcactatctgagagtattatgggagcatctttgtttttttattaattt

SEQ ID NO: 287078 - DNA, 1903 bp, Homo sapiens
ggacgcgtgggtcgcccacgcgtcgcccacgcgtcgttcaatagtcgcgggatacttgaactgcaagaacagccgccgctccggcgggctgctcgctgcatctctgggcgtctttggctcgccacgctgggcagtgcctgcctgcgcctttcgcaacctcctcggccctgcgtggtctcgagctgggtgagcgagcgggcgggctggtaggctggcctgggctgcgaccggcggctacgactattctttggccgggtcggtgcgagtggtcggctgggcagagtgcacgctgcttggcgccgcaggctgatcccgccgtccactcccgggagcagtgatgttgggcaactctgcgccggggcctgcgacccgcgaggcgggctcggcgctgctagcattgcagcagacggcgctccaagaggaccaggagaatatcaacccggaaaaggcagcgcccgtccaacaaccgcggacccgggccgcgctggcggtactgaagtccgggaacccgcggggtctagcgcagcagcagaggccgaagacgagacgggttgcaccccttaaggatcttcctgtaaatgatgagcatgtcaccgttcctccttggaaagcaaacagtaaacagcctgcgttcaccattcatgtggatgaagcagaaaaagaagctcagaagaagccagctgaatctcaaaaaatagagcgtgaagatgccctggcttttaattcagccattagtttacctggacccagaaaaccattggtccctcttgattatccaatggatggtagttttgagtcaccacatactatggacatgtcaattgtattagaagatgaaaagccagtgagtgttaatgaagtaccagactaccatgaggatattcacacataccttagggaaatggaggttaaatgtaaacctaaagtgggttacatgaagaaacagccagacatcactaacagtatgagagctatcctcgtggactggttagttgaagtaggagaagaatataaactacagaatgagaccctgcatttggctgtgaactacattgataggttcctgtcttccatgtcagtgctgagaggaaaacttcagcttgtgggcactgctgctatgctgttagcctcaaagtttgaagaaatataccccccagaagtagcagagtttgtgtacattacagatgatacctacaccaagaaacaagttctgagaatggagcatctagttttgaaagtccttacttttgacttagctgctccaacagtaaatcagtttcttacccaatactttctgcatcagcagcctgcaaactgcaaagttgaaagtttagcaatgtttttgggagaattaagtttgatagatgctgacccatacctcaagtatttgccatcagttattgctggagctgcctttcatttagcactctacacagtcacgggacaaagctggcctgaatcattaatacgaaagactggatataccctggaaagtcttaagccttgtctcatggaccttcaccagacctacctcaaagcaccacagcatgcacaacagtcaataagagaaaagtacaaaaattcaaagtatcatggtgtttctctcctcaacccaccagagacactaaatctgtaacaatgaaagactgcctttgttttctaagatgtaaatcactcaaagtatatggtgtacagtttttaacttaggttttaattttacaatcatttctgaatacagaagttgtggccaagtacaaattatggtatctattactttttaaatggttttaatttgtatatcttttgtatatgtatctgtcttagatatttggctaattttaagtggttttgttaaagtattaatgatgccagctgtcaggataataaattgatttggaaaact

SEQ ID NO: 287079 - DNA, 1785 bp, Homo sapiens
ggacgcgtgggtcgcccacgcgtcgcccacgcgtcgttcaatagtcgcgggatacttgaactgcaagaacagccgccgctccggcgggctgctcgctgcatctctgggcgtctttggctcgccacgctgggcagtgcctgcctgcgcctttcgcaacctcctcggccctgcgtggtctcgagctgggtgagcgagcgggcgggctggtaggctggcctgggctgcgaccggcggctacgactattctttggccgggtcggtgcgagtggtcggctgggcagagtgcacgctgcttggcgccgcaggctgatcccgccgtccactcccgggagcagtgatgttgggcaactctgcgccggggcctgcgacccgcgaggcgggctcggcgctgctagcattgcagcagacggcgctccaagaggaccaggagaatatcaacccggaaaaggcagcgcccgtccaacaaccgcggacccgggccgcgctggcggtactgaagtccgggaacccgcggggtctagcgcagcagcagaggccgaagacgagacgggttgcaccccttaaggatcttcctgtaaatgatgagcatgtcaccgttcctccttggaaagcaaacagtaaacagcctgcgttcaccattcatgtggatgaagcagaaaaagaagctcagaagaagccagctgaatctcaaaaaatagagcgtgaagatgccctggcttttaattcagccattagtttacctggacccagaaaaccattggtccctcttgattatccaatggatggtagttttgagtcaccacatactatggacatgtcaattgtattagaagatgaaaagccagtgagtgttaatgaagtaccagactaccatgaggatattcacacataccttagggaaatggaggttaaatgtaaacctaaagtgggttacatgaagaaacagccagacatcactaacagtatgagagctatcctcgtggactggttagttgaagtaggagaagaatataaactacagaatgagaccctgcatttggctgtgaactacattgataggttcctgtcttccatgtcagtgctgagaggaaaacttcagcttgtgggcactgctgctatgctgttagcctcaaagtttgaagaaatataccccccagaagtagcagagtttgtgtacattacagatgatacctacaccaagaaacaagttctgagaatggagcatctagttttgaaagtccttacttttgacttagctgctccaacagtaaatcagtttcttacccaatactttctgcatcagcagcctgcaaactgcaaagttgaaagtttagcaatgtttttgggagaattaagtttgatagatgctgacccatacctcaagtatttgccatcagttattgctggagctgcctttcatttagcactctacacagtcacgggacaaagctggcctgaatcattaatacgaaagactggatataccctggaaagtcttaagccttgtctcatggaccttcaccagacctacctcaaagcaccacagcatgcacaacagtcaataagagaaaagtacaaaaattcaaagtatcatggtgtttctctcctcaacccaccagagacactaaatctgtaacaatgaaagactgcctttgttttctaagatgtaaatcactcaaagtatatggtgtacagtttttaacttaggttttaattttacaatcatttctgaatacagaagttgtggccaagtacaaaaaaaaaacaaacaaaaagggcggccgc

SEQ ID NO: 287080 - DNA, 1304 bp, Homo sapiens
aagcagtggtatcaacgcagagtggccattacggccggggagaaaagtacaaaaattcaaagtatcatggtgtttctctcctcaacccaccagagacactaaatctgtaacaatgaaagactgcctttgttttctaagatgtaaatcactcaaagtatatggtgtacagtttttaacttaggttttaattttacaatcatttctgaatacagaagttgtggccaagtacaaattatggtatctattactttttaaatggttttaatttgtatatcttttgtatatgtatctgtcttagatatttggctaattttaagtggttttgttaaagtattaatgatgccagctgtcaggataataaattgatttggaaaactttgcaagtcaaatttaacttcttcaggattttgcttagtaaagaagtttacttggtttactatataatgggaagtgaaaagccttcctctaaaattaaagtaggtttaggaaaacagaccctcaaattctgacattcattttcctaagcaactggatcaatttgctgacttgggcataatctaatctaagcatatctgaatacagtattcagagatagatacagtagagattccccagactttttcgctctttgtaaaacctgtttgtttaggttttgcgaggtaaactcaacagaggttgggagtggaagagggtgggaagcttatatgcaaattaacagacgagaaatgctccagaaggtttattattttaaagcacattaaaaacaaaaaactatttttaaaatcctgctagattttataatggatttgtgaataaaaaatacccagggttctcagaatggaataaatatcccttttaatagttatatatacagatatacaactgttagctttaattggcagctctcttcttttttcttcttttcactggctttttacttggtgctttttcttgttttgcactggtggtctgtgttctgtgaataaagcaaagtaagaatttactaagagtatgttaagttttggattattgaaataagaggcatttcttagttttccagtaggatctaaaatgtgtcagctatgagtaagactggcatccaagaagtttatattatagatttaggtcctaatttttataaatcacaaggtaaaaaaatcacagaacagatggatctctaatgaaaaagggatgtctttttgtttatagtcatgtggcaagatgagagtaaaaccagagagcaaacctctataagtgttgagtatatgtatacatttgaaataaaccagaaatttgttacctta

SEQ ID NO: 287081 - DNA, 2830 bp, Homo sapiens
ggacgcgtgggtcgcccacgcgtcgcccacgcgtcgttcaatagtcgcgggatacttgaactgcaagaacagccgccgctccggcgggctgctcgctgcatctctgggcgtctttggctcgccacgctgggcagtgcctgcctgcgcctttcgcaacctcctcggccctgcgtggtctcgagctgggtgagcgagcgggcgggctggtaggctggcctgggctgcgaccggcggctacgactattctttggccgggtcggtgcgagtggtcggctgggcagagtgcacgctgcttggcgccgcaggctgatcccgccgtccactcccgggagcagtgatgttgggcaactctgcgccggggcctgcgacccgcgaggcgggctcggcgctgctagcattgcagcagacggcgctccaagaggaccaggagaatatcaacccggaaaaggcagcgcccgtccaacaaccgcggacccgggccgcgctggcggtactgaagtccgggaacccgcggggtctagcgcagcagcagaggccgaagacgagacgggttgcaccccttaaggatcttcctgtaaatgatgagcatgtcaccgttcctccttggaaagcaaacagtaaacagcctgcgttcaccattcatgtggatgaagcagaaaaagaagctcagaagaagccagctgaatctcaaaaaatagagcgtgaagatgccctggcttttaattcagccattagtttacctggacccagaaaaccattggtccctcttgattatccaatggatggtagttttgagtcaccacatactatggacatgtcaattgtattagaagatgaaaagccagtgagtgttaatgaagtaccagactaccatgaggatattcacacataccttagggaaatggaggttaaatgtaaacctaaagtgggttacatgaagaaacagccagacatcactaacagtatgagagctatcctcgtggactggttagttgaagtaggagaagaatataaactacagaatgagaccctgcatttggctgtgaactacattgataggttcctgtcttccatgtcagtgctgagaggaaaacttcagcttgtgggcactgctgctatgctgttagcctcaaagtttgaagaaatataccccccagaagtagcagagtttgtgtacattacagatgatacctacaccaagaaacaagttctgagaatggagcatctagttttgaaagtccttacttttgacttagctgctccaacagtaaatcagtttcttacccaatactttctgcatcagcagcctgcaaactgcaaagttgaaagtttagcaatgtttttgggagaattaagtttgatagatgctgacccatacctcaagtatttgccatcagttattgctggagctgcctttcatttagcactctacacagtcacgggacaaagctggcctgaatcattaatacgaaagactggatataccctggaaagtcttaagccttgtctcatggaccttcaccagacctacctcaaagcaccacagcatgcacaacagtcaataagagaaaagtacaaaaattcaaagtatcatggtgtttctctcctcaacccaccagagacactaaatctgtaacaatgaaagactgcctttgttttctaagatgtaaatcactcaaagtatatggtgtacagtttttaacttaggttttaattttacaatcatttctgaatacagaagttgtggccaagtacaaattatggtatctattactttttaaatggttttaatttgtatatcttttgtatatgtatctgtcttagatatttggctaattttaagtggttttgttaaagtattaatgatgccagctgtcaggataataaattgatttggaaaactttgcaagtcaaatttaacttcttcaggattttgcttagtaaagaagtttacttggtttactatataatgggaagtgaaaagccttcctctaaaattaaagtaggtttaggaaaacagaccctcaaattctgacattcattttcctaagcaactggatcaatttgctgacttgggcataatctaatctaagcatatctgaatacagtattcagagatagatacagtagagattccccagactttttcgctctttgtaaaacctgtttgtttaggttttgcgaggtaaactcaacagaggttgggagtggaagagggtgggaagcttatatgcaaattaacagacgagaaatgctccagaaggtttattattttaaagcacattaaaaacaaaaaactatttttaaaatcctgctagattttataatggatttgtgaataaaaaatacccagggttctcagaatggaataaatatcccttttaatagttatatatacagatatacaactgttagctttaattggcagctctcttcttttttcttcttttcactggctttttacttggtgctttttcttgttttgcactggtggtctgtgttctgtgaataaagcaaagtaagaatttactaagagtatgttaagttttggattattgaaataagaggcatttcttagttttccagtaggatctaaaatgtgtcagctatgagtaagactggcatccaagaagtttatattatagatttaggtcctaatttttataaatcacaaggtaaaaaaatcacagaacagatggatctctaatgaaaaagggatgtctttttgtttatagtcatgtggcaagatgagagtaaaaccagagagcaaacctctataagtgttgagtatatgtatacatttgaaataaaccagaaatttgttacctta

SEQ ID NO: 287082 - DNA, 2391 bp, Homo sapiens
cagtttgcaggctgctgatgcagaaagtattgggtaagaaactgatttactgttggagcagctaagtcaaaagtaaggactttcaaaactagatgctccattctcagaacttgtttcttggtgtaggtatcatctgtaatgtacacaaactctgctacttctggggggtatatttcttcaaactttgactagttctagatcgcgagcggccgctcgcgatctagaactcagaagaagccagctgaatctcaaaaaatagagcgtgaagatgccctggcttttaattcagccattagtttacctggacccagaaaaccattggtccctcttgattatccaatggatggtagttttgagtcaccacatactatggacatgtcaattgtattagaagatgaaaagccagtgagtgttaatgaagtaccagactaccatgaggatattcacacataccttagggaaatggaggttaaatgtaaacctaaagtgggttacatgaagaaacagccagacatcactaacagtatgagagctatcctcgtggactggttagttgaagtaggagaagaatataaactacagaatgagaccctgcatttggctgtgaactacattgataggttcctgtcttccatgtcagtgctgagaggaaaacttcagcttgtgggcactgctgctatgctgttagcctcaaagtttgaagaaatataccccccagaagtagcagagtttgtgtacattacagatgatacctacaccaagaaacaagttctgagaatggagcatctagttttgaaagtccttacttttgacttagctgctccaacagtaaatcagtttcttacccaatactttctgcatcagcagcctgcaaactgcaaagttgaaagtttagcaatgtttttgggagaattaagtttgatagatgctgacccatacctcaagtatttgccatcagttattgctggagctgcctttcatttagcactctacacagtcacgggacaaagctggcctgaatcattaatacgaaagactggatataccctggaaagtcttaagccttgtctcatggaccttcaccagacctacctcaaagcaccacagcatgcacaacagtcaataagagaaaagtacaaaaattcaaagtatcatggtgtttctctcctcaacccaccagagacactaaatctgtaacaatgaaagactgcctttgttttctaagatgtaaatcactcaaagtatatggtgtacagtttttaacttaggttttaattttacaatcatttctgaatacagaagttgtggccaagtacaaattatggtatctattactttttaaatggttttaatttgtatatcttttgtatatgtatctgtcttagatatttggctaattttaagtggttttgttaaagtattaatgatgccagctgtcaggataataaattgatttggaaaactttgcaagtcaaatttaacttcttcaggattttgcttagtaaagaagtttacttggtttactatataatgggaagtgaaaagccttcctctaaaattaaagtaggtttaggaaaacagaccctcaaattctgacattcattttcctaagcaactggatcaatttgctgacttgggcataatctaatctaagcatatctgaatacagtattcagagatagatacagtagagattccccagactttttcgctctttgtaaaacctgtttgtttaggttttgcgaggtaaactcaacagaggttgggagtggaagagggtgggaagcttatatgcaaattaacagacgagaaatgctccagaaggtttattattttaaagcacattaaaaacaaaaaactatttttaaaatcctgctagattttataatggatttgtgaataaaaaatacccagggttctcagaatggaataaatatcccttttaatagttatatatacagatatacaactgttagctttaattggcagctctcttcttttttcttcttttcactggctttttacttggtgctttttcttgttttgcactggtggtctgtgttctgtgaataaagcaaagtaagaatttactaagagtatgttaagttttggattattgaaataagaggcatttcttagttttccagtaggatctaaaatgtgtcagctatgagtaagactggcatccaagaagtttatattatagatttaggtcctaatttttataaatcacaaggtaaaaaaatcacagaacagatggatctctaatgaaaaagggatgtctttttgtttatagtcatgtggcaagatgagagtaaaaccagagagcaaacctctataagtgttgagtatatgtatacatttgaaataaaccagaaatttgttacctta

SEQ ID NO: 287083 - DNA, 855 bp, Homo sapiens
  misc_feature (831)..(831): n is a, c, g, or t
  misc_feature (848)..(848): n is a, c, g, or t
ggacgcgtgggtcgcccacgcgtcgcccacgcgtcgttcaatagtcgcgggatacttgaactgcaagaacagccgccgctccggcgggctgctcgctgcatctctgggcgtctttggctcgccacgctgggcagtgcctgcctgcgcctttcgcaacctcctcggccctgcgtggtctcgagctgggtgagcgagcgggcgggctggtaggctggcctgggctgcgaccggcggctacgactattctttggccgggtcggtgcgagtggtcggctgggcagagtgcacgctgcttggcgccgcaggctgatcccgccgtccactcccgggagcagtgatgttgggcaactctgcgccggggcctgcgacccgcgaggcgggctcggcgctgctagcattgcagcagacggcgctccaagaggaccaggagaatatcaacccggaaaaggcagcgcccgtccaacaaccgcggacccgggccgcgctggcggtactgaagtccgggaacccgcggggtctagcgcagcagcagaggccgaagacgagacgggttgcaccccttaaggatcttcctgtaaatgatgagcatgtcaccgttcctccttggaaagcaaacagtaaacagcctgcgttcaccattcatgtggatgaagcagaaaaagaagctcagaagaagccagctgaatctcaaaaaatagagcgtgaagatgccctggcttttaattcagccattagtttacctggacccagaaaaccattggtccctcttgattatccaatggatggtagttttgatcacacatatatggactgtcatgtatagagataaancatgatgtatgagtcanatctaga

SEQ ID NO: 287084 - DNA, 681 bp, Homo sapiens
ctatagtacccttcagctaagcacacggccgccggccctccctcctctcctcatccagcactagcccccagctgtctctttcctcccggtgcccacgatcgcaccgcccagaccaccctactctccctgccccggaagttacacactgccgacaccgggacgtaacttccgggaagggcttacttccaagacagacacggaagtgctgggaggcgccgggagcccgttcggttgcgggtgtctctggccctgcggtcagccctccagcctgggcaacagagcaaaactccaactcaaaaacaaaaacaaaaacaccttgaaaaacactgccttagtatacttaaactatcttttcatctatcagattgttaaggattttttttaaatttgacaacatccagtgtcaatgagggtgagggcaaaaaaaggactaccttggtgagaatgtaagttgtttaatcctttgggagggttaagctgtagatatctaaattttaaatatatatttatcctcttccatgttaagaaccctaagaaataactggacgagtgtggtatgatgtttgcatgtgatattcattacagtattattttaatagtagaaaattgttaaaaatctatatgtccattaataggaaattggttaaataaaatgaggcttccacaaactgaaaaaaaaaa

SEQ ID NO: 287085 - DNA, 739 bp, Homo sapiens
cctcatcttcttacgtctgaatcagctcctggaaccgagcacaaggcctgcacgcagtagatcctcaagaaatatttacggggctgggcacggtggctcacgcctgtaatcccagcactttgggaggctgaggcgggtggatcaagaggtcaggagatcgagaccatcctggctaagtcggtctctaataaaaatacaaaaaattagccaggcgtggtggcacgcgcctgtagtcccagctactcgggaggctgaggcaggaagaatcgcttgaacccgggaggcagaggttgcagtgagccgagaccgcgccactgcactccagcctgggcaacagagcaaaactccaactcaaaaacaaaaacaaaaacaccttgaaaaacactgccttagtatacttaaactatcttttcatctatcagattgttaaggattttttttaaatttgacaacatccagtgtcaatgagggtgagggcaaaaaaaggactaccttggtgagaatgtaagttgtttaatcctttgggagggttaagctgtagatatctaaattttaaatatatatttatcctcttccatgttaagaaccctaagaaataactggacgagtgtggtatgatgtttgcatgtgatattcattacagtattattttaatagtagaaaattgttaaaaatctatatgtccattaataggaaattggttaaataaaatgaggcttccacaaactgaaaaaaaaaa

SEQ ID NO: 287086 - DNA, 427 bp, Homo sapiens
tgaaaggacatgtatatgtctgaccaaaacagtctgcccagactcccgagcagcagtggaacttaaggaattgttttctccaggatccttggacctcccagagcttcagcctgcagcctttgtgtcttcttaccagcccatgtacctgacacatgaacccttggtagatactcacctgcagcacttgaagtctccatcacagggtagcccaattcagtcttcagattgaacaagaagggatcagatgccacatcgtttttgtcgtgattaatttaacttaaactaaaattttgggtatatgaaagaaggcagcaattcagaagtaaagaagatactaacgtatttcatcatggaaggtcctgtggtgatggttttccctgggaaaaccttcagctgctttatttttagtaataaatttctcttgtca

SEQ ID NO: 287087 - DNA, 4073 bp, Homo sapiens
ctatagtacccttcagctaagcacacggccgccggccctccctcctctcctcatccagcactagcccccagctgtctctttcctcccggtgcccacgatcgcaccgcccagaccaccctactctccctgccccggaagttacacactgccgacaccgggacgtaacttccgggaagggcttacttccaagacagacacggaagtgctgggaggcgccgggagcccgttcggttgcgggtgtctctggccctgcggtcagccctgggaacgtcccggagagctagattcctagaggcccgattccgctagcccggaacagacaaagccagcgctcccgcccgctccccgacttaggatccgatgccggcagcgtcctggggcccccgtagcggggctggaccatgagcctgctggacggcctcgcttcctcgccgcgggctccgctgcagtccagcaaggccaggatgaaaaagctcccgaagaagagccagaatgagaagtaccggctgaagtacctgcggctgcgcaaagcggccaaggccacggtgtttgaaaatgctgctatttgtgatgaaattgctcgtcttgaggaaaaatttcttaaagcaaaagaagaaagaaggtacttgctaaagaagctcctccagcttcaggctctaactgaaggggaagtacaggctgcagctccttcccacagttccagtttgcccctgacttatggtgtggccagctctgtgggaactatacagggagctgggcctatttcagggcccagcactggggctgaggaaccatttgggaagaaaactaagaaggagaaaaaagaaaaaggcaaagagaacaacaaactggaagccccaaagtggttctaaaggctaccacaggaaactggacttctaaattcttcagtgacctcaatcccaggttgggggaatgttttttatagatcatcaccgaccgacctggctttcatgatgagagtgccatctaccccgtgggctattgcagtactcgaatatatgccagcatgaagtgcccagaccagaagtgtctatatacctgtcagatcaaggatggtggtgtgcagcctcagtttgaaattgttcctgaagatgacccccagaatgccattgtcagctcttctgcagatgcttgtcatgcagaactgctcaggactataagcactactatggggaaactaatgcctaacctgcttccagctggagctgacttttttggattttctcatccagccatccacaacctgatccagagctgtccaggagctcgaaaatgcatcaattaccagtgggtgaaatttgatgtgtgcaaacctggagatgggcagctacctgaggggctgccggagaatgatgcagctatgagctttgaagcctttcagagacagatctttgatgaagatcagaatgatccccttctgccaggatccttggacctcccagagcttcagcctgcagcctttgtgtcttcttaccagcccatgtacctgacacatgaacccttggtagatactcacctgcagcacttgaagtctccatcacagggtagcccaattcagtcttcagattgaacaagaagggatcagatgccacatcgtttttgtcgtgattaatttaacttaaactaaaattttgggtatatgaaagaaggcagcaattcagaagtaaagaagatactaacgtatttcatcatggaaggtcctgtggtgatggttttccctgggaaaaccttcagctgctttatttttagtaataaatttctcttgtcaattctgtttactttcatcttgtaatcgggatgtaatcttttttgcttagctctgcctgaggtaaagtaaacttcagcctcttataaacaagagtgatagagagctgcaggctgctacaacaaataccatagacaggttggtttataaataacatgaatttatttctcacagttctggatgctgggaagtccaagttcaaggagcgcagattcaatgtctggtgagggcccacttcctagttcttagacagctgtcttcctgcagtgtcctcacgtggtagaagaggaaggcagctctccggggtcccttttataagatcactaagccggttcatgagaggtctgctctcatgacctaatcacctcccaaaggccccacctcccaataccatcacattaggggttaggatttaacatgaattttggggacatataaacattaagtctgtagtagcagcagctgactaacgagggagatagggagattctgacaaacttctactcttgattgtgatcctaattcaaggaatatcaagtcccagcccctgcaacccaggctgctgcttaattttcatgtcagtatcatcaaaatccaatgttctgcttaaactcaagatggaaagtccagtccaaggtacactgttcatctttttcttcacattttgcacatccttcaaggggatctttaacctctttaacctttgtattgcacctcagataatgtgctttttagctcagtacactgaaaccatatgataacacaaattcacatataattgggggttagtcccatactctataacagacttagtcctgtcttttcattagccatgtaataatataactccatgttccatgcaactggatttttggaccctgttaatagcattaaggtagaggtttactctatcacctaacacctcaacactacctgtgggatgccttagttacccagcagcaggttaccaagggctgtctggaaagggagggacaaaaggacccagaagtagaagaatggggatggagtggtgagaattgaatggttaatgcactgccattcataattgccaattgaggacaacacaaatgggattggtactttatagtaataaatctgaccagcagagggagggatcaggcagcagtgtttagagcacaccacactggccactgtaaactgagaagctaagttaactggtattttatgattttgagtatagtctttttataagttgtatacactttacaatgtaaaagaaacaaactttgtataatagcaaatcgggaaggggactgcttaaaatgttaatgcagtgtttttctttttttctctgcataaatggcttgagcatactggcatttacacagaaatgatatatgctgcttttatcatataacaaatattttcccactattacagcctgagtaatacccgtattaaaagagcctcattttagaaagacatttaaaatttttggaacataccacatgtagaaaggttgaactggtttttcagctataatgcatatacaactatagtgtgtacgtataccacatatacatatacttgtatgaagatatgtgtaaaatgtttttactatggatcatggatttaagaaacttgaaaagctgggcacggtggctcacgcctgtaatcccagcactttgggaggctgaggcgggtggatcaagaggtcaggagatcgagaccatcctggctaagtcggtctctaataaaaatacaaaaaattagccaggcgtggtggcacgcgcctgtagtcccagctactcgggaggctgaggcaggaagaatcgcttgaacccgggaggcagaggttgcagtgagccgagaccgcgccactgcactccagcctgggcaacagagcaaaactccaactcaaaaacaaaaacaaaaacaccttgaaaaacactgccttagtatacttaaactatcttttcatctatcagattgttaaggattttttttaaatttgacaacatccagtgtcaatgagggtgagggcaaaaaaaggactaccttggtgagaatgtaagttgtttaatcctttgggagggttaagctgtagatatctaaattttaaatatatatttatcctcttccatgttaagaaccctaagaaataactggacgagtgtggtatgatgtttgcatgtgatattcattacagtattattttaatagtagaaaattgttaaaaatctatatgtccattaataggaaattggttaaataaaatgaggcttccacaaactgaaaaaaaaaa

SEQ ID NO: 287088 - DNA, 4348 bp, Homo sapiens
ctatagtacccttcagctaagcacacggccgccggccctccctcctctcctcatccagcactagcccccagctgtctctttcctcccggtgcccacgatcgcaccgcccagaccaccctactctccctgccccggaagttacacactgccgacaccgggacgtaacttccgggaagggcttacttccaagacagacacggaagtgctgggaggcgccgggagcccgttcggttgcgggtgtctctggccctgcggtcagccctgggaacgtcccggagagctagattcctagaggcccgattccgctagcccggaacagacaaagccagcgctcccgcccgctccccgacttaggatccgatgccggcagcgtcctggggcccccgtagcggggctggaccatgagcctgctggacggcctcgcttcctcgccgcgggctccgctgcagtccagcaaggccaggatgaaaaagctcccgaagaagagccagaatgagaagtaccggctgaagtacctgcggctgcgcaaagcggccaaggccacggtgtttgaaaatgctgctatttgtgatgaaattgctcgtcttgaggaaaaatttcttaaagcaaaagaagaaagaaggtacttgctaaagaagctcctccagcttcaggctctaactgaaggggaagtacaggctgcagctccttcccacagttccagtttgcccctgacttatggtgtggccagctctgtgggaactatacagggagctgggcctatttcagggcccagcactggggctgaggaaccatttgggaagaaaactaagaaggagaaaaaagaaaaaggcaaagagaacaacaaactggaagttctgaagaaaacatgcaagaaaaagaaaatggcgggaggtgctcgcaagctggttcagcccattgccctggatccctcaggacggcctgtgttccccatcggactagggggtctaacagtatatagcctgggggaggtgagtgagaccagcgatatatagagaggagaatcagggaaatacgggaatggggttgagccttccctccctgttcccattagcagcagcctcttgctgatccataccaaccccagcgtatctccagtccctgcaaaaccccaaagtggttctaaaggctaccacaggaaactggacttctaaattcttcagtgacctcaatcccaggttgggggaatgttttttatagatcatcaccgaccgacctggctttcatgatgagagtgccatctaccccgtgggctattgcagtactcgaatatatgccagcatgaagtgcccagaccagaagtgtctatatacctgtcagatcaaggatggtggtgtgcagcctcagtttgaaattgttcctgaagatgacccccagaatgccattgtcagctcttctgcagatgcttgtcatgcagaactgctcaggactataagcactactatggggaaactaatgcctaacctgcttccagctggagctgacttttttggattttctcatccagccatccacaacctgatccagagctgtccaggagctcgaaaatgcatcaattaccagtgggtgaaatttgatgtgtgcaaacctggagatgggcagctacctgaggggctgccggagaatgatgcagctatgagctttgaagcctttcagagacagatctttgatgaagatcagaatgatccccttctgccaggatccttggacctcccagagcttcagcctgcagcctttgtgtcttcttaccagcccatgtacctgacacatgaacccttggtagatactcacctgcagcacttgaagtctccatcacagggtagcccaattcagtcttcagattgaacaagaagggatcagatgccacatcgtttttgtcgtgattaatttaacttaaactaaaattttgggtatatgaaagaaggcagcaattcagaagtaaagaagatactaacgtatttcatcatggaaggtcctgtggtgatggttttccctgggaaaaccttcagctgctttatttttagtaataaatttctcttgtcaattctgtttactttcatcttgtaatcgggatgtaatcttttttgcttagctctgcctgaggtaaagtaaacttcagcctcttataaacaagagtgatagagagctgcaggctgctacaacaaataccatagacaggttggtttataaataacatgaatttatttctcacagttctggatgctgggaagtccaagttcaaggagcgcagattcaatgtctggtgagggcccacttcctagttcttagacagctgtcttcctgcagtgtcctcacgtggtagaagaggaaggcagctctccggggtcccttttataagatcactaagccggttcatgagaggtctgctctcatgacctaatcacctcccaaaggccccacctcccaataccatcacattaggggttaggatttaacatgaattttggggacatataaacattaagtctgtagtagcagcagctgactaacgagggagatagggagattctgacaaacttctactcttgattgtgatcctaattcaaggaatatcaagtcccagcccctgcaacccaggctgctgcttaattttcatgtcagtatcatcaaaatccaatgttctgcttaaactcaagatggaaagtccagtccaaggtacactgttcatctttttcttcacattttgcacatccttcaaggggatctttaacctctttaacctttgtattgcacctcagataatgtgctttttagctcagtacactgaaaccatatgataacacaaattcacatataattgggggttagtcccatactctataacagacttagtcctgtcttttcattagccatgtaataatataactccatgttccatgcaactggatttttggaccctgttaatagcattaaggtagaggtttactctatcacctaacacctcaacactacctgtgggatgccttagttacccagcagcaggttaccaagggctgtctggaaagggagggacaaaaggacccagaagtagaagaatggggatggagtggtgagaattgaatggttaatgcactgccattcataattgccaattgaggacaacacaaatgggattggtactttatagtaataaatctgaccagcagagggagggatcaggcagcagtgtttagagcacaccacactggccactgtaaactgagaagctaagttaactggtattttatgattttgagtatagtctttttataagttgtatacactttacaatgtaaaagaaacaaactttgtataatagcaaatcgggaaggggactgcttaaaatgttaatgcagtgtttttctttttttctctgcataaatggcttgagcatactggcatttacacagaaatgatatatgctgcttttatcatataacaaatattttcccactattacagcctgagtaatacccgtattaaaagagcctcattttagaaagacatttaaaatttttggaacataccacatgtagaaaggttgaactggtttttcagctataatgcatatacaactatagtgtgtacgtataccacatatacatatacttgtatgaagatatgtgtaaaatgtttttactatggatcatggatttaagaaacttgaaaagctgggcacggtggctcacgcctgtaatcccagcactttgggaggctgaggcgggtggatcaagaggtcaggagatcgagaccatcctggctaagtcggtctctaataaaaatacaaaaaattagccaggcgtggtggcacgcgcctgtagtcccagctactcgggaggctgaggcaggaagaatcgcttgaacccgggaggcagaggttgcagtgagccgagaccgcgccactgcactccagcctgggcaacagagcaaaactccaactcaaaaacaaaaacaaaaacaccttgaaaaacactgccttagtatacttaaactatcttttcatctatcagattgttaaggattttttttaaatttgacaacatccagtgtcaatgagggtgagggcaaaaaaaggactaccttggtgagaatgtaagttgtttaatcctttgggagggttaagctgtagatatctaaattttaaatatatatttatcctcttccatgttaagaaccctaagaaataactggacgagtgtggtatgatgtttgcatgtgatattcattacagtattattttaatagtagaaaattgttaaaaatctatatgtccattaataggaaattggttaaataaaatgaggcttccacaaactgaaaaaaaaaa

SEQ ID NO: 287089 - DNA, 4745 bp, Homo sapiens
ctatagtacccttcagctaagcacacggccgccggccctccctcctctcctcatccagcactagcccccagctgtctctttcctcccggtgcccacgatcgcaccgcccagaccaccctactctccctgccccggaagttacacactgccgacaccgggacgtaacttccgggaagggcttacttccaagacagacacggaagtgctgggaggcgccgggagcccgttcggttgcgggtgtctctggccctgcggtcagccctgggaacgtcccggagagctagattcctagaggcccgattccgctagcccggaacagacaaagccagcgctcccgcccgctccccgacttaggatccgatgccggcagcgtcctggggcccccgtagcggggctggaccatgagcctgctggacggcctcgcttcctcgccgcgggctccgctgcagtccagcaaggccaggatgaaaaagctcccgaagaagagccagaatgagaagtaccggctgaagtacctgcggctgcgcaaagcggccaaggccacggtgtttgaaaatgctgctatttgtgatgaaattgctcgtcttgaggaaaaatttcttaaagcaaaagaagaaagaaggtgagctggcttcattttgtgttcagcatcacctttttggtgattgatttggtgattgataatggtgttactgctctgggagactttttttcccagtgggattgatgcgtatcgcacagccccttggccacttgatcaagcacagagaaacttacagcctgaggcattggtgcctgcacacccaagttatgttgggccatggcgatgagacagctcctctactcatctttctgaaaaagccatcttgccacatctaataaataatcttactaagattatttaatcttatggcccaattataaaagccaagtgataaaagcaactgcctctcgttctacaaatatttattctgtacgtactattctgtgcaaagcacaatgggtatatatacatgtgtaaataatgtgcctttcagaagcctaacaccgtccaacatcaaggtagaggaaccgtccagatgcaagagataagctacagttcttatccttggcctcttgaagtattgattatcctccagggctttatgattcatagggcctaataagaacctttcttttatgagtatagtaatctttgtatataattctggcttttcccagtacttgagtaaaatactgaattgagacaatacggaagttcatttctctgctcctttccttcctgatctcaggtgtacttgctaaagaagctcctccagcttcaggctctaactgaaggggaagtacaggctgcagctccttcccacagttccagtttgcccctgacttatggtgtggccagctctgtgggaactatacagggagctgggcctatttcagggcccagcactggggctgaggaaccatttgggaagaaaactaagaaggagaaaaaagaaaaaggcaaagagaacaacaaactggaagccccaaagtggttctaaaggctaccacaggaaactggacttctaaattcttcagtgacctcaatcccaggttgggggaatgttttttatagatcatcaccgaccgacctggctttcatgatgagagtgccatctaccccgtgggctattgcagtactcgaatatatgccagcatgaagtgcccagaccagaagtgtctatatacctgtcagatcaaggatggtggtgtgcagcctcagtttgaaattgttcctgaagatgacccccagaatgccattgtcagctcttctgcagatgcttgtcatgcagaactgctcaggactataagcactactatggggaaactaatgcctaacctgcttccagctggagctgacttttttggattttctcatccagccatccacaacctgatccagagctgtccaggagctcgaaaatgcatcaattaccagtgggtgaaatttgatgtgtgcaaacctggagatgggcagctacctgaggggctgccggagaatgatgcagctatgagctttgaagcctttcagagacagatctttgatgaagatcagaatgatccccttctgccaggatccttggacctcccagagcttcagcctgcagcctttgtgtcttcttaccagcccatgtacctgacacatgaacccttggtagatactcacctgcagcacttgaagtctccatcacagggtagcccaattcagtcttcagattgaacaagaagggatcagatgccacatcgtttttgtcgtgattaatttaacttaaactaaaattttgggtatatgaaagaaggcagcaattcagaagtaaagaagatactaacgtatttcatcatggaaggtcctgtggtgatggttttccctgggaaaaccttcagctgctttatttttagtaataaatttctcttgtcaattctgtttactttcatcttgtaatcgggatgtaatcttttttgcttagctctgcctgaggtaaagtaaacttcagcctcttataaacaagagtgatagagagctgcaggctgctacaacaaataccatagacaggttggtttataaataacatgaatttatttctcacagttctggatgctgggaagtccaagttcaaggagcgcagattcaatgtctggtgagggcccacttcctagttcttagacagctgtcttcctgcagtgtcctcacgtggtagaagaggaaggcagctctccggggtcccttttataagatcactaagccggttcatgagaggtctgctctcatgacctaatcacctcccaaaggccccacctcccaataccatcacattaggggttaggatttaacatgaattttggggacatataaacattaagtctgtagtagcagcagctgactaacgagggagatagggagattctgacaaacttctactcttgattgtgatcctaattcaaggaatatcaagtcccagcccctgcaacccaggctgctgcttaattttcatgtcagtatcatcaaaatccaatgttctgcttaaactcaagatggaaagtccagtccaaggtacactgttcatctttttcttcacattttgcacatccttcaaggggatctttaacctctttaacctttgtattgcacctcagataatgtgctttttagctcagtacactgaaaccatatgataacacaaattcacatataattgggggttagtcccatactctataacagacttagtcctgtcttttcattagccatgtaataatataactccatgttccatgcaactggatttttggaccctgttaatagcattaaggtagaggtttactctatcacctaacacctcaacactacctgtgggatgccttagttacccagcagcaggttaccaagggctgtctggaaagggagggacaaaaggacccagaagtagaagaatggggatggagtggtgagaattgaatggttaatgcactgccattcataattgccaattgaggacaacacaaatgggattggtactttatagtaataaatctgaccagcagagggagggatcaggcagcagtgtttagagcacaccacactggccactgtaaactgagaagctaagttaactggtattttatgattttgagtatagtctttttataagttgtatacactttacaatgtaaaagaaacaaactttgtataatagcaaatcgggaaggggactgcttaaaatgttaatgcagtgtttttctttttttctctgcataaatggcttgagcatactggcatttacacagaaatgatatatgctgcttttatcatataacaaatattttcccactattacagcctgagtaatacccgtattaaaagagcctcattttagaaagacatttaaaatttttggaacataccacatgtagaaaggttgaactggtttttcagctataatgcatatacaactatagtgtgtacgtataccacatatacatatacttgtatgaagatatgtgtaaaatgtttttactatggatcatggatttaagaaacttgaaaagctgggcacggtggctcacgcctgtaatcccagcactttgggaggctgaggcgggtggatcaagaggtcaggagatcgagaccatcctggctaagtcggtctctaataaaaatacaaaaaattagccaggcgtggtggcacgcgcctgtagtcccagctactcgggaggctgaggcaggaagaatcgcttgaacccgggaggcagaggttgcagtgagccgagaccgcgccactgcactccagcctgggcaacagagcaaaactccaactcaaaaacaaaaacaaaaacaccttgaaaaacactgccttagtatacttaaactatcttttcatctatcagattgttaaggattttttttaaatttgacaacatccagtgtcaatgagggtgagggcaaaaaaaggactaccttggtgagaatgtaagttgtttaatcctttgggagggttaagctgtagatatctaaattttaaatatatatttatcctcttccatgttaagaaccctaagaaataactggacgagtgtggtatgatgtttgcatgtgatattcattacagtattattttaatagtagaaaattgttaaaaatctatatgtccattaataggaaattggttaaataaaatgaggcttccacaaactgaaaaaaaaaa

SEQ ID NO: 287090 - DNA, 4366 bp, Homo sapiens
aacctgactacctttatctatggatttatttatagtttgtcacacggtcgaatagctccttcttctcagtaatacaagcttttttggtttgaaatatggatcctcttcccagcataataatgtgattttttttattcattttatgttattatattcacatttttacttaaaggaaaatgctgctatttgtgatgaaattgctcgtcttgaggaaaaatttcttaaagcaaaagaagaaagaaggtgagctggcttcattttgtgttcagcatcacctttttggtgattgatttggtgattgataatggtgttactgctctgggagactttttttcccagtgggattgatgcgtatcgcacagccccttggccacttgatcaagcacagagaaacttacagcctgaggcattggtgcctgcacacccaagttatgttgggccatggcgatgagacagctcctctactcatctttctgaaaaagccatcttgccacatctaataaataatcttactaagattatttaatcttatggcccaattataaaagccaagtgataaaagcaactgcctctcgttctacaaatatttattctgtacgtactattctgtgcaaagcacaatgggtatatatacatgtgtaaataatgtgcctttcagaagcctaacaccgtccaacatcaaggtagaggaaccgtccagatgcaagagataagctacagttcttatccttggcctcttgaagtattgattatcctccagggctttatgattcatagggcctaataagaacctttcttttatgagtatagtaatctttgtatataattctggcttttcccagtacttgagtaaaatactgaattgagacaatacggaagttcatttctctgctcctttccttcctgatctcaggtgtacttgctaaagaagctcctccagcttcaggctctaactgaaggggaagtacaggctgcagctccttcccacagttccagtttgcccctgacttatggtgtggccagctctgtgggaactatacagggagctgggcctatttcagggcccagcactggggctgaggaaccatttgggaagaaaactaagaaggagaaaaaagaaaaaggcaaagagaacaacaaactggaagccccaaagtggttctaaaggctaccacaggaaactggacttctaaattcttcagtgacctcaatcccaggttgggggaatgttttttatagatcatcaccgaccgacctggctttcatgatgagagtgccatctaccccgtgggctattgcagtactcgaatatatgccagcatgaagtgcccagaccagaagtgtctatatacctgtcagatcaaggatggtggtgtgcagcctcagtttgaaattgttcctgaagatgacccccagaatgccattgtcagctcttctgcagatgcttgtcatgcagaactgctcaggactataagcactactatggggaaactaatgcctaacctgcttccagctggagctgacttttttggattttctcatccagccatccacaacctgatccagagctgtccaggagctcgaaaatgcatcaattaccagtgggtgaaatttgatgtgtgcaaacctggagatgggcagctacctgaggggctgccggagaatgatgcagctatgagctttgaagcctttcagagacagatctttgatgaagatcagaatgatccccttctgccaggatccttggacctcccagagcttcagcctgcagcctttgtgtcttcttaccagcccatgtacctgacacatgaacccttggtagatactcacctgcagcacttgaagtctccatcacagggtagcccaattcagtcttcagattgaacaagaagggatcagatgccacatcgtttttgtcgtgattaatttaacttaaactaaaattttgggtatatgaaagaaggcagcaattcagaagtaaagaagatactaacgtatttcatcatggaaggtcctgtggtgatggttttccctgggaaaaccttcagctgctttatttttagtaataaatttctcttgtcaattctgtttactttcatcttgtaatcgggatgtaatcttttttgcttagctctgcctgaggtaaagtaaacttcagcctcttataaacaagagtgatagagagctgcaggctgctacaacaaataccatagacaggttggtttataaataacatgaatttatttctcacagttctggatgctgggaagtccaagttcaaggagcgcagattcaatgtctggtgagggcccacttcctagttcttagacagctgtcttcctgcagtgtcctcacgtggtagaagaggaaggcagctctccggggtcccttttataagatcactaagccggttcatgagaggtctgctctcatgacctaatcacctcccaaaggccccacctcccaataccatcacattaggggttaggatttaacatgaattttggggacatataaacattaagtctgtagtagcagcagctgactaacgagggagatagggagattctgacaaacttctactcttgattgtgatcctaattcaaggaatatcaagtcccagcccctgcaacccaggctgctgcttaattttcatgtcagtatcatcaaaatccaatgttctgcttaaactcaagatggaaagtccagtccaaggtacactgttcatctttttcttcacattttgcacatccttcaaggggatctttaacctctttaacctttgtattgcacctcagataatgtgctttttagctcagtacactgaaaccatatgataacacaaattcacatataattgggggttagtcccatactctataacagacttagtcctgtcttttcattagccatgtaataatataactccatgttccatgcaactggatttttggaccctgttaatagcattaaggtagaggtttactctatcacctaacacctcaacactacctgtgggatgccttagttacccagcagcaggttaccaagggctgtctggaaagggagggacaaaaggacccagaagtagaagaatggggatggagtggtgagaattgaatggttaatgcactgccattcataattgccaattgaggacaacacaaatgggattggtactttatagtaataaatctgaccagcagagggagggatcaggcagcagtgtttagagcacaccacactggccactgtaaactgagaagctaagttaactggtattttatgattttgagtatagtctttttataagttgtatacactttacaatgtaaaagaaacaaactttgtataatagcaaatcgggaaggggactgcttaaaatgttaatgcagtgtttttctttttttctctgcataaatggcttgagcatactggcatttacacagaaatgatatatgctgcttttatcatataacaaatattttcccactattacagcctgagtaatacccgtattaaaagagcctcattttagaaagacatttaaaatttttggaacataccacatgtagaaaggttgaactggtttttcagctataatgcatatacaactatagtgtgtacgtataccacatatacatatacttgtatgaagatatgtgtaaaatgtttttactatggatcatggatttaagaaacttgaaaagctgggcacggtggctcacgcctgtaatcccagcactttgggaggctgaggcgggtggatcaagaggtcaggagatcgagaccatcctggctaagtcggtctctaataaaaatacaaaaaattagccaggcgtggtggcacgcgcctgtagtcccagctactcgggaggctgaggcaggaagaatcgcttgaacccgggaggcagaggttgcagtgagccgagaccgcgccactgcactccagcctgggcaacagagcaaaactccaactcaaaaacaaaaacaaaaacaccttgaaaaacactgccttagtatacttaaactatcttttcatctatcagattgttaaggattttttttaaatttgacaacatccagtgtcaatgagggtgagggcaaaaaaaggactaccttggtgagaatgtaagttgtttaatcctttgggagggttaagctgtagatatctaaattttaaatatatatttatcctcttccatgttaagaaccctaagaaataactggacgagtgtggtatgatgtttgcatgtgatattcattacagtattattttaatagtagaaaattgttaaaaatctatatgtccattaataggaaattggttaaataaaatgaggcttccacaaactgaaaaaaaaaa

SEQ ID NO: 287091 - DNA, 1694 bp, Homo sapiens
ctatagtacccttcagctaagcacacggccgccggccctccctcctctcctcatccagcactagcccccagctgtctctttcctcccggtgcccacgatcgcaccgcccagaccaccctactctccctgccccggaagttacacactgccgacaccgggacgtaacttccgggaagggcttacttccaagacagacacggaagtgctgggaggcgccgggagcccgttcggttgcgggtgtctctggccctgcggtcagccctgggaacgtcccggagagctagattcctagaggcccgattccgctagcccggaacagacaaagccagcgctcccgcccgctccccgacttaggatccgatgccggcagcgtcctggggcccccgtagcggggctggaccatgagcctgctggacggcctcgcttcctcgccgcgggctccgctgcagtccagcaaggccaggatgaaaaagctcccgaagaagagccagaatgagaagtaccggctgaagtacctgcggctgcgcaaagcggccaaggccacggtgtttgtgagtctgacccacgttcagccggtcccctcctggagactccctcacaaaatctttccccaagctgttcccccttcccagtgtgacagtattaatacagtgttggcttttccgtatacgttactacttgttagccttgtgtccttggacaaattacgtaatttctctgtgtcctcatctgtaaatgagctagtaactgtcttgcagaataatgaatattaaatgagtaaagaaaagtgcttggtgcgtaaaagacataccaataaattttagtcatcgttgttactgcaggactctaggaaatgtgtttgattctcgagatacagccctgagaattaggcattatttgtaaaatgagaacactgaagcccagagagatgatttgcccaagggtactgtgtcagagccctgactccaacttagataaacctgattccgttttatgacttccagtacacagactattttctgagcacctcaaatccccataactgaccctttgcccaaagaggtacatgaaactgtcagtaatttcccccctctaacctttgagtgttccaagtgtttcttcctttcttttattgtagaagcactggatttattgagtgaataaacttaatatagcttgccagccataactttatattagaatagtttggcttgcctcagtgcttggaaataggggtggagtcctcaaatgtccccccacatccaagtcaacagttcatctcttctctctaccaaaagcttgaacgtctctcagcatttttggaagcataaggaaaggttcagaaattagaatacacattccaaaagcacttattcagcacttgctatgtgtattgcttgctatttgcactggagagaaacaagaaaagtaaaactaagagaacttagcatctgattgactgttccctttcttttatcccctatacgtcaaaggtacctaaagcttggaatttatgttatttcaaggatattggttccatcaaatacataatgaagattttgtgaagaaaaagcgatgttgttttgaacattgagagtttgaagttccacctatgggggcattcagattcagcattcccttcaggattggtgcttgggagatagattgagtcatcatttacaaaaaaaaaaaaa

SEQ ID NO: 287092 - DNA, 4015 bp, Homo sapiens
tgacagttagacctggtactaactgacagacacacacagctgcagatgtacttagagtctcatctggttcttaaggagccctaggagcccttgagaaaacaaatgtcaaatgtattagagccactttgggtggagaaattcgagctagacttcgttaaatgcaaggggagcagactgagacttcccccttcccccaactctctgggttgcattccatttagtctttcctagaggcagggaaatgggctaggtggcctttggagcacactgctggcttggtaaatttctgatcttacagatgaaataagaggccttaaaaagtataaggcctttggctcctaagcactaatctgggcaggttagaaagctactcagggctttgggcgaaagccccatatgcccattcagtaagtatataaaaccaggattggcttattgccctcaccattcacgtgcaaatttatcccttcccttcaacattggaaggggcctaaagtgggtgaccccagatttgcgtttcagttctgaagaaaacatgcaagaaaaagaaaatggcgggaggtgctcgcaagctggttcagcccattgccctggatccctcaggacggcctgtgttccccatcggactagggggtctaacagtatatagcctgggggaggtgagtgagaccagcgatatatagagaggagaatcagggaaatacgggaatggggttgagccttccctccctgttcccattagcagcagcctcttgctgatccataccaaccccagcgtatctccagtccctgcaaaaccccaaagtggttctaaaggctaccacaggaaactggacttctaaattcttcagtgacctcaatcccaggttgggggaatgttttttatagatcatcaccgaccgacctggctttcatgatgagagtgccatctaccccgtgggctattgcagtactcgaatatatgccagcatgaagtgcccagaccagaagtgtctatatacctgtcagatcaaggatggtggtgtgcagcctcagtttgaaattgttcctgaagatgacccccagaatgccattgtcagctcttctgcagatgcttgtcatgcagaactgctcaggactataagcactactatggggaaactaatgcctaacctgcttccagctggagctgacttttttggattttctcatccagccatccacaacctgatccagagctgtccaggagctcgaaaatgcatcaattaccagtgggtgaaatttgatgtgtgcaaacctggagatgggcagctacctgaggggctgccggagaatgatgcagctatgagctttgaagcctttcagagacagatctttgatgaagatcagaatgatccccttctgccaggatccttggacctcccagagcttcagcctgcagcctttgtgtcttcttaccagcccatgtacctgacacatgaacccttggtagatactcacctgcagcacttgaagtctccatcacagggtagcccaattcagtcttcagattgaacaagaagggatcagatgccacatcgtttttgtcgtgattaatttaacttaaactaaaattttgggtatatgaaagaaggcagcaattcagaagtaaagaagatactaacgtatttcatcatggaaggtcctgtggtgatggttttccctgggaaaaccttcagctgctttatttttagtaataaatttctcttgtcaattctgtttactttcatcttgtaatcgggatgtaatcttttttgcttagctctgcctgaggtaaagtaaacttcagcctcttataaacaagagtgatagagagctgcaggctgctacaacaaataccatagacaggttggtttataaataacatgaatttatttctcacagttctggatgctgggaagtccaagttcaaggagcgcagattcaatgtctggtgagggcccacttcctagttcttagacagctgtcttcctgcagtgtcctcacgtggtagaagaggaaggcagctctccggggtcccttttataagatcactaagccggttcatgagaggtctgctctcatgacctaatcacctcccaaaggccccacctcccaataccatcacattaggggttaggatttaacatgaattttggggacatataaacattaagtctgtagtagcagcagctgactaacgagggagatagggagattctgacaaacttctactcttgattgtgatcctaattcaaggaatatcaagtcccagcccctgcaacccaggctgctgcttaattttcatgtcagtatcatcaaaatccaatgttctgcttaaactcaagatggaaagtccagtccaaggtacactgttcatctttttcttcacattttgcacatccttcaaggggatctttaacctctttaacctttgtattgcacctcagataatgtgctttttagctcagtacactgaaaccatatgataacacaaattcacatataattgggggttagtcccatactctataacagacttagtcctgtcttttcattagccatgtaataatataactccatgttccatgcaactggatttttggaccctgttaatagcattaaggtagaggtttactctatcacctaacacctcaacactacctgtgggatgccttagttacccagcagcaggttaccaagggctgtctggaaagggagggacaaaaggacccagaagtagaagaatggggatggagtggtgagaattgaatggttaatgcactgccattcataattgccaattgaggacaacacaaatgggattggtactttatagtaataaatctgaccagcagagggagggatcaggcagcagtgtttagagcacaccacactggccactgtaaactgagaagctaagttaactggtattttatgattttgagtatagtctttttataagttgtatacactttacaatgtaaaagaaacaaactttgtataatagcaaatcgggaaggggactgcttaaaatgttaatgcagtgtttttctttttttctctgcataaatggcttgagcatactggcatttacacagaaatgatatatgctgcttttatcatataacaaatattttcccactattacagcctgagtaatacccgtattaaaagagcctcattttagaaagacatttaaaatttttggaacataccacatgtagaaaggttgaactggtttttcagctataatgcatatacaactatagtgtgtacgtataccacatatacatatacttgtatgaagatatgtgtaaaatgtttttactatggatcatggatttaagaaacttgaaaagctgggcacggtggctcacgcctgtaatcccagcactttgggaggctgaggcgggtggatcaagaggtcaggagatcgagaccatcctggctaagtcggtctctaataaaaatacaaaaaattagccaggcgtggtggcacgcgcctgtagtcccagctactcgggaggctgaggcaggaagaatcgcttgaacccgggaggcagaggttgcagtgagccgagaccgcgccactgcactccagcctgggcaacagagcaaaactccaactcaaaaacaaaaacaaaaacaccttgaaaaacactgccttagtatacttaaactatcttttcatctatcagattgttaaggattttttttaaatttgacaacatccagtgtcaatgagggtgagggcaaaaaaaggactaccttggtgagaatgtaagttgtttaatcctttgggagggttaagctgtagatatctaaattttaaatatatatttatcctcttccatgttaagaaccctaagaaataactggacgagtgtggtatgatgtttgcatgtgatattcattacagtattattttaatagtagaaaattgttaaaaatctatatgtccattaataggaaattggttaaataaaatgaggcttccacaaactgaaaaaaaaaa

SEQ ID NO: 287093 - DNA, 1789 bp, Homo sapiens
ctatagtacccttcagctaagcacacggccgccggccctccctcctctcctcatccagcactagcccccagctgtctctttcctcccggtgcccacgatcgcaccgcccagaccaccctactctccctgccccggaagttacacactgccgacaccgggacgtaacttccgggaagggcttacttccaagacagacacggaagtgctgggaggcgccgggagcccgttcggttgcgggtgtctctggccctgcggtcagccctgggaacgtcccggagagctagattcctagaggcccgattccgctagcccggaacagacaaagccagcgctcccgcccgctccccgacttaggatccgatgccggcagcgtcctggggcccccgtagcggggctggaccatgagcctgctggacggcctcgcttcctcgccgcgggctccgctgcagtccagcaaggccaggatgaaaaagctcccgaagaagagccagaatgagaagtaccggctgaagtacctgcggctgcgcaaagcggccaaggccacggtgtttgaaaatgctgctatttgtgatgaaattgctcgtcttgaggaaaaatttcttaaagcaaaagaagaaagaaggtacttgctaaagaagctcctccagcttcaggctctaactgaaggggaagtacaggctgcagctccttcccacagttccagtttgcccctgacttatggtgtggccagctctgtgggaactatacagggagctgggcctatttcagggcccagcactggggctgaggaaccatttgggaagaaaactaagaaggagaaaaaagaaaaaggcaaagagaacaacaaactggaagccccaaagtggttctaaaggctaccacaggaaactggacttctaaattcttcagtgacctcaatcccaggttgggggaatgttttttatagatcatcaccgaccgacctggctttcatgatgagagtgccatctaccccgtgggctattgcagtactcgaatatatgccagcatgaagtgcccagaccagaagtgtctatatacctgtcagatcaaggatggtggtgtgcagcctcagtttgaaattgttcctgaagatgacccccagaatgccattgtcagctcttctgcagatgcttgtcatgcagaactgctcaggactataagcactactatggggaaactaatgcctaacctgcttccagctggagctgacttttttggattttctcatccagccatccacaacctgatccagagctgtccaggagctcgaaaatgcatcaattaccagtgggtgaaatttgatgtgtgcaaacctggagatgggcagctacctgaggggctgccggagaatgatgcagctatgagctttgaagcctttcagagacagatctttgatgaagatcagaatgatccccttctgccaggatccttggacctcccagagcttcagcctgcagcctttgtgtcttcttaccagcccatgtacctgacacatgaacccttggtagatactcacctgcagcacttgaagtctccatcacagggtagcccaattcagtcttcagattgaacaagaagggatcagatgccacatcgtttttgtcgtgattaatttaacttaaactaaaattttgggtatatgaaagaaggcagcaattcagaagtaaagaagatactaacgtatttcatcatggaaggtcctgtggtgatggttttccctgggaaaaccttcagctgctttatttttagtaataaatttctcttgtca

SEQ ID NO: 287094 - DNA, 3729 bp, Homo sapiens
tagtgctcgatatcattctaaaaaattatacagaaaataaattaatcctgttcaggataatttgactgaagtaaacattgaagaactagaaactgtttaaatgaactttaaaactagtcaaataatttaattggctagatagaacttgttacagaaatattttcctggcaaaaaaatcattgcgctttatagaaaactggccaaataattaaatcagctagttaacttgttacatttgttacaaaaatattttcttggcaaaaattcctcagaattagtgtaatttcgatgcaacagtttctttttattaacataaccaagatattttaacgttcaaaatgaaagtaaatacaatgaaatggcagtttgcagtcagcctgtttctcctagatcttgtaaaattgacttaaaagattacatggagagtgatctcatttgtttttaaaataccatttgtatttgtacttaaggatataaataagtggattggaaaggtacacaacaaattaaacgctcacttttggaaagctgtcaaccaagaagggtagaactgaaacagtcaaaggactttctctaggtacttggatttgtttcaatttttagcagccctataggaaagtatgtgtgtcccttctgaagatggtatacgtcagcttcacgttccagagtaaagaaatatttacagagtagtatgcccctctctccttccttcttgaggattgatctcattgctcgtttgtctttctcagtttgaaattgttcctgaagatgacccccagaatgccattgtcagctcttctgcagatgcttgtcatgcagaactgctcaggactataagcactactatggggaaactaatgcctaacctgcttccagctggagctgacttttttggattttctcatccagccatccacaacctgatccagagctgtccaggagctcgaaaatgcatcaattaccagtgggtgaaatttgatgtgtgcaaacctggagatgggcagctacctgaggggctgccggagaatgatgcagctatgagctttgaagcctttcagagacagatctttgatgaagatcagaatgatccccttctgccaggatccttggacctcccagagcttcagcctgcagcctttgtgtcttcttaccagcccatgtacctgacacatgaacccttggtagatactcacctgcagcacttgaagtctccatcacagggtagcccaattcagtcttcagattgaacaagaagggatcagatgccacatcgtttttgtcgtgattaatttaacttaaactaaaattttgggtatatgaaagaaggcagcaattcagaagtaaagaagatactaacgtatttcatcatggaaggtcctgtggtgatggttttccctgggaaaaccttcagctgctttatttttagtaataaatttctcttgtcaattctgtttactttcatcttgtaatcgggatgtaatcttttttgcttagctctgcctgaggtaaagtaaacttcagcctcttataaacaagagtgatagagagctgcaggctgctacaacaaataccatagacaggttggtttataaataacatgaatttatttctcacagttctggatgctgggaagtccaagttcaaggagcgcagattcaatgtctggtgagggcccacttcctagttcttagacagctgtcttcctgcagtgtcctcacgtggtagaagaggaaggcagctctccggggtcccttttataagatcactaagccggttcatgagaggtctgctctcatgacctaatcacctcccaaaggccccacctcccaataccatcacattaggggttaggatttaacatgaattttggggacatataaacattaagtctgtagtagcagcagctgactaacgagggagatagggagattctgacaaacttctactcttgattgtgatcctaattcaaggaatatcaagtcccagcccctgcaacccaggctgctgcttaattttcatgtcagtatcatcaaaatccaatgttctgcttaaactcaagatggaaagtccagtccaaggtacactgttcatctttttcttcacattttgcacatccttcaaggggatctttaacctctttaacctttgtattgcacctcagataatgtgctttttagctcagtacactgaaaccatatgataacacaaattcacatataattgggggttagtcccatactctataacagacttagtcctgtcttttcattagccatgtaataatataactccatgttccatgcaactggatttttggaccctgttaatagcattaaggtagaggtttactctatcacctaacacctcaacactacctgtgggatgccttagttacccagcagcaggttaccaagggctgtctggaaagggagggacaaaaggacccagaagtagaagaatggggatggagtggtgagaattgaatggttaatgcactgccattcataattgccaattgaggacaacacaaatgggattggtactttatagtaataaatctgaccagcagagggagggatcaggcagcagtgtttagagcacaccacactggccactgtaaactgagaagctaagttaactggtattttatgattttgagtatagtctttttataagttgtatacactttacaatgtaaaagaaacaaactttgtataatagcaaatcgggaaggggactgcttaaaatgttaatgcagtgtttttctttttttctctgcataaatggcttgagcatactggcatttacacagaaatgatatatgctgcttttatcatataacaaatattttcccactattacagcctgagtaatacccgtattaaaagagcctcattttagaaagacatttaaaatttttggaacataccacatgtagaaaggttgaactggtttttcagctataatgcatatacaactatagtgtgtacgtataccacatatacatatacttgtatgaagatatgtgtaaaatgtttttactatggatcatggatttaagaaacttgaaaagctgggcacggtggctcacgcctgtaatcccagcactttgggaggctgaggcgggtggatcaagaggtcaggagatcgagaccatcctggctaagtcggtctctaataaaaatacaaaaaattagccaggcgtggtggcacgcgcctgtagtcccagctactcgggaggctgaggcaggaagaatcgcttgaacccgggaggcagaggttgcagtgagccgagaccgcgccactgcactccagcctgggcaacagagcaaaactccaactcaaaaacaaaaacaaaaacaccttgaaaaacactgccttagtatacttaaactatcttttcatctatcagattgttaaggattttttttaaatttgacaacatccagtgtcaatgagggtgagggcaaaaaaaggactaccttggtgagaatgtaagttgtttaatcctttgggagggttaagctgtagatatctaaattttaaatatatatttatcctcttccatgttaagaaccctaagaaataactggacgagtgtggtatgatgtttgcatgtgatattcattacagtattattttaatagtagaaaattgttaaaaatctatatgtccattaataggaaattggttaaataaaatgaggcttccacaaactgaaaaaaaaaa

SEQ ID NO: 287095 - DNA, 2711 bp, Homo sapiens
tgaaaggacatgtatatgtctgaccaaaacagtctgcccagactcccgagcagcagtggaacttaaggaattgttttctccaggatccttggacctcccagagcttcagcctgcagcctttgtgtcttcttaccagcccatgtacctgacacatgaacccttggtagatactcacctgcagcacttgaagtctccatcacagggtagcccaattcagtcttcagattgaacaagaagggatcagatgccacatcgtttttgtcgtgattaatttaacttaaactaaaattttgggtatatgaaagaaggcagcaattcagaagtaaagaagatactaacgtatttcatcatggaaggtcctgtggtgatggttttccctgggaaaaccttcagctgctttatttttagtaataaatttctcttgtcaattctgtttactttcatcttgtaatcgggatgtaatcttttttgcttagctctgcctgaggtaaagtaaacttcagcctcttataaacaagagtgatagagagctgcaggctgctacaacaaataccatagacaggttggtttataaataacatgaatttatttctcacagttctggatgctgggaagtccaagttcaaggagcgcagattcaatgtctggtgagggcccacttcctagttcttagacagctgtcttcctgcagtgtcctcacgtggtagaagaggaaggcagctctccggggtcccttttataagatcactaagccggttcatgagaggtctgctctcatgacctaatcacctcccaaaggccccacctcccaataccatcacattaggggttaggatttaacatgaattttggggacatataaacattaagtctgtagtagcagcagctgactaacgagggagatagggagattctgacaaacttctactcttgattgtgatcctaattcaaggaatatcaagtcccagcccctgcaacccaggctgctgcttaattttcatgtcagtatcatcaaaatccaatgttctgcttaaactcaagatggaaagtccagtccaaggtacactgttcatctttttcttcacattttgcacatccttcaaggggatctttaacctctttaacctttgtattgcacctcagataatgtgctttttagctcagtacactgaaaccatatgataacacaaattcacatataattgggggttagtcccatactctataacagacttagtcctgtcttttcattagccatgtaataatataactccatgttccatgcaactggatttttggaccctgttaatagcattaaggtagaggtttactctatcacctaacacctcaacactacctgtgggatgccttagttacccagcagcaggttaccaagggctgtctggaaagggagggacaaaaggacccagaagtagaagaatggggatggagtggtgagaattgaatggttaatgcactgccattcataattgccaattgaggacaacacaaatgggattggtactttatagtaataaatctgaccagcagagggagggatcaggcagcagtgtttagagcacaccacactggccactgtaaactgagaagctaagttaactggtattttatgattttgagtatagtctttttataagttgtatacactttacaatgtaaaagaaacaaactttgtataatagcaaatcgggaaggggactgcttaaaatgttaatgcagtgtttttctttttttctctgcataaatggcttgagcatactggcatttacacagaaatgatatatgctgcttttatcatataacaaatattttcccactattacagcctgagtaatacccgtattaaaagagcctcattttagaaagacatttaaaatttttggaacataccacatgtagaaaggttgaactggtttttcagctataatgcatatacaactatagtgtgtacgtataccacatatacatatacttgtatgaagatatgtgtaaaatgtttttactatggatcatggatttaagaaacttgaaaagctgggcacggtggctcacgcctgtaatcccagcactttgggaggctgaggcgggtggatcaagaggtcaggagatcgagaccatcctggctaagtcggtctctaataaaaatacaaaaaattagccaggcgtggtggcacgcgcctgtagtcccagctactcgggaggctgaggcaggaagaatcgcttgaacccgggaggcagaggttgcagtgagccgagaccgcgccactgcactccagcctgggcaacagagcaaaactccaactcaaaaacaaaaacaaaaacaccttgaaaaacactgccttagtatacttaaactatcttttcatctatcagattgttaaggattttttttaaatttgacaacatccagtgtcaatgagggtgagggcaaaaaaaggactaccttggtgagaatgtaagttgtttaatcctttgggagggttaagctgtagatatctaaattttaaatatatatttatcctcttccatgttaagaaccctaagaaataactggacgagtgtggtatgatgtttgcatgtgatattcattacagtattattttaatagtagaaaattgttaaaaatctatatgtccattaataggaaattggttaaataaaatgaggcttccacaaactgaaaaaaaaaa

SEQ ID NO: 287096 - DNA, 1012 bp, Homo sapiens
  misc_feature (255)..(255): n is a, c, g, or t
  misc_feature (259)..(259): n is a, c, g, or t
  misc_feature (267)..(267): n is a, c, g, or t
  misc_feature (269)..(269): n is a, c, g, or t
  misc_feature (273)..(273): n is a, c, g, or t
gtaaatgatgactcaatctatctcccaagcaccaatcctgaagggaatgctgaatctgaatgcccccataggtggaacttcaaactctcaatgttcaaaacaacatcgctttttcttcacaaaatcttcattatgtatttgatggaaccaatatccttgaaataacataaattccaagctttaggtacctttgacgtataggggataaaagaaagggaacagtcaatcagatgctaagttctcttagttttactntttnctgtggtntntctncccccttttcccttttttcagtgcaaatagcaagcaatacacatagcaagtgctgaataagtgcttttggaatgtgtattctaatttctgaccctttgcccaaagaggtacatgaaactgtcagtaatttcccccctctaacctttgagtgttccaagtgtttcttcctttcttttattgtagaagcactggatttattgagtgaataaacttaatatagcttgccagccataactttatattagaatagtttggcttgcctcagtgcttggaaataggggtggagtcctcaaatgtccccccacatccaagtcaacagttcatctcttctctctaccaaaagcttgaacgtctctcagcatttttggaagcataaggaaaggttcagaaattagaatacacattccaaaagcacttattcagcacttgctatgtgtattgcttgctatttgcactggagagaaacaagaaaagtaaaactaagagaacttagcatctgattgactgttccctttcttttatcccctatacgtcaaaggtacctaaagcttggaatttatgttatttcaaggatattggttccatcaaatacataatgaagattttgtgaagaaaaagcgatgttgttttgaacattgagagtttgaagttccacctatgggggcattcagattcagcattcccttcaggattggtgcttgggagatagattgagtcatcatttacaaaaaaaaaaaaa

SEQ ID NO: 287097 - DNA, 1553 bp, Homo sapiens
tagccatgtaataatataaagacaggactaagtctgttatagagtatgggactaacccccaattctataacagacttagtcctgtcttttcattagccatgtaataatataactccatgttccatgcaactggatttttggaccctgttaatagcattaaggtagaggtttactctatcacctaacacctcaacactacctgtgggatgccttagttacccagcagcaggttaccaagggctgtctggaaagggagggacaaaaggacccagaagtagaagaatggggatggagtggtgagaattgaatggttaatgcactgccattcataattgccaattgaggacaacacaaatgggattggtactttatagtaataaatctgaccagcagagggagggatcaggcagcagtgtttagagcacaccacactggccactgtaaactgagaagctaagttaactggtattttatgattttgagtatagtctttttataagttgtatacactttacaatgtaaaagaaacaaactttgtataatagcaaatcgggaaggggactgcttaaaatgttaatgcagtgtttttctttttttctctgcataaatggcttgagcatactggcatttacacagaaatgatatatgctgcttttatcatataacaaatattttcccactattacagcctgagtaatacccgtattaaaagagcctcattttagaaagacatttaaaatttttggaacataccacatgtagaaaggttgaactggtttttcagctataatgcatatacaactatagtgtgtacgtataccacatatacatatacttgtatgaagatatgtgtaaaatgtttttactatggatcatggatttaagaaacttgaaaagctgggcacggtggctcacgcctgtaatcccagcactttgggaggctgaggcgggtggatcaagaggtcaggagatcgagaccatcctggctaagtcggtctctaataaaaatacaaaaaattagccaggcgtggtggcacgcgcctgtagtcccagctactcgggaggctgaggcaggaagaatcgcttgaacccgggaggcagaggttgcagtgagccgagaccgcgccactgcactccagcctgggcaacagagcaaaactccaactcaaaaacaaaaacaaaaacaccttgaaaaacactgccttagtatacttaaactatcttttcatctatcagattgttaaggattttttttaaatttgacaacatccagtgtcaatgagggtgagggcaaaaaaaggactaccttggtgagaatgtaagttgtttaatcctttgggagggttaagctgtagatatctaaattttaaatatatatttatcctcttccatgttaagaaccctaagaaataactggacgagtgtggtatgatgtttgcatgtgatattcattacagtattattttaatagtagaaaattgttaaaaatctatatgtccattaataggaaattggttaaataaaatgaggcttccacaaactgaaaaaaaaaa

SEQ ID NO: 287098 - DNA, 752 bp, Homo sapiens
ctatagtacccttcagctaagcacacggccgccggccctccctcctctcctcatccagcactagcccccagctgtctctttcctcccggtgcccacgatcgcaccgcccagaccaccctactctccctgccccggaagttacacactgccgacaccgggacgtaacttccgggaagggcttacttccaagacagacacggaagtgctgggaggcgccgggagcccgttcggttgcgggtgtctctggccctgcggtcagccctgggaacgtcccggagagctagattcctagaggcccgattccgctagcccggaacagacaaagccagcgctcccgcccgctccccgacttaggatccgatgccggcagcgtcctggggcccccgtagcggggctggaccatgagcctgctggacggcctcgcttcctcgccgcgggctccgctgcagtccagcaaggccaggatgaaaaagctcccgaagaagagccagaatgagaagtaccggctgaagtacctgcggctgcgcaaagcggccaaggccacggtgtttgtacctaaagcttggaatttatgttatttcaaggatattggttccatcaaatacataatgaagattttgtgaagaaaaagcgatgttgttttgaacattgagagtttgaagttccacctatgggggcattcagattcagcattcccttcaggattggtgcttgggagatagattgagtcatcatttacaaaaaaaaaaaaa

SEQ ID NO: 287099 - DNA, 789 bp, Homo sapiens
agaaaaccaccattgattgaaaccactcacaagagaatttattactgacaaaattgacagatctctaaaatttgacacggtaaattgaatccagtgaaataataaccacagaagaaaactaacagtagtggaaactatactcagtaaaaattgctttgactttttttagaaatcagtagtgctcgatatcattctaaaaaattatacagaaaataaattaatcctgttcaggataatttgactgaagtaaacattgaagaactagaaactgtttaaatgaactttaaaactagtcaaataatttaattggctagatagaacttgttacagaaatattttcctggcaaaaaaatcattgcgctttatagaaaactggccaaataattaaatcagctagttaacttgttacatttgttacaaaaatattttcttggcaaaaattcctcagaattagtgtaatttcgatgcaacagtttctttttattaacataaccaagatattttaacgttcaaaatgaaagtaaatacaatgaaatggcagtttgcagtcagcctgtttctcctagatcttgtaaaattgacttaaaagattacatggagagtgatctcatttgtttttaaaataccatttgtatttgtacttaaggatataaataagtggattggaaaggtacacaacaaattaaacgctcacttttggaaagctgtcaaccaagaagggtagaactgaaacagtcaaaggactttctctaggtacttggatttgtttcaatttttagcagccctata

SEQ ID NO: 287100 - DNA, 604 bp, Homo sapiens
catttagtctttcctagaggcagggaaatgggctaggtggcctttggagcacactgctggcttggtaaatttctgatcttacagatgaaataagaggccttaaaaagtataaggcctttggctcctaagcactaatctgggcaggttagaaagctactcagggctttgggcgaaagccccatatgcccattcagtaagtatataaaaccaggattggcttattgccctcaccattcacgtgcaaatttatcccttcccttcaacattggaaggggcctaaagtgggtgaccccagatttgcgtttcagttctgaagaaaacatgcaagaaaaagaaaatggcgggaggtgctcgcaagctggttcagcccattgccctggatccctcaggacggcctgtgttccccatcggactagggggtctaacagtatatagcctgggggaggtgagtgagaccagcgatatatagagaggagaatcagggaaatacgggaatggggttgagccttccctccctgttcccattagcagcagcctcttgctgatccataccaaccccagcgtatctccagtccctgcaaaaccaggtcagtgttgtctgcta

SEQ ID NO: 287101 - DNA, 651 bp, Homo sapiens
cgttccagagtaaagaaatatttacagagtagtatgcccctctctccttccttcttgaggattgatctcattgctcgtttgtctttctcagtttgaaattgttcctgaagatgacccccagaatgccattgtcagctcttctgcagatgcttgtcatgcagaactgctcaggactataagcactactatgtaagttgaccaaaagcttgaaaacaggctaaaagatcactgttggtacagtgaaaccttttctcttgcttttaatgggtggagatactttattttatagaaacctatcctggatcctcctgacattgtgccaactagagcctccacattatcaaagtcaagaaagcttatcctgtttgttcataccactattctgttcttaaatccatcttcatctcccgctaagctctcaaactaaaattatccctctcctgtttagggggaaactaatgcctaacctgcttccagctggagctgacttttttggattttctcatccagccatccacaacctgatccagagctgtccaggagctcgaaaatgcatcaagtaagtgtgatcaaattcattcccttgagaaaagctcagtgatcatccggccagggactggcagttcctactttgttcactgaccttctgtg

SEQ ID NO: 287102 - DNA, 3982 bp, Homo sapiens
ctatagtacccttcagctaagcacacggccgccggccctccctcctctcctcatccagcactagcccccagctgtctctttcctcccggtgcccacgatcgcaccgcccagaccaccctactctccctgccccggaagttacacactgccgacaccgggacgtaacttccgggaagggcttacttccaagacagacacggaagtgctgggaggcgccgggagcccgttcggttgcgggtgtctctggccctgcggtcagccctgggaacgtcccggagagctagattcctagaggcccgattccgctagcccggaacagacaaagccagcgctcccgcccgctccccgacttaggatccgatgccggcagcgtcctggggcccccgtagcggggctggaccatgagcctgctggacggcctcgcttcctcgccgcgggctccgctgcagtccagcaaggccaggatgaaaaagctcccgaagaagagccagaatgagaagtaccggctgaagtacctgcggctgcgcaaagcggccaaggccacggtgtttgaaaatgctgctatttgtgatgaaattgctcgtcttgaggaaaaatttcttaaagcaaaagaagaaagaaggtacttgctaaagaagctcctccagcttcaggctctaactgaaggggaagtacaggctgcagctccttcccacagttccagtttgcccctgacttatggtgtggccagctctgtgggaactatacagggagctgggcctatttcagggcccagcactggggctgaggaaccatttgggaagaaaactaagaaggagaaaaaagaaaaaggcaaagagaacaacaaactggaagatcatcaccgaccgacctggctttcatgatgagagtgccatctaccccgtgggctattgcagtactcgaatatatgccagcatgaagtgcccagaccagaagtgtctatatacctgtcagatcaaggatggtggtgtgcagcctcagtttgaaattgttcctgaagatgacccccagaatgccattgtcagctcttctgcagatgcttgtcatgcagaactgctcaggactataagcactactatggggaaactaatgcctaacctgcttccagctggagctgacttttttggattttctcatccagccatccacaacctgatccagagctgtccaggagctcgaaaatgcatcaattaccagtgggtgaaatttgatgtgtgcaaacctggagatgggcagctacctgaggggctgccggagaatgatgcagctatgagctttgaagcctttcagagacagatctttgatgaagatcagaatgatccccttctgccaggatccttggacctcccagagcttcagcctgcagcctttgtgtcttcttaccagcccatgtacctgacacatgaacccttggtagatactcacctgcagcacttgaagtctccatcacagggtagcccaattcagtcttcagattgaacaagaagggatcagatgccacatcgtttttgtcgtgattaatttaacttaaactaaaattttgggtatatgaaagaaggcagcaattcagaagtaaagaagatactaacgtatttcatcatggaaggtcctgtggtgatggttttccctgggaaaaccttcagctgctttatttttagtaataaatttctcttgtcaattctgtttactttcatcttgtaatcgggatgtaatcttttttgcttagctctgcctgaggtaaagtaaacttcagcctcttataaacaagagtgatagagagctgcaggctgctacaacaaataccatagacaggttggtttataaataacatgaatttatttctcacagttctggatgctgggaagtccaagttcaaggagcgcagattcaatgtctggtgagggcccacttcctagttcttagacagctgtcttcctgcagtgtcctcacgtggtagaagaggaaggcagctctccggggtcccttttataagatcactaagccggttcatgagaggtctgctctcatgacctaatcacctcccaaaggccccacctcccaataccatcacattaggggttaggatttaacatgaattttggggacatataaacattaagtctgtagtagcagcagctgactaacgagggagatagggagattctgacaaacttctactcttgattgtgatcctaattcaaggaatatcaagtcccagcccctgcaacccaggctgctgcttaattttcatgtcagtatcatcaaaatccaatgttctgcttaaactcaagatggaaagtccagtccaaggtacactgttcatctttttcttcacattttgcacatccttcaaggggatctttaacctctttaacctttgtattgcacctcagataatgtgctttttagctcagtacactgaaaccatatgataacacaaattcacatataattgggggttagtcccatactctataacagacttagtcctgtcttttcattagccatgtaataatataactccatgttccatgcaactggatttttggaccctgttaatagcattaaggtagaggtttactctatcacctaacacctcaacactacctgtgggatgccttagttacccagcagcaggttaccaagggctgtctggaaagggagggacaaaaggacccagaagtagaagaatggggatggagtggtgagaattgaatggttaatgcactgccattcataattgccaattgaggacaacacaaatgggattggtactttatagtaataaatctgaccagcagagggagggatcaggcagcagtgtttagagcacaccacactggccactgtaaactgagaagctaagttaactggtattttatgattttgagtatagtctttttataagttgtatacactttacaatgtaaaagaaacaaactttgtataatagcaaatcgggaaggggactgcttaaaatgttaatgcagtgtttttctttttttctctgcataaatggcttgagcatactggcatttacacagaaatgatatatgctgcttttatcatataacaaatattttcccactattacagcctgagtaatacccgtattaaaagagcctcattttagaaagacatttaaaatttttggaacataccacatgtagaaaggttgaactggtttttcagctataatgcatatacaactatagtgtgtacgtataccacatatacatatacttgtatgaagatatgtgtaaaatgtttttactatggatcatggatttaagaaacttgaaaagctgggcacggtggctcacgcctgtaatcccagcactttgggaggctgaggcgggtggatcaagaggtcaggagatcgagaccatcctggctaagtcggtctctaataaaaatacaaaaaattagccaggcgtggtggcacgcgcctgtagtcccagctactcgggaggctgaggcaggaagaatcgcttgaacccgggaggcagaggttgcagtgagccgagaccgcgccactgcactccagcctgggcaacagagcaaaactccaactcaaaaacaaaaacaaaaacaccttgaaaaacactgccttagtatacttaaactatcttttcatctatcagattgttaaggattttttttaaatttgacaacatccagtgtcaatgagggtgagggcaaaaaaaggactaccttggtgagaatgtaagttgtttaatcctttgggagggttaagctgtagatatctaaattttaaatatatatttatcctcttccatgttaagaaccctaagaaataactggacgagtgtggtatgatgtttgcatgtgatattcattacagtattattttaatagtagaaaattgttaaaaatctatatgtccattaataggaaattggttaaataaaatgaggcttccacaaactgaaaaaaaaaa

SEQ ID NO: 287103 - DNA, 4119 bp, Homo sapiens
ctatagtacccttcagctaagcacacggccgccggccctccctcctctcctcatccagcactagcccccagctgtctctttcctcccggtgcccacgatcgcaccgcccagaccaccctactctccctgccccggaagttacacactgccgacaccgggacgtaacttccgggaagggcttacttccaagacagacacggaagtgctgggaggcgccgggagcccgttcggttgcgggtgtctctggccctgcggtcagccctgggaacgtcccggagagctagattcctagaggcccgattccgctagcccggaacagacaaagccagcgctcccgcccgctccccgacttaggatccgatgccggcagcgtcctggggcccccgtagcggggctggaccatgagcctgctggacggcctcgcttcctcgccgcgggctccgctgcagtccagcaaggccaggatgaaaaagctcccgaagaagagccagaatgagaagtaccggctgaagtacctgcggctgcgcaaagcggccaaggccacggtgtttgaaaatgctgctatttgtgatgaaattgctcgtcttgaggaaaaatttcttaaagcaaaagaagaaagaaggtacttgctaaagaagctcctccagcttcaggctctaactgaaggggaagtacaggctgcagctccttcccacagttccagtttgcccctgacttatggtgtggccagctctgtgggaactatacagggagctgggcctatttcagggcccagcactggggctgaggaaccatttgggaagaaaactaagaaggagaaaaaagaaaaaggcaaagagaacaacaaactggaagttctgaagaaaacatgcaagaaaaagaaaatggcgggaggtgctcgcaagctggttcagcccattgccctggatccctcaggacggcctgtgttccccatcggactagggggtctaacagtatatagcctgggggagatcatcaccgaccgacctggctttcatgatgagagtgccatctaccccgtgggctattgcagtactcgaatatatgccagcatgaagtgcccagaccagaagtgtctatatacctgtcagatcaaggatggtggtgtgcagcctcagtttgaaattgttcctgaagatgacccccagaatgccattgtcagctcttctgcagatgcttgtcatgcagaactgctcaggactataagcactactatggggaaactaatgcctaacctgcttccagctggagctgacttttttggattttctcatccagccatccacaacctgatccagagctgtccaggagctcgaaaatgcatcaattaccagtgggtgaaatttgatgtgtgcaaacctggagatgggcagctacctgaggggctgccggagaatgatgcagctatgagctttgaagcctttcagagacagatctttgatgaagatcagaatgatccccttctgccaggatccttggacctcccagagcttcagcctgcagcctttgtgtcttcttaccagcccatgtacctgacacatgaacccttggtagatactcacctgcagcacttgaagtctccatcacagggtagcccaattcagtcttcagattgaacaagaagggatcagatgccacatcgtttttgtcgtgattaatttaacttaaactaaaattttgggtatatgaaagaaggcagcaattcagaagtaaagaagatactaacgtatttcatcatggaaggtcctgtggtgatggttttccctgggaaaaccttcagctgctttatttttagtaataaatttctcttgtcaattctgtttactttcatcttgtaatcgggatgtaatcttttttgcttagctctgcctgaggtaaagtaaacttcagcctcttataaacaagagtgatagagagctgcaggctgctacaacaaataccatagacaggttggtttataaataacatgaatttatttctcacagttctggatgctgggaagtccaagttcaaggagcgcagattcaatgtctggtgagggcccacttcctagttcttagacagctgtcttcctgcagtgtcctcacgtggtagaagaggaaggcagctctccggggtcccttttataagatcactaagccggttcatgagaggtctgctctcatgacctaatcacctcccaaaggccccacctcccaataccatcacattaggggttaggatttaacatgaattttggggacatataaacattaagtctgtagtagcagcagctgactaacgagggagatagggagattctgacaaacttctactcttgattgtgatcctaattcaaggaatatcaagtcccagcccctgcaacccaggctgctgcttaattttcatgtcagtatcatcaaaatccaatgttctgcttaaactcaagatggaaagtccagtccaaggtacactgttcatctttttcttcacattttgcacatccttcaaggggatctttaacctctttaacctttgtattgcacctcagataatgtgctttttagctcagtacactgaaaccatatgataacacaaattcacatataattgggggttagtcccatactctataacagacttagtcctgtcttttcattagccatgtaataatataactccatgttccatgcaactggatttttggaccctgttaatagcattaaggtagaggtttactctatcacctaacacctcaacactacctgtgggatgccttagttacccagcagcaggttaccaagggctgtctggaaagggagggacaaaaggacccagaagtagaagaatggggatggagtggtgagaattgaatggttaatgcactgccattcataattgccaattgaggacaacacaaatgggattggtactttatagtaataaatctgaccagcagagggagggatcaggcagcagtgtttagagcacaccacactggccactgtaaactgagaagctaagttaactggtattttatgattttgagtatagtctttttataagttgtatacactttacaatgtaaaagaaacaaactttgtataatagcaaatcgggaaggggactgcttaaaatgttaatgcagtgtttttctttttttctctgcataaatggcttgagcatactggcatttacacagaaatgatatatgctgcttttatcatataacaaatattttcccactattacagcctgagtaatacccgtattaaaagagcctcattttagaaagacatttaaaatttttggaacataccacatgtagaaaggttgaactggtttttcagctataatgcatatacaactatagtgtgtacgtataccacatatacatatacttgtatgaagatatgtgtaaaatgtttttactatggatcatggatttaagaaacttgaaaagctgggcacggtggctcacgcctgtaatcccagcactttgggaggctgaggcgggtggatcaagaggtcaggagatcgagaccatcctggctaagtcggtctctaataaaaatacaaaaaattagccaggcgtggtggcacgcgcctgtagtcccagctactcgggaggctgaggcaggaagaatcgcttgaacccgggaggcagaggttgcagtgagccgagaccgcgccactgcactccagcctgggcaacagagcaaaactccaactcaaaaacaaaaacaaaaacaccttgaaaaacactgccttagtatacttaaactatcttttcatctatcagattgttaaggattttttttaaatttgacaacatccagtgtcaatgagggtgagggcaaaaaaaggactaccttggtgagaatgtaagttgtttaatcctttgggagggttaagctgtagatatctaaattttaaatatatatttatcctcttccatgttaagaaccctaagaaataactggacgagtgtggtatgatgtttgcatgtgatattcattacagtattattttaatagtagaaaattgttaaaaatctatatgtccattaataggaaattggttaaataaaatgaggcttccacaaactgaaaaaaaaaa

SEQ ID NO: 287104 - DNA, 4037 bp, Homo sapiens
ctatagtacccttcagctaagcacacggccgccggccctccctcctctcctcatccagcactagcccccagctgtctctttcctcccggtgcccacgatcgcaccgcccagaccaccctactctccctgccccggaagttacacactgccgacaccgggacgtaacttccgggaagggcttacttccaagacagacacggaagtgctgggaggcgccgggagcccgttcggttgcgggtgtctctggccctgcggtcagccctgggaacgtcccggagagctagattcctagaggcccgattccgctagcccggaacagacaaagccagcgctcccgcccgctccccgacttaggatccgatgccggcagcgtcctggggcccccgtagcggggctggaccatgagcctgctggacggcctcgcttcctcgccgcgggctccgctgcagtccagcaaggccaggatgaaaaagctcccgaagaagagccagaatgagaagtaccggctgaagtacctgcggctgcgcaaagcggccaaggccacggtgtttgaaaatgctgctatttgtgatgaaattgctcgtcttgaggaaaaatttcttaaagcaaaagaagaaagaaggtacttgctaaagaagctcctccagcttcaggctctaactgaaggggaagtacaggctgcagctccttcccacagttccagtttgcccctgacttatggtgtggccagctctgtgggaactatacagggagctgggcctatttcagggcccagcactggggctgaggaaccatttgggaagaaaactaagaaggagaaaaaagaaaaaggcaaagagaacaacaaactggaagcagcagcctcttgctgatccataccaaccccagcgtatctccagtccctgcaaaaatcatcaccgaccgacctggctttcatgatgagagtgccatctaccccgtgggctattgcagtactcgaatatatgccagcatgaagtgcccagaccagaagtgtctatatacctgtcagatcaaggatggtggtgtgcagcctcagtttgaaattgttcctgaagatgacccccagaatgccattgtcagctcttctgcagatgcttgtcatgcagaactgctcaggactataagcactactatggggaaactaatgcctaacctgcttccagctggagctgacttttttggattttctcatccagccatccacaacctgatccagagctgtccaggagctcgaaaatgcatcaattaccagtgggtgaaatttgatgtgtgcaaacctggagatgggcagctacctgaggggctgccggagaatgatgcagctatgagctttgaagcctttcagagacagatctttgatgaagatcagaatgatccccttctgccaggatccttggacctcccagagcttcagcctgcagcctttgtgtcttcttaccagcccatgtacctgacacatgaacccttggtagatactcacctgcagcacttgaagtctccatcacagggtagcccaattcagtcttcagattgaacaagaagggatcagatgccacatcgtttttgtcgtgattaatttaacttaaactaaaattttgggtatatgaaagaaggcagcaattcagaagtaaagaagatactaacgtatttcatcatggaaggtcctgtggtgatggttttccctgggaaaaccttcagctgctttatttttagtaataaatttctcttgtcaattctgtttactttcatcttgtaatcgggatgtaatcttttttgcttagctctgcctgaggtaaagtaaacttcagcctcttataaacaagagtgatagagagctgcaggctgctacaacaaataccatagacaggttggtttataaataacatgaatttatttctcacagttctggatgctgggaagtccaagttcaaggagcgcagattcaatgtctggtgagggcccacttcctagttcttagacagctgtcttcctgcagtgtcctcacgtggtagaagaggaaggcagctctccggggtcccttttataagatcactaagccggttcatgagaggtctgctctcatgacctaatcacctcccaaaggccccacctcccaataccatcacattaggggttaggatttaacatgaattttggggacatataaacattaagtctgtagtagcagcagctgactaacgagggagatagggagattctgacaaacttctactcttgattgtgatcctaattcaaggaatatcaagtcccagcccctgcaacccaggctgctgcttaattttcatgtcagtatcatcaaaatccaatgttctgcttaaactcaagatggaaagtccagtccaaggtacactgttcatctttttcttcacattttgcacatccttcaaggggatctttaacctctttaacctttgtattgcacctcagataatgtgctttttagctcagtacactgaaaccatatgataacacaaattcacatataattgggggttagtcccatactctataacagacttagtcctgtcttttcattagccatgtaataatataactccatgttccatgcaactggatttttggaccctgttaatagcattaaggtagaggtttactctatcacctaacacctcaacactacctgtgggatgccttagttacccagcagcaggttaccaagggctgtctggaaagggagggacaaaaggacccagaagtagaagaatggggatggagtggtgagaattgaatggttaatgcactgccattcataattgccaattgaggacaacacaaatgggattggtactttatagtaataaatctgaccagcagagggagggatcaggcagcagtgtttagagcacaccacactggccactgtaaactgagaagctaagttaactggtattttatgattttgagtatagtctttttataagttgtatacactttacaatgtaaaagaaacaaactttgtataatagcaaatcgggaaggggactgcttaaaatgttaatgcagtgtttttctttttttctctgcataaatggcttgagcatactggcatttacacagaaatgatatatgctgcttttatcatataacaaatattttcccactattacagcctgagtaatacccgtattaaaagagcctcattttagaaagacatttaaaatttttggaacataccacatgtagaaaggttgaactggtttttcagctataatgcatatacaactatagtgtgtacgtataccacatatacatatacttgtatgaagatatgtgtaaaatgtttttactatggatcatggatttaagaaacttgaaaagctgggcacggtggctcacgcctgtaatcccagcactttgggaggctgaggcgggtggatcaagaggtcaggagatcgagaccatcctggctaagtcggtctctaataaaaatacaaaaaattagccaggcgtggtggcacgcgcctgtagtcccagctactcgggaggctgaggcaggaagaatcgcttgaacccgggaggcagaggttgcagtgagccgagaccgcgccactgcactccagcctgggcaacagagcaaaactccaactcaaaaacaaaaacaaaaacaccttgaaaaacactgccttagtatacttaaactatcttttcatctatcagattgttaaggattttttttaaatttgacaacatccagtgtcaatgagggtgagggcaaaaaaaggactaccttggtgagaatgtaagttgtttaatcctttgggagggttaagctgtagatatctaaattttaaatatatatttatcctcttccatgttaagaaccctaagaaataactggacgagtgtggtatgatgtttgcatgtgatattcattacagtattattttaatagtagaaaattgttaaaaatctatatgtccattaataggaaattggttaaataaaatgaggcttccacaaactgaaaaaaaaaa

SEQ ID NO: 287105 - DNA, 4209 bp, Homo sapiens
ctatagtacccttcagctaagcacacggccgccggccctccctcctctcctcatccagcactagcccccagctgtctctttcctcccggtgcccacgatcgcaccgcccagaccaccctactctccctgccccggaagttacacactgccgacaccgggacgtaacttccgggaagggcttacttccaagacagacacggaagtgctgggaggcgccgggagcccgttcggttgcgggtgtctctggccctgcggtcagccctgggaacgtcccggagagctagattcctagaggcccgattccgctagcccggaacagacaaagccagcgctcccgcccgctccccgacttaggatccgatgccggcagcgtcctggggcccccgtagcggggctggaccatgagcctgctggacggcctcgcttcctcgccgcgggctccgctgcagtccagcaaggccaggatgaaaaagctcccgaagaagagccagaatgagaagtaccggctgaagtacctgcggctgcgcaaagcggccaaggccacggtgtttgaaaatgctgctatttgtgatgaaattgctcgtcttgaggaagagtcagaatgagaagtagcaggatgaagtgatctgcggttggcagatgcggccaaggtcagggtgtatgagaatgctgctatttgtgagtgaaatttgtctcgtacttgatggaaaaatgtccttaggagctatagagtagtgagaagaggtgttgtggtagtggtacttgctaaagaagctcctccagcttcaggctctaactgaaggggaagtacaggctgcagctccttcccacagttccagtttgcccctgacttatggtgtggccagctctgtgggaactatacagggagctgggcctatttcagggcccagcactggggctgaggaaccatttgggaagaaaactaagaaggagaaaaaagaaaaaggcaaagagaacaacaaactggaagccccaaagtggttctaaaggctaccacaggaaactggacttctaaattcttcagtgacctcaatcccaggttgggggaatgttttttatagatcatcaccgaccgacctggctttcatgatgagagtgccatctaccccgtgggctattgcagtactcgaatatatgccagcatgaagtgcccagaccagaagtgtctatatacctgtcagatcaaggatggtggtgtgcagcctcagtttgaaattgttcctgaagatgacccccagaatgccattgtcagctcttctgcagatgcttgtcatgcagaactgctcaggactataagcactactatggggaaactaatgcctaacctgcttccagctggagctgacttttttggattttctcatccagccatccacaacctgatccagagctgtccaggagctcgaaaatgcatcaattaccagtgggtgaaatttgatgtgtgcaaacctggagatgggcagctacctgaggggctgccggagaatgatgcagctatgagctttgaagcctttcagagacagatctttgatgaagatcagaatgatccccttctgccaggatccttggacctcccagagcttcagcctgcagcctttgtgtcttcttaccagcccatgtacctgacacatgaacccttggtagatactcacctgcagcacttgaagtctccatcacagggtagcccaattcagtcttcagattgaacaagaagggatcagatgccacatcgtttttgtcgtgattaatttaacttaaactaaaattttgggtatatgaaagaaggcagcaattcagaagtaaagaagatactaacgtatttcatcatggaaggtcctgtggtgatggttttccctgggaaaaccttcagctgctttatttttagtaataaatttctcttgtcaattctgtttactttcatcttgtaatcgggatgtaatcttttttgcttagctctgcctgaggtaaagtaaacttcagcctcttataaacaagagtgatagagagctgcaggctgctacaacaaataccatagacaggttggtttataaataacatgaatttatttctcacagttctggatgctgggaagtccaagttcaaggagcgcagattcaatgtctggtgagggcccacttcctagttcttagacagctgtcttcctgcagtgtcctcacgtggtagaagaggaaggcagctctccggggtcccttttataagatcactaagccggttcatgagaggtctgctctcatgacctaatcacctcccaaaggccccacctcccaataccatcacattaggggttaggatttaacatgaattttggggacatataaacattaagtctgtagtagcagcagctgactaacgagggagatagggagattctgacaaacttctactcttgattgtgatcctaattcaaggaatatcaagtcccagcccctgcaacccaggctgctgcttaattttcatgtcagtatcatcaaaatccaatgttctgcttaaactcaagatggaaagtccagtccaaggtacactgttcatctttttcttcacattttgcacatccttcaaggggatctttaacctctttaacctttgtattgcacctcagataatgtgctttttagctcagtacactgaaaccatatgataacacaaattcacatataattgggggttagtcccatactctataacagacttagtcctgtcttttcattagccatgtaataatataactccatgttccatgcaactggatttttggaccctgttaatagcattaaggtagaggtttactctatcacctaacacctcaacactacctgtgggatgccttagttacccagcagcaggttaccaagggctgtctggaaagggagggacaaaaggacccagaagtagaagaatggggatggagtggtgagaattgaatggttaatgcactgccattcataattgccaattgaggacaacacaaatgggattggtactttatagtaataaatctgaccagcagagggagggatcaggcagcagtgtttagagcacaccacactggccactgtaaactgagaagctaagttaactggtattttatgattttgagtatagtctttttataagttgtatacactttacaatgtaaaagaaacaaactttgtataatagcaaatcgggaaggggactgcttaaaatgttaatgcagtgtttttctttttttctctgcataaatggcttgagcatactggcatttacacagaaatgatatatgctgcttttatcatataacaaatattttcccactattacagcctgagtaatacccgtattaaaagagcctcattttagaaagacatttaaaatttttggaacataccacatgtagaaaggttgaactggtttttcagctataatgcatatacaactatagtgtgtacgtataccacatatacatatacttgtatgaagatatgtgtaaaatgtttttactatggatcatggatttaagaaacttgaaaagctgggcacggtggctcacgcctgtaatcccagcactttgggaggctgaggcgggtggatcaagaggtcaggagatcgagaccatcctggctaagtcggtctctaataaaaatacaaaaaattagccaggcgtggtggcacgcgcctgtagtcccagctactcgggaggctgaggcaggaagaatcgcttgaacccgggaggcagaggttgcagtgagccgagaccgcgccactgcactccagcctgggcaacagagcaaaactccaactcaaaaacaaaaacaaaaacaccttgaaaaacactgccttagtatacttaaactatcttttcatctatcagattgttaaggattttttttaaatttgacaacatccagtgtcaatgagggtgagggcaaaaaaaggactaccttggtgagaatgtaagttgtttaatcctttgggagggttaagctgtagatatctaaattttaaatatatatttatcctcttccatgttaagaaccctaagaaataactggacgagtgtggtatgatgtttgcatgtgatattcattacagtattattttaatagtagaaaattgttaaaaatctatatgtccattaataggaaattggttaaataaaatgaggcttccacaaactgaaaaaaaaaa

SEQ ID NO: 287106 - DNA, 3392 bp, Homo sapiens
  misc_feature (52)..(52): n is a, c, g, or t
ttactgagggagacagcgcgccctccacgtccattgccctactttgtttgcngtttgtggacaaacagggagctgggcctatttcagggcccagcactggggctgaggaaccatttgggaagaaaactaagaaggagaaaaaagaaaaaggcaaagagaacaacaaactggaagccccaaagtggttctaaaggctaccacaggaaactggacttctaaattcttcagtgacctcaatcccaggttgggggaatgttttttatagatcatcaccgaccgacctggctttcatgatgagagtgccatctaccccgtgggctattgcagtactcgaatatatgccagcatgaagtgcccagaccagaagtgtctatatacctgtcagatcaaggatggtggtgtgcagcctcagtttgaaattgttcctgaagatgacccccagaatgccattgtcagctcttctgcagatgcttgtcatgcagaactgctcaggactataagcactactatggggaaactaatgcctaacctgcttccagctggagctgacttttttggattttctcatccagccatccacaacctgatccagagctgtccaggagctcgaaaatgcatcaattaccagtgggtgaaatttgatgtgtgcaaacctggagatgggcagctacctgaggggctgccggagaatgatgcagctatgagctttgaagcctttcagagacagatctttgatgaagatcagaatgatccccttctgccaggatccttggacctcccagagcttcagcctgcagcctttgtgtcttcttaccagcccatgtacctgacacatgaacccttggtagatactcacctgcagcacttgaagtctccatcacagggtagcccaattcagtcttcagattgaacaagaagggatcagatgccacatcgtttttgtcgtgattaatttaacttaaactaaaattttgggtatatgaaagaaggcagcaattcagaagtaaagaagatactaacgtatttcatcatggaaggtcctgtggtgatggttttccctgggaaaaccttcagctgctttatttttagtaataaatttctcttgtcaattctgtttactttcatcttgtaatcgggatgtaatcttttttgcttagctctgcctgaggtaaagtaaacttcagcctcttataaacaagagtgatagagagctgcaggctgctacaacaaataccatagacaggttggtttataaataacatgaatttatttctcacagttctggatgctgggaagtccaagttcaaggagcgcagattcaatgtctggtgagggcccacttcctagttcttagacagctgtcttcctgcagtgtcctcacgtggtagaagaggaaggcagctctccggggtcccttttataagatcactaagccggttcatgagaggtctgctctcatgacctaatcacctcccaaaggccccacctcccaataccatcacattaggggttaggatttaacatgaattttggggacatataaacattaagtctgtagtagcagcagctgactaacgagggagatagggagattctgacaaacttctactcttgattgtgatcctaattcaaggaatatcaagtcccagcccctgcaacccaggctgctgcttaattttcatgtcagtatcatcaaaatccaatgttctgcttaaactcaagatggaaagtccagtccaaggtacactgttcatctttttcttcacattttgcacatccttcaaggggatctttaacctctttaacctttgtattgcacctcagataatgtgctttttagctcagtacactgaaaccatatgataacacaaattcacatataattgggggttagtcccatactctataacagacttagtcctgtcttttcattagccatgtaataatataactccatgttccatgcaactggatttttggaccctgttaatagcattaaggtagaggtttactctatcacctaacacctcaacactacctgtgggatgccttagttacccagcagcaggttaccaagggctgtctggaaagggagggacaaaaggacccagaagtagaagaatggggatggagtggtgagaattgaatggttaatgcactgccattcataattgccaattgaggacaacacaaatgggattggtactttatagtaataaatctgaccagcagagggagggatcaggcagcagtgtttagagcacaccacactggccactgtaaactgagaagctaagttaactggtattttatgattttgagtatagtctttttataagttgtatacactttacaatgtaaaagaaacaaactttgtataatagcaaatcgggaaggggactgcttaaaatgttaatgcagtgtttttctttttttctctgcataaatggcttgagcatactggcatttacacagaaatgatatatgctgcttttatcatataacaaatattttcccactattacagcctgagtaatacccgtattaaaagagcctcattttagaaagacatttaaaatttttggaacataccacatgtagaaaggttgaactggtttttcagctataatgcatatacaactatagtgtgtacgtataccacatatacatatacttgtatgaagatatgtgtaaaatgtttttactatggatcatggatttaagaaacttgaaaagctgggcacggtggctcacgcctgtaatcccagcactttgggaggctgaggcgggtggatcaagaggtcaggagatcgagaccatcctggctaagtcggtctctaataaaaatacaaaaaattagccaggcgtggtggcacgcgcctgtagtcccagctactcgggaggctgaggcaggaagaatcgcttgaacccgggaggcagaggttgcagtgagccgagaccgcgccactgcactccagcctgggcaacagagcaaaactccaactcaaaaacaaaaacaaaaacaccttgaaaaacactgccttagtatacttaaactatcttttcatctatcagattgttaaggattttttttaaatttgacaacatccagtgtcaatgagggtgagggcaaaaaaaggactaccttggtgagaatgtaagttgtttaatcctttgggagggttaagctgtagatatctaaattttaaatatatatttatcctcttccatgttaagaaccctaagaaataactggacgagtgtggtatgatgtttgcatgtgatattcattacagtattattttaatagtagaaaattgttaaaaatctatatgtccattaataggaaattggttaaataaaatgaggcttccacaaactgaaaaaaaaaa

SEQ ID NO: 287107 - DNA, 3603 bp, Homo sapiens
aacctgactacctttatctatggatttatttatagtttgtcacacggtcgaatagctccttcttctcagtaatacaagcttttttggtttgaaatatggatcctcttcccagcataataatgtgattttttttattcattttatgttattatattcacatttttacttaaaggaaaatgctgctatttgtgatgaaattgctcgtcttgaggaaaaatttcttaaagcaaaagaagaaagaaggtacttgctaaagaagctcctccagcttcaggctctaactgaaggggaagtacaggctgcagctccttcccacagttccagtttgcccctgacttatggtgtggccagctctgtgggaactatacagggagctgggcctatttcagggcccagcactggggctgaggaaccatttgggaagaaaactaagaaggagaaaaaagaaaaaggcaaagagaacaacaaactggaagatcatcaccgaccgacctggctttcatgatgagagtgccatctaccccgtgggctattgcagtactcgaatatatgccagcatgaagtgcccagaccagaagtgtctatatacctgtcagatcaaggatggtggtgtgcagcctcagtttgaaattgttcctgaagatgacccccagaatgccattgtcagctcttctgcagatgcttgtcatgcagaactgctcaggactataagcactactatggggaaactaatgcctaacctgcttccagctggagctgacttttttggattttctcatccagccatccacaacctgatccagagctgtccaggagctcgaaaatgcatcaattaccagtgggtgaaatttgatgtgtgcaaacctggagatgggcagctacctgaggggctgccggagaatgatgcagctatgagctttgaagcctttcagagacagatctttgatgaagatcagaatgatccccttctgccaggatccttggacctcccagagcttcagcctgcagcctttgtgtcttcttaccagcccatgtacctgacacatgaacccttggtagatactcacctgcagcacttgaagtctccatcacagggtagcccaattcagtcttcagattgaacaagaagggatcagatgccacatcgtttttgtcgtgattaatttaacttaaactaaaattttgggtatatgaaagaaggcagcaattcagaagtaaagaagatactaacgtatttcatcatggaaggtcctgtggtgatggttttccctgggaaaaccttcagctgctttatttttagtaataaatttctcttgtcaattctgtttactttcatcttgtaatcgggatgtaatcttttttgcttagctctgcctgaggtaaagtaaacttcagcctcttataaacaagagtgatagagagctgcaggctgctacaacaaataccatagacaggttggtttataaataacatgaatttatttctcacagttctggatgctgggaagtccaagttcaaggagcgcagattcaatgtctggtgagggcccacttcctagttcttagacagctgtcttcctgcagtgtcctcacgtggtagaagaggaaggcagctctccggggtcccttttataagatcactaagccggttcatgagaggtctgctctcatgacctaatcacctcccaaaggccccacctcccaataccatcacattaggggttaggatttaacatgaattttggggacatataaacattaagtctgtagtagcagcagctgactaacgagggagatagggagattctgacaaacttctactcttgattgtgatcctaattcaaggaatatcaagtcccagcccctgcaacccaggctgctgcttaattttcatgtcagtatcatcaaaatccaatgttctgcttaaactcaagatggaaagtccagtccaaggtacactgttcatctttttcttcacattttgcacatccttcaaggggatctttaacctctttaacctttgtattgcacctcagataatgtgctttttagctcagtacactgaaaccatatgataacacaaattcacatataattgggggttagtcccatactctataacagacttagtcctgtcttttcattagccatgtaataatataactccatgttccatgcaactggatttttggaccctgttaatagcattaaggtagaggtttactctatcacctaacacctcaacactacctgtgggatgccttagttacccagcagcaggttaccaagggctgtctggaaagggagggacaaaaggacccagaagtagaagaatggggatggagtggtgagaattgaatggttaatgcactgccattcataattgccaattgaggacaacacaaatgggattggtactttatagtaataaatctgaccagcagagggagggatcaggcagcagtgtttagagcacaccacactggccactgtaaactgagaagctaagttaactggtattttatgattttgagtatagtctttttataagttgtatacactttacaatgtaaaagaaacaaactttgtataatagcaaatcgggaaggggactgcttaaaatgttaatgcagtgtttttctttttttctctgcataaatggcttgagcatactggcatttacacagaaatgatatatgctgcttttatcatataacaaatattttcccactattacagcctgagtaatacccgtattaaaagagcctcattttagaaagacatttaaaatttttggaacataccacatgtagaaaggttgaactggtttttcagctataatgcatatacaactatagtgtgtacgtataccacatatacatatacttgtatgaagatatgtgtaaaatgtttttactatggatcatggatttaagaaacttgaaaagctgggcacggtggctcacgcctgtaatcccagcactttgggaggctgaggcgggtggatcaagaggtcaggagatcgagaccatcctggctaagtcggtctctaataaaaatacaaaaaattagccaggcgtggtggcacgcgcctgtagtcccagctactcgggaggctgaggcaggaagaatcgcttgaacccgggaggcagaggttgcagtgagccgagaccgcgccactgcactccagcctgggcaacagagcaaaactccaactcaaaaacaaaaacaaaaacaccttgaaaaacactgccttagtatacttaaactatcttttcatctatcagattgttaaggattttttttaaatttgacaacatccagtgtcaatgagggtgagggcaaaaaaaggactaccttggtgagaatgtaagttgtttaatcctttgggagggttaagctgtagatatctaaattttaaatatatatttatcctcttccatgttaagaaccctaagaaataactggacgagtgtggtatgatgtttgcatgtgatattcattacagtattattttaatagtagaaaattgttaaaaatctatatgtccattaataggaaattggttaaataaaatgaggcttccacaaactgaaaaaaaaaa

SEQ ID NO: 287108 - DNA, 1603 bp, Homo sapiens
ttcatgagaagccagacactgaggccagctcaaactcagggaaaggcagtgagactcacacctttgaagggaagggcaccaaggagccacattctacctgctttggccacgttgtctggcttctccagcctcagtctctttggccatgacaccataacgatgggaggggtgagttaatagacaccaaacagaactgctgtagcaactgccaaatgccttgcacagaggaggagtgtggggtgcccatgatattactctgcaagtgacattgccttctagggctttaatctcccagaaagccagagatggaatatctcagtgcttctgagcctttattttcagccctacccgcaacagcattctgcagcttgatctataatggggtgcaccacaccctctcagcctggtcagggatgggggccaaggactccctgtacctgtctcatctggagacgaaactcacctgggactaaccaaaaagaattagaagaaaaagcgaagtctcattacaaaaacacagaggattttagcccagtataactctagaagaaatggaatcctattaaggaaggaagtttggggcaaagcaccaggaaatccctcaaccggaagtgttgctagattgaggaagtgtcctaaaggaagtgggagacagctgtgggcactgtgtgcccagccccggccttcccagcagagtctgtgtgcatcgtgtcccaagtaaaaacaattcagttaccagaatggggtagttccttcacttgctaaaataaatgggtgtgtgggtgtgtgtgtgtgtgggtgtgtgtgtgtgtgtgtgtgtgtagtggctcttcatttgtttctccttcctaccactgttctcagccatttgaggagtggaaggtcgtggactggggaaagggccttccactctggctctctggttttccgtgttgttgggaacagtacgtcccaggctgtttgctttaaccagcgtgccttttatcactgcagaagctacgaagtgaagagtgtcctcggaaaggaagtggggttgttaaattgttttgtccagtccgtaaccgcccacccgaccagctgcattggattggaggaaatcgagcttctgagtgcaggaggggcctctgcagaacactagcggttgccgcaggatctgtgaactttgcaatgtggctgcaagggtggtggtggtggtggtgatttggggtagttatttgttaactatggacacagtgaacgtagtttacgatcttgaaatgaaacttagatttttctggggaaatgttcagatacagttttgtgaactgtaaatcaaaatacctttttctacagtttatcttttattttctgcaaatttaggaacatatttactcgttttcacattgaatcttaagtttaagctcttcatttggtatttaggcaatatatgagaaaaaaattttttttgttcatttgtaattttaacaagttgaacattttaccatgattgaacatgtttttattacagtatttaacattcccccaaagaataccctgcaaagtgtaaacctttgtcccatactgtgatattactgttctgctacaataaatgtcaaacctaagc

SEQ ID NO: 287109 - DNA, 1022 bp, Homo sapiens
ttcatgagaagccagacactgaggccagctcaaactcagggaaaggcagtgagactcacacctttgaagggaagggcaccaaggagccacattctacctgctttggccacgttgtctggcttctccagcctcagtctctttggccatgacaccataacgatgggaggggtgagttaatagacaccaaacagaactgctgtagcaactgccaaatgccttgcacagaggaggagtgtggggtgcccatgatattactctgcaagtgacattgccttctagggctttaatctcccagaaagccagagatggaatatctcagtgcttctgagcctttattttcagccctacccgcaacagcattctgcagcttgatctataatggggtgcaccacaccctctcagcctggtcagggatgggggccaaggactccctgtacctgtctcatctggagacgaaactcacctgggactaaccaaaaagaattagaagaaaaagcgaagtctcattacaaaaacacagaggattttagcccagtataactctagaagaaatggaatcctattaaggaaggaagtttggggcaaagcaccaggaaatccctcaaccggaagtgttgctagattgaggaagtgtcctaaaggaagtgggagacagctgtgggcactgtgtgcccagccccggccttcccagcagagtctgtgtgcatcgtgtcccaagtaaaaacaattcagttaccagaatggggtagttccttcacttgctaaaataaatgggtgtgtgggtgtgtgtgtgtgtgggtgtgtgtgtgtgtgtgtgtgtgtagtggctcttcatttgtttctccttcctaccactgttctcagccatttgaggagtggaaggtcgtggactggggaaagggccttccactctggctctctggttttccgtgttgttgggaacagtacgtcccaggctgtttgctttaaccagcgtgccttttatcactgcagattgttcccgctgggatcctctagatcac

SEQ ID NO: 287110 - DNA, 3272 bp, Homo sapiens
agcggggggtgggacggggcgcgctgaggaggcggtgcgctcaggcggcgctcccggagatgccccgcggcagccgcgctcggggctctaagagaaaaaggagttggaatacagaatgcccatcctttccaggagaaagaccactgcaggtcagaagagcaggtctcaggacagcaggggcagctgcctctctctctgaagcatggctcaggtgtggagaagggtttcagaacacttctgggaatccgtcattaacagctgaagagaagacgattacagaaaagcaccttgaattatgccctagacccaagcaagaaaccaccacatctaaaagcaccagtgggcttacagacataacatggagctccagtggaagtgatttgtcggatgaagataagacactttctcagttacagagagatgaattacagtttatcgactgggagattgacagtgacagggcagaggctagtgactgtgatgaatttgaagatgacgagggtgctgtggaaatctcagactgtgcttcttgtgcaagtaatcagtctttgacaagtgatgagaagctgtcggagcttcccaagccaagttctatagaaattttagagtattcatcagatagtgaaaaagaagatgatttggaaaatgtcctactcattgattcagaatcccctcacaaataccacgtgcagtttgcatcggatgcaagacagattatggagagactgatagatccaaggacaaaatcaacagagaccattttgcatacacctcagaaacccacagctaagtttcccaggactccagaaaattcagcaaagaagaagcttttaagaggtggactagcagaaagactaaatggactgcagaatcgagagagatctgctatttctttgtggagacatcaatgtatttcttaccaaaagacactttcaggtagaaaatctggtgtattaactgtgaaaattttagagctgcatgaggaatgtgccatgcaagttgccatgtgtgagcagttattggggtcaccagccaccagctcctcccaaagtgtggctcccaggcctggagctggcctgaaagttctcttcaccaaggagactgcaggctacctcaggggccgtccccaggacactgtccggatcttccctccctggcaaaaactgattattccaagtggaagttgccctgttattctgaatacttacttttgtgagaaagttgttgccaaagaagattcagaaaaaacttgtgaagtgtactgtccggacataccccttccaagaagaagcatctctttggcccagatgtttgtaattaagggtctaacaaataattcacctgaaatccaggttgtgtgtagtggtgtagccactacagggacagcctggacccatgggcacaaagaagcaaaacagcgcatcccaaccagcactcccctgagggattctctcctggatgtggtggaaagccagggagctgcctcgtggccaggagctggagtccgagtggtggtgcaaagagtgtattctcttcccagcagagacagcaccaggggtcagcagggggccagctcaggacacacagacccagctggaactcgagcctgccttctggtacaagatgcctgtggaatgttcggtgaagtgcacttggagttcaccatgtcgaaggcaagacagttggaagggaagtcttgcagcctggtgggaatgaaggttctacagaaagtcaccagaggaaggacagcggggattttcagtttgattgacaccctgtggcccccagcgatacctctgaaaacacctggccgcgaccagccctgtgaagagataaaaactcatctgcctcctccagccttgtgttacatcctcacagctcatccaaatctgggacaaattgatataattgacgaagaccccatttataagctttaccagcctccagttacccgctgcttaagagacattctccagatgaatgatcttggtacccgttgcagtttctatgccacggtgatttaccaaaaaccacagctgaagagtctgctgcttctggagcaaagggagatctggctgctagtgaccgatgtcactctgcaaacgaaggaggagagagaccccaggctccccaaaaccctgctggtctatgtggcccccttgtgtgtgctgggctctgaagtcctggaggcactcgctggggctgcccctcacagcctcttcttcaaggacgctctccgtgaccagggtcggattgtttgtgctgaacgaactgtcctcttgcttcagaagccccttttgagtgtggtctctggtgcaagttcctgtgagctgcctggcccggtgatgctcgacagcctggactctgcaacacctgtcaactccatctgcagtgttcaaggcactgtggttggcgtggacgagagcactgctttctcatggcctgtgtgtgacatgtgtggcaacgggagattggaacagaggccggaagacagaggcgccttttcctgtggggactgctcccgggtggtcacatctcctgttctcaagaggcacctgcaggtcttcctggactgccgctcaagaccgcagtgcagagtgaaggtcaagctgttgcagcgcagcatttcctccctgctgaggtttgccgccggtgaagatgggagctacgaagtgaagagtgtcctcggaaaggaagtggggttgttaaattgttttgtccagtccgtaaccgcccacccgaccagctgcattggattggaggaaatcgagcttctgagtgcaggaggggcctctgcagaacactagcggttgccgcaggatctgtgaactttgcaatgtggctgcaagggtggtggtggtggtggtgatttggggtagttatttgttaactatggacacagtgaacgtagtttacgatcttgaaatgaaacttagatttttctggggaaatgttcagatacagttttgtgaactgtaaatcaaaatacctttttctacagtttatcttttattttctgcaaatttaggaacatatttactcgttttcacattgaatcttaagtttaagctcttcatttggtatttaggcaatatatgagaaaaaaattttttttgttcatttgtaattttaacaagttgaacattttaccatgattgaacatgtttttattacagtatttaacattcccccaaagaataccctgcaaagtgtaaacctttgtcccatactgtgatattactgttctgctacaataaatgtcaaacctaagc

SEQ ID NO: 287111 - DNA, 3247 bp, Homo sapiens
gccgcctactactactaaattcgcggccgcgtcgacgccccgcggcagccgcgctcggggctctaagagaaaaaggagttggaatacagaatgcccatcctttccaggagaaagaccactgcaggtcagaagagcaggtctcaggacagcaggggcagctgcctctctctctgaagcatggctcaggtgtggagaagggtttcagaacacttctgggaatccgtcattaacagctgaagagaagacgattacagaaaagcaccttgaattatgccctagacccaagcaagaaaccaccacatctaaaagcaccagtgggcttacagacataacatggagctccagtggaagtgatttgtcggatgaagataagacactttctcagttacagagagatgaattacagtttatcgactgggagattgacagtgacagggcagaggctagtgactgtgatgaatttgaagatgacgagggtgctgtggaaatctcagactgtgcttcttgtgcaagtaatcagtctttgacaagtgatgagaagctgtcggagcttcccaagccaagttctatagaaattttagagtattcatcagatagtgaaaaagaagatgatttggaaaatgtcctactcattgattcagaatcccctcacaaataccacgtgcagtttgcatcggatgcaagacagattatggagagactgatagatccaaggacaaaatcaacagagaccattttgcatacacctcagaaacccacagctaagtttcccaggactccagaaaattcagcaaagaagaagcttttaagaggtggactagcagaaagactaaatggactgcagaatcgagagagatctgctatttctttgtggagacatcaatgtatttcttaccaaaagacactttcaggtagaaaatctggtgtattaactgtgaaaattttagagctgcatgaggaatgtgccatgcaagttgccatgtgtgagcagttattggggtcaccagccaccagctcctcccaaagtgtggctcccaggcctggagctggcctgaaagttctcttcaccaaggagactgcaggctacctcaggggccgtccccaggacactgtccggatcttccctccctggcaaaaactgattattccaagtggaagttgccctgttattctgaatacttacttttgtgagaaagttgttgccaaagaagattcagaaaaaacttgtgaagtgtactgtccggacataccccttccaagaagaagcatctctttggcccagatgtttgtaattaagggtctaacaaataattcacctgaaatccaggttgtgtgtagtggtgtagccactacagggacagcctggacccatgggcacaaagaagcaaaacagcgcatcccaaccagcactcccctgagggattctctcctggatgtggtggaaagccagggagctgcctcgtggccaggagctggagtccgagtggtggtgcaaagagtgtattctcttcccagcagagacagcaccaggggtcagcagggggccagctcaggacacacagacccagctggaactcgagcctgccttctggtacaagatgcctgtggaatgttcggtgaagtgcacttggagttcaccatgtcgaaggcaagacagttggaagggaagtcttgcagcctggtgggaatgaaggttctacagaaagtcaccagaggaaggacagcggggattttcagtttgattgacaccctgtggcccccagcgatacctctgaaaacacctggccgcgaccagccctgtgaagagataaaaactcatctgcctcctccagccttgtgttacatcctcacagctcatccaaatctgggacaaattgatataattgacgaagaccccatttataagctttaccagcctccagttacccgctgcttaagagacattctccagatgaatgatcttggtacccgttgcagtttctatgccacggtgatttaccaaaaaccacagctgaagagtctgctgcttctggagcaaagggagatctggctgctagtgaccgatgtcactctgcaaacgaaggaggagagagaccccaggctccccaaaaccctgctggtctatgtggcccccttgtgtgtgctgggctctgaagtcctggaggcactcgctggggctgcccctcacagcctcttcttcaaggacgctctccgtgaccagggtcggattgtttgtgctgaacgaactgtcctcttgcttcagaagccccttttgagtgtggtctctggtgcaagttcctgtgagctgcctggcccggtgatgctcgacagcctggactctgcaacacctgtcaactccatctgcagtgttcaaggcactgtggttggcgtggacgagagcactgctttctcatggcctgtgtgtgacatgtgtggcaacgggagattggaacagaggccggaagacagaggcgccttttcctgtggggactgctcccgggtggtcacatctcctgttctcaagaggcacctgcaggtcttcctggactgccgctcaagaccgcagtgcagagtgaaggtcaagctgttgcagcgcagcatttcctccctgctgaggtttgccgccggtgaagatgggagctacgaagtgaagagtgtcctcggaaaggaagtggggttgttaaattgttttgtccagtccgtaaccgcccacccgaccagctgcattggattggaggaaatcgagcttctgagtgcaggaggggcctctgcagaacactagcggttgccgcaggatctgtgaactttgcaatgtggctgcaagggtggtggtggtggtggtgatttggggtagttatttgttaactatggacacagtgaacgtagtttacgatcttgaaatgaaacttagatttttctggggaaatgttcagatacagttttgtgaactgtaaatcaaaatacctttttctacagtttatcttttattttctgcaaatttaggaacatatttactcgttttcacattgaatcttaagtttaagctcttcatttggtatttaggcaatatatgagaaaaaaattttttttgttcatttgtaattttaacaagttgaacattttaccatgattgaacatgtttttattacagtatttaacattcccccaaagaataccctgcaaagtgtaaacctttgtcccatactgtgatattactgttctgctacaataaatgtcaaacctaagc

SEQ ID NO: 287112 - DNA, 3307 bp, Homo sapiens
agcggggggtgggacggggcgcgctgaggaggcggtgcgctcaggcggcgctcccggagatgccccgcggcagccgcgctcggggctctaagagaaaaaggagttggaatacagaatgcccatcctttccaggagaaagaccactgcaggtcagaagagcaggtctcaggacagcaggggcagctgcctctctctctgaagcatggctcaggtgtggagaagggtttcagaacacttctgggaatccgtcattaacagctgaagagaagacgattacagaaaagcaccttgaattatgccctagacccaagcaagaaaccaccacatctaaaagcaccagtgggcttacagacataacatggagctccagtggaagtgatttgtcggatgaagataagacactttctcagttacagagagatgaattacagtttatcgactgggagattgacagtgacagggcagaggctagtgactgtgatgaatttgaagatgacgagggtgctgtggaaatctcagactgtgcttcttgtgcaagtaatcagtctttgacaagtgatgagaagctgtcggagcttcccaagccaagttctatagaaattttagagtattcatcagatagtgaaaaagaagatgatttggaaaatgtcctactcattgattcagaatcccctcacaaataccacgtgcagtttgcatcggatgcaagacagattatggagagactgatagatccaaggacaaaatcaacagagaccattttgcatacacctcagaaacccacagctaagtttcccaggactccagaaaattcagcaaagaagaagcttttaagaggtggactagcagaaagactaaatggactgcagaatcgagagagatctgctatttctttgtggagacatcaatgtatttcttaccaaaagacactttcaggtagaaaatctggtgtattaactgtgaaaattttagagctgcatgaggaatgtgccatgcaagttgccatgtgtgagcagttattggggtcaccagccaccagctcctcccaaagtgtggctcccaggcctggagctggcctgaaagttctcttcaccaaggagactgcaggctacctcaggggccgtccccaggacactgtccggatcttccctccctggcaaaaagaattaatagaaaatggcagcccaagaggcaaaaactgattattccaagtggaagttgccctgttattctgaatacttacttttgtgagaaagttgttgccaaagaagattcagaaaaaacttgtgaagtgtactgtccggacataccccttccaagaagaagcatctctttggcccagatgtttgtaattaagggtctaacaaataattcacctgaaatccaggttgtgtgtagtggtgtagccactacagggacagcctggacccatgggcacaaagaagcaaaacagcgcatcccaaccagcactcccctgagggattctctcctggatgtggtggaaagccagggagctgcctcgtggccaggagctggagtccgagtggtggtgcaaagagtgtattctcttcccagcagagacagcaccaggggtcagcagggggccagctcaggacacacagacccagctggaactcgagcctgccttctggtacaagatgcctgtggaatgttcggtgaagtgcacttggagttcaccatgtcgaaggcaagacagttggaagggaagtcttgcagcctggtgggaatgaaggttctacagaaagtcaccagaggaaggacagcggggattttcagtttgattgacaccctgtggcccccagcgatacctctgaaaacacctggccgcgaccagccctgtgaagagataaaaactcatctgcctcctccagccttgtgttacatcctcacagctcatccaaatctgggacaaattgatataattgacgaagaccccatttataagctttaccagcctccagttacccgctgcttaagagacattctccagatgaatgatcttggtacccgttgcagtttctatgccacggtgatttaccaaaaaccacagctgaagagtctgctgcttctggagcaaagggagatctggctgctagtgaccgatgtcactctgcaaacgaaggaggagagagaccccaggctccccaaaaccctgctggtctatgtggcccccttgtgtgtgctgggctctgaagtcctggaggcactcgctggggctgcccctcacagcctcttcttcaaggacgctctccgtgaccagggtcggattgtttgtgctgaacgaactgtcctcttgcttcagaagccccttttgagtgtggtctctggtgcaagttcctgtgagctgcctggcccggtgatgctcgacagcctggactctgcaacacctgtcaactccatctgcagtgttcaaggcactgtggttggcgtggacgagagcactgctttctcatggcctgtgtgtgacatgtgtggcaacgggagattggaacagaggccggaagacagaggcgccttttcctgtggggactgctcccgggtggtcacatctcctgttctcaagaggcacctgcaggtcttcctggactgccgctcaagaccgcagtgcagagtgaaggtcaagctgttgcagcgcagcatttcctccctgctgaggtttgccgccggtgaagatgggagctacgaagtgaagagtgtcctcggaaaggaagtggggttgttaaattgttttgtccagtccgtaaccgcccacccgaccagctgcattggattggaggaaatcgagcttctgagtgcaggaggggcctctgcagaacactagcggttgccgcaggatctgtgaactttgcaatgtggctgcaagggtggtggtggtggtggtgatttggggtagttatttgttaactatggacacagtgaacgtagtttacgatcttgaaatgaaacttagatttttctggggaaatgttcagatacagttttgtgaactgtaaatcaaaatacctttttctacagtttatcttttattttctgcaaatttaggaacatatttactcgttttcacattgaatcttaagtttaagctcttcatttggtatttaggcaatatatgagaaaaaaattttttttgttcatttgtaattttaacaagttgaacattttaccatgattgaacatgtttttattacagtatttaacattcccccaaagaataccctgcaaagtgtaaacctttgtcccatactgtgatattactgttctgctacaataaatgtcaaacctaagc

SEQ ID NO: 287113 - DNA, 3386 bp, Homo sapiens
  misc_feature (103)..(103): n is a, c, g, or t
agcggggggtgggacggggcgcgctgaggaggcggtgcgctcaggcggcgctcccggagatgccccgcggcagccgcgctcggggctctaaggtattcagtanaagcagatgaacagccagatgaagagatggatagagcaagacatggacattataaaggaattcaatagaagcacatgaacggccagatgaagagatggatagaagaaaaaggagttggaatacagaatgcccatcctttccaggagaaagaccactgcaggtcagaagagcaggtctcaggacagcaggggcagctgcctctctctctgaagcatggctcaggtgtggagaagggtttcagaacacttctgggaatccgtcattaacagctgaagagaagacgattacagaaaagcaccttgaattatgccctagacccaagcaagaaaccaccacatctaaaagcaccagtgggcttacagacataacatggagctccagtggaagtgatttgtcggatgaagataagacactttctcagttacagagagatgaattacagtttatcgactgggagattgacagtgacagggcagaggctagtgactgtgatgaatttgaagatgacgagggtgctgtggaaatctcagactgtgcttcttgtgcaagtaatcagtctttgacaagtgatgagaagctgtcggagcttcccaagccaagttctatagaaattttagagtattcatcagatagtgaaaaagaagatgatttggaaaatgtcctactcattgattcagaatcccctcacaaataccacgtgcagtttgcatcggatgcaagacagattatggagagactgatagatccaaggacaaaatcaacagagaccattttgcatacacctcagaaacccacagctaagtttcccaggactccagaaaattcagcaaagaagaagcttttaagaggtggactagcagaaagactaaatggactgcagaatcgagagagatctgctatttctttgtggagacatcaatgtatttcttaccaaaagacactttcaggtagaaaatctggtgtattaactgtgaaaattttagagctgcatgaggaatgtgccatgcaagttgccatgtgtgagcagttattggggtcaccagccaccagctcctcccaaagtgtggctcccaggcctggagctggcctgaaagttctcttcaccaaggagactgcaggctacctcaggggccgtccccaggacactgtccggatcttccctccctggcaaaaactgattattccaagtggaagttgccctgttattctgaatacttacttttgtgagaaagttgttgccaaagaagattcagaaaaaacttgtgaagtgtactgtccggacataccccttccaagaagaagcatctctttggcccagatgtttgtaattaagggtctaacaaataattcacctgaaatccaggttgtgtgtagtggtgtagccactacagggacagcctggacccatgggcacaaagaagcaaaacagcgcatcccaaccagcactcccctgagggattctctcctggatgtggtggaaagccagggagctgcctcgtggccaggagctggagtccgagtggtggtgcaaagagtgtattctcttcccagcagagacagcaccaggggtcagcagggggccagctcaggacacacagacccagctggaactcgagcctgccttctggtacaagatgcctgtggaatgttcggtgaagtgcacttggagttcaccatgtcgaaggcaagacagttggaagggaagtcttgcagcctggtgggaatgaaggttctacagaaagtcaccagaggaaggacagcggggattttcagtttgattgacaccctgtggcccccagcgatacctctgaaaacacctggccgcgaccagccctgtgaagagataaaaactcatctgcctcctccagccttgtgttacatcctcacagctcatccaaatctgggacaaattgatataattgacgaagaccccatttataagctttaccagcctccagttacccgctgcttaagagacattctccagatgaatgatcttggtacccgttgcagtttctatgccacggtgatttaccaaaaaccacagctgaagagtctgctgcttctggagcaaagggagatctggctgctagtgaccgatgtcactctgcaaacgaaggaggagagagaccccaggctccccaaaaccctgctggtctatgtggcccccttgtgtgtgctgggctctgaagtcctggaggcactcgctggggctgcccctcacagcctcttcttcaaggacgctctccgtgaccagggtcggattgtttgtgctgaacgaactgtcctcttgcttcagaagccccttttgagtgtggtctctggtgcaagttcctgtgagctgcctggcccggtgatgctcgacagcctggactctgcaacacctgtcaactccatctgcagtgttcaaggcactgtggttggcgtggacgagagcactgctttctcatggcctgtgtgtgacatgtgtggcaacgggagattggaacagaggccggaagacagaggcgccttttcctgtggggactgctcccgggtggtcacatctcctgttctcaagaggcacctgcaggtcttcctggactgccgctcaagaccgcagtgcagagtgaaggtcaagctgttgcagcgcagcatttcctccctgctgaggtttgccgccggtgaagatgggagctacgaagtgaagagtgtcctcggaaaggaagtggggttgttaaattgttttgtccagtccgtaaccgcccacccgaccagctgcattggattggaggaaatcgagcttctgagtgcaggaggggcctctgcagaacactagcggttgccgcaggatctgtgaactttgcaatgtggctgcaagggtggtggtggtggtggtgatttggggtagttatttgttaactatggacacagtgaacgtagtttacgatcttgaaatgaaacttagatttttctggggaaatgttcagatacagttttgtgaactgtaaatcaaaatacctttttctacagtttatcttttattttctgcaaatttaggaacatatttactcgttttcacattgaatcttaagtttaagctcttcatttggtatttaggcaatatatgagaaaaaaattttttttgttcatttgtaattttaacaagttgaacattttaccatgattgaacatgtttttattacagtatttaacattcccccaaagaataccctgcaaagtgtaaacctttgtcccatactgtgatattactgttctgctacaataaatgtcaaacctaagc

SEQ ID NO: 287114 - DNA, 3108 bp, Homo sapiens
agcggggggtgggacggggcgcgctgaggaggcggtgcgctcaggcggcgctcccggagatgccccgcggcagccgcgctcggggctctaagagaaaaaggagttggaatacagaatgcccatcctttccaggagaaagaccactgcaggtcagaagagcaggtctcaggacagcaggggcagctgcctctctctctgaagcatggctcaggtgtggagaagggtttcagaacacttctgggaatccgtcattaacagctgaagagaagacgattacagaaaagcaccttgaattatgccctagacccaagcaagaaaccaccacatctaaaagcaccagtgggcttacagacataacatggagctccagtggaagtgatttgtcggatgaagataagacactttctcagttacagagagccaagttctatagaaattttagagtattcatcagatagtgaaaaagaagatgatttggaaaatgtcctactcattgattcagaatcccctcacaaataccacgtgcagtttgcatcggatgcaagacagattatggagagactgatagatccaaggacaaaatcaacagagaccattttgcatacacctcagaaacccacagctaagtttcccaggactccagaaaattcagcaaagaagaagcttttaagaggtggactagcagaaagactaaatggactgcagaatcgagagagatctgctatttctttgtggagacatcaatgtatttcttaccaaaagacactttcaggtagaaaatctggtgtattaactgtgaaaattttagagctgcatgaggaatgtgccatgcaagttgccatgtgtgagcagttattggggtcaccagccaccagctcctcccaaagtgtggctcccaggcctggagctggcctgaaagttctcttcaccaaggagactgcaggctacctcaggggccgtccccaggacactgtccggatcttccctccctggcaaaaactgattattccaagtggaagttgccctgttattctgaatacttacttttgtgagaaagttgttgccaaagaagattcagaaaaaacttgtgaagtgtactgtccggacataccccttccaagaagaagcatctctttggcccagatgtttgtaattaagggtctaacaaataattcacctgaaatccaggttgtgtgtagtggtgtagccactacagggacagcctggacccatgggcacaaagaagcaaaacagcgcatcccaaccagcactcccctgagggattctctcctggatgtggtggaaagccagggagctgcctcgtggccaggagctggagtccgagtggtggtgcaaagagtgtattctcttcccagcagagacagcaccaggggtcagcagggggccagctcaggacacacagacccagctggaactcgagcctgccttctggtacaagatgcctgtggaatgttcggtgaagtgcacttggagttcaccatgtcgaaggcaagacagttggaagggaagtcttgcagcctggtgggaatgaaggttctacagaaagtcaccagaggaaggacagcggggattttcagtttgattgacaccctgtggcccccagcgatacctctgaaaacacctggccgcgaccagccctgtgaagagataaaaactcatctgcctcctccagccttgtgttacatcctcacagctcatccaaatctgggacaaattgatataattgacgaagaccccatttataagctttaccagcctccagttacccgctgcttaagagacattctccagatgaatgatcttggtacccgttgcagtttctatgccacggtgatttaccaaaaaccacagctgaagagtctgctgcttctggagcaaagggagatctggctgctagtgaccgatgtcactctgcaaacgaaggaggagagagaccccaggctccccaaaaccctgctggtctatgtggcccccttgtgtgtgctgggctctgaagtcctggaggcactcgctggggctgcccctcacagcctcttcttcaaggacgctctccgtgaccagggtcggattgtttgtgctgaacgaactgtcctcttgcttcagaagccccttttgagtgtggtctctggtgcaagttcctgtgagctgcctggcccggtgatgctcgacagcctggactctgcaacacctgtcaactccatctgcagtgttcaaggcactgtggttggcgtggacgagagcactgctttctcatggcctgtgtgtgacatgtgtggcaacgggagattggaacagaggccggaagacagaggcgccttttcctgtggggactgctcccgggtggtcacatctcctgttctcaagaggcacctgcaggtcttcctggactgccgctcaagaccgcagtgcagagtgaaggtcaagctgttgcagcgcagcatttcctccctgctgaggtttgccgccggtgaagatgggagctacgaagtgaagagtgtcctcggaaaggaagtggggttgttaaattgttttgtccagtccgtaaccgcccacccgaccagctgcattggattggaggaaatcgagcttctgagtgcaggaggggcctctgcagaacactagcggttgccgcaggatctgtgaactttgcaatgtggctgcaagggtggtggtggtggtggtgatttggggtagttatttgttaactatggacacagtgaacgtagtttacgatcttgaaatgaaacttagatttttctggggaaatgttcagatacagttttgtgaactgtaaatcaaaatacctttttctacagtttatcttttattttctgcaaatttaggaacatatttactcgttttcacattgaatcttaagtttaagctcttcatttggtatttaggcaatatatgagaaaaaaattttttttgttcatttgtaattttaacaagttgaacattttaccatgattgaacatgtttttattacagtatttaacattcccccaaagaataccctgcaaagtgtaaacctttgtcccatactgtgatattactgttctgctacaataaatgtcaaacctaagc

SEQ ID NO: 287115 - DNA, 3233 bp, Homo sapiens
agcggggggtgggacggggcgcgctgaggaggcggtgcgctcaggcggcgctcccggagatgccccgcggcagccgcgctcggggctctaagagaaaaaggagttggaatacagaatgcccatcctttccaggagaaagaccactgcaggtcagaagagcaggtctcaggacagcaggggcagctgcctctctctctgaagcatggctctcattaacagctgaagagaagacgattacagaaaagcaccttgaattatgccctagacccaagcaagaaaccaccacatctaaaagcaccagtgggcttacagacataacatggagctccagtggaagtgatttgtcggatgaagataagacactttctcagttacagagagatgaattacagtttatcgactgggagattgacagtgacagggcagaggctagtgactgtgatgaatttgaagatgacgagggtgctgtggaaatctcagactgtgcttcttgtgcaagtaatcagtctttgacaagtgatgagaagctgtcggagcttcccaagccaagttctatagaaattttagagtattcatcagatagtgaaaaagaagatgatttggaaaatgtcctactcattgattcagaatcccctcacaaataccacgtgcagtttgcatcggatgcaagacagattatggagagactgatagatccaaggacaaaatcaacagagaccattttgcatacacctcagaaacccacagctaagtttcccaggactccagaaaattcagcaaagaagaagcttttaagaggtggactagcagaaagactaaatggactgcagaatcgagagagatctgctatttctttgtggagacatcaatgtatttcttaccaaaagacactttcaggtagaaaatctggtgtattaactgtgaaaattttagagctgcatgaggaatgtgccatgcaagttgccatgtgtgagcagttattggggtcaccagccaccagctcctcccaaagtgtggctcccaggcctggagctggcctgaaagttctcttcaccaaggagactgcaggctacctcaggggccgtccccaggacactgtccggatcttccctccctggcaaaaactgattattccaagtggaagttgccctgttattctgaatacttacttttgtgagaaagttgttgccaaagaagattcagaaaaaacttgtgaagtgtactgtccggacataccccttccaagaagaagcatctctttggcccagatgtttgtaattaagggtctaacaaataattcacctgaaatccaggttgtgtgtagtggtgtagccactacagggacagcctggacccatgggcacaaagaagcaaaacagcgcatcccaaccagcactcccctgagggattctctcctggatgtggtggaaagccagggagctgcctcgtggccaggagctggagtccgagtggtggtgcaaagagtgtattctcttcccagcagagacagcaccaggggtcagcagggggccagctcaggacacacagacccagctggaactcgagcctgccttctggtacaagatgcctgtggaatgttcggtgaagtgcacttggagttcaccatgtcgaaggcaagacagttggaagggaagtcttgcagcctggtgggaatgaaggttctacagaaagtcaccagaggaaggacagcggggattttcagtttgattgacaccctgtggcccccagcgatacctctgaaaacacctggccgcgaccagccctgtgaagagataaaaactcatctgcctcctccagccttgtgttacatcctcacagctcatccaaatctgggacaaattgatataattgacgaagaccccatttataagctttaccagcctccagttacccgctgcttaagagacattctccagatgaatgatcttggtacccgttgcagtttctatgccacggtgatttaccaaaaaccacagctgaagagtctgctgcttctggagcaaagggagatctggctgctagtgaccgatgtcactctgcaaacgaaggaggagagagaccccaggctccccaaaaccctgctggtctatgtggcccccttgtgtgtgctgggctctgaagtcctggaggcactcgctggggctgcccctcacagcctcttcttcaaggacgctctccgtgaccagggtcggattgtttgtgctgaacgaactgtcctcttgcttcagaagccccttttgagtgtggtctctggtgcaagttcctgtgagctgcctggcccggtgatgctcgacagcctggactctgcaacacctgtcaactccatctgcagtgttcaaggcactgtggttggcgtggacgagagcactgctttctcatggcctgtgtgtgacatgtgtggcaacgggagattggaacagaggccggaagacagaggcgccttttcctgtggggactgctcccgggtggtcacatctcctgttctcaagaggcacctgcaggtcttcctggactgccgctcaagaccgcagtgcagagtgaaggtcaagctgttgcagcgcagcatttcctccctgctgaggtttgccgccggtgaagatgggagctacgaagtgaagagtgtcctcggaaaggaagtggggttgttaaattgttttgtccagtccgtaaccgcccacccgaccagctgcattggattggaggaaatcgagcttctgagtgcaggaggggcctctgcagaacactagcggttgccgcaggatctgtgaactttgcaatgtggctgcaagggtggtggtggtggtggtgatttggggtagttatttgttaactatggacacagtgaacgtagtttacgatcttgaaatgaaacttagatttttctggggaaatgttcagatacagttttgtgaactgtaaatcaaaatacctttttctacagtttatcttttattttctgcaaatttaggaacatatttactcgttttcacattgaatcttaagtttaagctcttcatttggtatttaggcaatatatgagaaaaaaattttttttgttcatttgtaattttaacaagttgaacattttaccatgattgaacatgtttttattacagtatttaacattcccccaaagaataccctgcaaagtgtaaacctttgtcccatactgtgatattactgttctgctacaataaatgtcaaacctaagc

SEQ ID NO: 287116 - DNA, 2741 bp, Homo sapiens
ggatatcgacgtcgtgatccagaagtccagagctgaggactgcctgtttgcagccaagttctatagaaattttagagtattcatcagatagtgaaaaagaagatgatttggaaaatgtcctactcattgattcagaatcccctcacaaataccacgtgcagtttgcatcggatgcaagacagattatggagagactgatagatccaaggacaaaatcaacagagaccattttgcatacacctcagaaacccacagctaagtttcccaggactccagaaaattcagcaaagaagaagcttttaagaggtggactagcagaaagactaaatggactgcagaatcgagagagatctgctatttctttgtggagacatcaatgtatttcttaccaaaagacactttcaggtagaaaatctggtgtattaactgtgaaaattttagagctgcatgaggaatgtgccatgcaagttgccatgtgtgagcagttattggggtcaccagccaccagctcctcccaaagtgtggctcccaggcctggagctggcctgaaagttctcttcaccaaggagactgcaggctacctcaggggccgtccccaggacactgtccggatcttccctccctggcaaaaactgattattccaagtggaagttgccctgttattctgaatacttacttttgtgagaaagttgttgccaaagaagattcagaaaaaacttgtgaagtgtactgtccggacataccccttccaagaagaagcatctctttggcccagatgtttgtaattaagggtctaacaaataattcacctgaaatccaggttgtgtgtagtggtgtagccactacagggacagcctggacccatgggcacaaagaagcaaaacagcgcatcccaaccagcactcccctgagggattctctcctggatgtggtggaaagccagggagctgcctcgtggccaggagctggagtccgagtggtggtgcaaagagtgtattctcttcccagcagagacagcaccaggggtcagcagggggccagctcaggacacacagacccagctggaactcgagcctgccttctggtacaagatgcctgtggaatgttcggtgaagtgcacttggagttcaccatgtcgaaggcaagacagttggaagggaagtcttgcagcctggtgggaatgaaggttctacagaaagtcaccagaggaaggacagcggggattttcagtttgattgacaccctgtggcccccagcgatacctctgaaaacacctggccgcgaccagccctgtgaagagataaaaactcatctgcctcctccagccttgtgttacatcctcacagctcatccaaatctgggacaaattgatataattgacgaagaccccatttataagctttaccagcctccagttacccgctgcttaagagacattctccagatgaatgatcttggtacccgttgcagtttctatgccacggtgatttaccaaaaaccacagctgaagagtctgctgcttctggagcaaagggagatctggctgctagtgaccgatgtcactctgcaaacgaaggaggagagagaccccaggctccccaaaaccctgctggtctatgtggcccccttgtgtgtgctgggctctgaagtcctggaggcactcgctggggctgcccctcacagcctcttcttcaaggacgctctccgtgaccagggtcggattgtttgtgctgaacgaactgtcctcttgcttcagaagccccttttgagtgtggtctctggtgcaagttcctgtgagctgcctggcccggtgatgctcgacagcctggactctgcaacacctgtcaactccatctgcagtgttcaaggcactgtggttggcgtggacgagagcactgctttctcatggcctgtgtgtgacatgtgtggcaacgggagattggaacagaggccggaagacagaggcgccttttcctgtggggactgctcccgggtggtcacatctcctgttctcaagaggcacctgcaggtcttcctggactgccgctcaagaccgcagtgcagagtgaaggtcaagctgttgcagcgcagcatttcctccctgctgaggtttgccgccggtgaagatgggagctacgaagtgaagagtgtcctcggaaaggaagtggggttgttaaattgttttgtccagtccgtaaccgcccacccgaccagctgcattggattggaggaaatcgagcttctgagtgcaggaggggcctctgcagaacactagcggttgccgcaggatctgtgaactttgcaatgtggctgcaagggtggtggtggtggtggtgatttggggtagttatttgttaactatggacacagtgaacgtagtttacgatcttgaaatgaaacttagatttttctggggaaatgttcagatacagttttgtgaactgtaaatcaaaatacctttttctacagtttatcttttattttctgcaaatttaggaacatatttactcgttttcacattgaatcttaagtttaagctcttcatttggtatttaggcaatatatgagaaaaaaattttttttgttcatttgtaattttaacaagttgaacattttaccatgattgaacatgtttttattacagtatttaacattcccccaaagaataccctgcaaagtgtaaacctttgtcccatactgtgatattactgttctgctacaataaatgtcaaacctaagc

SEQ ID NO: 287117 - DNA, 2895 bp, Homo sapiens
gccgcctactactactaaattcgcggccgcgtcgacgccccgcggcagccgcgctcggggctctaagagaaaaaggagttggaatacagaatgcccatcctttccaggagaaagaccactgcaggtcagaagagcaggtctcaggacagcaggggcagctgcctctctctctgaagcatggctcaggtgtggagaagggtttcagaacacttctgggaatccgtcattaacagctgaagagaagacgattacagaaaagcaccttgaattatgccctagacccaagcaagaaaccaccacatctaaaagcaccagtgggcttacagacataacatggagctccagtggaagtgatttgtcggatgaagataagacactttctcagttacagagagatgaattacagtttatcgactgggagattgacagtgacagggcagaggctagtgactgtgatgaatttgaagatgacgagggtgctgtggaaatctcagactgtgcttcttgtgcaagtaatcagtctttgacaagtgatgagaagctgtcggagcttcccaaggtagaaaatctggtgtattaactgtgaaaattttagagctgcatgaggaatgtgccatgcaagttgccatgtgtgagcagttattggggtcaccagccaccagctcctcccaaagtgtggctcccaggcctggagctggcctgaaagttctcttcaccaaggagactgcaggctacctcaggggccgtccccaggacactgtccggatcttccctccctggcaaaaactgattattccaagtggaagttgccctgttattctgaatacttacttttgtgagaaagttgttgccaaagaagattcagaaaaaacttgtgaagtgtactgtccggacataccccttccaagaagaagcatctctttggcccagatgtttgtaattaagggtctaacaaataattcacctgaaatccaggttgtgtgtagtggtgtagccactacagggacagcctggacccatgggcacaaagaagcaaaacagcgcatcccaaccagcactcccctgagggattctctcctggatgtggtggaaagccagggagctgcctcgtggccaggagctggagtccgagtggtggtgcaaagagtgtattctcttcccagcagagacagcaccaggggtcagcagggggccagctcaggacacacagacccagctggaactcgagcctgccttctggtacaagatgcctgtggaatgttcggtgaagtgcacttggagttcaccatgtcgaaggcaagacagttggaagggaagtcttgcagcctggtgggaatgaaggttctacagaaagtcaccagaggaaggacagcggggattttcagtttgattgacaccctgtggcccccagcgatacctctgaaaacacctggccgcgaccagccctgtgaagagataaaaactcatctgcctcctccagccttgtgttacatcctcacagctcatccaaatctgggacaaattgatataattgacgaagaccccatttataagctttaccagcctccagttacccgctgcttaagagacattctccagatgaatgatcttggtacccgttgcagtttctatgccacggtgatttaccaaaaaccacagctgaagagtctgctgcttctggagcaaagggagatctggctgctagtgaccgatgtcactctgcaaacgaaggaggagagagaccccaggctccccaaaaccctgctggtctatgtggcccccttgtgtgtgctgggctctgaagtcctggaggcactcgctggggctgcccctcacagcctcttcttcaaggacgctctccgtgaccagggtcggattgtttgtgctgaacgaactgtcctcttgcttcagaagccccttttgagtgtggtctctggtgcaagttcctgtgagctgcctggcccggtgatgctcgacagcctggactctgcaacacctgtcaactccatctgcagtgttcaaggcactgtggttggcgtggacgagagcactgctttctcatggcctgtgtgtgacatgtgtggcaacgggagattggaacagaggccggaagacagaggcgccttttcctgtggggactgctcccgggtggtcacatctcctgttctcaagaggcacctgcaggtcttcctggactgccgctcaagaccgcagtgcagagtgaaggtcaagctgttgcagcgcagcatttcctccctgctgaggtttgccgccggtgaagatgggagctacgaagtgaagagtgtcctcggaaaggaagtggggttgttaaattgttttgtccagtccgtaaccgcccacccgaccagctgcattggattggaggaaatcgagcttctgagtgcaggaggggcctctgcagaacactagcggttgccgcaggatctgtgaactttgcaatgtggctgcaagggtggtggtggtggtggtgatttggggtagttatttgttaactatggacacagtgaacgtagtttacgatcttgaaatgaaacttagatttttctggggaaatgttcagatacagttttgtgaactgtaaatcaaaatacctttttctacagtttatcttttattttctgcaaatttaggaacatatttactcgttttcacattgaatcttaagtttaagctcttcatttggtatttaggcaatatatgagaaaaaaattttttttgttcatttgtaattttaacaagttgaacattttaccatgattgaacatgtttttattacagtatttaacattcccccaaagaataccctgcaaagtgtaaacctttgtcccatactgtgatattactgttctgctacaataaatgtcaaacctaagc

SEQ ID NO: 287118 - DNA, 3337 bp, Homo sapiens
agcggggggtgggacggggcgcgctgaggaggcggtgcgctcaggcggcgctcccggagatgccccgcggcagccgcgctcggggctctaagagaaaaaggagttggaatacagaatgcccatcctttccaggagaaagaccactgcaggtcagaagagcaggtctcaggacagcaggggcagctgcctctctctctgaagcatggctcaggtgtggagaagggtttcagaacacttctgggaatccgtcattaacagctgaagagaagacgattacagaaaagcaccttgaattatgccctagacccaagcaagaaaccaccacatctaaaagcaccagtgggcttacagacataacatggagctccagtggaagtgatttgtcggatgaagataagacactttctcagttacagagagatgaattacagtttatcgactgggagattgacagtgacagggcagaggctagtgactgtgatgaatttgaagatgacgagggtgctgtggaaatctcagactgtgcttcttgtgcaagtaatcagtctttgacaagtgatgagaagctgtcggagcttcccaagccaagttctatagaaattttagagtattcatcagatagtgaaaaagaagatgatttggaaaatgtcctactcattgattcagaatcccctcacaaataccacgtgcagtttgcatcggatgcaagacagattatggagagactgatagatccaaggacaaaatcaacagagaccattttgcatacacctcagaaacccacagctaagtttcccaggactccagaaaattcagcaaagaagaagcttttaagaggtggactagcagaaagactaaatggactgcagaatcgagagagatctgctatttctttgtggagacatcaatgtatttcttaccaaaagacactttcaggtagaaaatctggtgtattaactgtgaaaattttagagctgcatgaggaatgtgccatgcaagttgccatgtgtgagcagttattggggtcaccagccaccagctcctcccaaagtgtggctcccaggcctggagctggcctgaaagttctcttcaccaaggagactgcaggctacctcaggggccgtccccaggacactgtccggatcttccctccctggcaaaaactgattattccaagtggaagttgccctgttattctgaatacttacttttgtgagaaagttgttgccaaagaagattcagaaaaaacttgtgaagtgtactgtccggacataccccttccaagaagaagcatctctttggcccagatgtttgtaattaagggtctaacaaataattcacctgaaatccaggttgtgtgtagtggtgtagccactacagggacagcctggacccatgggcacaaagaagcaaaacagcgcatcccaaccagcactcccctgagggattctctcctggatgtggtggaaagccagggagctgcctcgtggccaggagctggagtccgagtggtggtgcaaagagtgtattctcttcccagcagagacagcaccaggggtcagcagggggccagctcaggacacacagacccagctggaactcgagcctgccttctggtacaagatgcctgtggaatgttcggtgaagtgcacttggagttcaccatgtcgaaggcaagacagttggaagggaagtcttgcagcctggtgggaatgaaggttctacagaaagtcaccagaggaaggacagcggggattttcagtttgattgacaccctgtggcccccagcgatacctctgaaaacacctggccgcgaccagccctgtgaagagataaaaactcatctgcctcctccagccttgtgttacatcctcacagctcatccaaatctgggacaaattgatataattgacgaagaccccatttataagctttaccagcctccagttacccgctgcttaagagacattctccagatgaatgatcttggtacccgttgcagtttctatgccacggtgatttaccaaaaaccacagctgaagagtctgctgcttctggagcaaagggagatctggctgctagtgaccgatgtcactctgcaaacgaaggaggagagagaccccaggctccccaaaaccctgctggtctatgtggcccccttgtgtgtgctgggctctgaagtcctggaggcactcgctggggctgcccctcacagcctcttcttcaaggacgctctccgtgaccagggtcggattgtttgtgctgaacgaactgtcctcttgcttcagaagccccttttgagtgtggtctctggtgcaagttcctgtgagctgcctggcccggtgatgctcgacagcctggactctgcaacacctgtcaactccatctgcagtgttcaaggcactgtggttggcgtggacgagagcactgctttctcatggcctgtgtgtgacatgtgtggcaacgggagattggaacagaggccggaagacagaggcgccttttcctgtggggactgctcccgggtggtcacatctcctgttctcaagaggcacctgcaggtcttcctggactgccgctcaagaccgcagtgcagagtgaaggtcaagctgttgcagcgcagcatttcctccctgctgaggtttgccgccggtgaagatgggagatccagagaccaggaaccctggcagaaatcctccttccttcacttggtttccttctggctaagagctacgaagtgaagagtgtcctcggaaaggaagtggggttgttaaattgttttgtccagtccgtaaccgcccacccgaccagctgcattggattggaggaaatcgagcttctgagtgcaggaggggcctctgcagaacactagcggttgccgcaggatctgtgaactttgcaatgtggctgcaagggtggtggtggtggtggtgatttggggtagttatttgttaactatggacacagtgaacgtagtttacgatcttgaaatgaaacttagatttttctggggaaatgttcagatacagttttgtgaactgtaaatcaaaatacctttttctacagtttatcttttattttctgcaaatttaggaacatatttactcgttttcacattgaatcttaagtttaagctcttcatttggtatttaggcaatatatgagaaaaaaattttttttgttcatttgtaattttaacaagttgaacattttaccatgattgaacatgtttttattacagtatttaacattcccccaaagaataccctgcaaagtgtaaacctttgtcccatactgtgatattactgttctgctacaataaatgtcaaacctaagc

SEQ ID NO: 287119 - DNA, 2717 bp, Homo sapiens
agcggggggtgggacggggcgcgctgaggaggcggtgcgctcaggcggcgctcccggagatgccccgcggcagccgcgctcggggctctaagagaaaaaggagttggaatacagaatgcccatcctttccaggagaaagaccactgcaggtcagaagagcaggtctcaggacagcaggggcagctgcctctctctctgaagcatggctctcattaacagctgaagagaagacgattacagaaaagcaccttgaattatgccctagacccaagcaagaaaccaccacatctaaaagcaccagtgggcttacagacataacatggagctccagtggaagtgatttgtcggatgaagataagacactttctcagttacagagaggtagaaaatctggtgtattaactgtgaaaattttagagctgcatgaggaatgtgccatgcaagttgccatgtgtgagcagttattggggtcaccagccaccagctcctcccaaagtgtggctcccaggcctggagctggcctgaaagttctcttcaccaaggagactgcaggctacctcaggggccgtccccaggacactgtccggatcttccctccctggcaaaaactgattattccaagtggaagttgccctgttattctgaatacttacttttgtgagaaagttgttgccaaagaagattcagaaaaaacttgtgaagtgtactgtccggacataccccttccaagaagaagcatctctttggcccagatgtttgtaattaagggtctaacaaataattcacctgaaatccaggttgtgtgtagtggtgtagccactacagggacagcctggacccatgggcacaaagaagcaaaacagcgcatcccaaccagcactcccctgagggattctctcctggatgtggtggaaagccagggagctgcctcgtggccaggagctggagtccgagtggtggtgcaaagagtgtattctcttcccagcagagacagcaccaggggtcagcagggggccagctcaggacacacagacccagctggaactcgagcctgccttctggtacaagatgcctgtggaatgttcggtgaagtgcacttggagttcaccatgtcgaaggcaagacagttggaagggaagtcttgcagcctggtgggaatgaaggttctacagaaagtcaccagaggaaggacagcggggattttcagtttgattgacaccctgtggcccccagcgatacctctgaaaacacctggccgcgaccagccctgtgaagagataaaaactcatctgcctcctccagccttgtgttacatcctcacagctcatccaaatctgggacaaattgatataattgacgaagaccccatttataagctttaccagcctccagttacccgctgcttaagagacattctccagatgaatgatcttggtacccgttgcagtttctatgccacggtgatttaccaaaaaccacagctgaagagtctgctgcttctggagcaaagggagatctggctgctagtgaccgatgtcactctgcaaacgaaggaggagagagaccccaggctccccaaaaccctgctggtctatgtggcccccttgtgtgtgctgggctctgaagtcctggaggcactcgctggggctgcccctcacagcctcttcttcaaggacgctctccgtgaccagggtcggattgtttgtgctgaacgaactgtcctcttgcttcagaagccccttttgagtgtggtctctggtgcaagttcctgtgagctgcctggcccggtgatgctcgacagcctggactctgcaacacctgtcaactccatctgcagtgttcaaggcactgtggttggcgtggacgagagcactgctttctcatggcctgtgtgtgacatgtgtggcaacgggagattggaacagaggccggaagacagaggcgccttttcctgtggggactgctcccgggtggtcacatctcctgttctcaagaggcacctgcaggtcttcctggactgccgctcaagaccgcagtgcagagtgaaggtcaagctgttgcagcgcagcatttcctccctgctgaggtttgccgccggtgaagatgggagctacgaagtgaagagtgtcctcggaaaggaagtggggttgttaaattgttttgtccagtccgtaaccgcccacccgaccagctgcattggattggaggaaatcgagcttctgagtgcaggaggggcctctgcagaacactagcggttgccgcaggatctgtgaactttgcaatgtggctgcaagggtggtggtggtggtggtgatttggggtagttatttgttaactatggacacagtgaacgtagtttacgatcttgaaatgaaacttagatttttctggggaaatgttcagatacagttttgtgaactgtaaatcaaaatacctttttctacagtttatcttttattttctgcaaatttaggaacatatttactcgttttcacattgaatcttaagtttaagctcttcatttggtatttaggcaatatatgagaaaaaaattttttttgttcatttgtaattttaacaagttgaacattttaccatgattgaacatgtttttattacagtatttaacattcccccaaagaataccctgcaaagtgtaaacctttgtcccatactgtgatattactgttctgctacaataaatgtcaaacctaagc

SEQ ID NO: 287120 - DNA, 4682 bp, Homo sapiens
agcggggggtgggacggggcgcgctgaggaggcggtgcgctcaggcggcgctcccggagatgccccgcggcagccgcgctcggggctctaagagaaaaaggagttggaatacagaatgcccatcctttccaggagaaagaccactgcaggtcagaagagcaggtctcaggacagcaggggcagctgcctctctctctgaagcatggctcaggtgtggagaagggtttcagaacacttctgggaatccgtcattaacagctgaagagaagacgattacagaaaagcaccttgaattatgccctagacccaagcaagaaaccaccacatctaaaagcaccagtgggcttacagacataacatggagctccagtggaagtgatttgtcggatgaagataagacactttctcagttacagagagatgaattacagtttatcgactgggagattgacagtgacagggcagaggctagtgactgtgatgaatttgaagatgacgagggtgctgtggaaatctcagactgtgcttcttgtgcaagtaatcagtctttgacaagtgatgagaagctgtcggagcttcccaagccaagttctatagaaattttagagtattcatcagatagtgaaaaagaagatgatttggaaaatgtcctactcattgattcagaatcccctcacaaataccacgtgcagtttgcatcggatgcaagacagattatggagagactgatagatccaaggacaaaatcaacagagaccattttgcatacacctcagaaacccacagctaagtttcccaggactccagaaaattcagcaaagaagaagcttttaagaggtggactagcagaaagactaaatggactgcagaatcgagagagatctgctatttctttgtggagacatcaatgtatttcttaccaaaagacactttcaggtagaaaatctggtgtattaactgtgaaaattttagagctgcatgaggaatgtgccatgcaagttgccatgtgtgagcagttattggggtcaccagccaccagctcctcccaaagtgtggctcccaggcctggagctggcctgaaagttctcttcaccaaggagactgcaggctacctcaggggccgtccccaggacactgtccggatcttccctccctggcaaaaactgattattccaagtggaagttgccctgttattctgaatacttacttttgtgagaaagttgttgccaaagaagattcagaaaaaacttgtgaagtgtactgtccggacataccccttccaagaagaagcatctctttggcccagatgtttgtaattaagggtctaacaaataattcacctgaaatccaggttgtgtgtagtggtgtagccactacagggacagcctggacccatgggcacaaagaagcaaaacagcgcatcccaaccagcactcccctgagggattctctcctggatgtggtggaaagccagggagctgcctcgtggccaggagctggagtccgagtggtggtgcaaagagtgtattctcttcccagcagagacagcaccaggggtcagcagggggccagctcaggacacacagacccagctggaactcgagcctgccttctggtacaagatgcctgtggaatgttcggtgaagtgcacttggagttcaccatgtcgaaggcaagacagttggaagggaagtcttgcagcctggtgggaatgaaggttctacagaaagtcaccagaggaaggacagcggggattttcagtttgattgacaccctgtggcccccagcgatacctctgaaaacacctggccgcgaccagccctgtgaagagataaaaactcatctgcctcctccagccttgtgttacatcctcacagctcatccaaatctgggacaaattgatataattgacgaagaccccatttataagctttaccagcctccagttacccgctgcttaagagacattctccagatgaatgatcttggtacccgttgcagtttctatgccacggtgatttaccaaaaaccacagctgaagagtctgctgcttctggagcaaagggagatctggctgctagtgaccgatgtcactctgcaaacgaaggaggagagagaccccaggctccccaaaaccctgctggtctatgtggcccccttgtgtgtgctgggctctgaagtcctggaggcactcgctggggctgcccctcacagcctcttcttcaaggacgctctccgtgaccagggtgtgcttgcgtctccacagctttgatgcaggggcgactgatccgtgcccatagaatacctcttgtggcctctggatgcctccttgttgcttggacgctgccggcaccttcacggagcccatcacagacatggcccatgtaccagcctccagccttcactgaccctgtagcagccacctgggcagaaccagctccatggagatgctgtgctcactccagaattgcctgctggtggcaccccatactgctgcagactccacaaacaaaccaaaagctagaatattataaatgcgtatacttagatcagccagcccctttttccagggatcaaactaaaatcctgcctcagctatcttttttaatttttattgagtcataattcacatgccacataatttaccctgtgtggattgacttgaatctcacatttgagtgcttttttagcttagctcatggggttcaggagtgtgcacacacaatgaacgtgctgctggacacagtcccataactgcaccttcacctgcatgactcgaggggtagcaaaggagactgccattatgggcacaattcactttttcttcaaggcttcaataacctgaagtgtctctgtcggcaggtcggattgtttgtgctgaacgaactgtcctcttgcttcagaagccccttttgagtgtggtctctggtgcaagttcctgtgagctgcctggcccggtgatgctcgacagcctggactctgcaacacctgtcaactccatctgcagtgttcaaggcactgtggttggcgtggacgagagcactgctttctcatggcctgtgtgtgacatgtgtggcaacgggagattggaacagaggccggaagacagaggcgccttttcctgtggggactgctcccgggtggtcacatctcctgttctcaagaggcacctgcaggtcttcctggactgccgctcaagaccgcagtgcagagtgaaggtcaagctgttgcagcgcagcatttcctccctgctgaggtttgccgccggtgaagatgggagctacgaagtgaagagtgtcctcggaaaggaagtggggttgttaaattgttttgtccagtccgtaaccgcccacccgaccagctgcattggattggaggaaatcgagcttctgagtgcaggaggggcctctgcagaacactagcggttgccgcaggatctgtgaactttgcaatgtggctgcaagggtggtggtggtggtggtgatttggggtagttatttgttaactatggacacagtgaacgtagtttacgatcttgaaatgaaacttagatttttctggggaaatgttcagatacagttttgtgaactgtaaatcaaaatacctttttctacagtttatcttttattttctgcaaatttaggaacatatttactcgttttcacattgaatcttaagtttaagctcttcatttggtatttaggcaatatatgagaaaaaaattttttttgttcatttgtaattttaacaagttgaacattttaccatgattgaacatgtttttattacagtatttaacattcccccaaagaataccctgcaaagtgtaaacctttgtcccatactgtgatattactgttctgctacaataaatgtcaaacctaagcactttgcagttcactacttttgggaaaatgttctagggaactgtatcacaggtgaaactgttacccataaagtgtagctctctgaactggtgtgatcgtgtctctgctgaatggtggtggggatagctggctccaccacacacacctgttttaattaggctgggtaatgtgcacggagagcaaagatcacagactaaggagcagtcagtcggatatttgctttgctggcaaagatttaaaccaagaattaattatctttggacactataaagattttgttcccttccttatagcaatataatcatgacaggccatggttaactacatcagatacacgtagcagccgtgactaattaaatcttaaagcactgcaattactggcaagacagctggtcttaagcagttttgtgactgcccttttcatccactacatgactattccggcctttctggagcacttttgaaaatctacttgactctgtccacaagactgaggaaagtgaaagcaaagtcccgggaaagcgggagatgattcagcccggggttctgcccctcgcccctccagcagcctctacagttagggagctcttgaactgttctcagcaggggcccccaaaaagtcaacccttccccaggtctgcgttcttcgggagaacaccttctgctggaaagctgctagcttacctgagctcagccgtgctccacctagcttaggcaagttaaataaggccaggagagagcctttaatgcgttttaaaagcgacagaccctctctcctgagtagctcgggcctg

SEQ ID NO: 287121 - DNA, 1753 bp, Homo sapiens
acagctgtctgtgaggcagcaggccctcaaccagatgccaaacctgctggtgccttgatctgggacttcccagcctccagaactagcctgccttctggtacaagatgcctgtggaatgttcggtgaagtgcacttggagttcaccatgtcgaaggcaagacagttggaagggaagtcttgcagcctggtgggaatgaaggttctacagaaagtcaccagaggaaggacagcggggattttcagtttgattgacaccctgtggcccccagcgatacctctgaaaacacctggccgcgaccagccctgtgaagagataaaaactcatctgcctcctccagccttgtgttacatcctcacagctcatccaaatctgggacaaattgatataattgacgaagaccccatttataagctttaccagcctccagttacccgctgcttaagagacattctccagatgaatgatcttggtacccgttgcagtttctatgccacggtgatttaccaaaaaccacagctgaagagtctgctgcttctggagcaaagggagatctggctgctagtgaccgatgtcactctgcaaacgaaggaggagagagaccccaggctccccaaaaccctgctggtctatgtggcccccttgtgtgtgctgggctctgaagtcctggaggcactcgctggggctgcccctcacagcctcttcttcaaggacgctctccgtgaccagggtcggattgtttgtgctgaacgaactgtcctcttgcttcagaagccccttttgagtgtggtctctggtgcaagttcctgtgagctgcctggcccggtgatgctcgacagcctggactctgcaacacctgtcaactccatctgcagtgttcaaggcactgtggttggcgtggacgagagcactgctttctcatggcctgtgtgtgacatgtgtggcaacgggagattggaacagaggccggaagacagaggcgccttttcctgtggggactgctcccgggtggtcacatctcctgttctcaagaggcacctgcaggtcttcctggactgccgctcaagaccgcagtgcagagtgaaggtcaagctgttgcagcgcagcatttcctccctgctgaggtttgccgccggtgaagatgggagctacgaagtgaagagtgtcctcggaaaggaagtggggttgttaaattgttttgtccagtccgtaaccgcccacccgaccagctgcattggattggaggaaatcgagcttctgagtgcaggaggggcctctgcagaacactagcggttgccgcaggatctgtgaactttgcaatgtggctgcaagggtggtggtggtggtggtgatttggggtagttatttgttaactatggacacagtgaacgtagtttacgatcttgaaatgaaacttagatttttctggggaaatgttcagatacagttttgtgaactgtaaatcaaaatacctttttctacagtttatcttttattttctgcaaatttaggaacatatttactcgttttcacattgaatcttaagtttaagctcttcatttggtatttaggcaatatatgagaaaaaaattttttttgttcatttgtaattttaacaagttgaacattttaccatgattgaacatgtttttattacagtatttaacattcccccaaagaataccctgcaaagtgtaaacctttgtcccatactgtgatattactgttctgctacaataaatgtcaaacctaagc

SEQ ID NO: 287122 - DNA, 1711 bp, Homo sapiens
agcggcttcaaatacagctgatttttagaggtcagatgaactgtgactgagtgtgacgggaaacgtggctctcccttcactgatgggtagctgacttgacctccccccatgctctctggcagtcttgtgggagctgctgggtgagctgctgactgctgcagagcctgccagactagggacctggacagcggggattttcagtttgattgacaccctgtggcccccagcgatacctctgaaaacacctggccgcgaccagccctgtgaagagataaaaactcatctgcctcctccagccttgtgttacatcctcacagctcatccaaatctgggacaaattgatataattgacgaagaccccatttataagctttaccagcctccagttacccgctgcttaagagacattctccagatgaatgatcttggtacccgttgcagtttctatgccacggtgatttaccaaaaaccacagctgaagagtctgctgcttctggagcaaagggagatctggctgctagtgaccgatgtcactctgcaaacgaaggaggagagagaccccaggctccccaaaaccctgctggtctatgtggcccccttgtgtgtgctgggctctgaagtcctggaggcactcgctggggctgcccctcacagcctcttcttcaaggacgctctccgtgaccagggtcggattgtttgtgctgaacgaactgtcctcttgcttcagaagccccttttgagtgtggtctctggtgcaagttcctgtgagctgcctggcccggtgatgctcgacagcctggactctgcaacacctgtcaactccatctgcagtgttcaaggcactgtggttggcgtggacgagagcactgctttctcatggcctgtgtgtgacatgtgtggcaacgggagattggaacagaggccggaagacagaggcgccttttcctgtggggactgctcccgggtggtcacatctcctgttctcaagaggcacctgcaggtcttcctggactgccgctcaagaccgcagtgcagagtgaaggtcaagctgttgcagcgcagcatttcctccctgctgaggtttgccgccggtgaagatgggagctacgaagtgaagagtgtcctcggaaaggaagtggggttgttaaattgttttgtccagtccgtaaccgcccacccgaccagctgcattggattggaggaaatcgagcttctgagtgcaggaggggcctctgcagaacactagcggttgccgcaggatctgtgaactttgcaatgtggctgcaagggtggtggtggtggtggtgatttggggtagttatttgttaactatggacacagtgaacgtagtttacgatcttgaaatgaaacttagatttttctggggaaatgttcagatacagttttgtgaactgtaaatcaaaatacctttttctacagtttatcttttattttctgcaaatttaggaacatatttactcgttttcacattgaatcttaagtttaagctcttcatttggtatttaggcaatatatgagaaaaaaattttttttgttcatttgtaattttaacaagttgaacattttaccatgattgaacatgtttttattacagtatttaacattcccccaaagaataccctgcaaagtgtaaacctttgtcccatactgtgatattactgttctgctacaataaatgtcaaacctaagc

SEQ ID NO: 287123 - DNA, 1630 bp, Homo sapiens
cactagagatgccgcggccccagctgcacacaaaaggaccctggtgtgggggacccttacaaaagaggacggaaacaacatagttttaaaccaataaaccttgacagcggggattttcagtttgattgacaccctgtggcccccagcgatacctctgaaaacacctggccgcgaccagccctgtgaagagataaaaactcatctgcctcctccagccttgtgttacatcctcacagctcatccaaatctgggacaaattgatataattgacgaagaccccatttataagctttaccagcctccagttacccgctgcttaagagacattctccagatgaatgatcttggtacccgttgcagtttctatgccacggtgatttaccaaaaaccacagctgaagagtctgctgcttctggagcaaagggagatctggctgctagtgaccgatgtcactctgcaaacgaaggaggagagagaccccaggctccccaaaaccctgctggtctatgtggcccccttgtgtgtgctgggctctgaagtcctggaggcactcgctggggctgcccctcacagcctcttcttcaaggacgctctccgtgaccagggtcggattgtttgtgctgaacgaactgtcctcttgcttcagaagccccttttgagtgtggtctctggtgcaagttcctgtgagctgcctggcccggtgatgctcgacagcctggactctgcaacacctgtcaactccatctgcagtgttcaaggcactgtggttggcgtggacgagagcactgctttctcatggcctgtgtgtgacatgtgtggcaacgggagattggaacagaggccggaagacagaggcgccttttcctgtggggactgctcccgggtggtcacatctcctgttctcaagaggcacctgcaggtcttcctggactgccgctcaagaccgcagtgcagagtgaaggtcaagctgttgcagcgcagcatttcctccctgctgaggtttgccgccggtgaagatgggagctacgaagtgaagagtgtcctcggaaaggaagtggggttgttaaattgttttgtccagtccgtaaccgcccacccgaccagctgcattggattggaggaaatcgagcttctgagtgcaggaggggcctctgcagaacactagcggttgccgcaggatctgtgaactttgcaatgtggctgcaagggtggtggtggtggtggtgatttggggtagttatttgttaactatggacacagtgaacgtagtttacgatcttgaaatgaaacttagatttttctggggaaatgttcagatacagttttgtgaactgtaaatcaaaatacctttttctacagtttatcttttattttctgcaaatttaggaacatatttactcgttttcacattgaatcttaagtttaagctcttcatttggtatttaggcaatatatgagaaaaaaattttttttgttcatttgtaattttaacaagttgaacattttaccatgattgaacatgtttttattacagtatttaacattcccccaaagaataccctgcaaagtgtaaacctttgtcccatactgtgatattactgttctgctacaataaatgtcaaacctaagc

SEQ ID NO: 287124 - DNA, 2897 bp, Homo sapiens
agcggggggtgggacggggcgcgctgaggaggcggtgcgctcaggcggcgctcccggagatgccccgcggcagccgcgctcggggctctaagagaaaaaggagttggaatacagaatgcccatcctttccaggagaaagaccactgcaggtcagaagagcaggtctcaggacagcaggggcagctgcctctctctctgaagcatggctcaggtgtggagaagggtttcagaacacttctgggaatccgtcattaacagctgaagagaagacgattacagaaaagcaccttgaattatgccctagacccaagcaagaaaccaccacatctaaaagcaccagtgggcttacagacataacatggagctccagtggaagtgatttgtcggatgaagataagacactttctcagttacagagagatgaattacagtttatcgactgggagattgacagtgacagggcagaggctagtgactgtgatgaatttgaagatgacgagggtgctgtggaaatctcagactgtgcttcttgtgcaagtaatcagtctttgacaagtgatgagaagctgtcggagcttcccaagccaagttctatagaaattttagagtattcatcagatagtgaaaaagaagatgatttggaaaatgtcctactcattgattcagaatcccctcacaaataccacgtgcagtttgcatcggatgcaagacagattatggagagactgatagatccaaggacaaaatcaacagagaccattttgcatacacctcagaaacccacagctaagtttcccaggactccagaaaattcagcaaagaagaagcttttaagaggtggactagcagaaagactaaatggactgcagaatcgagagagatctgctatttctttgtggagacatcaatgtatttcttaccaaaagacactttcaggtagaaaatctggtgtattaactgtgaaaattttagagctgcatgaggaatgtgccatgcaagttgccatgtgtgagcagttattggggtcaccagccaccagctcctcccaaagtgtggctcccaggcctggagctggcctgaaagttctcttcaccaaggagactgcaggctacctcaggggccgtccccaggacactgtccggatcttccctccctggcaaaaactgattattccaagtggaagttgccctgttattctgaatacttacttttgtgagaaagttgttgccaaagaagattcagaaaaaacttgtgaagtgtactgtccggacataccccttccaagaagaagcatctctttggcccagatgtttgtaattaagggtctaacaaataattcacctgaaatccaggttgtgtgtagtggtgtagccactacagggacagcctggacccatgggcacaaagaagcaaaacagcgcatcccaaccagcactcccctgagggattctctcctggatgtggtggaaagccagggagctgcctcgtggccaggagctggagtccgagtggtggtgcaaagagtgtattctcttcccagcagagacagcaccaggggtcagcagggggccagctcaggacacacagacccagctggaactcgagcctgccttctggtacaagatgcctgtggaatgttcggtgaagtgcacttggagttcaccatgtcgaaggcaagacagttggaagggaagtcttgcagcctggtgggaatgaaggttctacagaaagtcaccagaggaaggacagcggggattttcagtttgattgacaccctgtggcccccagcgatacctctgaaaacacctggccgcgaccagccctgtgaagagataaaaactcatctgcctcctccagccttgtgttacatcctcacagctcatccaaatctgggacaaattgatataattgacgaagaccccatttataagctttaccagcctccagttacccgctgcttaagagacattctccagatgaatgatcttggtacccgttgcagtttctatgccacggtgatttaccaaaaaccacagctgaagagtctgctgcttctggagcaaagggagatctggctgctagtgaccgatgtcactctgcaaacgaaggaggagagagaccccaggctccccaaaaccctgctggtctatgtggcccccttgtgtgtgctgggctctgaagtcctggaggcactcgctggggctgcccctcacagcctcttcttcaaggacgctctccgtgaccagggtcggattgtttgtgctgaacgaactgtcctcttgcttcagaagccccttttgagtgtggtctctggtgcaagttcctgtgagctgcctggcccggtgatgctcgacagcctggactctgcaacacctgtcaactccatctgcagtgttcaaggcactgtggttggcgtggacgagagcactgctttctcatggcctgtgtgtgacatgtgtggcaacgggagattggaacagaggccggaagacagaggcgccttttcctgtggggactgctcccgggtggtcacatctcctgttctcaagaggcacctgcaggtcttcctggactgccgctcaagaccgcagtgcagagtgaaggtcaagctgttgcagcgcagcatttcctccctgctgaggtttgccgccggtgaagatgggagctacgaagtgaagagtgtcctcggaaaggaagtggggttgttaaattgttttgtccagtccgtaaccgcccacccgaccagctgcattggattggaggaaatcgagcttctgagtgcaggaggggcctctgcagaacactagcggttgccgcaggatctgtgaactttgcaatgtggctgcaagggtggtggtggtttcctcacatattatcctttattctaaaaaacttcg

SEQ ID NO: 287125 - DNA, 2820 bp, Homo sapiens
agcggggggtgggacggggcgcgctgaggaggcggtgcgctcaggcggcgctcccggagatgccccgcggcagccgcgctcggggctctaagagaaaaaggagttggaatacagaatgcccatcctttccaggagaaagaccactgcaggtcagaagagcaggtctcaggacagcaggggcagctgcctctctctctgaagcatggctcaggtgtggagaagggtttcagaacacttctgggaatccgtcattaacagctgaagagaagacgattacagaaaagcaccttgaattatgccctagacccaagcaagaaaccaccacatctaaaagcaccagtgggcttacagacataacatggagctccagtggaagtgatttgtcggatgaagataagacactttctcagttacagagagatgaattacagtttatcgactgggagattgacagtgacagggcagaggctagtgactgtgatgaatttgaagatgacgagggtgctgtggaaatctcagactgtgcttcttgtgcaagtaatcagtctttgacaagtgatgagaagctgtcggagcttcccaagccaagttctatagaaattttagagtattcatcagatagtgaaaaagaagatgatttggaaaatgtcctactcattgattcagaatcccctcacaaataccacgtgcagtttgcatcggatgcaagacagattatggagagactgatagatccaaggacaaaatcaacagagaccattttgcatacacctcagaaacccacagctaagtttcccaggactccagaaaattcagcaaagaagaagcttttaagaggtggactagcagaaagactaaatggactgcagaatcgagagagatctgctatttctttgtggagacatcaatgtatttcttaccaaaagacactttcaggtagaaaatctggtgtattaactgtgaaaattttagagctgcatgaggaatgtgccatgcaagttgccatgtgtgagcagttattggggtcaccagccaccagctcctcccaaagtgtggctcccaggcctggagctggcctgaaagttctcttcaccaaggagactgcaggctacctcaggggccgtccccaggacactgtccggatcttccctccctggcaaaaactgattattccaagtggaagttgccctgttattctgaatacttacttttgtgagaaagttgttgccaaagaagattcagaaaaaacttgtgaagtgtactgtccggacataccccttccaagaagaagcatctctttggcccagatgtttgtaattaagggtctaacaaataattcacctgaaatccaggttgtgtgtagtggtgtagccactacagggacagcctggacccatgggcacaaagaagcaaaacagcgcatcccaaccagcactcccctgagggattctctcctggatgtggtggaaagccagggagctgcctcgtggccaggagctggagtccgagtggtggtgcaaagagtgtattctcttcccagcagagacagcaccaggggtcagcagggggccagctcaggacacacagacccagctggaactcgagcctgccttctggtacaagatgcctgtggaatgttcggtgaagtgcacttggagttcaccatgtcgaaggcaagacagttggaagggaagtcttgcagcctggtgggaatgaaggttctacagaaagtcaccagaggaaggacagcggggattttcagtttgattgacaccctgtggcccccagcgatacctctgaaaacacctggccgcgaccagccctgtgaagagataaaaactcatctgcctcctccagccttgtgttacatcctcacagctcatccaaatctgggacaaattgatataattgacgaagaccccatttataagctttaccagcctccagttacccgctgcttaagagacattctccagatgaatgatcttggtacccgttgcagtttctatgccacggtgatttaccaaaaaccacagctgaagagtctgctgcttctggagcaaagggagatctggctgctagtgaccgatgtcactctgcaaacgaaggaggagagagaccccaggctccccaaaaccctgctggtctatgtggcccccttgtgtgtgctgggctctgaagtcctggaggcactcgctggggctgcccctcacagcctcttcttcaaggacgctctccgtgaccagggtcggattgtttgtgctgaacgaactgtcctcttgcttcagaagccccttttgagtgtggtctctggtgcaagttcctgtgagctgcctggcccggtgatgctcgacagcctggactctgcaacacctgtcaactccatctgcagtgttcaaggcactgtggttggcgtggacgagagcactgctttctcatggcctgtgtgtgacatgtgtggcaacgggagattggaacagaggccggaagacaggtaaggggacaggagctgtcctgaaagccctagaactgaaagggcacagaagcaacccagccccagaacctgggccttgctacctcaggtgactccctcgagagctcaaggggcaacctctgcctctgctgagcagcaagggaagaggcctctggggcccagtgggttttccttactgagatttctgctgtttcttgcagctgctcctgttatgagatagatgtgctgggttttgtccccacctcctttattatcagccaggagaattaaaaaaacaggacaaacatgaataagtgaaaaaaacttggtgactgtatagcctagct

SEQ ID NO: 287126 - DNA, 1958 bp, Homo sapiens
  misc_feature (103)..(103): n is a, c, g, or t
agcggggggtgggacggggcgcgctgaggaggcggtgcgctcaggcggcgctcccggagatgccccgcggcagccgcgctcggggctctaaggtattcagtanaagcagatgaacagccagatgaagagatggatagagcaagacatggacattataaaggaattcaatagaagcacatgaacggccagatgaagagatggatagaagaaaaaggagttggaatacagaatgcccatcctttccaggagaaagaccactgcaggtcagaagagcaggtctcaggacagcaggggcagctgcctctctctctgaagcatggctcaggtgtggagaagggtttcagaacacttctgggaatccgtcattaacagctgaagagaagacgattacagaaaagcaccttgaattatgccctagacccaagcaagaaaccaccacatctaaaagcaccagtgggcttacagacataacatggagctccagtggaagtgatttgtcggatgaagataagacactttctcagttacagagagatgaattacagtttatcgactgggagattgacagtgacagggcagaggctagtgactgtgatgaatttgaagatgacgagggtgctgtggaaatctcagactgtgcttcttgtgcaagtaatcagtctttgacaagtgatgagaagctgtcggagcttcccaaggtaagaatgaagtatttcaaaacttttattcactttataacatttgctaatcatagttgtcatttttttttttgtttttttttttcctgtccttcctcgagaacaaccacttttgactcttaggggattcttttgttctttactcacttatctctaaataacatgcttgtgctgtacttctcaacatggataaatattgatctcacttctctttcacttcccaccctcactgcacaccgaatgttttttatcctgctattcttccagtgcagatatatcaaagtgctggaattgcacatgtcagccaccatacctgggcaaaaagatacaaatttaaatcagctgtcttccacgagtcctctcccagtggagtcacacagtatatgcttaattcttccagcaaaatgtttagacaacatgtgtgaagtgttatgtaccagggaactcattagagactcagtgcccagggtttgtattaggggctagtaacataggcaccctctccctagaaggttcagcagtggactaggaggatacacaggacttagcatatagtcgtactcgtggccatcgtttattacactgaaaggatagaaatctatttttatttatttatttagagacagggtcttgctgtgtcacccaggctagaacgcaatggtgcgatcgtagctcactgtagccttgatctcctgggctcaagtgatcctctcacctcagcctccagagtagctggtcctacaggcatgtgccaccacgtctggctaattgttgtattttttgtatgttaactcttttctacacagacatgatttaccttttgtggactagctttaccccaaattgcattgttaaagttttgaatttataattaatgacagcgtggactacttagtattttaactgtatttgagaccacaagtagtttcttcaatattttctcaagcccttgagacacttaattctccctcttgacttcctcttcatcttagaaactgcaatttcctttgtaggaacaacttcctgctgggtactgccctctttggccacttctgtcttgggtgcctatgtttttatctaaagccataagtgcattgcaacactagccatttcatcatcatgtgaattgagaaagtctagcaggaagtcacaagttgattgtccccaatacaagcccaaatgtttcttggttgctgtgtcataataggcagttggtgttctgaatggcagttatgaagaggatactttgtagaaaggact

SEQ ID NO: 287127 - DNA, 1045 bp, Homo sapiens
gccgcctactactactaaattcgcggccgcgtcgacgccccgcggcagccgcgctcggggctctaagagaaaaaggagttggaatacagaatgcccatcctttccaggagaaagaccactgcaggtcagaagagcaggtctcaggacagcaggggcagctgcctctctctctgaagcatggctcaggtgtggagaagggtttcagaacacttctgggaatccgtcattaacagctgaagagaagacgattacagaaaagcaccttgaattatgccctagacccaagcaagaaaccaccacatctaaaagcaccagtgggcttacagacataacatggagctccagtggaagtgatttgtcggatgaagataagacactttctcagttacagagagatgaattacagtttatcgactgggagattgacagtgacagggcagaggctagtgactgtgatgaatttgaagatgacgagggtgctgtggaaatctcagactgtgcttcttgtgcaagtaatcagtctttgacaagtgatgagaagctgtcggagcttcccaaggtagaaaatctggtgtattaactgtgaaaattttagagctgcatgaggaatgtgccatgcaagttgccatgtgtgagcagttattggggtcaccagccaccagctcctcccaaagtgtggctcccaggcctggagctggcctgaaagttctcttcaccaaggagactgcaggctacctcaggggccgtccccaggacactgtccggatcttccctccctggcaaaaactgattattccaagtggaagttgccctgttattctgaatacttacttttgtgagaaagttgttgccaaagaagattcagaaaaaacttgtgaagtgtactgtccggacatacgcccaggtaagcatgcgtacctgggcgtatgcccctattcctaacactcacaacaaaactaactaatactaacatctcagacgctcaggaaatagaaaccgtctgaactatcctgcccggcatcatcctaagtctcatacgcctccc

SEQ ID NO: 287128 - DNA, 825 bp, Homo sapiens
  misc_feature (346)..(346): n is a, c, g, or t
  misc_feature (348)..(348): n is a, c, g, or t
  misc_feature (351)..(351): n is a, c, g, or t
  misc_feature (354)..(354): n is a, c, g, or t
ctaaacttaatacattataattcattaaacagaggtggactagcagaaagactaaatggactgcagaatcgagagagatctgctatttctttgtggagacatcaatgtatttcttaccaaaagacactttcagggtaaggcttgtgcaggaatctgagacaatgtgtaaaaaaatattttagttaaaagaattcttacattaaaatatatgaagttaattgttaatattttcatgactttttaaaaattttttccaacattctaattttaacatataaaaactatatatagtaaatatatttaacttgatgagtttaaaaataagcatactcttatgaaaacatcnanccnacnaatctgtgctataaatctacccttgacctccaaaaattttgttctattcttatcattaagagcactctaccctcttagcaaaatttattttgttttatttcattatttagagacagggtctcaccgttgcccaggctggagtgtagtgacataatcatgtagcctcaaactcttgggctcaagcaaattctctcacttcagcctcccgactggctaagaccacaggctttttccaccgtgcccagctcctcttagcaaaattttaagaatacaatacagtatgttaactataggcatgattctgtactgcagatctctaggactggtttagcttatataatcaaaacgttgtaccctttgacaaatacctctctattggcagccaccattgcagtctctgcttctgtagccagagcactattagtcaagaaaaagagataaaagatatccaagttggaaagcaagaggtaa

SEQ ID NO: 287129 - DNA, 370 bp, Homo sapiens
tcagttaggtggtaatatgcaggcaagttttaaaacgtacttcttattgttataatttttctttgtacaataagtggaaattataaaaatcttaggaacatgtatataaactcccaagtaaggcaaaaatcacgaggcccctcatgttgtcctctgcacgtggaggagcagaggagtcagagagggcagagccgcctctgaggtgggctttccttctcttgggcctaggcactgtggttggcgtggacgagagcactgctttctcatggcctgtgtgtgacatgtgtggcaacgggagattggaacagaggccggaagacaggtaaggggacaggagctgtcctgaaagccctagaactgaaagggcaca

SEQ ID NO: 287130 - DNA, 3888 bp, Homo sapiens
agcggggggtgggacggggcgcgctgaggaggcggtgcgctcaggcggcgctcccggagatgccccgcggcagccgcgctcggggctctaagagaaaaaggagttggaatacagaatgcccatcctttccaggagaaagaccactgcaggtcagaagagcaggtctcaggacagcaggggcagctgcctctctctctgaagcatggctcaggtgtggagaagggtttcagaacacttctgggaatccgtcattaacagctgaagagaagacgattacagaaaagcaccttgaattatgccctagacccaagcaagaaaccaccacatctaaaagcaccagtgggcttacagacataacatggagctccagtggaagtgatttgtcggatgaagataagacactttctcagttacagagagatgaattacagtttatcgactgggagattgacagtgacagggcagaggctagtgactgtgatgaatttgaagatgacgagggtgctgtggaaatctcagactgtgcttcttgtgcaagtaatcagtctttgacaagtgatgagaagctgtcggagcttcccaagccaagttctatagaaattttagagtattcatcagatagtgaaaaagaagatgatttggaaaatgtcctactcattgattcagaatcccctcacaaataccacgtgcagtttgcatcggatgcaagacagattatggagagactgatagatccaaggacaaaatcaacagagaccattttgcatacacctcagaaacccacagctaagtttcccaggactccagaaaattcagcaaagaagaagcttttaagaggtggactagcagaaagactaaatggactgcagaatcgagagagatctgctatttctttgtggagacatcaatgtatttcttaccaaaagacactttcaggtagaaaatctggtgtattaactgtgaaaattttagagctgcatgaggaatgtgccatgcaagttgccatgtgtgagcagttattggggtcaccagccaccagctcctcccaaagtgtggctcccaggcctggagctggcctgaaagttctcttcaccaaggagactgcaggctacctcaggggccgtccccaggacactgtccggatcttccctccctggcaaaaactgattattccaagtggaagttgccctgttattctgaatacttacttttgtgagaaagttgttgccaaagaagattcagaaaaaacttgtgaagtgtactgtccggacataccccttccaagaagaagcatctctttggcccagatgtttgtaattaagggtctaacaaataattcacctgaaatccaggttgtgtgtagtggtgtagccactacagggacagcctggacccatgggcacaaagaagcaaaacagcgcatcccaaccagcactcccctgagggattctctcctggatgtggtggaaagccagggagctgcctcgtggccaggagctggagtccgagtggtggtgcaaagagtgtattctcttcccagcagagacagcaccaggggtcagcagggggccagctcaggacacacagacccagctggaactcgagcctgccttctggtacaagatgcctgtggaatgttcggtgaagtgcacttggagttcaccatgtcgaaggcaagacagttggaagggaagtcttgcagcctggtgggaatgaaggttctacagaaagtcaccagaggaaggacagcggggattttcagtttgattgacaccctgtggcccccagcgatacctctgaaaacacctggccgcgaccagccctgtgaagagataaaaactcatctgcctcctccagccttgtgttacatcctcacagctcatccaaatctgggacaaattgatataattgacgaagaccccatttataagctttaccagcctccagttacccgctgcttaagagacattctccagatgaatgatcttggtacccgttgcagtttctatgccacggtgatttaccaaaaaccacagctgaagagtctgctgcttctggagcaaagggagatctggctgctagtgaccgatgtcactctgcaaacgaaggaggagagagaccccaggctccccaaaaccctgctggtctatgtggcccccttgtgtgtgctgggctctgaagtcctggaggcactcgctggggctgcccctcacagcctcttcttcaaggacgctctccgtgaccagggtgtgcttgcgtctccacagctttgatgcaggggcgactgatccgtgcccatagaatacctcttgtggcctctggatgcctccttgttgcttggacgctgccggcaccttcacggagcccatcacagacatggcccatgtaccagcctccagccttcactgaccctgtagcagccacctgggcagaaccagctccatggagatgctgtgctcactccagaattgcctgctggtggcaccccatactgctgcagactccacaaacaaaccaaaagctagaatattataaatgcgtatacttagatcagccagcccctttttccagggatcaaactaaaatcctgcctcagctatcttttttaatttttattgagtcataattcacatgccacataatttaccctgtgtggattgacttgaatctcacatttgagtgcttttttagcttagctcatggggttcaggagtgtgcacacacaatgaacgtgctgctggacacagtcccataactgcaccttcacctgcatgactcgaggggtagcaaaggagactgccattatgggcacaattcactttttcttcaaggcttcaataacctgaagtgtctctgtcggcaggtcggattgtttgtgctgaacgaactgtcctcttgcttcagaagccccttttgagtgtggtctctggtgcaagttcctgtgagctgcctggcccggtgatgctcgacagcctggactctgcaacacctgtcaactccatctgcagtgttcaaggcactgtggttggcgtggacgagagcactgctttctcatggcctgtgtgtgacatgtgtggcaacgggagattggaacagaggccggaagacagaggcgccttttcctgtggggactgctcccgggtggtcacatctcctgttctcaagaggcacctgcaggtcttcctggactgccgctcaagaccgcagtgcagagtgaaggtcaagctgttgcagcgcagcatttcctccctgctgaggtttgccgccggtgaagatgggagctacgaagtgaagagtgtcctcggaaaggaagtggggttgttaaattgttttgtccagtccgtaaccgcccacccgaccagctgcattggattggaggaaatcgagcttctgagtgcaggaggggcctctgcagaacactagcggttgccgcaggatctgtgaactttgcaatgtggctgcaagggtggtggtggtggtggtgatttggggtagttatttgttaactatggacacagtgaacgtagtttacgatcttgaaatgaaacttagatttttctggggaaatgttcagatacagttttgtgaactgtaaatcaaaatacctttttctacagtttatcttttattttctgcaaatttaggaacatatttactcgttttcacattgaatcttaagtttaagctcttcatttggtatttaggcaatatatgagaaaaaaattttttttgttcatttgtaattttaacaagttgaacattttaccatgattgaacatgtttttattacagtatttaacattcccccaaagaataccctgcaaagtgtaaacctttgtcccatactgtgatattactgttctgctacaataaatgtcaaacctaagc

SEQ ID NO: 287131 - DNA, 3103 bp, Homo sapiens
agcggggggtgggacggggcgcgctgaggaggcggtgcgctcaggcggcgctcccggagatgccccgcggcagccgcgctcggggctctaagagaaaaaggagttggaatacagaatgcccatcctttccaggagaaagaccactgcaggtcagaagagcaggtctcaggacagcaggggcagctgcctctctctctgaagcatggctcaggtgtggagaagggtttcagaacacttctgggaatccgtcattaacagctgaagagaagacgattacagaaaagcaccttgaattatgccctagacccaagcaagaaaccaccacatctaaaagcaccagtgggcttacagacataacatggagctccagtggaagtgatttgtcggatgaagataagacactttctcagttacagagagatgaattacagtttatcgactgggagattgacagtgacagggcagaggctagtgactgtgatgaatttgaagatgacgagggtgctgtggaaatctcagactgtgcttcttgtgcaagtaatcagtctttgacaagtgatgagaagctgtcggagcttcccaagccaagttctatagaaattttagagtattcatcagatagtgaaaaagaagatgatttggaaaatgtcctactcattgattcagaatcccctcacaaataccacgtgcagtttgcatcggatgcaagacagattatggagagactgatagatccaaggacaaaatcaacagagaccattttgcatacacctcagaaacccacagctaagtttcccaggactccagaaaattcagcaaagaagaagcttttaagaggtggactagcagaaagactaaatggactgcagaatcgagagagatctgctatttctttgtggagacatcaatgtatttcttaccaaaagacactttcaggtagaaaatctggtgtattaactgtgaaaattttagagctgcatgaggaatgtgccatgcaagttgccatgtgtgagcagttattggggtcaccagccaccagctcctcccaaagtgtggctcccaggcctggagctggcctgaaagttctcttcaccaaggagactgcaggctacctcaggggccgtccccaggacactgtccggatcttccctccctggcaaaaactgattattccaagtggaagttgccctgttattctgaatacttacttttgtgagaaagttgttgccaaagaagattcagaaaaaacttgtgaagtgtactgtccggacataccccttccaagaagaagcatctctttggcccagatgtttgtaattaagggtctaacaaataattcacctgaaatccaggttgtgtgtagtggtgtagccactacagggacagcctggacccatgggcacaaagaagcaaaacagcgcatcccaaccagcactcccctgagggattctctcctggatgtggtggaaagccagggagctgcctcgtggccaggagctggagtccgagtggtggtgcaaagagtgtattctcttcccagcagagacagcaccaggggtcagcagggggccagctcaggacacacagacccagctggaactcgagcctgccttctggtacaagatgcctgtggaatgttcggtgaagtgcacttggagttcaccatgtcgaaggcaagacagttggaagggaagtcttgcagcctggtgggaatgaaggttctacagaaagtcaccagaggaaggacagcggggattttcagtttgattgacaccctgtggcccccagcgatacctctgaaaacacctggccgcgaccagccctgtgaagagataaaaactcatctgcctcctccagccttgtgttacatcctcacagctcatccaaatctgggacaaattgatataattgacgaagaccccatttataagctttaccagcctccagttacccgctgcttaagagacattctccagatgaatgatcttggtacccgttgcagtttctatgccacggtgatttaccaaaaaccacagctgaagagtctgctgcttctggagcaaagggagatctggctgctagtgaccgatgtcactctgcaaacgaaggaggagagagaccccaggctccccaaaaccctgctggtctatgtggcccccttgtgtgtgctgggctctgaagtcctggaggcactcgctggggctgcccctcacagcctcttcttcaaggacgctctccgtgaccagggtcggattgtttgtgctgaacgaactgtcctcttgcttcagaagccccttttgagtgtggtctctggtgcaagttcctgtgagctgcctggcccggtgatgctcgacagcctggactctgcaacacctgtcaactccatctgcagtgttcaaggcactgtggttggcgtggacgagagcactgctttctcatggcctgtgtgtgacatgtgtggcaacgggagattggaacagaggccggaagacagagctacgaagtgaagagtgtcctcggaaaggaagtggggttgttaaattgttttgtccagtccgtaaccgcccacccgaccagctgcattggattggaggaaatcgagcttctgagtgcaggaggggcctctgcagaacactagcggttgccgcaggatctgtgaactttgcaatgtggctgcaagggtggtggtggtggtggtgatttggggtagttatttgttaactatggacacagtgaacgtagtttacgatcttgaaatgaaacttagatttttctggggaaatgttcagatacagttttgtgaactgtaaatcaaaatacctttttctacagtttatcttttattttctgcaaatttaggaacatatttactcgttttcacattgaatcttaagtttaagctcttcatttggtatttaggcaatatatgagaaaaaaattttttttgttcatttgtaattttaacaagttgaacattttaccatgattgaacatgtttttattacagtatttaacattcccccaaagaataccctgcaaagtgtaaacctttgtcccatactgtgatattactgttctgctacaataaatgtcaaacctaagc

SEQ ID NO: 287132 - DNA, 3502 bp, Homo sapiens
  misc_feature (103)..(103): n is a, c, g, or t
agcggggggtgggacggggcgcgctgaggaggcggtgcgctcaggcggcgctcccggagatgccccgcggcagccgcgctcggggctctaaggtattcagtanaagcagatgaacagccagatgaagagatggatagagcaagacatggacattataaaggaattcaatagaagcacatgaacggccagatgaagagatggatagaagaaaaaggagttggaatacagaatgcccatcctttccaggagaaagaccactgcaggtcagaagagcaggtctcaggacagcaggggcagctgcctctctctctgaagcatggctcaggtgtggagaagggtttcagaacacttctgggaatccgtcattaacagctgaagagaagacgattacagaaaagcaccttgaattatgccctagacccaagcaagaaaccaccacatctaaaagcaccagtgggcttacagacataacatggagctccagtggaagtgatttgtcggatgaagataagacactttctcagttacagagagatgaattacagtttatcgactgggagattgacagtgacagggcagaggctagtgactgtgatgaatttgaagatgacgagggtgctgtggaaatctcagactgtgcttcttgtgcaagtaatcagtctttgacaagtgatgagaagctgtcggagcttcccaaggttttggcaattatgattgaaggtgctataaacatacatttggaagtttccgtgtggagataaactttcaactcctttgagtagataccaagcagagcaactattggattgtattgccaagttctatagaaattttagagtattcatcagatagtgaaaaagaagatgatttggaaaatgtcctactcattgattcagaatcccctcacaaataccacgtgcagtttgcatcggatgcaagacagattatggagagactgatagatccaaggacaaaatcaacagagaccattttgcatacacctcagaaacccacagctaagtttcccaggactccagaaaattcagcaaagaagaagcttttaagaggtggactagcagaaagactaaatggactgcagaatcgagagagatctgctatttctttgtggagacatcaatgtatttcttaccaaaagacactttcaggtagaaaatctggtgtattaactgtgaaaattttagagctgcatgaggaatgtgccatgcaagttgccatgtgtgagcagttattggggtcaccagccaccagctcctcccaaagtgtggctcccaggcctggagctggcctgaaagttctcttcaccaaggagactgcaggctacctcaggggccgtccccaggacactgtccggatcttccctccctggcaaaaactgattattccaagtggaagttgccctgttattctgaatacttacttttgtgagaaagttgttgccaaagaagattcagaaaaaacttgtgaagtgtactgtccggacataccccttccaagaagaagcatctctttggcccagatgtttgtaattaagggtctaacaaataattcacctgaaatccaggttgtgtgtagtggtgtagccactacagggacagcctggacccatgggcacaaagaagcaaaacagcgcatcccaaccagcactcccctgagggattctctcctggatgtggtggaaagccagggagctgcctcgtggccaggagctggagtccgagtggtggtgcaaagagtgtattctcttcccagcagagacagcaccaggggtcagcagggggccagctcaggacacacagacccagctggaactcgagcctgccttctggtacaagatgcctgtggaatgttcggtgaagtgcacttggagttcaccatgtcgaaggcaagacagttggaagggaagtcttgcagcctggtgggaatgaaggttctacagaaagtcaccagaggaaggacagcggggattttcagtttgattgacaccctgtggcccccagcgatacctctgaaaacacctggccgcgaccagccctgtgaagagataaaaactcatctgcctcctccagccttgtgttacatcctcacagctcatccaaatctgggacaaattgatataattgacgaagaccccatttataagctttaccagcctccagttacccgctgcttaagagacattctccagatgaatgatcttggtacccgttgcagtttctatgccacggtgatttaccaaaaaccacagctgaagagtctgctgcttctggagcaaagggagatctggctgctagtgaccgatgtcactctgcaaacgaaggaggagagagaccccaggctccccaaaaccctgctggtctatgtggcccccttgtgtgtgctgggctctgaagtcctggaggcactcgctggggctgcccctcacagcctcttcttcaaggacgctctccgtgaccagggtcggattgtttgtgctgaacgaactgtcctcttgcttcagaagccccttttgagtgtggtctctggtgcaagttcctgtgagctgcctggcccggtgatgctcgacagcctggactctgcaacacctgtcaactccatctgcagtgttcaaggcactgtggttggcgtggacgagagcactgctttctcatggcctgtgtgtgacatgtgtggcaacgggagattggaacagaggccggaagacagaggcgccttttcctgtggggactgctcccgggtggtcacatctcctgttctcaagaggcacctgcaggtcttcctggactgccgctcaagaccgcagtgcagagtgaaggtcaagctgttgcagcgcagcatttcctccctgctgaggtttgccgccggtgaagatgggagctacgaagtgaagagtgtcctcggaaaggaagtggggttgttaaattgttttgtccagtccgtaaccgcccacccgaccagctgcattggattggaggaaatcgagcttctgagtgcaggaggggcctctgcagaacactagcggttgccgcaggatctgtgaactttgcaatgtggctgcaagggtggtggtggtggtggtgatttggggtagttatttgttaactatggacacagtgaacgtagtttacgatcttgaaatgaaacttagatttttctggggaaatgttcagatacagttttgtgaactgtaaatcaaaatacctttttctacagtttatcttttattttctgcaaatttaggaacatatttactcgttttcacattgaatcttaagtttaagctcttcatttggtatttaggcaatatatgagaaaaaaattttttttgttcatttgtaattttaacaagttgaacattttaccatgattgaacatgtttttattacagtatttaacattcccccaaagaataccctgcaaagtgtaaacctttgtcccatactgtgatattactgttctgctacaataaatgtcaaacctaagc

SEQ ID NO: 287133 - DNA, 3322 bp, Homo sapiens
agcggggggtgggacggggcgcgctgaggaggcggtgcgctcaggcggcgctcccggagatgccccgcggcagccgcgctcggggctctaagagaaaaaggagttggaatacagaatgcccatcctttccaggagaaagaccactgcaggtcagaagagcaggtctcaggacagcaggggcagctgcctctctctctgaagcatggctcaggtgtggagaagggtttcagaacacttctgggaatccgtcattaacagctgaagagaagacgattacagaaaagcaccttgaattatgccctagacccaagcaagctcgtccctctgttcggggtccctgacttcctgcaacacttaagtttcttaaaccaccacatctaaaagcaccagtgggcttacagacataacatggagctccagtggaagtgatttgtcggatgaagataagacactttctcagttacagagagatgaattacagtttatcgactgggagattgacagtgacagggcagaggctagtgactgtgatgaatttgaagatgacgagggtgctgtggaaatctcagactgtgcttcttgtgcaagtaatcagtctttgacaagtgatgagaagctgtcggagcttcccaagccaagttctatagaaattttagagtattcatcagatagtgaaaaagaagatgatttggaaaatgtcctactcattgattcagaatcccctcacaaataccacgtgcagtttgcatcggatgcaagacagattatggagagactgatagatccaaggacaaaatcaacagagaccattttgcatacacctcagaaacccacagctaagtttcccaggactccagaaaattcagcaaagaagaagcttttaagaggtggactagcagaaagactaaatggactgcagaatcgagagagatctgctatttctttgtggagacatcaatgtatttcttaccaaaagacactttcaggtagaaaatctggtgtattaactgtgaaaattttagagctgcatgaggaatgtgccatgcaagttgccatgtgtgagcagttattggggtcaccagccaccagctcctcccaaagtgtggctcccaggcctggagctggcctgaaagttctcttcaccaaggagactgcaggctacctcaggggccgtccccaggacactgtccggatcttccctccctggcaaaaactgattattccaagtggaagttgccctgttattctgaatacttacttttgtgagaaagttgttgccaaagaagattcagaaaaaacttgtgaagtgtactgtccggacataccccttccaagaagaagcatctctttggcccagatgtttgtaattaagggtctaacaaataattcacctgaaatccaggttgtgtgtagtggtgtagccactacagggacagcctggacccatgggcacaaagaagcaaaacagcgcatcccaaccagcactcccctgagggattctctcctggatgtggtggaaagccagggagctgcctcgtggccaggagctggagtccgagtggtggtgcaaagagtgtattctcttcccagcagagacagcaccaggggtcagcagggggccagctcaggacacacagacccagctggaactcgagcctgccttctggtacaagatgcctgtggaatgttcggtgaagtgcacttggagttcaccatgtcgaaggcaagacagttggaagggaagtcttgcagcctggtgggaatgaaggttctacagaaagtcaccagaggaaggacagcggggattttcagtttgattgacaccctgtggcccccagcgatacctctgaaaacacctggccgcgaccagccctgtgaagagataaaaactcatctgcctcctccagccttgtgttacatcctcacagctcatccaaatctgggacaaattgatataattgacgaagaccccatttataagctttaccagcctccagttacccgctgcttaagagacattctccagatgaatgatcttggtacccgttgcagtttctatgccacggtgatttaccaaaaaccacagctgaagagtctgctgcttctggagcaaagggagatctggctgctagtgaccgatgtcactctgcaaacgaaggaggagagagaccccaggctccccaaaaccctgctggtctatgtggcccccttgtgtgtgctgggctctgaagtcctggaggcactcgctggggctgcccctcacagcctcttcttcaaggacgctctccgtgaccagggtcggattgtttgtgctgaacgaactgtcctcttgcttcagaagccccttttgagtgtggtctctggtgcaagttcctgtgagctgcctggcccggtgatgctcgacagcctggactctgcaacacctgtcaactccatctgcagtgttcaaggcactgtggttggcgtggacgagagcactgctttctcatggcctgtgtgtgacatgtgtggcaacgggagattggaacagaggccggaagacagaggcgccttttcctgtggggactgctcccgggtggtcacatctcctgttctcaagaggcacctgcaggtcttcctggactgccgctcaagaccgcagtgcagagtgaaggtcaagctgttgcagcgcagcatttcctccctgctgaggtttgccgccggtgaagatgggagctacgaagtgaagagtgtcctcggaaaggaagtggggttgttaaattgttttgtccagtccgtaaccgcccacccgaccagctgcattggattggaggaaatcgagcttctgagtgcaggaggggcctctgcagaacactagcggttgccgcaggatctgtgaactttgcaatgtggctgcaagggtggtggtggtggtggtgatttggggtagttatttgttaactatggacacagtgaacgtagtttacgatcttgaaatgaaacttagatttttctggggaaatgttcagatacagttttgtgaactgtaaatcaaaatacctttttctacagtttatcttttattttctgcaaatttaggaacatatttactcgttttcacattgaatcttaagtttaagctcttcatttggtatttaggcaatatatgagaaaaaaattttttttgttcatttgtaattttaacaagttgaacattttaccatgattgaacatgtttttattacagtatttaacattcccccaaagaataccctgcaaagtgtaaacctttgtcccatactgtgatattactgttctgctacaataaatgtcaaacctaagc

SEQ ID NO: 287134 - DNA, 3021 bp, Homo sapiens
agcggggggtgggacggggcgcgctgaggaggcggtgcgctcaggcggcgctcccggagatgccccgcggcagccgcgctcggggctctaagagaaaaaggagttggaatacagaatgcccatcctttccaggagaaagaccactgcaggtcagaagagcaggtctcaggacagcaggggcagctgcctctctctctgaagcatggctcaggtgtggagaagggtttcagaacacttctgggaatccgtcattaacagctgaagagaagacgattacagaaaagcaccttgaattatgccctagacccaagcaagaaaccaccacatctaaaagcaccagtgggcttacagacataacatggagctccagtggaagtgatttgtcggatgaagataagacactttctcagttacagagagatgaattacagtttatcgactgggagattgacagtgacagggcagaggctagtgactgtgatgaatttgaagatgacgagggtgctgtggaaatctcagactgtgcttcttgtgcaagtaatcagtctttgacaagtgatgagaagctgtcggagcttcccaagaggtggactagcagaaagactaaatggactgcagaatcgagagagatctgctatttctttgtggagacatcaatgtatttcttaccaaaagacactttcaggtagaaaatctggtgtattaactgtgaaaattttagagctgcatgaggaatgtgccatgcaagttgccatgtgtgagcagttattggggtcaccagccaccagctcctcccaaagtgtggctcccaggcctggagctggcctgaaagttctcttcaccaaggagactgcaggctacctcaggggccgtccccaggacactgtccggatcttccctccctggcaaaaactgattattccaagtggaagttgccctgttattctgaatacttacttttgtgagaaagttgttgccaaagaagattcagaaaaaacttgtgaagtgtactgtccggacataccccttccaagaagaagcatctctttggcccagatgtttgtaattaagggtctaacaaataattcacctgaaatccaggttgtgtgtagtggtgtagccactacagggacagcctggacccatgggcacaaagaagcaaaacagcgcatcccaaccagcactcccctgagggattctctcctggatgtggtggaaagccagggagctgcctcgtggccaggagctggagtccgagtggtggtgcaaagagtgtattctcttcccagcagagacagcaccaggggtcagcagggggccagctcaggacacacagacccagctggaactcgagcctgccttctggtacaagatgcctgtggaatgttcggtgaagtgcacttggagttcaccatgtcgaaggcaagacagttggaagggaagtcttgcagcctggtgggaatgaaggttctacagaaagtcaccagaggaaggacagcggggattttcagtttgattgacaccctgtggcccccagcgatacctctgaaaacacctggccgcgaccagccctgtgaagagataaaaactcatctgcctcctccagccttgtgttacatcctcacagctcatccaaatctgggacaaattgatataattgacgaagaccccatttataagctttaccagcctccagttacccgctgcttaagagacattctccagatgaatgatcttggtacccgttgcagtttctatgccacggtgatttaccaaaaaccacagctgaagagtctgctgcttctggagcaaagggagatctggctgctagtgaccgatgtcactctgcaaacgaaggaggagagagaccccaggctccccaaaaccctgctggtctatgtggcccccttgtgtgtgctgggctctgaagtcctggaggcactcgctggggctgcccctcacagcctcttcttcaaggacgctctccgtgaccagggtcggattgtttgtgctgaacgaactgtcctcttgcttcagaagccccttttgagtgtggtctctggtgcaagttcctgtgagctgcctggcccggtgatgctcgacagcctggactctgcaacacctgtcaactccatctgcagtgttcaaggcactgtggttggcgtggacgagagcactgctttctcatggcctgtgtgtgacatgtgtggcaacgggagattggaacagaggccggaagacagaggcgccttttcctgtggggactgctcccgggtggtcacatctcctgttctcaagaggcacctgcaggtcttcctggactgccgctcaagaccgcagtgcagagtgaaggtcaagctgttgcagcgcagcatttcctccctgctgaggtttgccgccggtgaagatgggagctacgaagtgaagagtgtcctcggaaaggaagtggggttgttaaattgttttgtccagtccgtaaccgcccacccgaccagctgcattggattggaggaaatcgagcttctgagtgcaggaggggcctctgcagaacactagcggttgccgcaggatctgtgaactttgcaatgtggctgcaagggtggtggtggtggtggtgatttggggtagttatttgttaactatggacacagtgaacgtagtttacgatcttgaaatgaaacttagatttttctggggaaatgttcagatacagttttgtgaactgtaaatcaaaatacctttttctacagtttatcttttattttctgcaaatttaggaacatatttactcgttttcacattgaatcttaagtttaagctcttcatttggtatttaggcaatatatgagaaaaaaattttttttgttcatttgtaattttaacaagttgaacattttaccatgattgaacatgtttttattacagtatttaacattcccccaaagaataccctgcaaagtgtaaacctttgtcccatactgtgatattactgttctgctacaataaatgtcaaacctaagc

SEQ ID NO: 287135 - DNA, 3327 bp, Homo sapiens
agcggggggtgggacggggcgcgctgaggaggcggtgcgctcaggcggcgctcccggagatgccccgcggcagccgcgctcggggctctaagagaaaaaggagttggaatacagaatgcccatcctttccaggagaaagaccactgcaggtcagaagagcaggtctcaggacagcaggggcagctgcctctctctctgaagcatggctcaggtgtggagaagggtttcagaacacttctgggaatccgtcattaacagctgaagagaagacgattacagaaaagcaccttgaattatgccctagacccaagcaagaaaccaccacatctaaaagcaccagtgggcttacagacataacatggagctccagtggaagtgatttgtcggatgaagataagacactttctcagttacagagagatgaattacagtttatcgactgggagattgacagtgacagggcagaggctagtgactgtgatgaatttgaagatgacgagggtgctgtggaaatctcagactgtgcttcttgtgcaagtaatcagtctttgacaagtgatgagaagctgtcggagcttcccaagccaagttctatagaaattttagagtattcatcagatagtgaaaaagaagatgatttggaaaatgtcctactcattgattcagaatcccctcacaaataccacgtgcagtttgcatcggatgcaagacagattatggagagactgatagatccaaggacaaaatcaacagagaccattttgcatacacctcagaaacccacagctaagtttcccaggactccagaaaattcagcaaagaagaagcttttaagaggtggactagcagaaagactaaatggactgcagaatcgagagagatctgctatttctttgtggagacatcaatgtatttcttaccaaaagacactttcaggtagaaaatctggtgtattaactgtgaaaattttagagctgcatgaggaatgtgccatgcaagttgccatgtgtgagcagttattggggtcaccagccaccagctcctcccaaagtgtggctcccaggcctggagctggcctgaaagttctcttcaccaaggagactgcaggctacctcaggggccgtccccaggacactgtccggatcttccctccctggcaaaaactgattattccaagtggaagttgccctgttattctgaatacttacttttgtgagaaagttgttgccaaagaagattcagaaaaaacttgtgaagtgtactgtccggacataccccttccaagaagaagcatctctttggcccagatgtttgtaattaagggtctaacaaataattcacctgaaatccaggttgtgtgtagtggtgtagccactacagggacagcctggacccatgggcacaaagaagcaaaacagcgcatcccaaccagcactcccctgagggattctctcctggatgtggtggaaagccagggagctgcctcgtggccaggagctggagtccgagtggtggtgcaaagagtgtattctcttcccagcagagacagcaccaggggtcagcagggggccagctcaggacacacagacccagctggaactcgagcctgccttctggtacaagatgcctgtggaatgttcggtgaagtgcacttggagttcaccatgtcgaaggcaagacagttggaagggaagtcttgcagcctggtgggaatgaaggttctacagaaagtcaccagaggaaggacagcggggattttcagtttgattgacaccctgtggcccccagcgatacctctgaaaacacctggccgcgaccagccctgtgaagagataaaaactcatctgcctcctccagccttgtgttacatcctcacagctcatccaaatctgggacaaattgatataattgacgaagaccccatttataagctttaccagcctccagttacccgctgcttaagagacattctccagatgaatgatcttggtacccgttgcagtttctatgccacggtgatttaccaaaaaccacagctgaagagtctgctgcttctggagcaaagggagatctggctgctagtgaccgatgtcactctgcaaacgaaggaggagagagaccccaggctccccaaaaccctgctggtctatgtggcccccttgtgtgtgctgggctctgaagtcctggaggcactcgctggggctgcccctcacagcctcttcttcaaggacgctctccgtgaccagggtcggattgtttgtgctgaacgaactgtcctcttgcttcagaagccccttttgagtgtggtctctggtgcaagttcctgtgagctgcctggcccggtgatgctcgacagcctggactctgcaacacctgtcaactccatctgcagtgttcaaggcactgtggttggcgtggacgagagcactgctttctcatggcctgtgtgtgacatgtgtggcaacgggagattggaacagaggccggaagacagaggcgccttttcctgtggggactgctcccgggtggtcacatctcctgttctcaagaggcacctgcaggtcttcctggactgccgctcaagaccgcagtgcagagtgaaggtcaaggtaggagccaggccagagcacgcacgcactcctagctcactccaacatagcgaagctgttgcagcgcagcatttcctccctgctgaggtttgccgccggtgaagatgggagctacgaagtgaagagtgtcctcggaaaggaagtggggttgttaaattgttttgtccagtccgtaaccgcccacccgaccagctgcattggattggaggaaatcgagcttctgagtgcaggaggggcctctgcagaacactagcggttgccgcaggatctgtgaactttgcaatgtggctgcaagggtggtggtggtggtggtgatttggggtagttatttgttaactatggacacagtgaacgtagtttacgatcttgaaatgaaacttagatttttctggggaaatgttcagatacagttttgtgaactgtaaatcaaaatacctttttctacagtttatcttttattttctgcaaatttaggaacatatttactcgttttcacattgaatcttaagtttaagctcttcatttggtatttaggcaatatatgagaaaaaaattttttttgttcatttgtaattttaacaagttgaacattttaccatgattgaacatgtttttattacagtatttaacattcccccaaagaataccctgcaaagtgtaaacctttgtcccatactgtgatattactgttctgctacaataaatgtcaaacctaagc

SEQ ID NO: 287136 - DNA, 4736 bp, Homo sapiens
agcggggggtgggacggggcgcgctgaggaggcggtgcgctcaggcggcgctcccggagatgccccgcggcagccgcgctcggggctctaagagaaaaaggagttggaatacagaatgcccatcctttccaggagaaagaccactgcaggtcagaagagcaggtctcaggacagcaggggcagctgcctctctctctgaagcatggctcaggtgtggagaagggtttcagaacacttctgggaatccgtcattaacagctgaagagaagacgattacagaaaagcaccttgaattatgccctagacccaagcaagaaaccaccacatctaaaagcaccagtgggcttacagacataacatggagctccagtggaagtgatttgtcggatgaagataagacactttctcagttacagagagatgaattacagtttatcgactgggagattgacagtgacagggcagaggctagtgactgtgatgaatttgaagatgacgagggtgctgtggaaatctcagactgtgcttcttgtgcaagtaatcagtctttgacaagtgatgagaagctgtcggagcttcccaagccaagttctatagaaattttagagtattcatcagatagtgaaaaagaagatgatttggaaaatgtcctactcattgattcagaatcccctcacaaataccacgtgcagtttgcatcggatgcaagacagattatggagagactgatagatccaaggacaaaatcaacagagaccattttgcatacacctcagaaacccacagctaagtttcccaggactccagaaaattcagcaaagaagaagcttttaagaggtggactagcagaaagactaaatggactgcagaatcgagagagatctgctatttctttgtggagacatcaatgtatttcttaccaaaagacactttcaggtagaaaatctggtgtattaactgtgaaaattttagagctgcatgaggaatgtgccatgcaagttgccatgtgtgagcagttattggggtcaccagccaccagctcctcccaaagtgtggctcccaggcctggagctggcctgaaagttctcttcaccaaggagactgcaggctacctcaggggccgtccccaggacactgtccggatcttccctccctggcaaaaactgattattccaagtggaagttgccctgttattctgaatacttacttttgtgagaaagttgttgccaaagaagattcagaaaaaacttgtgaagtgtactgtccggacataccccttccaagaagaagcatctctttggcccagatgtttgtaattaagggtctaacaaataattcacctgaaatccaggttgtgtgtagtggtgtagccactacagggacagcctggacccatgggcacaaagaagcaaaacagcgcatcccaaccagcactcccctgagggattctctcctggatgtggtggaaagccagggagctgcctcgtggccaggagctggagtccgagtggtggtgcaaagagtgtattctcttcccagcagagacagcaccaggggtcagcagggggccagctcaggacacacagacccagctggaactcgagcctgccttctggtacaagatgcctgtggaatgttcggtgaagtgcacttggagttcaccatgtcgaaggcaagacagttggaagggaagtcttgcagcctggtgggaatgaaggttctacagaaagtcaccagaggaaggacagcggggattttcagtttgattgacaccctgtggcccccagcgatacctctgaaaacacctggccgcgaccagccctgtgaagagataaaaactcatctgcctcctccagccttgtgttacatcctcacagctcatccaaatctgggacaaattgatataattgacgaagaccccatttataagctttaccagcctccagttacccgctgcttaagagacattctccagatgaatgatcttggtacccgttgcagtttctatgccacggtgatttaccaaaaaccacagctgaagagtctgctgcttctggagcaaagggagatctggctgctagtgaccgatgtcactctgcaaacgaaggaggagagagaccccaggctccccaaaaccctgctggtctatgtggcccccttgtgtgtgctgggctctgaagtcctggaggcactcgctggggctgcccctcacagcctcttcttcaaggacgctctccgtgaccagggtgtgcttgcgtctccacagctttgatgcaggggcgactgatccgtgcccatagaatacctcttgtggcctctggatgcctccttgttgcttggacgctgccggcaccttcacggagcccatcacagacatggcccatgtaccagcctccagccttcactgaccctgtagcagccacctgggcagaaccagctccatggagatgctgtgctcactccagaattgcctgctggtggcaccccatactgctgcagactccacaaacaaaccaaaagctagaatattataaatgcgtatacttagatcagccagcccctttttccagggatcaaactaaaatcctgcctcagctatcttttttaatttttattgagtcataattcacatgccacataatttaccctgtgtggattgacttgaatctcacatttgagtgcttttttagcttagctcatggggttcaggagtgtgcacacacaatgaacgtgctgctggacacagtcccataactgcaccttcacctgcatgactcgaggggtagcaaaggagactgccattatgggcacaattcactttttcttcaaggcttcaataacctgaagtgtctctgtcggcaggtcggattgtttgtgctgaacgaactgtcctcttgcttcagaagccccttttgagtgtggtctctggtgcaagttcctgtgagctgcctggcccggtgatgctcgacagcctggactctgcaacacctgtcaactccatctgcagtgttcaaggcactgtggttggcgtggacgagagcactgctttctcatggcctgtgtgtgacatgtgtggcaacgggagattggaacagaggccggaagacagaggcgccttttcctgtggggactgctcccgggtggtcacatctcctgttctcaagaggcacctgcaggtcttcctggactgccgctcaagaccgcagtgcagagtgaaggtcaagctgttgcagcgcagcatttcctccctgctgaggtttgccgccggtgaagatgggagctacgaagtgaagagtgtcctcggaaaggaagtggggttgttaaattgttttgtccagtccgtaaccgcccacccgaccagctgcattggattggaggaaatcgagcttctgagtgcaggaggggcctctgcagaacactagcggttgccgcaggatctgtgaactttgcaatgtggctgcaagggtggtggtggtggtggtgatttggggtagttatttgttaactatggacacagtgaacgtagtttacgatcttgaaatgaaacttagatttttctggggaaatgttcagatacagttttgtgaactgtaaatcaaaatacctttttctacagtttatcttttattttctgcaaatttaggaacatatttactcgttttcacattgaatcttaagtttaagctcttcatttggtatttaggcaatatatgagaaaaaaattttttttgttcatttgtaattttaacaagttgaacattttaccatgattgaacatgtttttattacagtatttaacattcccccaaagaataccctgcaaagtgtaaacctttgtcccatactgtgatattactgttctgctacaataaatgtcaaacctaagcactttgcagttcactacttttgggaaaatgttctagggaactgtatcacaggtgaaactgttacccataaagtgtagctctctgaactggtgtgatcgtgtctctgctgaatggtggtggggatagctggctccaccacacacacctgttttaattaggctgggtaatgtgcacggagagcaaagatcacagactaaggagcagtcagtcggatatttgctttgctggcaaagatttaaaccaagaattaattatctttggacactataaagattttgttcccttccttatagcaatataatcatgacaggccatggttaactacatcagatacacgtagcagccgtgaccaagacatggtgccctaataccaagtgttcttgggttaaaggcaggcggctttttaattaaatcttaaagcactgcaattactggcaagacagctggtcttaagcagttttgtgactgcccttttcatccactacatgactattccggcctttctggagcacttttgaaaatctacttgactctgtccacaagactgaggaaagtgaaagcaaagtcccgggaaagcgggagatgattcagcccggggttctgcccctcgcccctccagcagcctctacagttagggagctcttgaactgttctcagcaggggcccccaaaaagtcaacccttccccaggtctgcgttcttcgggagaacaccttctgctggaaagctgctagcttacctgagctcagccgtgctccacctagcttaggcaagttaaataaggccaggagagagcctttaatgcgttttaaaagcgacagaccctctctcctgagtagctcgggcctg

SEQ ID NO: 287137 - DNA, 1874 bp, Homo sapiens
tggctgtgttgctgcaagtgggacaccaggttttatcctgctgggatatgcgtgtctaaacgtgtactgtcgcagagaatgcctcttattgttgttcttatcgtaatgttatcctgcagcttttctcagtatcgagcatccacacaaagcaaatatttctttcatgggaaacggtaaaaatgggaaaaggacactctgtttctagagcctgccttctggtacaagatgcctgtggaatgttcggtgaagtgcacttggagttcaccatgtcgaaggcaagacagttggaagggaagtcttgcagcctggtgggaatgaaggttctacagaaagtcaccagaggaaggacagcggggattttcagtttgattgacaccctgtggcccccagcgatacctctgaaaacacctggccgcgaccagccctgtgaagagataaaaactcatctgcctcctccagccttgtgttacatcctcacagctcatccaaatctgggacaaattgatataattgacgaagaccccatttataagctttaccagcctccagttacccgctgcttaagagacattctccagatgaatgatcttggtacccgttgcagtttctatgccacggtgatttaccaaaaaccacagctgaagagtctgctgcttctggagcaaagggagatctggctgctagtgaccgatgtcactctgcaaacgaaggaggagagagaccccaggctccccaaaaccctgctggtctatgtggcccccttgtgtgtgctgggctctgaagtcctggaggcactcgctggggctgcccctcacagcctcttcttcaaggacgctctccgtgaccagggtcggattgtttgtgctgaacgaactgtcctcttgcttcagaagccccttttgagtgtggtctctggtgcaagttcctgtgagctgcctggcccggtgatgctcgacagcctggactctgcaacacctgtcaactccatctgcagtgttcaaggcactgtggttggcgtggacgagagcactgctttctcatggcctgtgtgtgacatgtgtggcaacgggagattggaacagaggccggaagacagaggcgccttttcctgtggggactgctcccgggtggtcacatctcctgttctcaagaggcacctgcaggtcttcctggactgccgctcaagaccgcagtgcagagtgaaggtcaagctgttgcagcgcagcatttcctccctgctgaggtttgccgccggtgaagatgggagctacgaagtgaagagtgtcctcggaaaggaagtggggttgttaaattgttttgtccagtccgtaaccgcccacccgaccagctgcattggattggaggaaatcgagcttctgagtgcaggaggggcctctgcagaacactagcggttgccgcaggatctgtgaactttgcaatgtggctgcaagggtggtggtggtggtggtgatttggggtagttatttgttaactatggacacagtgaacgtagtttacgatcttgaaatgaaacttagatttttctggggaaatgttcagatacagttttgtgaactgtaaatcaaaatacctttttctacagtttatcttttattttctgcaaatttaggaacatatttactcgttttcacattgaatcttaagtttaagctcttcatttggtatttaggcaatatatgagaaaaaaattttttttgttcatttgtaattttaacaagttgaacattttaccatgattgaacatgtttttattacagtatttaacattcccccaaagaataccctgcaaagtgtaaacctttgtcccatactgtgatattactgttctgctacaataaatgtcaaacctaagc

SEQ ID NO: 287138 - DNA, 1880 bp, Homo sapiens
agtgatgaccgtgcgggacttcacacaggtgtttgacagctacgcccagttcgaggagagcatgatcgctgcaaagatggagaccgcctcggagctggggcgcgaggaggaggatgatgtggacctggaactgcgcctggcccgctgaagatgatgttcatcatcttcagcggggggccagctcaggacacacagccccagctggaactcgagcctgccttctggtacaagatgcctgtggaatgttcggtgaagtgcacttggagttcaccatgtcgaaggcaagacagttggaagggaagtcttgcagcctggtgggaatgaaggttctacagaaagtcaccagaggaaggacagcggggattttcagtttgattgacaccctgtggcccccagcgatacctctgaaaacacctggccgcgaccagccctgtgaagagataaaaactcatctgcctcctccagccttgtgttacatcctcacagctcatccaaatctgggacaaattgatataattgacgaagaccccatttataagctttaccagcctccagttacccgctgcttaagagacattctccagatgaatgatcttggtacccgttgcagtttctatgccacggtgatttaccaaaaaccacagctgaagagtctgctgcttctggagcaaagggagatctggctgctagtgaccgatgtcactctgcaaacgaaggaggagagagaccccaggctccccaaaaccctgctggtctatgtggcccccttgtgtgtgctgggctctgaagtcctggaggcactcgctggggctgcccctcacagcctcttcttcaaggacgctctccgtgaccagggtcggattgtttgtgctgaacgaactgtcctcttgcttcagaagccccttttgagtgtggtctctggtgcaagttcctgtgagctgcctggcccggtgatgctcgacagcctggactctgcaacacctgtcaactccatctgcagtgttcaaggcactgtggttggcgtggacgagagcactgctttctcatggcctgtgtgtgacatgtgtggcaacgggagattggaacagaggccggaagacagaggcgccttttcctgtggggactgctcccgggtggtcacatctcctgttctcaagaggcacctgcaggtcttcctggactgccgctcaagaccgcagtgcagagtgaaggtcaagctgttgcagcgcagcatttcctccctgctgaggtttgccgccggtgaagatgggagctacgaagtgaagagtgtcctcggaaaggaagtggggttgttaaattgttttgtccagtccgtaaccgcccacccgaccagctgcattggattggaggaaatcgagcttctgagtgcaggaggggcctctgcagaacactagcggttgccgcaggatctgtgaactttgcaatgtggctgcaagggtggtggtggtggtggtgatttggggtagttatttgttaactatggacacagtgaacgtagtttacgatcttgaaatgaaacttagatttttctggggaaatgttcagatacagttttgtgaactgtaaatcaaaatacctttttctacagtttatcttttattttctgcaaatttaggaacatatttactcgttttcacattgaatcttaagtttaagctcttcatttggtatttaggcaatatatgagaaaaaaattttttttgttcatttgtaattttaacaagttgaacattttaccatgattgaacatgtttttattacagtatttaacattcccccaaagaataccctgcaaagtgtaaacctttgtcccatactgtgatattactgttctgctacaataaatgtcaaacctaagc

SEQ ID NO: 287139 - DNA, 1495 bp, Homo sapiens
gagttacgaagttcgagcgtcggtactccaggccgcgggtctgaactgtgaagagataaaaactcatctgcctcctccagccttgtgttacatcctcacagctcatccaaatctgggacaaattgatataattgacgaagaccccatttataagctttaccagcctccagttacccgctgcttaagagacattctccagatgaatgatcttggtacccgttgcagtttctatgccacggtgatttaccaaaaaccacagctgaagagtctgctgcttctggagcaaagggagatctggctgctagtgaccgatgtcactctgcaaacgaaggaggagagagaccccaggctccccaaaaccctgctggtctatgtggcccccttgtgtgtgctgggctctgaagtcctggaggcactcgctggggctgcccctcacagcctcttcttcaaggacgctctccgtgaccagggtcggattgtttgtgctgaacgaactgtcctcttgcttcagaagccccttttgagtgtggtctctggtgcaagttcctgtgagctgcctggcccggtgatgctcgacagcctggactctgcaacacctgtcaactccatctgcagtgttcaaggcactgtggttggcgtggacgagagcactgctttctcatggcctgtgtgtgacatgtgtggcaacgggagattggaacagaggccggaagacagaggcgccttttcctgtggggactgctcccgggtggtcacatctcctgttctcaagaggcacctgcaggtcttcctggactgccgctcaagaccgcagtgcagagtgaaggtcaagctgttgcagcgcagcatttcctccctgctgaggtttgccgccggtgaagatgggagctacgaagtgaagagtgtcctcggaaaggaagtggggttgttaaattgttttgtccagtccgtaaccgcccacccgaccagctgcattggattggaggaaatcgagcttctgagtgcaggaggggcctctgcagaacactagcggttgccgcaggatctgtgaactttgcaatgtggctgcaagggtggtggtggtggtggtgatttggggtagttatttgttaactatggacacagtgaacgtagtttacgatcttgaaatgaaacttagatttttctggggaaatgttcagatacagttttgtgaactgtaaatcaaaatacctttttctacagtttatcttttattttctgcaaatttaggaacatatttactcgttttcacattgaatcttaagtttaagctcttcatttggtatttaggcaatatatgagaaaaaaattttttttgttcatttgtaattttaacaagttgaacattttaccatgattgaacatgtttttattacagtatttaacattcccccaaagaataccctgcaaagtgtaaacctttgtcccatactgtgatattactgttctgctacaataaatgtcaaacctaagc

SEQ ID NO: 287140 - DNA, 2902 bp, Homo sapiens
agcggggggtgggacggggcgcgctgaggaggcggtgcgctcaggcggcgctcccggagatgccccgcggcagccgcgctcggggctctaagagaaaaaggagttggaatacagaatgcccatcctttccaggagaaagaccactgcaggtcagaagagcaggtctcaggacagcaggggcagctgcctctctctctgaagcatggctcaggtgtggagaagggtttcagaacacttctgggaatccgtcattaacagctgaagagaagacgattacagaaaagcaccttgaattatgccctagacccaagcaagaaaccaccacatctaaaagcaccagtgggcttacagacataacatggagctccagtggaagtgatttgtcggatgaagataagacactttctcagttacagagagatgaattacagtttatcgactgggagattgacagtgacagggcagaggctagtgactgtgatgaatttgaagatgacgagggtgctgtggaaatctcagactgtgcttcttgtgcaagtaatcagtctttgacaagtgatgagaagctgtcggagcttcccaagccaagttctatagaaattttagagtattcatcagatagtgaaaaagaagatgatttggaaaatgtcctactcattgattcagaatcccctcacaaataccacgtgcagtttgcatcggatgcaagacagattatggagagactgatagatccaaggacaaaatcaacagagaccattttgcatacacctcagaaacccacagctaagtttcccaggactccagaaaattcagcaaagaagaagcttttaagaggtggactagcagaaagactaaatggactgcagaatcgagagagatctgctatttctttgtggagacatcaatgtatttcttaccaaaagacactttcaggtagaaaatctggtgtattaactgtgaaaattttagagctgcatgaggaatgtgccatgcaagttgccatgtgtgagcagttattggggtcaccagccaccagctcctcccaaagtgtggctcccaggcctggagctggcctgaaagttctcttcaccaaggagactgcaggctacctcaggggccgtccccaggacactgtccggatcttccctccctggcaaaaactgattattccaagtggaagttgccctgttattctgaatacttacttttgtgagaaagttgttgccaaagaagattcagaaaaaacttgtgaagtgtactgtccggacataccccttccaagaagaagcatctctttggcccagatgtttgtaattaagggtctaacaaataattcacctgaaatccaggttgtgtgtagtggtgtagccactacagggacagcctggacccatgggcacaaagaagcaaaacagcgcatcccaaccagcactcccctgagggattctctcctggatgtggtggaaagccagggagctgcctcgtggccaggagctggagtccgagtggtggtgcaaagagtgtattctcttcccagcagagacagcaccaggggtcagcagggggccagctcaggacacacagacccagctggaactcgagcctgccttctggtacaagatgcctgtggaatgttcggtgaagtgcacttggagttcaccatgtcgaaggcaagacagttggaagggaagtcttgcagcctggtgggaatgaaggttctacagaaagtcaccagaggaaggacagcggggattttcagtttgattgacaccctgtggcccccagcgatacctctgaaaacacctggccgcgaccagccctgtgaagagataaaaactcatctgcctcctccagccttgtgttacatcctcacagctcatccaaatctgggacaaattgatataattgacgaagaccccatttataagctttaccagcctccagttacccgctgcttaagagacattctccagatgaatgatcttggtacccgttgcagtttctatgccacggtgatttaccaaaaaccacagctgaagagtctgctgcttctggagcaaagggagatctggctgctagtgaccgatgtcactctgcaaacgaaggaggagagagaccccaggctccccaaaaccctgctggtctatgtggcccccttgtgtgtgctgggctctgaagtcctggaggcactcgctggggctgcccctcacagcctcttcttcaaggacgctctccgtgaccagggtcggattgtttgtgctgaacgaactgtcctcttgcttcagaagccccttttgagtgtggtctctggtgcaagttcctgtgagctgcctggcccggtgatgctcgacagcctggactctgcaacacctgtcaactccatctgcagtgttcaaggcactgtggttggcgtggacgagagcactgctttctcatggcctgtgtgtgacatgtgtggcaacgggagattggaacagaggccggaagacagaggcgccttttcctgtggggactgctcccgggtggtcacatctcctgttctcaagaggcacctgcaggtcttcctggactgccgctcaagaccgcagtgcagagtgaaggtcaagctgttgcagcgcagcatttcctccctgctgaggtttgccgccggtgaagatggggtaagtgcagggggcccagcccagggggccgcacactcagtagcctgcatgagcaactcatccccagaggaagcccccactcccaaatgtgttctattacaacccatcccactaggaagtggtgtagacactcgagagtgaaatgcagatatgtctgccattcagactgataggttcctttcctctgtggaaatgaggttattttagatcattgttgaggtagatgcaggaatctgtcc

SEQ ID NO: 287141 - DNA, 1791 bp, Homo sapiens
agcggggggtgggacggggcgcgctgaggaggcggtgcgctcaggcggcgctcccggagatgccccgcggcagccgcgctcggggctctaagagaaaaaggagttggaatacagaatgcccatcctttccaggagaaagaccactgcaggtcagaagagcaggtctcaggacagcaggggcagctgcctctctctctgaagcatggctcaggtgtggagaagggtttcagaacacttctgggaatccgtcattaacagctgaagagaagacgattacagaaaagcaccttgaattatgccctagacccaagcaagaaaccaccacatctaaaagcaccagtgggcttacagacataacatggagctccagtggaagtgatttgtcggatgaagataagacactttctcagttacagagagatgaattacagtttatcgactgggagattgacagtgacagggcagaggctagtgactgtgatgaatttgaagatgacgagggtgctgtggaaatctcagactgtgcttcttgtgcaagtaatcagtctttgacaagtgatgagaagctgtcggagcttcccaagccaagttctatagaaattttagagtattcatcagatagtgaaaaagaagatgatttggaaaatgtcctactcattgattcagaatcccctcacaaataccacgtgcagtttgcatcggatgcaagacagattatggagagactgatagatccaaggacaaaatcaacagagaccattttgcatacacctcagaaacccacagctaagtttcccaggactccagaaaattcagcaaagaagaagcttttaagaggtggactagcagaaagactaaatggactgcagaatcgagagagatctgctatttctttgtggagacatcaatgtatttcttaccaaaagacactttcaggtagaaaatctggtgtattaactgtgaaaattttagagctgcatgaggaatgtgccatgcaagttgccatgtgtgagcagttattggggtcaccagccaccagctcctcccaaagtgtggctcccaggcctggagctggcctgaaagttctcttcaccaaggagactgcaggctacctcaggggccgtccccaggacactgtccggatcttccctccctggcaaaaactgattattccaagtggaagttgccctgttattctgaatacttacttttgtgagaaagttgttgccaaagaagattcagaaaaaacttgtgaagtgtactgtccggacataccccttccaagaagaagcatctctttggcccagatgtttgtaattaagggtctaacaaataattcacctgaaatccaggttgtgtgtagtggtgtagccactacagggacagcctggacccatgggcacaaagaagcaaaacagcgcatcccaaccagcactcccctgagggattctctcctggatgtggtggaaagccagggagctgcctcgtggccaggagctggagtccgagtggtggtgcaaagagtgtattctcttcccagcagagacagcaccaggggtcagcagggggccagctcaggacacacagacccagctggaactcgagcctgccttctggtacaagatgcctgtggaatgttcggtgaagtgcacttggagttcaccatgtcgaaggcaagacagttggaagggaagtcttgcagcctggtgggaatgaaggttctacagaaagtcaccagaggaagacagcggggattttcagttgatcgagctacgggatcctctagaccag

SEQ ID NO: 287142 - DNA, 1262 bp, Homo sapiens
ctgactccgatttaggaatatcctaccacttctccatcaacaaatctcccatcactgccgtcccacggcctcgctcgcgcccacagacccactcacaattccttgatcagcaccatcttcccggaaccccctcacagctgccgccgataccaccgccgccgccgccgctaccgcctctcacagcgcctgcgcggccccgcctccctgcccccccgagccaccatcgcgcctgcgtgcttacacccttccgccgcgaccagtcgcgtcagcgcgcgagggggcctagctccgcccagtttcgtgccccaccccgggcacacgaggcctccactgcggttgcgcagcctgccgaagagcgtgcggcttctactgcggctgcgcaagctcgacgcgcactcttgtctgcttacgagggctcctcccttcagctttggtccctcggggcgtctgggcagcctacgctttccgactggaatcagccattttaccaagaaagttgggtttcttttactggcaaatagtacttcaagagcacagtcttatgtaagaagtacagtctatataaagactgtccaggacaaaaactggccactccattcagcattgacagcagtatttaaagctggtgcatggtgaggtgaagtttctcaagggcaaagacaatgccttcatgcatgttcagtgtctgcccccgtgggcttttggaaatgatcgctgacaatgggggatctgcagtgacttctctggcctctgccaaagcccagggggtgctgctccctaattctaaggattctaatgagactcagagcaggtgtaacacagggcatggagcttcctgagcaagaggctggctaacaaactgtggacgtggtacttagacacattaagagacattacagggacacctgcaagtatgtctccctggggagaagccaagtgcagatgctatggccacagatgatatggtttggctctgtgtccccactcaaatctcatctcaagttgtaatccctggatgtcgagggagggacctggtgggaggtgattggattggttcgcatgatagtgagggagttctcacgagatctggttgtttgataagtgtctggcatttctcctgtgctgtctctcctgccaccttgtgaagaaggtgcctgcttctccttcgccttccgccatgattgtaagtttcctgaggcctccctagcaatgcagaactgtgagtcaattaaacttcctttctttataaattaaaaaaaatc

SEQ ID NO: 287143 - DNA, 1107 bp, Homo sapiens
gcttgcttcccggttttcaggattacttcctcctgaccaacttcacagagatcaaaacctagaggaacaaagaatataagcatctgcttccttcgggaagattccagatcttgaacatgagcgctatagggctccttgtgcaacttcatggaatgcctgcaaggcccttcagcaagcatttgggcctggggcttccccatgtctgcacagaggttggtcatgtggcagaggggtcgggctgccccacccagaacatccactctacgcagcccccatttggcgtgtgtgtggctctcactgcctggctctcctctgtcccttcacggaaagcactatggaccagaactcagtaaggctcactcacatgttttcttttccatttttttttcacagaagtacagtctatataaagactgtccaggacaaaaactggccactccattcagcattgacagcagtatttaaagctggtgcatggtgaggtgaagtttctcaagggcaaagacaatgccttcatgcatgttcagtgtctgcccccgtgggcttttggaaatgatcgctgacaatgggggatctgcagtgacttctctggcctctgccaaagcccagggggtgctgctccctaattctaaggattctaatgagactcagagcaggtgtaacacagggcatggagcttcctgagcaagaggctggctaacaaactgtggacgtggtacttagacacattaagagacattacagggacacctgcaagtatgtctccctggggagaagccaagtgcagatgctatggccacagatgatatggtttggctctgtgtccccactcaaatctcatctcaagttgtaatccctggatgtcgagggagggacctggtgggaggtgattggattggttcgcatgatagtgagggagttctcacgagatctggttgtttgataagtgtctggcatttctcctgtgctgtctctcctgccaccttgtgaagaaggtgcctgcttctccttcgccttccgccatgattgtaagtttcctgaggcctccctagcaatgcagaactgtgagtcaattaaacttcctttctttataaattaaaaaaaatc

SEQ ID NO: 287144 - DNA, 1423 bp, Homo sapiens
ctgactccgatttaggaatatcctaccacttctccatcaacaaatctcccatcactgccgtcccacggcctcgctcgcgcccacagacccactcacaattccttgatcagcaccatcttcccggaaccccctcacagctgccgccgataccaccgccgccgccgccgctaccgcctctcacagcgcctgcgcggccccgcctccctgcccccccgagccaccatcgcgcctgcgtgcttacacccttccgccgcgaccagtcgcgtcagcgcgcgagggggcctagctccgcccagtttcgtgccccaccccgggcacacgaggcctccactgcggttgcgcagcctgccgaagagcgtgcggcttctactgcggctgcgcaagctcgacgcgcactcttgtctgcttacgagggctcctcccttcagctttggtccctcggggcgtctgggcagcctacgctttccggataaaaatggcagaatgaaagaattatgagtggaactagagaataggaaagacatgaaccaacgcccaaaatgagaaagaaggacatataaagaaaaagacaaatacaagtgaaaaaaatagactaatggattaacgtccctgtcgtgtgacattttctgactggaatcagccattttaccaagaaagttgggtttcttttactggcaaatagtacttcaagagcacagtcttatgtaagaagtacagtctatataaagactgtccaggacaaaaactggccactccattcagcattgacagcagtatttaaagctggtgcatggtgaggtgaagtttctcaagggcaaagacaatgccttcatgcatgttcagtgtctgcccccgtgggcttttggaaatgatcgctgacaatgggggatctgcagtgacttctctggcctctgccaaagcccagggggtgctgctccctaattctaaggattctaatgagactcagagcaggtgtaacacagggcatggagcttcctgagcaagaggctggctaacaaactgtggacgtggtacttagacacattaagagacattacagggacacctgcaagtatgtctccctggggagaagccaagtgcagatgctatggccacagatgatatggtttggctctgtgtccccactcaaatctcatctcaagttgtaatccctggatgtcgagggagggacctggtgggaggtgattggattggttcgcatgatagtgagggagttctcacgagatctggttgtttgataagtgtctggcatttctcctgtgctgtctctcctgccaccttgtgaagaaggtgcctgcttctccttcgccttccgccatgattgtaagtttcctgaggcctccctagcaatgcagaactgtgagtcaattaaacttcctttctttataaattaaaaaaaatc

SEQ ID NO: 287145 - DNA, 1182 bp, Homo sapiens
ctgactccgatttaggaatatcctaccacttctccatcaacaaatctcccatcactgccgtcccacggcctcgctcgcgcccacagacccactcacaattccttgatcagcaccatcttcccggaaccccctcacagctgccgccgataccaccgccgccgccgccgctaccgcctctcacagcgcctgcgcggccccgcctccctgcccccccgagccaccatcgcgcctgcgtgcttacacccttccgccgcgaccagtcgcgtcagcgcgcgagggggcctagctccgcccagtttcgtgccccaccccgggcacacgaggcctccactgcggttgcgcagcctgccgaagagcgtgcggcttctactgcggctgcgcaagctcgacgcgcactcttgtctgcttacgagggctcctcccttcagctttggtccctcggggcgtctgggcagcctacgctttccgaagtacagtctatataaagactgtccaggacaaaaactggccactccattcagcattgacagcagtatttaaagctggtgcatggtgaggtgaagtttctcaagggcaaagacaatgccttcatgcatgttcagtgtctgcccccgtgggcttttggaaatgatcgctgacaatgggggatctgcagtgacttctctggcctctgccaaagcccagggggtgctgctccctaattctaaggattctaatgagactcagagcaggtgtaacacagggcatggagcttcctgagcaagaggctggctaacaaactgtggacgtggtacttagacacattaagagacattacagggacacctgcaagtatgtctccctggggagaagccaagtgcagatgctatggccacagatgatatggtttggctctgtgtccccactcaaatctcatctcaagttgtaatccctggatgtcgagggagggacctggtgggaggtgattggattggttcgcatgatagtgagggagttctcacgagatctggttgtttgataagtgtctggcatttctcctgtgctgtctctcctgccaccttgtgaagaaggtgcctgcttctccttcgccttccgccatgattgtaagtttcctgaggcctccctagcaatgcagaactgtgagtcaattaaacttcctttctttataaattaaaaaaaatc

SEQ ID NO: 287146 - DNA, 1244 bp, Homo sapiens
ctgactccgatttaggaatatcctaccacttctccatcaacaaatctcccatcactgccgtcccacggcctcgctcgcgcccacagacccactcacaattccttgatcagcaccatcttcccggaaccccctcacagctgccgccgataccaccgccgccgccgccgctaccgcctctcacagcgcctgcgcggccccgcctccctgcccccccgagccaccatcgcgcctgcgtgcttacacccttccgccgcgaccagtcgcgtcagcgcgcgagggggcctagctccgcccagtttcgtgccccaccccgggcacacgaggcctccactgcggttgcgcagcctgccgaagagcgtgcggcttctactgcggctgcgcaagctcgacgcgcactcttgtctgcttacgagggctcctcccttcagctttggtccctcggggcgtctgggcagcctacgctttccggataaaaatggcagaatgaaagaattatgagtggaactagagaataggaaagacatgaaccaacgcccaaaatgagaaagaaggacatataaagaaaaagacaaatacaagtgaaaaaaatagactaatggattaacgtccctgtcgtgtgacattttctgactatggaaatgatattagacaaaaagcaacttcaagtggttttcttatttgagttcaaaatgggtcataacgcagcagagataacttgaaacatgaacagcgcatttggcccaggaactactaacgaacatacagggcagctgtgattcaagaagttttgcaaagcagactagagccttgaatatgaggaacacagtggccagccattggatgcttcacttcttgaagcatcttgacagctttttgcaggtgaaatgcttccacaccagcaggatgcagaaaaatgctttccaagagtttgttgaatccagaagcatggatgtttatgctgcaggaataaacaaatttatttctcgttggcaaaaaagtgttgattgtaatggttcctattttgattaataaagatgtgtttgagcctagttataatgatttaaaattaatggtccaaaaatgcaattacttttgcaccaccaccaacacacacacacacctacacattctggatttgaattccatgttgattatatgcacttggaatatttcttttccatctgtggattgttctgtcacttattttctttaataaatgggtttctgaacctctgttgtattga

SEQ ID NO: 287147 - DNA, 1121 bp, Homo sapiens
ctgactccgatttaggaatatcctaccacttctccatcaacaaatctcccatcactgccgtcccacggcctcgctcgcgcccacagacccactcacaattccttgatcagcaccatcttcccggaaccccctcacagctgccgccgataccaccgccgccgccgccgctaccgcctctcacagcgcctgcgcggccccgcctccctgcccccccgagccaccatcgcgcctgcgtgcttacacccttccgccgcgaccagtcgcgtcagcgcgcgagggggcctagctccgcccagtttcgtgccccaccccgggcacacgaggcctccactgcggttgcgcagcctgccgaagagcgtgcggcttctactgcggctgcgcaagctcgacgcgcactcttgtctgcttacgagggctcctcccttcagctttggtccctcggggcgtctgggcagcctacgctttccggataaaaatggcagaatgaaagaattatgagtggaactagagaataggaaagacatgaaccaacgcccaaaatgagaaagaaggacatataaagaaaaagacaaatacaagtgaaaaaaatagactaatggattaacgtccctgtcgtgtgacattttctggtatgacagctgaagatgttgaaccgtatggtgcagttttgcaaatagtgtatgaagtgggttgtaagttttaccagtaattgtctatagatacaaaaaggagccaacctctttttttttcttttagtgtgatgttccttgttctatcttcgaactctcaaaggtagcctttacacagatgttcaaactaattctaccagtgtcatatgtctaccaatctcattacttcccttgtatgtacttctagagcaaagagctcattacagtaagaatgatggtaaattttactgaggcaaacaaagatttctgaacgcgagcagtgtgtgtgaaatgcttatgcactagctgatagcataactctggtcaaagaaatttggtcacttaaatattataattgaatttagcccctaaagtagctgttcttaacctggaatctgaagaacagcctgttggtggggctcccagggaatttgtgaaccactgaaattatat

SEQ ID NO: 287148 - DNA, 650 bp, Homo sapiens
aacaaatctgaaataccgatgtcaatttcacttactgctcttattgctcagaatgttctatctttggccagttgaatcccttcaaattgtctcctgaatcctgctgatgtgttcctggtaagtagtctttgacagcttcattggtataacaagatctagcacaaaagcttatctcatatattttctgccgttccagactggaatcagccattttaccaagaaagttgggtttcttttactggcaaatagtacttcaagagcacagtcttatgtaaggtaagtcatggcttctggatttgtaatcgttttttggcctttttagttgctagggcgaaaaaattttgtacacttaaatatatagataatgcatagggatatcgattatataaatatgacaggaacacttaatgtattatgtgcatacagttgacccttgagcaacatggatttgaactgcacagatccacttatacatggattttttttcaataaatatattggaaaattttttggagattcacaatgatttaaaaaaaaaaaacacttggccgggcgtggtggctcacgcctgtaatcccagcactctggggggccgaggcaggtggatcacgaggtcaggagatcgagaccatcctggctaacatggtgaa

SEQ ID NO: 287149 - DNA, 180 bp, Homo sapiens
taaccggtttagatgtatttattgacggaaagattaggttgctggaaaacatgaaatctatataataaaataatcctacattacatctatttacaggataaaaatggcagaatgaaagaattatgagtggaactagagaataggaaagacatgaaccaacgcccaaaatgagaaagaagg

SEQ ID NO: 287150 - DNA, 1038 bp, Homo sapiens
agggggcaagcgccgcctccgccgcgtgtccggggtcagcccgagcccgtgcgggccctttaagggccgggggcgtgtagcgggcccgccccctccccgcggcgcccgcagtccgttaagtgcgagccccggcgcaggggccggatctggccgggggccggcggcggtgtgggagcggcgcgtcatgtacaccatcaccaaggggcccagcaagctggtcgcgcagcgccgcacaggtcccacgcagcagcaggtggagggccggctcggcgagctcctgaaatgccggcagcccgcgccgccgacctcgcagcccccgcgggcgcagccctttgcgcagccgccgggaccctggcccctgtcgagtccagggccaaggcttgtgttcaatcgtgtgaatggccggcgggccccctccacgtccccatccttcgaggggacccaggagacctacacagtggcccacgaggagaatgtccgctttgtgtccgaagcctggcagcaggtgcaacagcagctggatggtggcccagccggtgagggcgggccaaggcctgtgcagtacgtggagaggacccccaatccccggctgcagaactttgtgcccattgacctagacgagtggtgggcgcagcagttcctggcgagaatcaccagctgttcctagtggctgctgggagggggcgctgctacacggccgacctgtcgccaggagagaagcatggcgccctgcccacccactgcgcctggctgggtgccggccacacctgaagtgccagcatttggacttttgcacctttttttcccttggcccggctgtcccaaccaagctgccatggccaagggccgaacccgtctgacctcagccctgctcactgtgcccagggaccagcgaccagcccctggggctggcagggaggagctccaggctaataaagtggagaaactgtccaggataagggggacgtccaaaaaaaaactccgttttgtggagagaaagcggaattcaccttaaaggaagcccggtaacggagaaga

SEQ ID NO: 287151 - DNA, 1728 bp, Homo sapiens
gcgggagccatctcctttggcatcgccccttgtctcgggccggtggggagtgggcgagggttatagtcactctcccgactcagggactgcccatcccggcacccagtcctcatcccatgggacgtgggggcagccagggagagggcaaaggcccccgttcccgtccaggtccatccgtccatggagggaaacatcgtggagatggaggtgcttctgtggggcgagaatgtggcctagaactacacccagagtgggggggttggggcagagagacatggtcatggactgggtcgtggctcaggtcagaatctgggctgctgatgggatgcaggtggcagcatgggcacctgcaagaccctcggggaggggtactgagtggggcccgaccaaaggtttgggacactctaagactgaggcccccaccctacagtcactcacttccctcaggacacagggctgcaggtgtgagctgagctgccgatggcttggggactgcaagagaggcctgggccaccggctgctgtgggtggctgctctctctggttcaggaagtgcctaggctggccaagtctggggaaagtgggctggcccggggctgctcctgagttctgccaggcagcaccgcacctgggatgggcaccaaccatgtccgtctcctcccttcctgcagtccagggccaaggcttgtgttcaatcgtgtgaatggccggcgggccccctccacgtccccatccttcgaggggacccaggagacctacacagtggcccacgaggagaatgtccgctttgtgtccgaaggtagcgagcggggccagagggtgcggcataggctgctgggtcgcaaaaccatggacccgggatggccccacttcaagctgacccacagccgctgcatggctgtgcttttccttggcactctgcccttgtgtcctgtgaccagccctgtgtggggctggagtccagggtgaccatcaggccctgggtgggcgatggggtgcctgggacctggctcagcccgactgccctcctcccacagcctggcagcaggtgcaacagcagctggatggtggcccagccggtgagggcgggccaaggcctgtgcagtacgtggagaggacccccaatccccggctgcagagtgagccccccaaccctgtccccccaggagagaccccccagcccctctgatcctgacccaggccctgccaggttcccaccccaggggatgagggaggggactcttgtgcagaaaccccttcttcccagcgcctgccgcactcggagtccgggtgagcggcttgtggttagctccaggggagacttgccggctggcctgggaggcagcatcactgcccagccttctctgcccacagactttgtgcccattgacctagacgagtggtgggcgcagcagttcctggcgagaatcaccagctgttcctagtggctgctgggagggggcgctgctacacggccgacctgtcgccaggagagaagcatggcgccctgcccacccactgcgcctggctgggtgccggccacacctgaagtgccagcatttggacttttgcacctttttttcccttggcccggctgtcccaaccaagctgccatggccaagggccgaacccgtctgacctcagccctgctcactgtgcccagggaccagcgaccagcccctggggctggcagggaggagctccaggctaataaagtggagaaactgtc

SEQ ID NO: 287152 - DNA, 693 bp, Homo sapiens
agggggcaagcgccgcctccgccgcgtgtccggggtcagcccgagcccgtgcgggccctttaagggccgggggcgtgtagcgggcccgccccctccccgcggcgcccgcagtccgttaagtgcgagccccggcgcaggggccggatctggccgggggccggcggcggtgtgggagcggcgcgtcatgtacaccatcaccaaggggcccagcaagctggtcgcgcagcgccgcacagcctggcagcaggtgcaacagcagctggatggtggcccagccggtgagggcgggccaaggcctgtgcagtacgtggagaggacccccaatccccggctgcagaactttgtgcccattgacctagacgagtggtgggcgcagcagttcctggcgagaatcaccagctgttcctagtggctgctgggagggggcgctgctacacggccgacctgtcgccaggagagaagcatggcgccctgcccacccactgcgcctggctgggtgccggccacacctgaagtgccagcatttggacttttgcacctttttttcccttggcccggctgtcccaaccaagctgccatggccaagggccgaacccgtctgacctcagccctgctcactgtgcccagggaccagcgaccagcccctggggctggcagggaggagctccaggctaataaagtggagaaactgtc

SEQ ID NO: 287153 - DNA, 916 bp, Homo sapiens
agggggcaagcgccgcctccgccgcgtgtccggggtcagcccgagcccgtgcgggccctttaagggccgggggcgtgtagcgggcccgccccctccccgcggcgcccgcagtccgttaagtgcgagccccggcgcaggggccggatctggccgggggccggcggcggtgtgggagcggcgcgtcatgtacaccatcaccaaggggcccagcaagctggtcgcgcagcgccgcacaggtcccacgcagcagcaggtggagggccggctcggcgagctcctgaaatgccggcagcccgcgccgccgacctcgcagcccccgcgggcgcagccctttgcgcagccgccgggaccctggcccctgtcgagtccagggccaaggcttgtgttcaatcgtgtgaatggccggcgggccccctccacgtccccatccttcgaggggacccaggagacctacacagtggcccacgaggagaatgtccgctttgtgtccgaagcctggcagcaggtgcaacagcagctggatggtggcccagccggtgagggcgggccaaggcctgtgcaactttgtgcccattgacctagacgagtggtgggcgcagcagttcctggcgagaatcaccagctgttcctagtggctgctgggagggggcgctgctacacggccgacctgtcgccaggagagaagcatggcgccctgcccacccactgcgcctggctgggtgccggccacacctgaagtgccagcatttggacttttgcacctttttttcccttggcccggctgtcccaaccaagctgccatggccaagggccgaacccgtctgacctcagccctgctcactgtgcccagggaccagcgaccagcccctggggctggcagggaggagctccaggctaataaagtggagaaactgtc

SEQ ID NO: 287154 - DNA, 1304 bp, Homo sapiens
agggggcaagcgccgcctccgccgcgtgtccggggtcagcccgagcccgtgcgggccctttaagggccgggggcgtgtagcgggcccgccccctccccgcggcgcccgcagtccgttaagtgcgagccccggcgcaggggccggatctggccgggggccggcggcggtgtgggagcggcgcgtcatgtacaccatcaccaaggggcccagcaagctggtcgcgcagcgccgcacaggtcccacgcagcagcaggtggagggccggctcggcgagctcctgaaatgccggcagcccgcgccgccgacctcgcagcccccgcgggcgcagccctttgcgcagccgccgggaccctggcccctgtcgagtccagggccaaggcttgtgttcaatcgtgtgaatggccggcgggccccctccacgtccccatccttcgaggggacccaggagacctacacagtggcccacgaggagaatgtccgctttgtgtccgaagcctggcagcaggtgcaacagcagctggatggtggcccagccggtgagggcgggccaaggcctgtgcagtacgtggagaggacccccaatccccggctgcagaactttgtgcccattgacctagacgagtggtgggcgcagcagttcctggcgagaatcaccagctgttcctagtggctgctgggagggggcgctgctacacggccgacctgtcgccaggagagaagcatggcgccctgcccacccactgcgcctggctgggtgccggccacacctgaagtgccagcatttggacttttgcacctttttttcccttggcccggctgtcccaaccaagctgccatggccaagggccgaacccgtctgacctcagccctgctcactgtgcccagggaccagcgaccagcccctggggctggcagggaggagctccaggctaataaagtggagaaactgtcaaaaagatagaaagaataacagatagaaatgaataccacatgagagggggcggcgcgcgtctctgagaagttattccctctgaggggggcgccccagatttgtacagcggtcacccatggtttccttgtgtgcaccaagggtgggccccatagatgggtgcgagagggtgcgcttgtaattcaccgcttggggaactcgtgggacaccgctggtttttacaacgcatgggctcgtggagcacggggcgaactgcgggtcccactctttgggggaaaccgtgtccggaaagggggcaaccccgtaaaatccaggggaggggggcagacacaacctaggtgggcacgagctccct

SEQ ID NO: 287155 - DNA, 1003 bp, Homo sapiens
agggggcaagcgccgcctccgccgcgtgtccggggtcagcccgagcccgtgcgggccctttaagggccgggggcgtgtagcgggcccgccccctccccgcggcgcccgcagtccgttaagtgcgagccccggcgcaggggccggatctggccgggggccggcggcggtgtgggagcggcgcgtcatgtacaccatcaccaaggggcccagcaagctggtcgcgcagcgccgcacaggtcccacgcagcagcaggtggagggccggctcggcgagctcctgaaatgccggcagcccgcgccgccgacctcgcagcccccgcgggcgcagccctttgcgcagccgccgggaccctggcccctgtcgagtccagggccaaggcttgtgttcaatcgtgtgaatggccggcgggccccctccacgtccccatccttcgaggggacccaggagacctacacagtggcccacgaggagaatgtccgctttgtgtccgaagcctggcagcaggtgcaacagcagctggatggtggcccagccggtgagggcgggccaaggcctgtgcagtacgtggagaggacccccaatccccggctgcagaactttgtgcccattgacctagacgagtggtgggcgcagcagttcctggcgagaatcaccagctgttcctagtggctgctgggagggggcgctgctacacggccgacctgtcgccaggagagaagcatggcgccctgcccacccactgcgcctggctgggtgccggccacacctgaagtgccagcatttggacttttgcacctttttttcccttggcccggctgtcccaaccaagctgccatggccaagggccgaacccgtctgacctcagccctgctcactgtgcccagggaccagcgaccagcccctggggctggcagggaggagctccaggctaataaagtggagaaactgtcaaaaaaaaaaaaaaacaaaaaaaaaaaaaacaaaaaaacaaaaaaagggggg

SEQ ID NO: 287156 - DNA, 1311 bp, Homo sapiens
agggggcaagcgccgcctccgccgcgtgtccggggtcagcccgagcccgtgcgggccctttaagggccgggggcgtgtagcgggcccgccccctccccgcggcgcccgcagtccgttaagtgcgagccccggcgcaggggccggatctggccgggggccggcggcggtgtgggagcggcgcgtcatgtacaccatcaccaaggggcccagcaagctggtcgcgcagcgccgcacagtgcccctctcagctgaggaggaaccgagagcggcgctggggcacctgagcccaggaaggcaacaggccggccgggaccgcgagtgcctggcggagcaggcgcagcccaggactcccggctcccacctccggctgtagtccagggccaaggcttgtgttcaatcgtgtgaatggccggcgggccccctccacgtccccatccttcgaggggacccaggagacctacacagtggcccacgaggagaatgtccgctttgtgtccgaagcctggcagcaggtgcaacagcagctggatggtggcccagccggtgagggcgggccaaggcctgtgcagtacgtggagaggacccccaatccccggctgcagaactttgtgcccattgacctagacgagtggtgggcgcagcagttcctggcgagaatcaccagctgttcctagtggctgctgggagggggcgctgctacacggccgacctgtcgccaggagagaagcatggcgccctgcccacccactgcgcctggctgggtgccggccacacctgaagtgccagcatttggacttttgcacctttttttcccttggcccggctgtcccaaccaagctgccatggccaagggccgaacccgtctgacctcagccctgctcactgtgcccagggaccagcgaccagcccctggggctggcagggaggagctccaggctaataaagtggagaaactgtcaaaaagatagaaagaataacagatagaaatgaataccacatgagagggggcggcgcgcgtctctgagaagttattccctctgaggggggcgccccagatttgtacagcggtcacccatggtttccttgtgtgcaccaagggtgggccccatagatgggtgcgagagggtgcgcttgtaattcaccgcttggggaactcgtgggacaccgctggtttttacaacgcatgggctcgtggagcacggggcgaactgcgggtcccactctttgggggaaaccgtgtccggaaagggggcaaccccgtaaaatccaggggaggggggcagacacaacctaggtgggcacgagctccct

SEQ ID NO: 287157 - DNA, 1679 bp, Homo sapiens
agggggcaagcgccgcctccgccgcgtgtccggggtcagcccgagcccgtgcgggccctttaagggccgggggcgtgtagcgggcccgccccctccccgcggcgcccgcagtccgttaagtgcgagccccggcgcaggggccggatctggccgggggccggcggcggtgtgggagcggcgcgtcatgtacaccatcaccaaggggcccagcaagctggtcgcgcagcgccgcacaggtcccacgcagcagcaggtggagggccggctcggcgagctcctgaaatgccggcagcccgcgccgccgacctcgcagcccccgcgggcgcagccctttgcgcagccgccgggaccctggcccctgtcgagtgcccctctcagctgaggaggaaccgagagcggcgctggggcacctgagcccaggaaggcaacaggccggccgggaccgcgagtgcctggcggagcaggcgcagcccaggactcccggctcccacctccggctgtagtccagggccaaggcttgtgttcaatcgtgtgaatggccggcgggccccctccacgtccccatccttcgaggggacccaggagacctacacagtggcccacgaggagaatgtccgctttgtgtccgaaggtagcgagcggggccagagggtgcggcataggctgctgggtcgcaaaaccatggacccgggatggccccacttcaagctgacccacagccgctgcatggctgtgcttttccttggcactctgcccttgtgtcctgtgaccagccctgtgtggggctggagtccagggtgaccatcaggccctgggtgggcgatggggtgcctgggacctggctcagcccgactgccctcctcccacagcctggcagcaggtgcaacagcagctggatggtggcccagccggtgagggcgggccaaggcctgtgcagtacgtggagaggacccccaatccccggctgcagaactttgtgcccattgacctagacgagtggtgggcgcagcagttcctggcgagaatcaccagctgttcctagtggctgctgggagggggcgctgctacacggccgacctgtcgccaggagagaagcatggcgccctgcccacccactgcgcctggctgggtgccggccacacctgaagtgccagcatttggacttttgcacctttttttcccttggcccggctgtcccaaccaagctgccatggccaagggccgaacccgtctgacctcagccctgctcactgtgcccagggaccagcgaccagcccctggggctggcagggaggagctccaggctaataaagtggagaaactgtcaaaaagatagaaagaataacagatagaaatgaataccacatgagagggggcggcgcgcgtctctgagaagttattccctctgaggggggcgccccagatttgtacagcggtcacccatggtttccttgtgtgcaccaagggtgggccccatagatgggtgcgagagggtgcgcttgtaattcaccgcttggggaactcgtgggacaccgctggtttttacaacgcatgggctcgtggagcacggggcgaactgcgggtcccactctttgggggaaaccgtgtccggaaagggggcaaccccgtaaaatccaggggaggggggcagacacaacctaggtgggcacgagctccct

SEQ ID NO: 287158 - DNA, 821 bp, Homo sapiens
agggggcaagcgccgcctccgccgcgtgtccggggtcagcccgagcccgtgcgggccctttaagggccgggggcgtgtagcgggcccgccccctccccgcggcgcccgcagtccgttaagtgcgagccccggcgcaggggccggatctggccgggggccggcggcggtgtgggagcggcgcgtcatgtacaccatcaccaaggggcccagcaagctggtcgcgcagcgccgcacaggtcccacgcagcagcaggtggagggccggctcggcgagctcctgaaatgccggcagcccgcgccgccgacctcgcagcccccgcgggcgcagccctttgcgcagccgccgggaccctggcccctgtcgagtccagggccaaggcttgtgttcaatcgtgtgaatggccggcgggccccctccacgtccccatccttcgaggggacccaggagacctacacagtggcccacgaggagaatgtccgctttgtgtccgaagcctggcagcaggtgcaacagcagctggatggtggcccagccggtgagggcgggccaaggcctgtgcagtacgtggagaggacccccaatccccggctgcagagccctgcccacccactgcgcctggctgggtgccggccacacctgaagtgccagcatttggacttttgcacctttttttcccttggcccggctgtcccaaccaagctgccatggccaagggccgaacccgtctgacctcagccctgctcactgtgcccagggaccagcgaccagcccctggggctggcagggaggagctccaggctaataaagtggagaaactgtc

SEQ ID NO: 287159 - DNA, 951 bp, Homo sapiens
agggggcaagcgccgcctccgccgcgtgtccggggtcagcccgagcccgtgcgggccctttaagggccgggggcgtgtagcgggcccgccccctccccgcggcgcccgcagtccgttaagtgcgagccccggcgcaggggccggatctggccgggggccggcggcggtgtgggagcggcgcgtcatgtacaccatcaccaaggggcccagcaagctggtcgcgcagcgccgcacaggtcccacgcagcagcaggtggagggccggctcggcgagctcctgaaatgccggcagcccgcgccgccgacctcgcagcccccgcgggcgcagccctttgcgcagccgccgggaccctggcccctgtcgagtccagggccaaggcttgtgttcaatcgtgtgaatggccggcgggccccctccacgtccccatccttcgaggggacccaggagacctacacagtggcccacgaggagaatgtccgctttgtgtccgaagcctggcagcaggtgcaacagcagctggatggtggcccagccggtgagggcgggccaaggcctgtgcagtacgtggagaggacccccaatccccggctgcagaactttgtgcccattgacctagacgagtggtgggcgcagcagttcctggcgagaatcaccagctgttcctagtggctgctgggagggggcgctgctacacggccgacctgtcgccaggagagaagcatggcgccctgcccacccactgcgcctggctgggtgccggccacacctgaagtgccagcatttggacttttgcacctttttttcccttggcccggctgtcccaaccaagctgccatggccaagggccgaacccgtctgacctcagccctgctcactgtgcccagggaccagcgaccagcccctggggctggcagggaggagctccaggctaataaagtggagaaactgtc

SEQ ID NO: 287160 - DNA, 823 bp, Homo sapiens
agggggcaagcgccgcctccgccgcgtgtccggggtcagcccgagcccgtgcgggccctttaagggccgggggcgtgtagcgggcccgccccctccccgcggcgcccgcagtccgttaagtgcgagccccggcgcaggggccggatctggccgggggccggcggcggtgtgggagcggcgcgtcatgtacaccatcaccaaggggcccagcaagctggtcgcgcagcgccgcacaggtcccacgcagcagcaggtggagggccggctcggcgagctcctgaaatgccggcagcccgcgccgccgacctcgcagcccccgcgggcgcagccctttgcgcagccgccgggaccctggcccctgtcgagcctggcagcaggtgcaacagcagctggatggtggcccagccggtgagggcgggccaaggcctgtgcagtacgtggagaggacccccaatccccggctgcagaactttgtgcccattgacctagacgagtggtgggcgcagcagttcctggcgagaatcaccagctgttcctagtggctgctgggagggggcgctgctacacggccgacctgtcgccaggagagaagcatggcgccctgcccacccactgcgcctggctgggtgccggccacacctgaagtgccagcatttggacttttgcacctttttttcccttggcccggctgtcccaaccaagctgccatggccaagggccgaacccgtctgacctcagccctgctcactgtgcccagggaccagcgaccagcccctggggctggcagggaggagctccaggctaataaagtggagaaactgtc

SEQ ID NO: 287161 - DNA, 899 bp, Homo sapiens
agggggcaagcgccgcctccgccgcgtgtccggggtcagcccgagcccgtgcgggccctttaagggccgggggcgtgtagcgggcccgccccctccccgcggcgcccgcagtccgttaagtgcgagccccggcgcaggggccggatctggccgggggccggcggcggtgtgggagcggcgcgtcatgtacaccatcaccaaggggcccagcaagctggtcgcgcagcgccgcacaggtgcgcacgggccggggaacgggaacggggacggggcggggcgcggcggcggctgaccgccccccggtgcccgcaggtcccacgcagcagcaggtggagggccggctcggcgagctcctgaaatgccggcagcccgcgccgccgacctcgcagcccccgcgggcgcagccctttgcgcagccgccgggaccctggcccctgtcgagcctggcagcaggtgcaacagcagctggatggtggcccagccggtgagggcgggccaaggcctgtgcagtacgtggagaggacccccaatccccggctgcagaactttgtgcccattgacctagacgagtggtgggcgcagcagttcctggcgagaatcaccagctgttcctagtggctgctgggagggggcgctgctacacggccgacctgtcgccaggagagaagcatggcgccctgcccacccactgcgcctggctgggtgccggccacacctgaagtgccagcatttggacttttgcacctttttttcccttggcccggctgtcccaaccaagctgccatggccaagggccgaacccgtctgacctcagccctgctcactgtgcccagggaccagcgaccagcccctggggctggcagggaggagctccaggctaataaagtggagaaactgtc

SEQ ID NO: 287162 - DNA, 875 bp, Homo sapiens
agggggcaagcgccgcctccgccgcgtgtccggggtcagcccgagcccgtgcgggccctttaagggccgggggcgtgtagcgggcccgccccctccccgcggcgcccgcagtccgttaagtgcgagccccggcgcaggggccggatctggccgggggccggcggcggtgtgggagcggcgcgtcatgtacaccatcaccaaggggcccagcaagctggtcgcgcagcgccgcacaggtcccacgcagcagcaggtggagggccggctcggcgagctcctgaaatgccggcagcccgcgccgccgacctcgcagcccccgcgggcgcagccctttgcgcagccgccgggaccctggcccctgtcgagcctggcagcaggtgcaacagcagctggatggtggcccagccggtgagggcgggccaaggcctgtgcagtacgtggagaggacccccaatccccggctgcagaactttgtgcccattgacctagacgagtggtgggcgcagcagttcctggcgagaatcaccagctgttcctagtggctgctgggagggggcgctgctacacggccgacctgtcgccaggagagaagcatggcgccctgcccacccactgcgcctggctgggtgccggccacacctgaagtgccagcatttggacttttgcacctttttttcccttggcccggctgtcccaaccaagctgccatggccaagggccgaacccgtctgacctcagccctgctcactgtgcccagggaccagcgaccagcccctggggctggcagggaggagctccaggctaataaagtggagaaactgtcaaaaaaaaaaaaaaacaaaaaaaaaaaaaacaaaaaaacaaaaaaagggggg

SEQ ID NO: 287163 - DNA, 1088 bp, Homo sapiens
agggggcaagcgccgcctccgccgcgtgtccggggtcagcccgagcccgtgcgggccctttaagggccgggggcgtgtagcgggcccgccccctccccgcggcgcccgcagtccgttaagtgcgagccccggcgcaggggccggatctggccgggggccggcggcggtgtgggagcggcgcgtcatgtacaccatcaccaaggggcccagcaagctggtcgcgcagcgccgcacaggtcccacgcagcagcaggtggagggccggctcggcgagctcctgaaatgccggcagcccgcgccgccgacctcgcagcccccgcgggcgcagccctttgcgcagccgccgggaccctggcccctgtcgagtgcccctctcagctgaggaggaaccgagagcggcgctggggcacctgagcccaggaaggcaacaggccggccgggaccgcgagtgcctggcggagcaggcgcagcccaggactcccggctcccacctccggctgtagtccagggccaaggcttgtgttcaatcgtgtgaatggccggcgggccccctccacgtccccatccttcgaggggacccaggagacctacacagtggcccacgaggagaatgtccgctttgtgtccgaagcctggcagcaggtgcaacagcagctggatggtggcccagccggtgagggcgggccaaggcctgtgcagtacgtggagaggacccccaatccccggctgcagaactttgtgcccattgacctagacgagtggtgggcgcagcagttcctggcgagaatcaccagctgttcctagtggctgctgggagggggcgctgctacacggccgacctgtcgccaggagagaagcatggcgccctgcccacccactgcgcctggctgggtgccggccacacctgaagtgccagcatttggacttttgcacctttttttcccttggcccggctgtcccaaccaagctgccatggccaagggccgaacccgtctgacctcagccctgctcactgtgcccagggaccagcgaccagcccctggggctggcagggaggagctccaggctaataaagtggagaaactgtc

SEQ ID NO: 287164 - DNA, 1164 bp, Homo sapiens
agggggcaagcgccgcctccgccgcgtgtccggggtcagcccgagcccgtgcgggccctttaagggccgggggcgtgtagcgggcccgccccctccccgcggcgcccgcagtccgttaagtgcgagccccggcgcaggggccggatctggccgggggccggcggcggtgtgggagcggcgcgtcatgtacaccatcaccaaggggcccagcaagctggtcgcgcagcgccgcacaggtgcgcacgggccggggaacgggaacggggacggggcggggcgcggcggcggctgaccgccccccggtgcccgcaggtcccacgcagcagcaggtggagggccggctcggcgagctcctgaaatgccggcagcccgcgccgccgacctcgcagcccccgcgggcgcagccctttgcgcagccgccgggaccctggcccctgtcgagtgcccctctcagctgaggaggaaccgagagcggcgctggggcacctgagcccaggaaggcaacaggccggccgggaccgcgagtgcctggcggagcaggcgcagcccaggactcccggctcccacctccggctgtagtccagggccaaggcttgtgttcaatcgtgtgaatggccggcgggccccctccacgtccccatccttcgaggggacccaggagacctacacagtggcccacgaggagaatgtccgctttgtgtccgaagcctggcagcaggtgcaacagcagctggatggtggcccagccggtgagggcgggccaaggcctgtgcagtacgtggagaggacccccaatccccggctgcagaactttgtgcccattgacctagacgagtggtgggcgcagcagttcctggcgagaatcaccagctgttcctagtggctgctgggagggggcgctgctacacggccgacctgtcgccaggagagaagcatggcgccctgcccacccactgcgcctggctgggtgccggccacacctgaagtgccagcatttggacttttgcacctttttttcccttggcccggctgtcccaaccaagctgccatggccaagggccgaacccgtctgacctcagccctgctcactgtgcccagggaccagcgaccagcccctggggctggcagggaggagctccaggctaataaagtggagaaactgtc

SEQ ID NO: 287165 - DNA, 1323 bp, Homo sapiens
agggggcaagcgccgcctccgccgcgtgtccggggtcagcccgagcccgtgcgggccctttaagggccgggggcgtgtagcgggcccgccccctccccgcggcgcccgcagtccgttaagtgcgagccccggcgcaggggccggatctggccgggggccggcggcggtgtgggagcggcgcgtcatgtacaccatcaccaaggggcccagcaagctggtcgcgcagcgccgcacaggtcccacgcagcagcaggtggagggccggctcggcgagctcctgaaatgccggcagcccgcgccgccgacctcgcagcccccgcgggcgcagccctttgcgcagccgccgggaccctggcccctgtcgagtgcccctctcagctgaggaggaaccgagagcggcgctggggcacctgagcccaggaaggcaacaggccggccgggaccgcgagtgcctggcggagcaggcgcagcccaggactcccggctcccacctccggctgtagtccagggccaaggcttgtgttcaatcgtgtgaatggccggcgggccccctccacgtccccatccttcgaggggacccaggagacctacacagtggcccacgaggagaatgtccgctttgtgtccgaagcctggcagcaggtgcaacagcagctggatggtggcccagccggtgagggcgggccaaggcctgtgcagtacgtggagaggacccccaatccccggctgcagagtgagccccccaaccctgtccccccaggagagaccccccagcccctctgatcctgacccaggccctgccaggttcccaccccaggggatgagggaggggactcttgtgcagaaaccccttcttcccagcgcctgccgcactcggagtccgggtgagcggcttgtggttagctccaggggagacttgccggctggcctgggaggcagcatcactgcccagccttctctgcccacagactttgtgcccattgacctagacgagtggtgggcgcagcagttcctggcgagaatcaccagctgttcctagtggctgctgggagggggcgctgctacacggccgacctgtcgccaggagagaagcatggcgccctgcccacccactgcgcctggctgggtgccggccacacctgaagtgccagcatttggacttttgcacctttttttcccttggcccggctgtcccaaccaagctgccatggccaagggccgaacccgtctgacctcagccctgctcactgtgcccagggaccagcgaccagcccctggggctggcagggaggagctccaggctaataaagtggagaaactgtc

SEQ ID NO: 287166 - DNA, 396 bp, Homo sapiens
aatgaacaagttagtatattttgcctaatttggtaagtgtctattctatgcttcaaggacagctcttgaagaaaagattaaatcatggtcagaaaccttgcattaaaataataataataacagtgataatgttcttaacataattctgttactgcattaggtgttagaatttcataatttttttttttttatttttcccttaagcttaggaaagttgttccaaaatagggatgccaaccttatttccccatagctgtaagttttttgagatgcataaatgatacagtttagaatgaagagctcaataatttcctcctttttctttactgaaggaaaattcgggaggtggggcagatgtgtatttaaggagattacaagggtgactttagagccaaa

SEQ ID NO: 287167 - DNA, 1123 bp, Homo sapiens
gaaaagaaaagaaaaagaaaatcctttaactgacttcatcttaaccttttagttcctaaggacggtctgaagagccaagagctatttgatgaaattagaatgacctacatcaaagagctaggaaaagccattgtcaagagggaaggaaactccagccagaactggcagcggttttatcaactgacaaaactcttggattctatgcatgaagtggttgaaaatctccttaactattgcttccaaacatttttggataagaccatgagtattgaattccccgagatgttagctgaaatcatcaccaatcagataccaaaatattcaaatggaaatatcaaaaaacttctgtttcatcaaaagtgactgccttaataagaatggttgccttaaagaaagtcgaattaatagcttttattgtataaactatcagtttgtcctgtagaggttttgttgttttattttttattgttttcatctgttgttttgttttaaatacgcactacatgtggtttatagagggccaagacttggcaacagaagcagttgagtcgtcatcacttttcagtgatgggagagtagatggtgaaatttattagttaatatatcccagaaattagaaaccttaatatgtggacgtaatctccacagtcaaagaaggatggcacctaaaccaccagtgcccaaagtctgtgtgatgaactttctcttcatactttttttcacagttggctggatgaaattttctagactttctgttggtgtatcccccccctgtatagttaggatagcatttttgatttatgcatggaaacctgaaaaaaagtttacaagtgtatatcagaaaagggaagttgtgccttttatagctattactgtctggttttaacaatttcctttatatttagtgaactacgcttgctcattttttcttacataattttttattcaagttattgtacagctgtttaagatgggcagctagttcgtagctttcccaaataaactctaaacattaatcaatcatctgtgtgaaaatgggttggtgcttctaacctgatggcacttagctatcagaagaccacaaaaattgactcaaatctccagtattcttgtcaaaaaaaaa

SEQ ID NO: 287168 - DNA, 406 bp, Homo sapiens
gcggccgcctactactactactgctcgaattcaagcttctacggggacatgagccctggccaggacagtaccagttttctgaggaccatggaaacctgaaaaaaagtttacaagtgtatatcagaaaagggaagttgtgccttttatagctattactgtctggttttaacaatttcctttatatttagtgaactacgcttgctcattttttcttacataattttttattcaagttattgtacagctgtttaagatgggcagctagttcgtagctttcccaaataaactctaaacattaatcaatcatctgtgtgaaaatgggttggtgcttctaacctgatggcacttagctatcagaagaccacaaaaattgactcaaatctccagtattcttgtcaaaaaaaaa

SEQ ID NO: 287169 - DNA, 2040 bp, Homo sapiens
aactttagattttttagaattgtactaaaagcaaactgttttcttggatatttgttctttctccccaaaagatgatttataagttttcagagctaagaaatgggaaggaagagccatcctagcatggcagccccagcatgagaccagatgtaagctctcctccatccagctcctcaacagcaacaacaggaccacctcccaaactctgcctggtgtgctctgatgaagcttcaggatgtcattatggagtcttaacttgtggaagctgtaaagttttcttcaaaagagcagtggaaggacagcacaattacctatgtgctggaaggaatgattgcatcatcgataaaattcgaagaaaaaactgcccagcatgccgctatcgaaaatgtcttcaggctggaatgaacctggaagctcgaaaaacaaagaaaaaaataaaaggaattcagcaggccactacaggagtctcacaagaaacctctgaaaatcctggtaacaaaacaatagttcctgcaacgttaccacaactcacccctaccctggtgtcactgttggaggttattgaacctgaagtgttatatgcaggatatgatagctctgttccagactcaacttggaggatcatgactacgctcaacatgttaggagggcggcaagtgattgcagcagtgaaatgggcaaaggcaataccaggtttcaggaacttacacctggatgaccaaatgaccctactgcagtactcctggatgtttcttatggcatttgctctggggtggagatcatatagacaatcaagtgcaaacctgctgtgttttgctcctgatctgattattaatgagcagagaatgactctaccctgcatgtacgaccaatgtaaacacatgctgtatgtttcctctgagttacacaggcttcaggtatcttatgaagagtatctctgtatgaaaaccttactgcttctctcttcagttcctaaggacggtctgaagagccaagagctatttgatgaaattagaatgacctacatcaaagagctaggaaaagccattgtcaagagggaaggaaactccagccagaactggcagcggttttatcaactgacaaaactcttggattctatgcatgaagtggttgaaaatctccttaactattgcttccaaacatttttggataagaccatgagtattgaattccccgagatgttagctgaaatcatcaccaatcagataccaaaatattcaaatggaaatatcaaaaaacttctgtttcatcaaaagtgactgccttaataagaatggttgccttaaagaaagtcgaattaatagcttttattgtataaactatcagtttgtcctgtagaggttttgttgttttattttttattgttttcatctgttgttttgttttaaatacgcactacatgtggtttatagagggccaagacttggcaacagaagcagttgagtcgtcatcacttttcagtgatgggagagtagatggtgaaatttattagttaatatatcccagaaattagaaaccttaatatgtggacgtaatctccacagtcaaagaaggatggcacctaaaccaccagtgcccaaagtctgtgtgatgaactttctcttcatactttttttcacagttggctggatgaaattttctagactttctgttggtgtatcccccccctgtatagttaggatagcatttttgatttatgcatggaaacctgaaaaaaagtttacaagtgtatatcagaaaagggaagttgtgccttttatagctattactgtctggttttaacaatttcctttatatttagtgaactacgcttgctcattttttcttacataattttttattcaagttattgtacagctgtttaagatgggcagctagttcgtagctttcccaaataaactctaaacattaatcaatcatctgtgtgaaaatgggttggtgcttctaacctgatggcacttagctatcagaagaccacaaaaattgactcaaatctccagtattcttgtcaaaaaaaaa

SEQ ID NO: 287170 - DNA, 1160 bp, Homo sapiens
gcgggtgtgccagattccaccctcctgccccgcgcgccttccctctcctcggaccctctctgtttcctaggagcgcgtgtctgatactctcaaggaacggagctggaatagccaagagctatttgatgaaattagaatgacctacatcaaagagctaggaaaagccattgtcaagagggaaggaaactccagccagaactggcagcggttttatcaactgacaaaactcttggattctatgcatgaagtggttgaaaatctccttaactattgcttccaaacatttttggataagaccatgagtattgaattccccgagatgttagctgaaatcatcaccaatcagataccaaaatattcaaatggaaatatcaaaaaacttctgtttcatcaaaagtgactgccttaataagaatggttgccttaaagaaagtcgaattaatagcttttattgtataaactatcagtttgtcctgtagaggttttgttgttttattttttattgttttcatctgttgttttgttttaaatacgcactacatgtggtttatagagggccaagacttggcaacagaagcagttgagtcgtcatcacttttcagtgatgggagagtagatggtgaaatttattagttaatatatcccagaaattagaaaccttaatatgtggacgtaatctccacagtcaaagaaggatggcacctaaaccaccagtgcccaaagtctgtgtgatgaactttctcttcatactttttttcacagttggctggatgaaattttctagactttctgttggtgtatcccccccctgtatagttaggatagcatttttgatttatgcatggaaacctgaaaaaaagtttacaagtgtatatcagaaaagggaagttgtgccttttatagctattactgtctggttttaacaatttcctttatatttagtgaactacgcttgctcattttttcttacataattttttattcaagttattgtacagctgtttaagatgggcagctagttcgtagctttcccaaataaactctaaacattaatcaatcatctgtgtgaaaatgggttggtgcttctaacctgatggcacttagctatcagaagaccacaaaaattgactcaaatctccagtattcttgtcaaaaaaaaa

SEQ ID NO: 287171 - DNA, 2005 bp, Homo sapiens
ggtgccaaggatctggagatgacaacttgacttctctggggactctgaacttccctggtcgaacagttttttctaatggctattcaagccccagcatgagaccagatgtaagctctcctccatccagctcctcaacagcaacaacaggaccacctcccaaactctgcctggtgtgctctgatgaagcttcaggatgtcattatggagtcttaacttgtggaagctgtaaagttttcttcaaaagagcagtggaaggacagcacaattacctatgtgctggaaggaatgattgcatcatcgataaaattcgaagaaaaaactgcccagcatgccgctatcgaaaatgtcttcaggctggaatgaacctggaagctcgaaaaacaaagaaaaaaataaaaggaattcagcaggccactacaggagtctcacaagaaacctctgaaaatcctggtaacaaaacaatagttcctgcaacgttaccacaactcacccctaccctggtgtcactgttggaggttattgaacctgaagtgttatatgcaggatatgatagctctgttccagactcaacttggaggatcatgactacgctcaacatgttaggagggcggcaagtgattgcagcagtgaaatgggcaaaggcaataccaggtttcaggaacttacacctggatgaccaaatgaccctactgcagtactcctggatgtttcttatggcatttgctctggggtggagatcatatagacaatcaagtgcaaacctgctgtgttttgctcctgatctgattattaatgagcagagaatgactctaccctgcatgtacgaccaatgtaaacacatgctgtatgtttcctctgagttacacaggcttcaggtatcttatgaagagtatctctgtatgaaaaccttactgcttctctcttcagttcctaaggacggtctgaagagccaagagctatttgatgaaattagaatgacctacatcaaagagctaggaaaagccattgtcaagagggaaggaaactccagccagaactggcagcggttttatcaactgacaaaactcttggattctatgcatgaagtggttgaaaatctccttaactattgcttccaaacatttttggataagaccatgagtattgaattccccgagatgttagctgaaatcatcaccaatcagataccaaaatattcaaatggaaatatcaaaaaacttctgtttcatcaaaagtgactgccttaataagaatggttgccttaaagaaagtcgaattaatagcttttattgtataaactatcagtttgtcctgtagaggttttgttgttttattttttattgttttcatctgttgttttgttttaaatacgcactacatgtggtttatagagggccaagacttggcaacagaagcagttgagtcgtcatcacttttcagtgatgggagagtagatggtgaaatttattagttaatatatcccagaaattagaaaccttaatatgtggacgtaatctccacagtcaaagaaggatggcacctaaaccaccagtgcccaaagtctgtgtgatgaactttctcttcatactttttttcacagttggctggatgaaattttctagactttctgttggtgtatcccccccctgtatagttaggatagcatttttgatttatgcatggaaacctgaaaaaaagtttacaagtgtatatcagaaaagggaagttgtgccttttatagctattactgtctggttttaacaatttcctttatatttagtgaactacgcttgctcattttttcttacataattttttattcaagttattgtacagctgtttaagatgggcagctagttcgtagctttcccaaataaactctaaacattaatcaatcatctgtgtgcagaccaattggtgcttccgaccgaacgctctcagcccccagcggacgcgcgcaattcaatacgttggtcaggagtgggcgcgcacggcgcccgccggg

SEQ ID NO: 287172 - DNA, 590 bp, Homo sapiens
acataaaggttcttggtttgtaaaaatttattaaatggttcactgatttgtgtactttttttatatgtgaatactgcaataaggttttttattgcactgttttcagtttgttgaacagaaaaagggagactctttttgttgtttttgacctctcgacctcataatggcaatgtaggcaagaacattccctcaaggcaatacctgtgggtgtcttggttatattccaccggaaacaaagacagaggctgtccttataaaatatgtttgaagacctgtgaaactttaatagtgccttttattccatataggacagcacaattacctatgtgctggaaggaatgattgcatcatcgataaaattcgaagaaaaaactgcccagcatgccgctatcgaaaatgtcttcaggctggaatgaacctggaaggtaatataaatatctgaaagcaattgtttgtctctgtagcttataaaaatttatcattttacttttgaagatacacgtaagcagatgtaattaatgtagtcagttcagtatatatatgcttgactagcataatgttactgcccaataaaaatgggaaattttttt

SEQ ID NO: 287173 - DNA, 1998 bp, Homo sapiens
ggtgccaaggatctggagatgacaacttgacttctctggggactctgaacttccctggtcgaacagttttttctaatggctattcaagccccagcatgagaccagatgtaagctctcctccatccagctcctcaacagcaacaacaggaccacctcccaaactctgcctggtgtgctctgatgaagcttcaggatgtcattatggagtcttaacttgtggaagctgtaaagttttcttcaaaagagcagtggaaggacagcacaattacctatgtgctggaaggaatgattgcatcatcgataaaattcgaagaaaaaactgcccagcatgccgctatcgaaaatgtcttcaggctggaatgaacctggaagctcgaaaaacaaagaaaaaaataaaaggaattcagcaggccactacaggagtctcacaagaaacctctgaaaatcctggtaacaaaacaatagttcctgcaacgttaccacaactcacccctaccctggtgtcactgttggaggttattgaacctgaagtgttatatgcaggatatgatagctctgttccagactcaacttggaggatcatgactacgctcaacatgttaggagggcggcaagtgattgcagcagtgaaatgggcaaaggcaataccaggtttcaggaacttacacctggatgaccaaatgaccctactgcagtactcctggatgtttcttatggcatttgctctggggtggagatcatatagacaatcaagtgcaaacctgctgtgttttgctcctgatctgattattaatgagcagagaatgactctaccctgcatgtacgaccaatgtaaacacatgctgtatgtttcctctgagttacacaggcttcaggtatcttatgaagagtatctctgtatgaaaaccttactgcttctctcttcagttcctaaggacggtctgaagagccaagagctatttgatgaaattagaatgacctacatcaaagagctaggaaaagccattgtcaagagggaaggaaactccagccagaactggcagcggttttatcaactgacaaaactcttggattctatgcatgaagtggttgaaaatctccttaactattgcttccaaacatttttggataagaccatgagtattgaattccccgagatgttagctgaaatcatcaccaatcagataccaaaatattcaaatggaaatatcaaaaaacttctgtttcatcaaaagtgactgccttaataagaatggttgccttaaagaaagtcgaattaatagcttttattgtataaactatcagtttgtcctgtagaggttttgttgttttattttttattgttttcatctgttgttttgttttaaatacgcactacatgtggtttatagagggccaagacttggcaacagaagcagttgagtcgtcatcacttttcagtgatgggagagtagatggtgaaatttattagttaatatatcccagaaattagaaaccttaatatgtggacgtaatctccacagtcaaagaaggatggcacctaaaccaccagtgcccaaagtctgtgtgatgaactttctcttcatactttttttcacagttggctggatgaaattttctagactttctgttggtgtatcccccccctgtatagttaggatagcatttttgatttatgcatggaaacctgaaaaaaagtttacaagtgtatatcagaaaagggaagttgtgccttttatagctattactgtctggttttaacaatttcctttatatttagtgaactacgcttgctcattttttcttacataattttttattcaagttattgtacagctgtttaagatgggcagctagttcgtagctttcccaaataaactctaaacattaatcaatcatctgtgtgaaaatgggttggtgcttctaacctgatggcacttagctatcagaagaccacaaaaattgactcaaatctccagtattcttgtcaaaaaaaaa

SEQ ID NO: 287174 - DNA, 1946 bp, Homo sapiens
ggtgccaaggatctggagatgacaacttgacttctctggggactctgaacttccctggtcgaacagttttttctaatggctattcaagccccagcatgagaccagatgtaagctctcctccatccagctcctcaacagcaacaacaggaccacctcccaaactctgcctggtgtgctctgatgaagcttcaggatgtcattatggagtcttaacttgtggaagctgtaaagttttcttcaaaagagcagtggaaggacagcacaattacctatgtgctggaaggaatgattgcatcatcgataaaattcgaagaaaaaactgcccagcatgccgctatcgaaaatgtcttcaggctggaatgaacctggaagctcgaaaaacaaagaaaaaaataaaaggaattcagcaggccactacaggagtctcacaagaaacctctgaaaatcctggtaactgttggaggttattgaacctgaagtgttatatgcaggatatgatagctctgttccagactcaacttggaggatcatgactacgctcaacatgttaggagggcggcaagtgattgcagcagtgaaatgggcaaaggcaataccaggtttcaggaacttacacctggatgaccaaatgaccctactgcagtactcctggatgtttcttatggcatttgctctggggtggagatcatatagacaatcaagtgcaaacctgctgtgttttgctcctgatctgattattaatgagcagagaatgactctaccctgcatgtacgaccaatgtaaacacatgctgtatgtttcctctgagttacacaggcttcaggtatcttatgaagagtatctctgtatgaaaaccttactgcttctctcttcagttcctaaggacggtctgaagagccaagagctatttgatgaaattagaatgacctacatcaaagagctaggaaaagccattgtcaagagggaaggaaactccagccagaactggcagcggttttatcaactgacaaaactcttggattctatgcatgaagtggttgaaaatctccttaactattgcttccaaacatttttggataagaccatgagtattgaattccccgagatgttagctgaaatcatcaccaatcagataccaaaatattcaaatggaaatatcaaaaaacttctgtttcatcaaaagtgactgccttaataagaatggttgccttaaagaaagtcgaattaatagcttttattgtataaactatcagtttgtcctgtagaggttttgttgttttattttttattgttttcatctgttgttttgttttaaatacgcactacatgtggtttatagagggccaagacttggcaacagaagcagttgagtcgtcatcacttttcagtgatgggagagtagatggtgaaatttattagttaatatatcccagaaattagaaaccttaatatgtggacgtaatctccacagtcaaagaaggatggcacctaaaccaccagtgcccaaagtctgtgtgatgaactttctcttcatactttttttcacagttggctggatgaaattttctagactttctgttggtgtatcccccccctgtatagttaggatagcatttttgatttatgcatggaaacctgaaaaaaagtttacaagtgtatatcagaaaagggaagttgtgccttttatagctattactgtctggttttaacaatttcctttatatttagtgaactacgcttgctcattttttcttacataattttttattcaagttattgtacagctgtttaagatgggcagctagttcgtagctttcccaaataaactctaaacattaatcaatcatctgtgtgaaaatgggttggtgcttctaacctgatggcacttagctatcagaagaccacaaaaattgactcaaatctccagtattcttgtcaaaaaaaaa

SEQ ID NO: 287175 - DNA, 599 bp, Homo sapiens
ggtgccaaggatctggagatgacaacttgacttctctggggactctgaacttccctggtcgaacagttttttctaatggctattcaagccccagcatgagaccagatgtaagctctcctccatccagctcctcaacagcaacaacaggaccacctcccaaactctgcctggtgtgctctgatgaagcttcaggatgtcattatggagtcttaacttgtggaagctgtaaagttttcttcaaaagagcagtggaaggtagtgtgtgttttgaagagtttatttttcctctacttggttttcatttctcagggtggattttgaaatttccattatatgcaaagcccatgaaaggctaaatatcagttaagaggggagaggagggtggctcctaggtcctctaatgggcaggaaagtatttaaaacgacaatacaaaaagatctagaataaaatagaaaagtacaagttgatgtctgggagtttggtcagggagcataaggtaacactataagaaagtgctatcatatgaaatgatggtgttaagtttgggcataacataatgttcattgtattagaaacatgggctttaacttccataagc

SEQ ID NO: 287176 - DNA, 1050 bp, Homo sapiens
caagactctgtctcaaaaaaaaaaaaaaaaaaagtaacatttatttcatgctatacagctatgtgttttcatgcaataattttaagtattatggtatacattttcataagaggagcaaataaatcccaatataattttaaaataaagatatatattaagtatctttaatatttttaatgcatttgacaataccatatgctgtttttgatgacaaatttcattttggtacatggcagatttgtccttttggtactgaactgaagaaaaaacatgtcacacctgaaattctgccttaagtgagtaaaaccatggtcaactacatcaatagatttcagccaaccagcaaaattgaaatgttttagtcattcttattatttataataaaaatgaaacaagattaatagtcaacaggagagaatagttaatatcatcagtttaaaacaggtctttttattttttcgagatagtgtcttgctctattgtccaggctggagtgcagtggtgtgatcacagctcactgcagcctcaacctcccaggctcaagctatcctcccttctcagcctccaagtagttaggactacaggcacgtgccatcatgcctggctaattttttattttctataaagatggggtctcactctgttgcctaggctggtctcaaactcctggtctcaaccttccaaaatggtgggattacaggtgtgagccactgcacccaacctaaaataggacttaaagcagattacttataccacatattcaaaagaaaataatatttggaaatgtaagatatcaatctgaactgaaaacatttttaatattaattcctgtctctccaatgcagccaactttcatatgatagtgtgaggttgatcacatctaatctatgcaaaaatgggtatcttcttcatgttatccaccatttctcaactagtctctatattaatttacacaattatttcacagagattaataaaacatcagataatagaatcaacccaaaaggcaacagcatttttctttctacaagggaacatggctttcaatgt

SEQ ID NO: 287177 - DNA, 805 bp, Homo sapiens
aaattcaaaaatatttttggttattattgagtgtagtctgaataacctctcacccaatactttacagtaacccatacacacatgaaattatgtattgatttcctaattcattgggaaaaaaattaacattctcccagagtagtaaacaatcacatagtatttttccacataaaatattctattacacccatcaatactgacctaggtagggagaaaataattctgaatccagcagagtaccaaaaaagctttttaatgcactatttgttttccaggcaaaagatcttcagaaaatatccgtcatttagtagacttacaaatggcacttttggctacataggagaatcagatatgagacccacgtgttttttctgataagctagtagtaggtcagctttataatacaaccctttcttagaataaaaaatggctaatttgttttaaaagacaggaaaagctgaaaccctaaagtcattgttttaaaaaatgtggggccaggcgcagtggccacatattcaaaagaaaataatatttggaaatgtaagatatcaatctgaactgaaaacatttttaatattaattcctgtctctccaatgcagccaactttcatatgatagtgtgaggttgatcacatctaatctatgcaaaaatgggtatcttcttcatgttatccaccatttctcaactagtctctatattaatttacacaattatttcacagagattaataaaacatcagataatagaatcaacccaaaaggcaacagcatttttctttctacaagggaacatggctttcaatgt

SEQ ID NO: 287178 - DNA, 1257 bp, Homo sapiens
aaattcaaaaatatttttggttattattgagtgtagtctgaataacctctcacccaatactttacagtaacccatacacacatgaaattatgtattgatttcctaattcattgggaaaaaaattaacattctcccagagtagtaaacaatcacatagtatttttccacataaaatattctattacacccatcaatactgacctaggtagggagaaaataattctgaatccagcagagtaccaaaaaagctttttaatgcactatttgttttccaggcaaaagatcttcagaaaatatccgtcatttagtagacttacaaatggcacttttggctacataggagaatcagatatgagacccacgtgttttttctgataagctagtagtaggtcagctttataatacaaccctttcttagaataaaaaatggctaatttgttttaaaagacaggaaaagctgaaaccctaaagtcattgttttaaaaaatgtggggccaggcgcagtggctcacacctgtaatcccagcaccttgaggtgggtttttagacaacaatagagagctgacacactactctgtggcaggaattgtgccaggtgaagaaaataccctggatactaagacatagcccctgttctgcagatgcttagagtctacttaggcaaacagacatgtaacaggggaatttcaaagtaaatgtcatcagtgctctaacggggcatagggaggacttaaggatccatgtaaatttagagaagaggcatcaatcctagaactggggagctggtgaaggcttctcagaggagataatttctaaagggagtttacatgaagaaagaattttccaggcaacagtaagacagaacattcttctttccacgaagaagaaagtacatgtgcaagggctggagggagtgagatagggtccccaggaaggtaggggtagtctttttaattgctgtgtaaagatgtcaggggtgggctggaggagtagctaagggaaagctctcatggcctttggcttttgaacttagggtgatgggaaccaaagaaggaaatcctctctcccttctttccttccttcctcacagccaagaggagatcgtgtgcaatagatacagagaaatgcttctctggtgcttaggttggctgaagggaagttctattatgccagggtccaagataatggtatcttcttcttgcctgctttacccattatcttggacctggctgaagggaagttctattatgccaccca

SEQ ID NO: 287179 - DNA, 706 bp, Homo sapiens
aaattcaaaaatatttttggttattattgagtgtagtctgaataacctctcacccaatactttacagtaacccatacacacatgaaattatgtattgatttcctaattcattgggaaaaaaattaacattctcccagagtagtaaacaatcacatagtatttttccacataaaatattctattacacccatcaatactgacctaggtagggagaaaataattctgaatccagcagagtaccaaaaaagctttttaatgcactatttgttttccaggcaaaagatcttcagaaaatatccgtcatttagtagacttacaaatggcacttttggctacataggagaatcagatatgagacccacgtgttttttctgataagctagtagtaggtcagctttataatacaaccctttcttagaataaaaaatggctaatttgttttaaaagacaggaaaagctgaaaccctaaagtcattgttttaaaaaatgtggggccaggcgcagtggctcacacctgtaatcccagcactttgggaggccgaggcgggcagatcacgaagtcaagagatcgagaccatcctggccaacatggtgaaaccctgtctctactaaaaatacaaaaaattagctgggcgtggtggtgcgtgcctgtagtcccagctactcaagaggttcaggcaggagaatcacttgaacctgggaggcg

SEQ ID NO: 287180 - DNA, 1203 bp, Homo sapiens
aaattcaaaaatatttttggttattattgagtgtagtctgaataacctctcacccaatactttacagtaacccatacacacatgaaattatgtattgatttcctaattcattgggaaaaaaattaacattctcccagagtagtaaacaatcacatagtatttttccacataaaatattctattacacccatcaatactgacctaggtagggagaaaataattctgaatccagcagagtaccaaaaaagctttttaatgcactatttgttttccaggcaaaagatcttcagatcagatatgagacccacgtgttttttctgataagctagtagtaggtcagctttataatacaaccctttcttagaataaaaaatggctaatttgttttaaaagacaggaaaagctgaaaccctaaagtcattgttttaaaaaatgtggggccaggcgcagtggctcacacctgtaatcccagcaccttgaggtgggtttttagacaacaatagagagctgacacactactctgtggcaggaattgtgccaggtgaagaaaataccctggatactaagacatagcccctgttctgcagatgcttagagtctacttaggcaaacagacatgtaacaggggaatttcaaagtaaatgtcatcagtgctctaacggggcatagggaggacttaaggatccatgtaaatttagagaagaggcatcaatcctagaactggggagctggtgaaggcttctcagaggagataatttctaaagggagtttacatgaagaaagaattttccaggcaacagtaagacagaacattcttctttccacgaagaagaaagtacatgtgcaagggctggagggagtgagatagggtccccaggaaggtaggggtagtctttttaattgctgtgtaaagatgtcaggggtgggctggaggagtagctaagggaaagctctcatggcctttggcttttgaacttagggtgatgggaaccaaagaaggaaatcctctctcccttctttccttccttcctcacagccaagaggagatcgtgtgcaatagatacagagaaatgcttctctggtgcttaggttggctgaagggaagttctattatgccagggtccaagataatggtatcttcttcttgcctgctttacccattatcttggacctggctgaagggaagttctattatgccaccca

SEQ ID NO: 287181 - DNA, 907 bp, Homo sapiens
aaattcaaaaatatttttggttattattgagtgtagtctgaataacctctcacccaatactttacagtaacccatacacacatgaaattatgtattgatttcctaattcattgggaaaaaaattaacattctcccagagtagtaaacaatcacatagtatttttccacataaaatattctattacacccatcaatactgacctaggtagggagaaaataattctgaatccagcagagtaccaaaaaagctttttaatgcactatttgttttccaggcaaaagatcttcagaaaatatccgtcatttagtagacttacaaatggcacttttggctacataggagaatcagatatgagacccacgtgttttttctgataagctagtagtaggtcagctttataatacaaccctttcttagaataaaaaatggctaatttgttttaaaagacaggaaaagctgaaaccctaaagtcattgttttaaaaaatgtggggccaggcgcagtggcacagaacattcttctttccacgaagaagaaagtacatgtgcaagggctggagggagtgagatagggtccccaggaaggtaggggtagtctttttaattgctgtgtaaagatgtcaggggtgggctggaggagtagctaagggaaagctctcatggcctttggcttttgaacttagggtgatgggaaccaaagaaggaaatcctctctcccttctttccttccttcctcacagccaagaggagatcgtgtgcaatagatacagagaaatgcttctctggtgcttaggttggctgaagggaagttctattatgccagggtccaagataatggtatcttcttcttgcctgctttacccattatcttggacctggctgaagggaagttctattatgccaccca

SEQ ID NO: 287182 - DNA, 555 bp, Homo sapiens
ctgcatggtccctgagctgtccctgcaggactccagtggaagtgaaagaactgggcaccggggaaaagctaggatgtcccacactcctacaccatgcagggaactcgggcacaggccggctgggccgggatcagatgggaagcagaagctcatcatgaccagaaactgtttccctacggagagcacttggagatggcaatgctgaacctcacactgtaggactcacacacgactctaacgggattgtaagaatcaagtcactctcatgggaagaatttttatatgggaaagcggctaaaactttcattggactggaatgtttggagattgttaaattccaaatcaggaaccacaaactgccctctaataagatatcagctgtctaagcgtgtgggtgccgcctttctgccagtagttctggttcttaagaaaagcaccataaatcagacatgaaaattctggctccaaaaatagcattttctttgtgcaaataaaaacgtgtgtatcaagtatgacgttcccccaacgtggacacacttggttcctcagaaagcc

SEQ ID NO: 287183 - DNA, 670 bp, Homo sapiens
ccctggccccgcgtaggcagaccgtgggctcgctcctgggcctgcctcaaaccctccgcagtaacctgaagctttcaccgtagacgtgctgtattgcccagaagccatcgtgtcgctggtcggggtcctgcggaggctggctgcctgccaggagcacaagcgggctcctgaggtctacgtggcctttaccgtccgcaacccagagacgtgccagctgttcaccaccgagctaggctgggccgggatcagatgggaagcagaagctcatcatgaccagaaactgtttccctacggagagcacttggagatggcaatgctgaacctcacactgtaggactcacacacgactctaacgggattgtaagaatcaagtcactctcatgggaagaatttttatatgggaaagcggctaaaactttcattggactggaatgtttggagattgttaaattccaaatcaggaaccacaaactgccctctaataagatatcagctgtctaagcgtgtgggtgccgcctttctgccagtagttctggttcttaagaaaagcaccataaatcagacatgaaaattctggctccaaaaatagcattttctttgtgcaaataaaaacgtgtgtatcaagtatgacgttcccccaacgtggacacacttggttcctcagaaagcc

SEQ ID NO: 287184 - DNA, 934 bp, Homo sapiens
cggcgcgcacactgcgctccttcccctggcatgtgggcggcggggcgagcggagaggcccgcggggctcgcgggagtccaggggcagacgggatgggtctccgtgctgaaacccccggcgctccggctacactgtgaagcatcctgtgtgtgtgtgaagcacccgccgtcagtcaagtatgcccggtgctttctctcagaactcatcaaaaagccctcgggaggctcggtcacaatctccgagagcacagccatcatctctcacggtaccacaggcctggtcacatgggacgccaccctctgccttgcagaatgggccatcgagaacccagcagccttcactaacagacgtgctgtattgcccagaagccatcgtgtcgctggtcggggtcctgcggaggctggctgcctgccaggagcacaagcgggctcctgaggtctacgtggcctttaccgtccgcaacccagagacgtgccagctgttcaccaccgagctaggctgggccgggatcagatgggaagcagaagctcatcatgaccagaaactgtttccctacggagagcacttggagatggcaatgctgaacctcacactgtaggactcacacacgactctaacgggattgtaagaatcaagtcactctcatgggaagaatttttatatgggaaagcggctaaaactttcattggactggaatgtttggagattgttaaattccaaatcaggaaccacaaactgccctctaataagatatcagctgtctaagcgtgtgggtgccgcctttctgccagtagttctggttcttaagaaaagcaccataaatcagacatgaaaattctggctccaaaaatagcattttctttgtgcaaataaaaacgtgtgtatcaagtatgacgttcccccaacgtggacacacttggttcctcagaaagcc

SEQ ID NO: 287185 - DNA, 987 bp, Homo sapiens
gtttgcgggaacaaagcagcgccctgcggaaggcagccctcgtgaactcagaagttagttttcgtctctggacctttttataatcggacttcagcccatcactgtctcgttttgtcctcagaaacggcgacagcagcctcttcccaatgttgagagcaaaaagtgtgaacccagaaattccgagacagatctcaattacttgccaaggttgaggacgcgcgcgtgacagcctcaggaagtcctcacgacatgtgcccaaggtggtctgggcatagcttagttttatacattttatggagacatgagacatcaataaatgtatgtaagaagtacattggttctgtttggaaaggcggggcaacttgaagcaaaggcaggaagacgtgaagcaggaagggggcttccaagaaacagaagagacaagtgaacatttatttttatgtctttcttcctatgtgtatttcaagtctttttcaaaacaaggccccaggactctccagattcaattatgtccttgggcttggtcgactgctgcaggagtcttaaggagccttgtgcaaatgctagagtgactcatttaccaacattaaaccctaggatagatgcaacagagaagtactacttcctccatggaatgtgctgatttcaggcgacgtggcacccaatgtagaaaacgctggaatttttccttggaactggactgtgatgagaggtgcttgccatgaacataagctactgtcttttttttctttttttgagacggactttcactttttttgcccaggctggagtgtaatggcgcgatcttggctcaccgcaacctccgcctcccaggtttgagtgattctcctaccttagcctcctgagtagctgggattacaggcgtgcgccaccattcccagctaatttttgtatttttagtagacacagtgtttctccatgttggtcaggctggtctcaaactcctgacctcaggtgatacgcccg

SEQ ID NO: 287186 - DNA, 413 bp, Homo sapiens
tatttcttttcttttttttttttttgcagagacaagtgaacatttatttttatgtctttcttcctatgtgtatttcaagtctttttcaaaacaaggccccaggactctccagattcaattatgtccttgggcttggtcgactgctgcaggagtcttaaggagccttgtgcaaatgctagagtgactcatttaccaacattaaaccctaggatagatgcaacagagaagtactacttcctccatggaatgtgctgatttcaggcgacgtggcacccaatgtagaaaacgctggaatttttccttggaactggactgtgatgagaggtgcttgccatgaacataagctactgtcttttttttctttttttgagacggactttcactttttttgcccaggctggagtgtaatggcg

SEQ ID NO: 287187 - DNA, 491 bp, Homo sapiens
ttttttttttgagacggagtctcggtctgtcgcccaggctggagtgcagtggtgcgatctcggctcactgcaagctccgcctcccgggttcacgccattctcctgcctcagcctccggagtagctgggactacagggtctcactgtgttgcccaggctggagtgcagtggcatgatcgcgactcctgcagcctcaatctccctcccaggatgaagtgatcctcctgcctctaggaccacaggtggccctgaagctcctcgtcctcctccagctgcggggtcaggccatcggtgtcgtcctctggaacagagccaagcccaccccaggggagtccgtggaaggtgaaggaggccaaggccgccccaggctccctgcgggtcaccaccttctctgtccagttccgggaaagcactggccgtcctgcctgcctgtggctgttcctgctacagccctaagcaggctccacagcagcacagcacacccctctccag

SEQ ID NO: 287188 - DNA, 493 bp, Homo sapiens
gcggccgccgagcgcatactggacggcggcccacagttcactcctcaggcgcggaggaaatggtggaaggcccagctctgggtgatcctgggcgctgcccccgttacccgttaccaggaagaaggactcctgaccttcaggctcagtgtggctcggtcatattcgaacacccggatggctggattgttggccccattgaccactccagagcatccgaaagctgtcggtgtggtggtgcccgaagaactgccctgctatgacgcgatgatgcttccggaccaccttcagatgaggaaactgagcgagtgagcggcagaccggggatgccgagcacgtcagaatggaaatgatcacagtgcactatattctgccaccacctaccagcatggccttggagatatatacaggttttccttgacttacaatggggctacgtcccccaaaattgaaaatatcataagtcaaaaatgcattcaacacacccaacctacca

SEQ ID NO: 287189 - DNA, 1078 bp, Homo sapiens
agactgacctgcggcccgccagaccctcggcgcggccgccggacgccgcggggcggacgcggaagtgaacgccttctcagctgctcggcaactcgggagcagagcggccccagcggcgcccccgtgcggcccggctctgaggcagcggctcagggagggagggaggccacgtcccgggcacgccacgccacgccacgccccgcccccagattcgtctcgccccagtgggccgcctcggagtcgggtgggtcttccatcccggaggacccgattggctgatggggcaaccgccaacggctgtggcgtttaaacccaagccgcagccgctgctgctcgccgagctcccggagctgggtgggggtgccccacgctgaaagagagtgatggagtgcccagtgatggaaactggctcactttttacctcaggaattaagagacatttgaaagacaaaagaatttcaaagactactaagttgaatgtttctcttgcttcaaaaataaaaacaaaaatactaaataattcttctattttcaaaatatctttaaagcacaacaacagggcattagctcaggctcttagtagagaaaaagagaattctcgaagaattacaactgaaaagatgctattgcaaaaagaagtagagaaactgaattttgagaacacatttcttcgcctaaagctaaataacttgaataagaagcttatagacatagaagctctcatgaacaataacttgataactgcaattgaaatgagcagtctttctgagttccatcagagttcctttctactgtcagctagcaagaagaaacgaattagtaaacagtgcaagttgatgcgtcttccatttgcaagggttccattaacttcaaatgatgatgaagatgaagataaagagaaaatgccgtgtgacaaccatattaaatcaaagacattacctgatattccctcttcaggatcaacaacacaacctttatcaactcaggataatcggaagtgtttctttcagcaatcaccacgttttgggagattcaccattcccctagggtgagcccaaaaactcccctgaccagtaag

SEQ ID NO: 287190 - DNA, 1381 bp, Homo sapiens
agactgacctgcggcccgccagaccctcggcgcggccgccggacgccgcggggcggacgcggaagtgaacgccttctcagctgctcggcaactcgggagcagagcggccccagcggcgcccccgtgcggcccggctctgaggcagcggctcagggagggagggaggccacgtcccgggcacgccacgccacgccacgccccgcccccagattcgtctcgccccagtgggccgcctcggagtcgggtgggtcttccatcccggaggacccgattggctgatggggcaaccgccaacggctgtggcgtttaaacccaagccgcagccgctgctgctcgccgagctcccggagctgggtgggggtgccccacgctgaaagagagtgatggagtgcccagtgatggaaactggctcactttttacctcaggaattaagagacatttgaaagacaaaagaatttcaaagactactaagttgaatgtttctcttgcttcaaaaataaaaacaaaaatactaaataattcttctattttcaaaatatctttaaagcacaacaacagggcattagctcaggctcttagtagagaaaaagagaattctcgaagaattacaactgaaaagatgctattgcaaaaagaagtagagaaactgaattttgagaacacatttcttcgcctaaagctaaataacttgaataagaagcttatagacatagaagctctcatgaacaataacttgataactgcaattgaaatgagcagtctttctgagttccatcagagttcctttctactgtcagctagcaagaagaaacgaattagtaaacagtgcaagttgatgcgtcttccatttgcaagcaggacgtggtggctcatgcctgtaatcccagcactttgggaggctgaggcaggaggatcacgaggtcaggaaatcgagaccatcctggctaacatggtgaaaccccgtctctactaaaaatacaaaaaattagccgggtgtggtggcgggcacctgtagtcctagctacttgggaggctgaggcaggagaatggtgtgaactcgggaggcagagcttgcagtgagccgagattgcgccactgcgctccagcctgggcgacagagcaagactctgtctcaaaaaaacaaacaaacaaaattaacttttgtctttgctcttatcctcctgtgcacaattctcattttttattaatttgattataagttatagaaagcaccctatttcaaatctgtcatcttacaagtcagtcagtgatgctcagagaggcaaaatgattgaatgaattgatagcattgaccaaaatcctgttgtctcttttagaaatgttctttctattatatataacatatagatttaatgcttt

SEQ ID NO: 287191 - DNA, 315 bp, Homo sapiens
gctcaggctcttagtagagaaaaagagaattctcgaagaattacaactgaaaagatgctattgcaaaaagaagtagagaaactgaattttgagaacacatttcttcgcctaaagctaaataacttggtatgtaagctatattgtttttgaattctaattataacttaaatcttttagctgcattattatagaagctttaaaaatatttttcaaatctccaatagtgaaaaattattgaaagtcagtataccatgtaagtctatgtcaaagtacaaactgttaatgggtaataaaatatgtgttttaaatctacat

SEQ ID NO: 287192 - DNA, 2799 bp, Homo sapiens
agcgggtagtataaccgtcctcagccataagcctgtcccatcgagacgtcgggacaccgaaaactaccattcccgccggcaaagcggctccggcctctcagcacacttccctccccatggcctctgttcatccccctgcctcagttctggtacctggggtcaaatcggctgtagtggttgactctcagggcacccgctgccgggtcccagtccacctttgctactttgtcctactcccagcccgcgggcgctaggctcgggggcgtggcgcatccctgactccgcccccgccgcgggggggcctctggggcctggtcgccatggcgaccggctgtacgctaccacagcttcccaggccgcgggtgctgattgcccgcctgcccgtgggtcatggcctgccagcagtcgcggtaccacagcttctcgtccgcgtcgaggtaggcgctggcagggatgagggcagagatgagggtttgagtacttctagagagggaaatggcacttgatccggacctctgcacctcctgctggcctctgaccattgatctagggctccagcaccacagagtcaatggttagaatcgggctgatttagcccagtgaagacgttacgtgctagcaaaacgattacagccacggccttcaggagtgaccatagacgaatcctttctcacagaagacaagagcacccagaatcgcaagcttcttcagaaacgaaggacgctgactggtcagttctccatgggtgggcacctgtccccatggcccacatacaccagtggccagaccattttgcaaaatcgaaaaccctgttcagatgactaccggaagcgagtagggagctgccagcagcacccctttcgcactgccaagccccagtacttggaggaactggaaaactacctacgcaaggagctcctcctgctggacctgggcacagattccacccaggaactaaggctgcagccttacagagagatctttgagttcttcatagaggacttcaaaacgtacaagccattactatcctccatcaagaatgcgtatgaggggatgctggcccaccaaagggagaagattcgggctctggagcccctgaaggccaagcttgtcactgtgaatgaggactgcaatgagaggatcctggccatgagagctgaggagaaatatgaaatctccctgctcaagaaagagaagatgaacttgctaaaactcatcgacaaaaagaatgaggagaagatttcattgcagagcgaggtgaccaaactgaggaagaacttggctgaggagtacctgcactacctcagtgagcgagatgcctgtaagatcctcatcgcagacctgaatgagctgcggtaccagcgggaggacatgtcattagcccagtcgccaggcatctggggggaggaccctgtgaagttaaccctggctcttaagatgacccggcaagacctgacccgcacgcagatggaactcaacaacatgaaggccaactttggagatgtggtccccaggagggactttgaaatgcaggagaagaccaacaaggatcttcaggagcagctggacaccctgagagccagctacgaggaggttcgcaaggagcatgagatcctcatgcagctgcacatgagcacgctgaaggaacgggaccaattcttctctgagctgcaggagatccagcgcacttccacgccgcggcctgactggaccaagtgcaaagatgtggtggctgggggcccagagcgctggcagatgctggctgagggcaagaacagcgaccagctggtggacgtgctcctggaagagattggttcggggctgctgcgggagaaagacttcttccctggtctgggctatggggaagccatccctgcttttcttcggtttgatggcctcgtggagaacaagaagccaagcaagaaggacgtggtcaacctcctcaaggatgcctggaaggaacgtcttgctgaggagcagaaagagacgttcccagatttcttcttcaatttcctggagcatcgctttgggcccagtgatgccatggcctgggcttatactatttttgaaaatatcaagatcttccactccaacgaggttatgagtcagttctatgcagtcttgatgggaaagcggagtgagaatgtgtatgtcacccagaaggagacagtagcccagctgctgaaggagatgacaaatgctgacagtcagaacgaggggctactaaccatggagcagttcaacactgtcctcaagagtaccttccctctcaagacagaagagcaaatccaggagctgatggaggcagggggctggcatcccagcagcagcaatgcagacttgctcaactaccgctcactgtttatggaggatgaggagggccagagtgagccctttgtgcaaaaactctgggaacaatacatggatgagaaggacgagtacttacagcagctaaagcaggagcttggcatagaactccatgaggaagtgactctgcccaagctgcgagggggcctgatgaccatcgaccccagcctggacaagcagacagtgaacacctacatgagccaggccttccagctccctgagtcggaaatgccagaggagggtgacgagaaggaagaagccgtggtggaaatcctccagactgccctggagcggcttcaggtgattgacatcaggcgtgtgggacctcgagagccagagcctgcaagctaggaacttgtgggcagcctgcgtactccagtcctgctaacccctagcttttaatataaaagtgtttgtctgaaaacaaaaaat

SEQ ID NO: 287193 - DNA, 419 bp, Homo sapiens
cccactgaccagagttgctcgctgtccttgaccccaccgagaggggtgcaaccctgactcagcatcacctcctatctgtcatagcggggagagctttccccaaaggccagcaggggaaaacccaaccttacttggaggagccagggaagtatctcgcagatcccgcaaaaaggcacccacgtctacagctcggcgggctggaggtctgcgggccaagccaggcctctgcactgactgtggctgaagaggtgtggcaaaggtcaggttgagggatctggtgagggaagaggcatcagcattcccttgaggctcttgggagagagacagcccctggtccactccctgctgaaacactgacagtctcagcctctgtttcctcctgccaggggccagcagacctggagccagggttgtggggg

SEQ ID NO: 287194 - DNA, 2765 bp, Homo sapiens
agcgggtagtataaccgtcctcagccataagcctgtcccatcgagacgtcgggacaccgaaaactaccattcccgccggcaaagcggctccggcctctcagcacacttccctccccatggcctctgttcatccccctgcctcagttctggtacctggggtcaaatcggctgtagtggttgactctcagggcacccgctgccgggtcccagtccacctttgctactttgtcctactcccagcccgcgggcgctaggctcgggggcgtggcgcatccctgactccgcccccgccgcgggggggcctctggggcctggtcgccatggcgaccggctgtacgctaccacagcttcccaggccgcgggtgctgattgcccgcctgcccgtgggtcatggcctgccagcagtcgcggtaccacagcttctcgtccgcgtcgagattacagccacggccttcaggagtgaccatagacgaatcctttctcacagaagacaagagcacccagaatcgcaagcttcttcagaaacgaaggacgctgactggtcagttctccatgggtgggcacctgtccccatggcccacatacaccagtggccagaccattttgcaaaatcgaaaaccctgttcagatgactaccggaagcgagtagggagctgccagcagcacccctttcgcactgccaagccccagtacttggaggaactggaaaactacctacgcaaggagctcctcctgctggacctgggcacagattccacccaggaactaaggctgcagccttacagagagatctttgagttcttcatagaggacttcaaaacgtacaagccattactatcctccatcaagaatgcgtatgaggggatgctggcccaccaaagggagaagattcgggctctggagcccctgaaggccaagcttgtcactgtgaatgaggactgcaatgagaggatcctggccatgagagctgaggagaaatatgaaatctccctgctcaagaaagagaagatgaacttgctaaaactcatcgacaaaaagaatgaggagaagatttcattgcagagcgaggtgaccaaactgaggaagaacttggctgaggagtacctgcactacctcagtgagcgagatgcctgtaagatcctcatcgcagacctgaatgagctgcggtaccagcgggaggacatgtcattagcccagtcgccaggcatctggggggaggaccctgtgaagttaaccctggctcttaagatgacccggcaagacctgacccgcacgcagatggaactcaacaacatgaaggccaactttggagatgtggtccccaggagggactttgaaatgcaggagaagaccaacaaggatcttcaggagcaggtgctggcaggcaggcagggccaggagggtaggacggggtctcacaggtggggggccagggccaatgtccttgcccacagctggacaccctgagagccagctacgaggaggttcgcaaggagcatgagatcctcatgcagctgcacatgagcacgctgaaggaacgggaccaattcttctctgagctgcaggagatccagcgcacttccacgccgcggcctgactggaccaagtgcaaaggtgagggcagccggcagggccccaggtcctgcttacatgtgggcccagactccagctccctctccccacatgcagatgtggtggctgggggcccagagcgctggcagatgctggctgagggcaagaacagcgaccagctggtggacgtgctcctggaagagattggttcggggctgctgcgggagaaagacttcttccctggtctgggctatggggaagccatccctgcttttcttcggtttgatggcctcgtggagaacaagaagccaagcaagaaggacgtggtcaacctcctcaaggatgcctggaaggaacgtcttgctgaggagcagaaagagacgttcccagatttcttcttcaatttcctggagcatcgctttgggcccagtgatgccatggcctgggcttatactatttttgaaaatatcaagatcttccactccaacgaggttatgagtcagttctatgcagtcttgatgggaaagcggagtgagaatgtgtatgtcacccagaaggagacagtagcccagctgctgaaggagatgacaaatgctgacagtcagaacgaggggctactaaccatggagcagttcaacactgtcctcaagagtaccttccctctcaagacagaagagcaaatccaggagctgatggaggcagggggctggcatcccagcagcagcaatgcagacttgctcaactaccgctcactgtttatggaggatgaggagggccagagtgagccctttgtgcaaaaactctgggaacaatacatggatgagaaggacgagtacttacagcagctaaagcaggagcttggcatagaactccatgaggaagtgactctgcccaagctgcgagggggcctgatgaccatcgaccccagcctggacaagcagacagtgaacacctacatgagccaggccttccagctccctgagtcggaaatgccagaggagggtgacgagaaggaagaagccgtggtggaaatcctccagactgccctggagcggcttcaggtgattgacatcaggcgtgtgggacctcgagagccagagcctgcaagctaggaacttgtgggcagcctgcgtactccagtcctgctaacccctagcttttaatataaaagtgtttgtctgaaaacaaaaaat

SEQ ID NO: 287195 - DNA, 2431 bp, Homo sapiens
agcgggtagtataaccgtcctcagccataagcctgtcccatcgagacgtcgggacaccgaaaactaccattcccgccggcaaagcggctccggcctctcagcacacttccctccccatggcctctgttcatccccctgcctcagttctggtacctggggtcaaatcggctgtagtggttgactctcagggcacccgctgccgggtcccagtccacctttgctactttgtcctactcccagcccgcgggcgctaggctcgggggcgtggcgcatccctgactccgcccccgccgcgggggggcctctggggcctggtcgccatggcgaccggctgtacgctaccacagcttcccaggccgcgggtgctgattgcccgcctgcccgtgggtcatggcctgccagcagtcgcggtaccacagcttctcgtccgcgtcgagattacagccacggccttcaggagtgaccatagacgaatcctttctcacagaagacaagagcacccagaatcgcaagcttcttcagaaacgaaggacgctgactggtcagttctccatgggtgggcacctgtccccatggcccacatacaccagtggccagaccattttgcaaaatcgaaaaccctgttcagatgactaccggaagcgagtagggagctgccagcagcacccctttcgcactgccaagccccagtacttggaggaactggaaaactacctacgcaaggagctcctcctgctggacctgggcacagattccacccaggaactaaggctgcagccttacagagagatctttgagttcttcatagaggacttcaaaacgtacaagccattactatcctccatcaagaatgcgtatgaggggatgctggcccaccaaagggagaagattcgggctctggagcccctgaaggccaagcttgtcactgtgaatgaggactgcaatgagaggatcctggccatgagagctgaggagaaatatgaaatctccctgctcaagaaagagaagatgaacttgctaaaactcatcgacaaaaagaatgaggagaagatttcattgcagagcgaggtgaccaaactgaggaagaacttggctgaggagtacctgcactacctcagtgagcgagatgcctgtaagatcctcatcgcagacctgaatgagctgcggtaccagcgggaggacatgtcattagcccagtcgccaggcatctggggggaggaccctgtgaagttaaccctggctcttaagatgacccggcaagacctgacccgcacgcagatggaactcaacaacatgaaggccaactttggagatgtggtccccaggagggactttgaaatgcaggagaagaccaacaaggatcttcaggagcaggtgctggcaggcaggcagggccaggagggtaggacggggtctcacaggtggggggccagggccaatgtccttgcccacagctggacaccctgagagccagctacgaggaggttcgcaaggagcatgagatcctcatgcagctgcacatgagcacgctgaaggaacgggaccaattcttctctgagctgcaggagatccagcgcacttccacgccgcggcctgactggaccaagtgcaaaggtgagggcagccggcagggccccaggtcctgcttacatgtgggcccagactccagctccctctccccacatgcagatgtggtggctgggggcccagagcgctggcagatgctggctgagggcaagaacagcgaccagctggtggacgtgctcctggaagagattggttcggggctgctgcgggagaaagacttcttccctggtctgggctatggggaagccatccctgcttttcttcggtttgatggcctcgtggagaacaagaagccaagcaagaaggacgtggtcaacctcctcaaggatgcctggaaggaacgtcttgctgaggagcagaaagagacgttcccagatttcttcttcaatttcctgaagcccctgggtctccctgtgcaccatgcaccatccactgctcagcccagcacagaggagggcacctgggagtctggggcacggagaggaggggtcagggcctgtcactctctttcctgtggggcagccatgaggaagtgactctgcccaagctgcgagggggcctgatgaccatcgaccccagcctggacaagcagacagtgaacacctacatgagccaggccttccagctccctgagtcggaaatgccagaggagggtgacgagaaggaagaagccgtggtggaaatcctccagactgccctggagcggcttcaggtgattgacatcaggcgtgtgggacctcgagagccagagcctgcaagctaggaacttgtgggcagcctgcgtactccagtcctgctaacccctagcttttaatataaaagtgtttgtctgaaaacaaaaaat

SEQ ID NO: 287196 - DNA, 2747 bp, Homo sapiens
agcgggtagtataaccgtcctcagccataagcctgtcccatcgagacgtcgggacaccgaaaactaccattcccgccggcaaagcggctccggcctctcagcacacttccctccccatggcctctgttcatccccctgcctcagttctggtacctggggtcaaatcggctgtagtggttgactctcagggcacccgctgccgggtcccagtccacctttgctactttgtcctactcccagcccgcgggcgctaggctcgggggcgtggcgcatccctgactccgcccccgccgcgggggggcctctggggcctggtcgccatggcgaccggctgtacgctaccacagcttcccaggccgcgggtgctgattgcccgcctgcccgtgggtcatggcctgccagcagtcgcggtaccacagcttctcgtccgcgtcgaggtaggcgctggcagggatgagggcagagatgagggtttgagtacttctagagagggaaatggcacttgatccggacctctgcacctcctgctggcctctgaccattgatctagggctccagcaccacagagtcaatggttagaatcgggctgatttagcccagtgaagacgttacgtgctagcaaaacgattacagccacggccttcaggagtgaccatagacgaatcctttctcacagaagacaagagcacccagaatcgcaagcttcttcagaaacgaaggacgctggagctgccagcagcacccctttcgcactgccaagccccagtacttggaggaactggaaaactacctacgcaaggagctcctcctgctggacctgggcacagattccacccaggaactaaggctgcagcccaccaaagggagaagattcgggctctggagcccctgaaggccaagcttgtcactgtgaatgaggactgcaatgagaggatcctggccatgagagctgaggagaaatatgaaatctccctgctcaagaaagagaagatgaacttgctaaaactcatcgacaaaaagaatgaggagaagatttcattgcagagcgaggtgaccaaactgaggaagaacttggctgaggagtacctgcactacctcagtgagcgagatgcctgtaagatcctcatcgcagacctgaatgagctgcggtaccagcgggaggacatgtcattagcccagtcgccaggcatctggggggaggaccctgtgaagttaaccctggctcttaagatgacccggcaagacctgacccgcacgcagatggaactcaacaacatgaaggccaactttggagatgtggtccccaggagggactttgaaatgcaggagaagaccaacaaggatcttcaggagcaggtgctggcaggcaggcagggccaggagggtaggacggggtctcacaggtggggggccagggccaatgtccttgcccacagctggacaccctgagagccagctacgaggaggttcgcaaggagcatgagatcctcatgcagctgcacatgagcacgctgaaggaacgggaccaattcttctctgagctgcaggagatccagcgcacttccacgccgcggcctgactggaccaagtgcaaaggtgagggcagccggcagggccccaggtcctgcttacatgtgggcccagactccagctccctctccccacatgcagatgtggtggctgggggcccagagcgctggcagatgctggctgagggcaagaacagcgaccagctggtggacgtgctcctggaagagattggttcggggctgctgcgggagaaagacttcttccctggtctgggctatggggaagccatccctgcttttcttcggtttgatggcctcgtggagaacaagaagccaagcaagaaggacgtggtcaacctcctcaaggatgcctggaaggaacgtcttgctgaggagcagaaagagacgttcccagatttcttcttcaatttcctggagcatcgctttgggcccagtgatgccatggcctgggcttatactatttttgaaaatatcaagatcttccactccaacgaggttatgagtcagttctatgcagtcttgatgggaaagcggagtgagaatgtgtatgtcacccagaaggagacagtagcccagctgctgaaggagatgacaaatgctgacagtcagaacgaggggctactaaccatggagcagttcaacactgtcctcaagagtaccttccctctcaagacagaagagcaaatccaggagctgatggaggcagggggctggcatcccagcagcagcaatgcagacttgctcaactaccgctcactgtttatggaggatgaggagggccagagtgagccctttgtgcaaaaactctgggaacaatacatggatgagaaggacgagtacttacagcagctaaagcaggagcttggcatagaactccatgaggaagtgactctgcccaagctgcgagggggcctgatgaccatcgaccccagcctggacaagcagacagtgaacacctacatgagccaggccttccagctccctgagtcggaaatgccagaggagggtgacgagaaggaagaagccgtggtggaaatcctccagactgccctggagcggcttcaggtgattgacatcaggcgtgtgggacctcgagagccagagcctgcaagctaggaacttgtgggcagcctgcgtactccagtcctgctaacccctagcttttaatataaaagtgtttgtctgaaaacaaaaaat

SEQ ID NO: 287197 - DNA, 1169 bp, Homo sapiens
agcgggtagtataaccgtcctcagccataagcctgtcccatcgagacgtcgggacaccgaaaactaccattcccgccggcaaagcggctccggcctctcagcacacttccctccccatggcctctgttcatccccctgcctcagttctggtacctggggtcaaatcggctgtagtggttgactctcagggcacccgctgccgggtcccagtccacctttgctactttgtcctactcccagcccgcgggcgctaggctcgggggcgtggcgcatccctgactccgcccccgccgcgggggggcctctggggcctggtcgccatggcgaccggctgtacgctaccacagcttcccaggccgcgggtgctgattgcccgcctgcccgtgggtcatggcctgccagcagtcgcggtaccacagcttctcgtccgcgtcgaggtaggcgctggcagggatgagggcagagatgagggtttgagtacttctagagagggaaatggcacttgatccggacctctgcacctcctgctggcctctgaccattgatctagggctccagcaccacagagtcaatggttagaatcgggctgatttagcccagtgaagacgttacgtgctagcaaaacgattacagccacggccttcaggagtgaccatagacgaatcctttctcacagaagacaagagcatcccagcagcagcaatgcagacttgctcaactaccgctcactgtttatggaggatgaggagggccagagtgagccctttgtgcaaaaactctgggaacaatacatggatgagaaggacgagtacttacagcagctaaagcaggagcttggcatagaactccatgaggaagtgactctgcccaagctgcgagggggcctgatgaccatcgaccccagcctggacaagcagacagtgaacacctacatgagccaggccttccagctccctgagtcggaaatgccagaggagggtgacgagaaggaagaagccgtggtggaaatcctccagactgccctggagcggcttcaggtgattgacatcaggcgtgtgggacctcgagagccagagcctgcaagctaggaacttgtgggcagcctgcgtactccagtcctgctaacccctagcttttaatataaaagtgtttgtctgaaaacaaaaaat

SEQ ID NO: 287198 - DNA, 2634 bp, Homo sapiens
agcgggtagtataaccgtcctcagccataagcctgtcccatcgagacgtcgggacaccgaaaactaccattcccgccggcaaagcggctccggcctctcagcacacttccctccccatggcctctgttcatccccctgcctcagttctggtacctggggtcaaatcggctgtagtggttgactctcagggcacccgctgccgggtcccagtccacctttgctactttgtcctactcccagcccgcgggcgctaggctcgggggcgtggcgcatccctgactccgcccccgccgcgggggggcctctggggcctggtcgccatggcgaccggctgtacgctaccacagcttcccaggccgcgggtgctgattgcccgcctgcccgtgggtcatggcctgccagcagtcgcggtaccacagcttctcgtccgcgtcgagattacagccacggccttcaggagtgaccatagacgaatcctttctcacagaagacaagagcacccagaatcgcaagcttcttcagaaacgaaggacgctgactggtcagttctccatgggtgggcacctgtccccatggcccacatacaccagtggccagaccattttgcaaaatcgaaaaccctgttcagatgactaccggaagcgagtagggagctgccagcagcacccctttcgcactgccaagccccagtacttggaggaactggaaaactacctacgcaaggagctcctcctgctggacctgggcacagattccacccaggaactaaggctgcagccttacagagagatctttgagttcttcatagaggacttcaaaacgtacaagccattactatcctccatcaagaatgcgtatgaggggatgctggcccaccaaagggagaagattcgggctctggagcccctgaaggccaagcttgtcactgtgaatgaggactgcaatgagaggatcctggccatgagagctgaggagaaatatgaaatctccctgctcaagaaagagaagatgaacttgctaaaactcatcgacaaaaagaatgaggagaagatttcattgcagagcgaggtgaccaaactgaggaagaacttggctgaggagtacctgcactacctcagtgagcgagatgcctgtaagatcctcatcgcagacctgaatgagctgcggtaccagcgggaggacatgtcattagcccagtcgccaggcatctggggggaggaccctgtgaagttaaccctggctcttaagatgacccggcaagacctgacccgcacgcagatggaactcaacaacatgaaggccaactttggagatgtggtccccaggagggactttgaaatgcaggagaagaccaacaaggatcttcaggagcaggtgctggcaggcaggcagggccaggagggtaggacggggtctcacaggtggggggccagggccaatgtccttgcccacagctggacaccctgagagccagctacgaggaggttcgcaaggagcatgagatcctcatgcagctgcacatgagcacgctgaaggaacgggaccaattcttctctgagctgcaggagatccagcgcacttccacgccgcggcctgactggaccaagtgcaaaggtgagggcagccggcagggccccaggtcctgcttacatgtgggcccagactccagctccctctccccacatgcagatgtggtggctgggggcccagagcgctggcagatgctggctgagggcaagaacagcgaccagctggtggacgtgctcctggaagagattggttcggggctgctgcgggagaaagacttcttccctggtctgggctatggggaagccatccctgcttttcttcggtttgatggcctcgtggagaacaagaagccaagcaagaaggacgtggtcaacctcctcaaggatgcctggaaggaacgtcttgctgaggagcagaaagagacgttcccagatttcttcttcaatttcctgaagcccctgggtctccctgtgcaccatgcaccatccactgctcagcccagcacagaggagggcacctgggagtctggggcacggagaggaggggtcagggcctgtcactctctttcctgtggggcagccatgaggaagtgactctgcccaagctgcgagggggcctgatgaccatcgaccccagcctggacaagcagacagtgaacacctacatgagccaggccttccagctccctgagtcggaaatgccagaggagggtgacgagaaggaagaagccgtggtggaaatcctccagactgccctggagcggcttcagcggggagagctttccccaaaggccagcaggggaaaacccaaccttacttggaggagccagggaagtatctcgcagatcccgcaaaaaggcacccacgtctacagctcggcgggctggaggtctgcgggccaagccaggcctctgcactgactgtggctgaagaggtgtggcaaaggtcaggttgagggatctggtgagggaagaggcatcagcattcccttgaggctcttgggagagagacagcccctggtccactccctgctgaaacactgacagtctcagcctctgtttcctcctgccaggggccagcagacctggagccagggttgtggggg

SEQ ID NO: 287199 - DNA, 491 bp, Homo sapiens
gtgaatggaagtggtgtgatgatgaccaagtccccgaattcctgccaactccacgacaagggtgaccccctaccctgctctgcctttctacggagagtgacacactgagccaccaccttcccccagagccttgctaactccaccctctgccctgctgctaggctcagtactttccccacagggggaaacattggcaccttgccgaattctcagaaatggccaatctccttcttctttcacctttcctgttcacagtccctgatggggccccccagaacccagcccactccctggggtgaccagctgcatacaggggtccaggggcagcccctgaccacacagccaccttcttgccaggtgaccaaactgaggaagaacttggctgaggagtacctgcactacctcagtgagcgagatgcctgtaagatcctcatcgcagacctgaatgagctgcggtaccagcgggaggacatgtcattagcccagtcgcc

SEQ ID NO: 287200 - DNA, 2483 bp, Homo sapiens
agcgggtagtataaccgtcctcagccataagcctgtcccatcgagacgtcgggacaccgaaaactaccattcccgccggcaaagcggctccggcctctcagcacacttccctccccatggcctctgttcatccccctgcctcagttctggtacctggggtcaaatcggctgtagtggttgactctcagggcacccgctgccgggtcccagtccacctttgctactttgtcctactcccagcccgcgggcgctaggctcgggggcgtggcgcatccctgactccgcccccgccgcgggggggcctctggggcctggtcgccatggcgaccggctgtacgctaccacagcttcccaggccgcgggtgctgattgcccgcctgcccgtgggtcatggcctgccagcagtcgcggtaccacagcttctcgtccgcgtcgagattacagccacggccttcaggagtgaccatagacgaatcctttctcacagaagacaagagcacccagaatcgcaagcttcttcagaaacgaaggacgctggagctgccagcagcacccctttcgcactgccaagccccagtacttggaggaactggaaaactacctacgcaaggagctcctcctgctggacctgggcacagattccacccaggaactaaggctgcagcccaccaaagggagaagattcgggctctggagcccctgaaggccaagcttgtcactgtgaatgaggactgcaatgagaggatcctggccatgagagctgaggagaaatatgaaatctccctgctcaagaaagagaagatgaacttgctaaaactcatcgacaaaaagaatgaggagaagatttcattgcagagcgaggtgaccaaactgaggaagaacttggctgaggagtacctgcactacctcagtgagcgagatgcctgtaagatcctcatcgcagacctgaatgagctgcggtaccagcgggaggacatgtcattagcccagtcgccaggcatctggggggaggaccctgtgaagttaaccctggctcttaagatgacccggcaagacctgacccgcacgcagatggaactcaacaacatgaaggccaactttggagatgtggtccccaggagggactttgaaatgcaggagaagaccaacaaggatcttcaggagcaggtgctggcaggcaggcagggccaggagggtaggacggggtctcacaggtggggggccagggccaatgtccttgcccacagctggacaccctgagagccagctacgaggaggttcgcaaggagcatgagatcctcatgcagctgcacatgagcacgctgaaggaacgggaccaattcttctctgagctgcaggagatccagcgcacttccacgccgcggcctgactggaccaagtgcaaagatgtggtggctgggggcccagagcgctggcagatgctggctgagggcaagaacagcgaccagctggtggacgtgctcctggaagagattggttcggggctgctgcgggagaaagacttcttccctggtctgggctatggggaagccatccctgcttttcttcggtttgatggcctcgtggagaacaagaagccaagcaagaaggacgtggtcaacctcctcaaggatgcctggaaggaacgtcttgctgaggagcagaaagagacgttcccagatttcttcttcaatttcctggagcatcgctttgggcccagtgatgccatggcctgggcttatactatttttgaaaatatcaagatcttccactccaacgaggttatgagtcagttctatgcagtcttgatgggaaagcggagtgagaatgtgtatgtcacccagaaggagacagtagcccagctgctgaaggagatgacaaatgctgacagtcagaacgaggggctactaaccatggagcagttcaacactgtcctcaagagtaccttccctctcaagacagaagagcaaatccaggagctgatggaggcagggggctggcatcccagcagcagcaatgcagacttgctcaactaccgctcactgtttatggaggatgaggagggccagagtgagccctttgtgcaaaaactctgggaacaatacatggatgagaaggacgagtacttacagcagctaaagcaggagcttggcatagaactccatgaggaagtgactctgcccaagctgcgagggggcctgatgaccatcgaccccagcctggacaagcagacagtgaacacctacatgagccaggccttccagctccctgagtcggaaatgccagaggagggtgacgagaaggaagaagccgtggtggaaatcctccagactgccctggagcggcttcaggtgattgacatcaggcgtgtgggacctcgagagccagagcctgcaagctaggaacttgtgggcagcctgcgtactccagtcctgctaacccctagcttttaatataaaagtgtttgtctgaaaacaaaaaat

SEQ ID NO: 287201 - DNA, 386 bp, Homo sapiens
cgagagggaggagagcttggcaactcgccccaactacggacccaggccctgtgaggctgggtcacggggtggacctgcttcagctgggccccttggggggcctgatgaccatcgaccccagcctggacaagcagacagtgaacacctacatgagccaggccttccagctccctgagtcggaaatgccagaggagggtgacgagaaggaagaagccgtggtggaaatcctccagactgccctggagcggcttcaggtgattgacatcaggcgtgtgggacctcgagagccagagcctgcaagctaggaacttgtgggcagcctgcgtactccagtcctgctaacccctagcttttaatataaaagtgtttgtctgaaaacaaaaaat

SEQ ID NO: 287202 - DNA, 2234 bp, Homo sapiens
agcgggtagtataaccgtcctcagccataagcctgtcccatcgagacgtcgggacaccgaaaactaccattcccgccggcaaagcggctccggcctctcagcacacttccctccccatggcctctgttcatccccctgcctcagttctggtacctggggtcaaatcggctgtagtggttgactctcagggcacccgctgccgggtcccagtccacctttgctactttgtcctactcccagcccgcgggcgctaggctcgggggcgtggcgcatccctgactccgcccccgccgcgggggggcctctggggcctggtcgccatggcgaccggctgtacgctaccacagcttcccaggccgcgggtgctgattgcccgcctgcccgtgggtcatggcctgccagcagtcgcggtaccacagcttctcgtccgcgtcgagattacagccacggccttcaggagtgaccatagacgaatcctttctcacagaagacaagagcacccagaatcgcaagcttcttcagaaacgaaggacgctggtgaccaaactgaggaagaacttggctgaggagtacctgcactacctcagtgagcgagatgcctgtaagatcctcatcgcagacctgaatgagctgcggtaccagcgggaggacatgtcattagcccagtcgccaggcatctggggggaggaccctgtgaagttaaccctggctcttaagatgacccggcaagacctgacccgcacgcagatggaactcaacaacatgaaggccaactttggagatgtggtccccaggagggactttgaaatgcaggagaagaccaacaaggatcttcaggagcaggtgctggcaggcaggcagggccaggagggtaggacggggtctcacaggtggggggccagggccaatgtccttgcccacagctggacaccctgagagccagctacgaggaggttcgcaaggagcatgagatcctcatgcagctgcacatgagcacgctgaaggaacgggaccaattcttctctgagctgcaggagatccagcgcacttccacgccgcggcctgactggaccaagtgcaaaggtgagggcagccggcagggccccaggtcctgcttacatgtgggcccagactccagctccctctccccacatgcagatgtggtggctgggggcccagagcgctggcagatgctggctgagggcaagaacagcgaccagctggtggacgtgctcctggaagagattggttcggggctgctgcgggagaaagacttcttccctggtctgggctatggggaagccatccctgcttttcttcggtttgatggcctcgtggagaacaagaagccaagcaagaaggacgtggtcaacctcctcaaggatgcctggaaggaacgtcttgctgaggagcagaaagagacgttcccagatttcttcttcaatttcctggagcatcgctttgggcccagtgatgccatggcctgggcttatactatttttgaaaatatcaagatcttccactccaacgaggttatgagtcagttctatgcagtcttgatgggaaagcggagtgagaatgtgtatgtcacccagaaggagacagtagcccagctgctgaaggagatgacaaatgctgacagtcagaacgaggggctactaaccatggagcagttcaacactgtcctcaagagtaccttccctctcaagacagaagagcaaatccaggagctgatggaggcagggggctggcatcccagcagcagcaatgcagacttgctcaactaccgctcactgtttatggaggatgaggagggccagagtgagccctttgtgcaaaaactctgggaacaatacatggatgagaaggacgagtacttacagcagctaaagcaggagcttggcatagaactccatgaggaagtgactctgcccaagctgcgagggggcctgatgaccatcgaccccagcctggacaagcagacagtgaacacctacatgagccaggccttccagctccctgagtcggaaatgccagaggagggtgacgagaaggaagaagccgtggtggaaatcctccagactgccctggagcggcttcaggtgattgacatcaggcgtgtgggacctcgagagccagagcctgcaagctaggaacttgtgggcagcctgcgtactccagtcctgctaacccctagcttttaatataaaagtgtttgtctgaaaacaaaaaat

SEQ ID NO: 287203 - DNA, 2431 bp, Homo sapiens
agcgggtagtataaccgtcctcagccataagcctgtcccatcgagacgtcgggacaccgaaaactaccattcccgccggcaaagcggctccggcctctcagcacacttccctccccatggcctctgttcatccccctgcctcagttctggtacctggggtcaaatcggctgtagtggttgactctcagggcacccgctgccgggtcccagtccacctttgctactttgtcctactcccagcccgcgggcgctaggctcgggggcgtggcgcatccctgactccgcccccgccgcgggggggcctctggggcctggtcgccatggcgaccggctgtacgctaccacagcttcccaggccgcgggtgctgattgcccgcctgcccgtgggtcatggcctgccagcagtcgcggtaccacagcttctcgtccgcgtcgagattacagccacggccttcaggagtgaccatagacgaatcctttctcacagaagacaagagcacccagaatcgcaagcttcttcagaaacgaaggacgctgcccaccaaagggagaagattcgggctctggagcccctgaaggccaagcttgtcactgtgaatgaggactgcaatgagaggatcctggccatgagagctgaggagaaatatgaaatctccctgctcaagaaagagaagatgaacttgctaaaactcatcgacaaaaagaatgaggagaagatttcattgcagagcgaggtgaccaaactgaggaagaacttggctgaggagtacctgcactacctcagtgagcgagatgcctgtaagatcctcatcgcagacctgaatgagctgcggtaccagcgggaggacatgtcattagcccagtcgccaggcatctggggggaggaccctgtgaagttaaccctggctcttaagatgacccggcaagacctgacccgcacgcagatggaactcaacaacatgaaggccaactttggagatgtggtccccaggagggactttgaaatgcaggagaagaccaacaaggatcttcaggagcaggtgctggcaggcaggcagggccaggagggtaggacggggtctcacaggtggggggccagggccaatgtccttgcccacagctggacaccctgagagccagctacgaggaggttcgcaaggagcatgagatcctcatgcagctgcacatgagcacgctgaaggaacgggaccaattcttctctgagctgcaggagatccagcgcacttccacgccgcggcctgactggaccaagtgcaaaggtgagggcagccggcagggccccaggtcctgcttacatgtgggcccagactccagctccctctccccacatgcagatgtggtggctgggggcccagagcgctggcagatgctggctgagggcaagaacagcgaccagctggtggacgtgctcctggaagagattggttcggggctgctgcgggagaaagacttcttccctggtctgggctatggggaagccatccctgcttttcttcggtttgatggcctcgtggagaacaagaagccaagcaagaaggacgtggtcaacctcctcaaggatgcctggaaggaacgtcttgctgaggagcagaaagagacgttcccagatttcttcttcaatttcctggagcatcgctttgggcccagtgatgccatggcctgggcttatactatttttgaaaatatcaagatcttccactccaacgaggttatgagtcagttctatgcagtcttgatgggaaagcggagtgagaatgtgtatgtcacccagaaggagacagtagcccagctgctgaaggagatgacaaatgctgacagtcagaacgaggggctactaaccatggagcagttcaacactgtcctcaagagtaccttccctctcaagacagaagagcaaatccaggagctgatggaggcagggggctggcatcccagcagcagcaatgcagacttgctcaactaccgctcactgtttatggaggatgaggagggccagagtgagccctttgtgcaaaaactctgggaacaatacatggatgagaaggacgagtacttacagcagctaaagcaggagcttggcatagaactccatgaggaagtgactctgcccaagctgcgagggggcctgatgaccatcgaccccagcctggacaagcagacagtgaacacctacatgagccaggccttccagctccctgagtcggaaatgccagaggagggtgacgagaaggaagaagccgtggtggaaatcctccagactgccctggagcggcttcaggtgattgacatcaggcgtgtgggacctcgagagccagagcctgcaagctaggaacttgtgggcagcctgcgtactccagtcctgctaacccctagcttttaatataaaagtgtttgtctgaaaacaaaaaat

SEQ ID NO: 287204 - DNA, 3229 bp, Homo sapiens
agcgggtagtataaccgtcctcagccataagcctgtcccatcgagacgtcgggacaccgaaaactaccattcccgccggcaaagcggctccggcctctcagcacacttccctccccatggcctctgttcatccccctgcctcagttctggtacctggggtcaaatcggctgtagtggttgactctcagggcacccgctgccgggtcccagtccacctttgctactttgtcctactcccagcccgcgggcgctaggctcgggggcgtggcgcatccctgactccgcccccgccgcgggggggcctctggggcctggtcgccatggcgaccggctgtacgctaccacagcttcccaggccgcgggtgctgattgcccgcctgcccgtgggtcatggcctgccagcagtcgcggtaccacagcttctcgtccgcgtcgagattacagccacggccttcaggagtgaccatagacgaatcctttctcacagaagacaagagcacccagaatcgcaagcttcttcagaaacgaaggacgctgactggtcagttctccatgggtgggcacctgtccccatggcccacatacaccagtggccagaccattttgcaaaatcgaaaaccctgttcagatgactaccggaagcgagtagggagctgccagcagcacccctttcgcactgccaagccccagtacttggaggaactggaaaactacctacgcaaggagctcctcctgctggacctgggcacagattccacccaggaactaaggctgcagccttacagagagatctttgagttcttcatagaggacttcaaaacgtacaagccattactatcctccatcaagaatgcgtatgaggggatgctggcccaccaaagggagaagattcgggctctggagcccctgaaggccaagcttgtcactgtgaatgaggactgcaatgagaggatcctggccatgagagctgaggagaaatatgaaatctccctgctcaagaaagagaagatgaacttgctaaaactcatcgacaaaaagaatgaggagaagatttcattgcagagcgaggtgaccaaactgaggaagaacttggctgaggagtacctgcactacctcagtgagcgagatgcctgtaagatcctcatcgcagacctgaatgagctgcggtaccagcgggaggacatgtcattagcccagtcgccaggcatctggggggaggaccctgtgaagttaaccctggctcttaagatgacccggcaagacctgacccgcacgcagatggaactcaacaacatgaaggccaactttggagatgtggtccccaggagggactttgaaatgcaggagaagaccaacaaggatcttcaggagcaggtgctggcaggcaggcagggccaggagggtaggacggggtctcacaggtggggggccagggccaatgtccttgcccacagctggacaccctgagagccagctacgaggaggttcgcaaggagcatgagatcctcatgcagctgcacatgagcacgctgaaggaacgggaccaattcttctctgagctgcaggagatccagcgcacttccacgccgcggcctgactggaccaagtgcaaaggtgagggcagccggcagggccccaggtcctgcttacatgtgggcccagactccagctccctctccccacatgcagatgtggtggctgggggcccagagcgctggcagatgctggctgagggcaagaacagcgaccagctggtggacgtgctcctggaagagattggttcggggctgctgcgggagaaagacttcttccctggtctgggctatggggaagccatccctgcttttcttcggtttgatggcctcgtggagaacaagaagccaagcaagaaggacgtggtcaacctcctcaaggatgcctggaaggaacgtcttgctgaggagcagaaagagacgttcccagatttcttcttcaatttcctggagcatcgctttgggcccagtgatgccatggcctgggcttatactatttttgaaaatatcaagatcttccactccaacgaggttatgagtcagttctatgcagtcttgatgggaaagcggagtgagaatgtgtatgtcacccagaaggagacagtagcccagctgctgaaggagatgacaaatgctgacagtcagaacgaggggctactaaccatggagcagttcaacactgtcctcaagagtaccttccctctcaagacagaagagcaaatccaggagctgatggaggcagggggctggcatcccagcagcagcaatgcagacttgctcaactaccgctcactgtttatggaggatgaggagggccagagtgagccctttgtgcaaaaactctgggaacaatacatggatgagaaggacgagtacttacagcagctaaagcaggagcttggcatagaactccatgaggaagtgactctgcccaagctgcgagggggcctgatgaccatcgaccccagcctggacaagcagacagtgaacacctacatgagccaggccttccagctccctgagtcggaaatgccagaggagggtgacgagaaggaagaagccgtggtggaaatcctccagactgccctggagcggcttcagcggggagagctttccccaaaggccagcaggggaaaacccaaccttacttggaggagccagggaagtatctcgcagatcccgcaaaaaggcacccacgtctacagctcggcgggctggaggtctgcgggccaagccaggcctctgcactgactgtggctgaagaggtgtggcaaaggtcaggttgagggatctggtgaggtggggaggcacagaggaaagtcaggtacctgagacccagtttgcccacagatccctccatctgccctggggctctcatctcttagaacagatgctgtgaggctaaaactggtaggaagtagtatgggcagattccatcccaggcagcacctccctccccaagtctctcctccacccactcccagaacaggaaacacccagagcagcacctggtgagggaagaggcatcagcattcccttgaggctctgtcagcaaccggcaagagaatgtaaaagaagaaaaccatgggttggaccgcctgcggtgctggcactggcttcactaccgactcaggcatcaggatggaagattctggggctgcagaaacaccaaggagagggtggggctgacagaacag

SEQ ID NO: 287205 - DNA, 1382 bp, Homo sapiens
  misc_feature (1382)..(1382): n is a, c, g, or t
aggccgctagggtgcggggttggggaggaggccgctagtctacgcctgtggagccgatactcagccctctgcgaccatggctgtgctggcggcacttctgcgcagcggcgcccgcagccgcagccccctgctccggaggctggtgcaggaaataagatatgtggaacggagttatgtatcaaaacccactttgaaggaagtggtcatagtaagtgctacaagaacacccattggatcttttttaggcagcctttccttgctgccagccactaagcttggttccattgcaattcagggagccattgaaaaggcagggattccaaaagaagaagtgaaagaagcatacatgggtaatgttctacaaggaggtgaaggacaagctcctacaaggcaggcagtattgggtgcaggcttacctatttctactccatgtaccaccataaacaaagtttgtgcttcaggaatgaaagccatcatgatggcctctcaaagtcttatgtgtggacatcagatcaagcaagagacaggctccttagcaaaaatatgctgtcatgtcaggaggtgagacctggacacacagaagaatcaagattctctcagatctgagcccttcatttttcagatgaagatttttttcagtgtgtctgagacagccacagagttacagggctgagcatctgccatgtgacagtcattggaaatagagtggtgaacaaaacatttaaaaaaatctgtacatgtgcaggtctctgttggaaaaatgcctaaaagaaatgctgagtcaggatttgaacattttggtatttgcaaatgctttccataaaagttgtaccagttagactttccaaaaattgtgtgacttgtctggatctgcaccaccactgggtggtaccaaacccttgtcaaactggtaggtgaaaaacggtcaccagatttagtttcagaactgtttgtcatggaaagttttgtcttaattgaagtattgtggttctctagcaaatgccatttgtactatattgaaatactttcatttaatattattttattcatttgtggatatatacagtgacttataggcattcttggaagtgctttgttttgaatatttatgaccttagaaaacagtcagttttactttataatgaagaattgataccttattttctgtcacttattattgccatcacccccagtaaaaagtacaagtgaataaaacttagatgagaactgattaagaatttctctatttcggaataggcaaaatatttatgtttctttggtatagagcttgcttgtctgtatgcctgattaaagactgtaagaagatattattggctttatgtttacattaatgttttatattaaactgtttttaactagcn

SEQ ID NO: 287206 - DNA, 2579 bp, Homo sapiens
aggccgctagggtgcggggttggggaggaggccgctagtctacgcctgtggagccgatactcagccctctgcgaccatggctgtgctggcggcacttctgcgcagcggcgcccgcagccgcagccccctgctccggaggctggtgcaggaaataagatatgtggaacggagttatgtatcaaaacccactttgaaggaagtggtcatagtaagtgctacaagaacacccattggatcttttttaggcagcctttccttgctgccagccactaagcttggttccattgcaattcagggagccattgaaaaggcagggattccaaaagaagaagtgaaagaagcatacatgggtaatgttctacaaggaggtgaaggacaagctcctacaaggcaggcagtattgggtgcaggcttacctatttctactccatgtaccaccataaacaaagtttgtgcttcaggaatgaaagccatcatgatggcctctcaaagtcttatgtgtggacatcaggatgtgatggtggcaggtgggatggagagcatgtccaatgttccatatgtaatgaacagaggatcaacaccatatggtggggtaaagcttgaagatttgattgtaaaagacgggctaactgatgtctacaataaaattcatatgggcagctgtgctgagaatacagcaaagaagctgaatattgcacgaaatgaacaggacgcttatgctattaattcttataccagaagtaaagcagcatgggaagctgggaaatttggaaatgaagttattcctgtcacagttacagtaaaaggtcaaccagatgtagtggtgaaagaagatgaagaatataaacgtgttgattttagcaaagttccaaagctgaagacagttttccagaaagaaaatggcacagtaacagctgccaatgccagtacactgaatgatggagcagctgctctggttctcatgacggcagatgcagcgaagaggctcaatgttacaccactggcaagaatagtagcatttgctgacgctgctgtagaacctattgattttccaattgctcctgtatatgctgcatctatggttcttaaagatgtgggattgaaaaaagaagatattgcaatgtgggaagtaaatgaagcctttagtctggttgtactagcaaacattaaaatgttggagattgatccccaaaaagtgaatatcaatggaggagctgtttctctgggacatccaattgggatgtctggagccaggattgttggtcatttgactcatgccttgaagcaaggagaatacggtcttgccagtatttgcaatggaggaggaggtgcttctgccatgctaattcagaagctgtagacaacctctgctatttaaggagacaaccctatgtgaccagaaggcctgctgtaatcagtgtgactactgtgggtcagcttatattcagataagctgtttcattttttattattttctatgttaacttttaaaaatcaaaatgatgaaatcccaaaacattttgaaattaaaaataaatttcttcttctgcttttttcttggtaaccttgaaaagtttgatacatttttgcattctgagtctatacttatcgaaatatggtagaaataccaatgtgtaatattagtgacttacataagtagctagaagtttccatttgtgagaacacatttatatttttgaggattgttaaaggtcaagtgaatgctctttataggtaatttacatttagtaaattacggtaaattaaattacttctctttacagtaagagttggctattctggacaaactagcagtgcttcatataatcactcaaaccacagtgtgtgcagcagtactagaaacaagacagaagcccatgtcctcagggtctagagtgggggcaatttcttataacctcaacattcagggttgggggaggtcaagcagaaaaccctggagtttgggctctgaattactatagcagcatagagagtgggaagggaggtagaaactgatatgctgaatggatatataaaaaagggaacagatcaccacttccaatacacgacaatgcctgttcttaagcaggacagactgtaacagaagtatctcgcattgcattttatctgggaaaaaattaattaaaacgctacaggcaggggctatgcacactaccctcaattgcagctctgaagagggaaaactccccctcaggaagaggagggggcagtaaaggtcattgtgtacacattatctgttggcaaataatgtattgtagatcttttgaaggagcaaaatgacaatatatgggagaaatagattagattgctcttcagattcagaggaagagtagagtattttcaaaaacatctgtaatcatcaccaacttttgaggcttgttatgtgctttatatgtataaactcatttaattgtcacaaaaacttctaagagtgggtaccattattatccctcctttataaacaaggaaattgaggcatagagtagctaaataaattccaagggcaaaaagctggctaggattcaactccaagttagtcaagctccagagcccacgtt

SEQ ID NO: 287207 - DNA, 3116 bp, Homo sapiens
agtcacgcgacgggttctggtccaaaaaccgcctaagtgctccgataacacccagggactcgcctatttttacagcgcgtttctacttccaaggtctcggcgtaatcatcttaatgagcgttactggtggggggaatcagatcctgtttgtatgcttatggaattatccagaagtaaaaggggtgaatgatgtagaggagaaggaagggataactgtgccatctttgaaaaggcaactggaaatgggatccagagtaaagtggagagaaccagggaagattccattaaactggaccagaagcttgaaagaagagaagtggcttagtaaacaaggaacaaactagctaagtagaaaggggacttttaaaatttaatttttatttcaataggcttttgggaacaggtggtgttggattatatgaataagttctttattggtggtatctgatattttggtgcacccatcacctgagcagtatacactgtaaaccaatgtgtagtcttttattcctcacccccaccccccgcctttcccctgagtccccaaagtccactgtatcattcttatgcctttgtgtcctcatagcgcagctcccacttatgagtgagaacataagctgtttggtgtttccattcctgagttacttcacttagaataatagtctccaattccatccaggttgcagaaataagatatgtggaacggagttatgtatcaaaacccactttgaaggaagtggtcatagtaagtgctacaagaacacccattggatcttttttaggcagcctttccttgctgccagccactaagcttggttccattgcaattcagggagccattgaaaaggcagggattccaaaagaagaagtgaaagaagcatacatgggtaatgttctacaaggaggtgaaggacaagctcctacaaggcaggcagtattgggtgcaggcttacctatttctactccatgtaccaccataaacaaagtttgtgcttcaggaatgaaagccatcatgatggcctctcaaagtcttatgtgtggacatcaggatgtgatggtggcaggtgggatggagagcatgtccaatgttccatatgtaatgaacagaggatcaacaccatatggtggggtaaagcttgaagatttgattgtaaaagacgggctaactgatgtctacaataaaattcatatgggcagctgtgctgagaatacagcaaagaagctgaatattgcacgaaatgaacaggacgcttatgctattaattcttataccagaagtaaagcagcatgggaagctgggaaatttggaaatgaagttattcctgtcacagttacagtaaaaggtcaaccagatgtagtggtgaaagaagatgaagaatataaacgtgttgattttagcaaagttccaaagctgaagacagttttccagaaagaaaatggcacagtaacagctgccaatgccagtacactgaatgatggagcagctgctctggttctcatgacggcagatgcagcgaagaggctcaatgttacaccactggcaagaatagtagcatttgctgacgctgctgtagaacctattgattttccaattgctcctgtatatgctgcatctatggttcttaaagatgtgggattgaaaaaagaagatattgcaatgtgggaagtaaatgaagcctttagtctggttgtactagcaaacattaaaatgttggagattgatccccaaaaagtgaatatcaatggaggagctgtttctctgggacatccaattgggatgtctggagccaggattgttggtcatttgactcatgccttgaagcaaggagaatacggtcttgccagtatttgcaatggaggaggaggtgcttctgccatgctaattcagaagctgtagacaacctctgctatttaaggagacaaccctatgtgaccagaaggcctgctgtaatcagtgtgactactgtgggtcagcttatattcagataagctgtttcattttttattattttctatgttaacttttaaaaatcaaaatgatgaaatcccaaaacattttgaaattaaaaataaatttcttcttctgcttttttcttggtaaccttgaaaagtttgatacatttttgcattctgagtctatacttatcgaaatatggtagaaataccaatgtgtaatattagtgacttacataagtagctagaagtttccatttgtgagaacacatttatatttttgaggattgttaaaggtcaagtgaatgctctttataggtaatttacatttagtaaattacggtaaattaaattacttctctttacagtaagagttggctattctggacaaactagcagtgcttcatataatcactcaaaccacagtgtgtgcagcagtactagaaacaagacagaagcccatgtcctcagggtctagagtgggggcaatttcttataacctcaacattcagggttgggggaggtcaagcagaaaaccctggagtttgggctctgaattactatagcagcatagagagtgggaagggaggtagaaactgatatgctgaatggatatataaaaaagggaacagatcaccacttccaatacacgacaatgcctgttcttaagcaggacagactgtaacagaagtatctcgcattgcattttatctgggaaaaaattaattaaaacgctacaggcaggggctatgcacactaccctcaattgcagctctgaagagggaaaactccccctcaggaagaggagggggcagtaaaggtcattgtgtacacattatctgttggcaaataatgtattgtagatcttttgaaggagcaaaatgacaatatatgggagaaatagattagattgctcttcagattcagaggaagagtagagtattttcaaaaacatctgtaatcatcaccaacttttgaggcttgttatgtgctttatatgtataaactcatttaattgtcacaaaaacttctaagagtgggtaccattattatccctcctttataaacaaggaaattgaggcatagagtagctaaataaattccaagggcaaaaagctggctaggattcaactccaagttagtcaagctccagagcccacgtt

SEQ ID NO: 287208 - DNA, 2418 bp, Homo sapiens
gctgcagccgcagtgactctagaggtccccaagctgaagtggtcatagtaagtgctacaagaacacccattggatcttttttaggcagcctttccttgctgccagccactaagcttggttccattgcaattcagggagccattgaaaaggcagggattccaaaagaagaagtgaaagaagcatacatgggtaatgttctacaaggaggtgaaggacaagctcctacaaggcaggcagtattgggtgcaggcttacctatttctactccatgtaccaccataaacaaagtttgtgcttcaggaatgaaagccatcatgatggcctctcaaagtcttatgtgtggacatcaggatgtgatggtggcaggtgggatggagagcatgtccaatgttccatatgtaatgaacagaggatcaacaccatatggtggggtaaagcttgaagatttgattgtaaaagacgggctaactgatgtctacaataaaattcatatgggcagctgtgctgagaatacagcaaagaagctgaatattgcacgaaatgaacaggacgcttatgctattaattcttataccagaagtaaagcagcatgggaagctgggaaatttggaaatgaagttattcctgtcacagttacagtaaaaggtcaaccagatgtagtggtgaaagaagatgaagaatataaacgtgttgattttagcaaagttccaaagctgaagacagttttccagaaagaaaatggcacagtaacagctgccaatgccagtacactgaatgatggagcagctgctctggttctcatgacggcagatgcagcgaagaggctcaatgttacaccactggcaagaatagtagcatttgctgacgctgctgtagaacctattgattttccaattgctcctgtatatgctgcatctatggttcttaaagatgtgggattgaaaaaagaagatattgcaatgtgggaagtaaatgaagcctttagtctggttgtactagcaaacattaaaatgttggagattgatccccaaaaagtgaatatcaatggaggagctgtttctctgggacatccaattgggatgtctggagccaggattgttggtcatttgactcatgccttgaagcaaggagaatacggtcttgccagtatttgcaatggaggaggaggtgcttctgccatgctaattcagaagctgtagacaacctctgctatttaaggagacaaccctatgtgaccagaaggcctgctgtaatcagtgtgactactgtgggtcagcttatattcagataagctgtttcattttttattattttctatgttaacttttaaaaatcaaaatgatgaaatcccaaaacattttgaaattaaaaataaatttcttcttctgcttttttcttggtaaccttgaaaagtttgatacatttttgcattctgagtctatacttatcgaaatatggtagaaataccaatgtgtaatattagtgacttacataagtagctagaagtttccatttgtgagaacacatttatatttttgaggattgttaaaggtcaagtgaatgctctttataggtaatttacatttagtaaattacggtaaattaaattacttctctttacagtaagagttggctattctggacaaactagcagtgcttcatataatcactcaaaccacagtgtgtgcagcagtactagaaacaagacagaagcccatgtcctcagggtctagagtgggggcaatttcttataacctcaacattcagggttgggggaggtcaagcagaaaaccctggagtttgggctctgaattactatagcagcatagagagtgggaagggaggtagaaactgatatgctgaatggatatataaaaaagggaacagatcaccacttccaatacacgacaatgcctgttcttaagcaggacagactgtaacagaagtatctcgcattgcattttatctgggaaaaaattaattaaaacgctacaggcaggggctatgcacactaccctcaattgcagctctgaagagggaaaactccccctcaggaagaggagggggcagtaaaggtcattgtgtacacattatctgttggcaaataatgtattgtagatcttttgaaggagcaaaatgacaatatatgggagaaatagattagattgctcttcagattcagaggaagagtagagtattttcaaaaacatctgtaatcatcaccaacttttgaggcttgttatgtgctttatatgtataaactcatttaattgtcacaaaaacttctaagagtgggtaccattattatccctcctttataaacaaggaaattgaggcatagagtagctaaataaattccaagggcaaaaagctggctaggattcaactccaagttagtcaagctccagagcccacgtt

SEQ ID NO: 287209 - DNA, 1579 bp, Homo sapiens
ctgtagtatttcaaggaaatgatgacagtaagttgtgattgctaattatttgaacatcatctgtcttttaaaaaatttaaggttcttaaagatgtgggattgaaaaaagaagatattgcaatgtgggaagtaaatgaagcctttagtctggttgtactagcaaacattaaaatgttggagattgatccccaaaaagtgaatatcaatggaggagctgtttctctgggacatccaattgggatgtctggagccaggattgttggtcatttgactcatgccttgaagcaaggagaatacggtcttgccagtatttgcaatggaggaggaggtgcttctgccatgctaattcagaagctgtagacaacctctgctatttaaggagacaaccctatgtgaccagaaggcctgctgtaatcagtgtgactactgtgggtcagcttatattcagataagctgtttcattttttattattttctatgttaacttttaaaaatcaaaatgatgaaatcccaaaacattttgaaattaaaaataaatttcttcttctgcttttttcttggtaaccttgaaaagtttgatacatttttgcattctgagtctatacttatcgaaatatggtagaaataccaatgtgtaatattagtgacttacataagtagctagaagtttccatttgtgagaacacatttatatttttgaggattgttaaaggtcaagtgaatgctctttataggtaatttacatttagtaaattacggtaaattaaattacttctctttacagtaagagttggctattctggacaaactagcagtgcttcatataatcactcaaaccacagtgtgtgcagcagtactagaaacaagacagaagcccatgtcctcagggtctagagtgggggcaatttcttataacctcaacattcagggttgggggaggtcaagcagaaaaccctggagtttgggctctgaattactatagcagcatagagagtgggaagggaggtagaaactgatatgctgaatggatatataaaaaagggaacagatcaccacttccaatacacgacaatgcctgttcttaagcaggacagactgtaacagaagtatctcgcattgcattttatctgggaaaaaattaattaaaacgctacaggcaggggctatgcacactaccctcaattgcagctctgaagagggaaaactccccctcaggaagaggagggggcagtaaaggtcattgtgtacacattatctgttggcaaataatgtattgtagatcttttgaaggagcaaaatgacaatatatgggagaaatagattagattgctcttcagattcagaggaagagtagagtattttcaaaaacatctgtaatcatcaccaacttttgaggcttgttatgtgctttatatgtataaactcatttaattgtcacaaaaacttctaagagtgggtaccattattatccctcctttataaacaaggaaattgaggcatagagtagctaaataaattccaagggcaaaaagctggctaggattcaactccaagttagtcaagctccagagcccacgtt

SEQ ID NO: 287210 - DNA, 1512 bp, Homo sapiens
aggccgctagggtgcggggttggggaggaggccgctagtctacgcctgtggagccgatactcagccctctgcgaccatggctgtgctggcggcacttctgcgcagcggcgcccgcagccgcagccccctgctccggaggctggtgcaggaaataagatatgtggaacggagttatgtatcaaaacccactttgaaggaagtggtcatagtaagtgctacaagaacacccattggatcttttttaggcagcctttccttgctgccagccactaagcttggttccattgcaattcagggagccattgaaaaggcagggattccaaaagaagaagtgaaagaagcatacatgggtaatgttctacaaggaggtgaaggacaagctcctacaaggcaggcagtattgggtgcaggcttacctatttctactccatgtaccaccataaacaaagtttgtgcttcaggaatgaaagccatcatgatggcctctcaaagtcttatgtgtggacatcaggatgtgatggtggcaggtgggatggagagcatgtccaatgttccatatgtaatgaacagaggatcaacaccatatggtggggtaaagcttgaagatttgattgtaaaagacgggctaactgatgtctacaataaaattcatatgggcagctgtgctgagaatacagcaaagaagctgaatattgcacgaaatgaacaggacgcttatgctattaattcttataccagaagtaaagcagcatgggaagctgggaaatttggaaatgaagttattcctgtcacagttacagtaaaaggtcaaccagatgtagtggtgaaagaagatgaagaatataaacgtgttgattttagcaaagttccaaagctgaagacagttttccagaaagaaaatggcacagtaacagctgccaatgccagtacactgaatgatggagcagctgctctggttctcatgacggcagatgcagcgaagaggctcaatgttacaccactggcaagaatagtagcatttgctgacgctgctgtagaacctattgattttccaattgctcctgtatatgctgcatctatggttcttaaagatgtgggattgaaaaaagaagatattgcaatgtgggaagtaaatgaagcctttagtctggttgtactagcaaacattaaaatgttggagattgatccccaaaaagtgaatatcaatggaggagctgtttctctgggacatccaattgggatgtctggagccaggattctgcagctgctttgccatttctcttcctaaattcattgtggttggcaattcccttttccctttccgcaaattagggtggaatcttaaataacctttccagcaattatttttccaaaattgagatactatttgtaaaaaatgtccttaaaatataaaaaacagacaaaaaagcaacaatacaactaaacaaaaaaaataaatagcaaccacgcacaaaacattcaatacgaagctacaacaaagcatacagaaaa

SEQ ID NO: 287211 - DNA, 1320 bp, Homo sapiens
gaagtcgccggtcaccgttggggaagcaaggagaatacggtcttgccagtatttgcaatggaggaggaggtgcttctgccatgctaattcagaagctgtagacaacctctgctatttaaggagacaaccctatgtgaccagaaggcctgctgtaatcagtgtgactactgtgggtcagcttatattcagataagctgtttcattttttattattttctatgttaacttttaaaaatcaaaatgatgaaatcccaaaacattttgaaattaaaaataaatttcttcttctgcttttttcttggtaaccttgaaaagtttgatacatttttgcattctgagtctatacttatcgaaatatggtagaaataccaatgtgtaatattagtgacttacataagtagctagaagtttccatttgtgagaacacatttatatttttgaggattgttaaaggtcaagtgaatgctctttataggtaatttacatttagtaaattacggtaaattaaattacttctctttacagtaagagttggctattctggacaaactagcagtgcttcatataatcactcaaaccacagtgtgtgcagcagtactagaaacaagacagaagcccatgtcctcagggtctagagtgggggcaatttcttataacctcaacattcagggttgggggaggtcaagcagaaaaccctggagtttgggctctgaattactatagcagcatagagagtgggaagggaggtagaaactgatatgctgaatggatatataaaaaagggaacagatcaccacttccaatacacgacaatgcctgttcttaagcaggacagactgtaacagaagtatctcgcattgcattttatctgggaaaaaattaattaaaacgctacaggcaggggctatgcacactaccctcaattgcagctctgaagagggaaaactccccctcaggaagaggagggggcagtaaaggtcattgtgtacacattatctgttggcaaataatgtattgtagatcttttgaaggagcaaaatgacaatatatgggagaaatagattagattgctcttcagattcagaggaagagtagagtattttcaaaaacatctgtaatcatcaccaacttttgaggcttgttatgtgctttatatgtataaactcatttaattgtcacaaaaacttctaagagtgggtaccattattatccctcctttataaacaaggaaattgaggcatagagtagctaaataaattccaagggcaaaaagctggctaggattcaactccaagttagtcaagctccagagcccacgtt

SEQ ID NO: 287212 - DNA, 1315 bp, Homo sapiens
agtcacgcgacgggttctggtccaaaaaccgcctaagtgctccgataacacccagggactcgcctatttttacagcgcgtttctacttccaaggtctcggcgtaatcatcttaatgagcgttactggtggggggaatcagatcctgtttgtatgcttatggaattatccagaagtaaaaggggtgaatgatgtagaggagaaggaagggataactgtgccatctttgaaaaggcaactggaaatgggatccagagtaaagtggagagaaccagggaagattccattaaactggaccagaagcttgaaagaagagaagtggcttagtaaacaaggaacaaactagctaagtagaaaggggacttttaaaatttaatttttatttcaataggcttttgggaacaggtggtgttggattatatgaataagttctttattggtggtatctgatattttggtgcacccatcacctgagcagtatacactgtaaaccaatgtgtagtcttttattcctcacccccaccccccgcctttcccctgagtccccaaagtccactgtatcattcttatgcctttgtgtcctcatagcgcagctcccacttatgagtgagaacataagctgtttggtgtttccattcctgagttacttcacttagaataatagtctccaattccatccaggttgcagaaataagatatgtggaacggagttatgtatcaaaacccactttgaaggaagtggtcatagtaagtgctacaagaacacccattggatcttttttaggcagcctttccttgctgccagccactaagcttggttccattgcaattcagggagccattgaaaaggcagggattccaaaagaagaagtgaaagaagcatacatgggtaatgttctacaaggaggtgaaggacaagctcctacaaggcaggcagtattgggtgcaggcttacctatttctactccatgtaccaccataaacaaagtttgtgcttcaggaatgaaagccatcatgatggcctctcaaagtcttatgtgtggacatcaggatgtgatggtggcaggtgggatggagagcatgtccaatgttccatatgtaatgaacagaggatcaacaccatatggtggggtaaagcttgaagatttgattgtaaaagacgggctaactgatgtctacaataaaattcatatggtaaatgtgatttttagtggataaatgctatctaatgtccaatactgtttgatttttcttactctatgtactttacaaactgaactgaaagatgggctctataaatgttgattttagccgtgt

SEQ ID NO: 287213 - DNA, 363 bp, Homo sapiens
aggcatttgggtctttctctgaggctgggtgactaaaaattcataaatactgtatttgccagaataagacaggttttcattataaaggagaacacggtgcttaaccctgggaatcaaatcattgcttgagcccaggcttgatgactaatttgtagtcattaagttaagttctacaggctttctaattagccttgctgatctatatcttgtctttacttgagatcaagcaagagacaggctccttagcaaaaatatgctgtcatgtcaggaggtgagacctggacacacagaagaatcaagattctctcagatctgagcccttcatttttcagatgaagatttttttcagtgtgtctgagacag

SEQ ID NO: 287214 - DNA, 283 bp, Homo sapiens
ccaggcaataggtatttgttgaattgaaccaaatacatttattgtgaaggaatgttttgacttcaacctcatttttgctttcaggcacagtaacagctgccaatgccagtacactgaatgatggagcagctgctctggttctcatgacggcagatgcagcgaagaggctcaatgttacaccactggcaagaatagtaggtaaggccaggcgaggtggctcacacctgtaatcccagcactttcggaggttgaggtgggaggattgcttgagccccggagttcg

SEQ ID NO: 287215 - DNA, 170 bp, Homo sapiens
accagaagtaaagcagcatgggaagctgggaaatttggaaatgaagttattcctgtcacagttacagtaaaaggtagagataatgttccaaaaaggatgaatagacttttcatgttgctgaatgttttatgcttaagttttaaattaggacattatcttggttcatttca

SEQ ID NO: 287216 - DNA, 1957 bp, Homo sapiens
aggccgctagggtgcggggttggggaggaggccgctagtctacgcctgtggagccgatactcagccctctgcgaccatggctgtgctggcggcacttctgcgcagcggcgcccgcagccgcagccccctgctccggaggctggtgcaggaaataagatatgtggaacggagttatgtatcaaaacccactttgaaggaagtggtcatagtaagtgctacaagaacacccattggatcttttttaggcagcctttccttgctgccagccactaagcttggttccattgcaattcagggagccattgaaaaggcagggattccaaaagaagaagtgaaagaagcatacatgggtaatgttctacaaggaggtgaaggacaagctcctacaaggcaggcagtattgggtgcaggcttacctatttctactccatgtaccaccataaacaaagtttgtgcttcaggaatgaaagccatcatgatggcctctcaaagtcttatgtgtggacatcaggatgtgatggtggcaggtgggatggagagcatgtccaatgttccatatgtaatgaacagaggatcaacaccatatggtggggtaaagcttgaagatttgattgtaaaagacgggctaactgatgtctacaataaaattcatatgggcagctgtgctgagaatacagcaaagaagctgaatattgcacgaaatgaacaggacgcttatgctattaattcttataccagaagtaaagcagcatgggaagctgggaaatttggaaatgaagttattcctgtcacagttacagtaaaaggtcaaccagatgtagtggtgaaagaagatgaagaatataaacgtgttgattttagcaaagttccaaagctgaagacagttttccagaaagaaaatggcacagtaacagctgccaatgccagtacactgaatgatggagcagctgctctggttctcatgacggcagatgcagcgaagaggctcaatgttacaccactggcaagaatagtagcatttgctgacgctgctgtagaacctattgattttccaattgctcctgtatatgctgcatctatggttcttaaagatgtgggattgaaaaaagaagatattgcaatgtgggaagtaaatgaagcctttagtctggttgtactagcaaacattaaaatgttggagattgatccccaaaaagtgaatatcaatggaggagctgtttctctgggacatccaattgggatgtctggagccaggattgttggtcatttgactcatgccttgaagcaaggagaatacggtcttgccagtatttgcaatggaggaggaggtgcttctgccatgctaattcagaagctgtagacaacctctgctatttaaggagacaaccctatgtgaccagaaggcctgctgtaatcagtgtgactactgtgggtcagcttatattcagataagctgtttcattttttattattttctatgttaacttttaaaaatcaaaatgatgaaatcccaaaacattttgaaattaaaaataaatttcttcttctgcttttttcttggtaaccttgaaaaaaaacaacacacaagccaacagaagaaagacaagtcacactgctggggggcgcactcggggcccctgggaaagagcttctctgtacagacccaccacgcgtgaggcgcgccagagaggccccaaaaagagcgacaggcgacacacgcgtgggacaaaacgacggataccacaagaggaacaccgcgagggggccagggaacgagcagcgacgacggacatgccgtaaccgacagattaaagaaaacagccccgcgggggacaacacagaagcggttaaatggagaccacgcatcccataatgagaaatatcagagcgcaagaacgcggcggccatatcacaaacgagactcacaagcgaagccggccgacccaaccatttgccc

SEQ ID NO: 287217 - DNA, 1672 bp, Homo sapiens
aggccgctagggtgcggggttggggaggaggccgctagtctacgcctgtggagccgatactcagccctctgcgaccatggctgtgctggcggcacttctgcgcagcggcgcccgcagccgcagccccctgctccggaggctggtgcaggaaataagatatgtggaacggagttatgtatcaaaacccactttgaaggaagtggtcatagtaagtgctacaagaacacccattggatcttttttaggcagcctttccttgctgccagccactaagcttggttccattgcaattcagggagccattgaaaaggcagggattccaaaagaagaagtgaaagaagcatacatgggtaatgttctacaaggaggtgaaggacaagctcctacaaggcaggcagtattgggtgcaggcttacctatttctactccatgtaccaccataaacaaagtttgtgcttcaggaatgaaagccatcatgatggcctctcaaagtcttatgtgtggacatcaggatgtgatggtggcaggtgggatggagagcatgtccaatgttccatatgtaatgaacagaggatcaacaccatatggtggggtaaagcttgaagatttgattgtaaaagacgggctaactgatgtctacaataaaattcatatgggcagctgtgctgagaatacagcaaagaagctgaatattgcacgaaatgaacaggacgcttatgctattaattcttataccagaagtaaagcagcatgggaagctgggaaatttggaaatgaagttattcctgtcacagttacagtaaaaggtcaaccagatgtagtggtgaaagaagatgaagaatataaacgtgttgattttagcaaagttccaaagctgaagacagttttccagaaagaaaatggcacagtaacagctgccaatgccagtacactgaatgatggagcagctgctctggttctcatgacggcagatgcagcgaagaggctcaatgttacaccactggcaagaatagtagcatttgctgacgctgctgtagaacctattgattttccaattgctcctgtatatgctgcatctatggttcttaaagatgtgggattgaaaaaagaagatattgcaatgtgggaagtaaatgaagcctttagtctggttgtactagcaaacattaaaatgttggagattgatccccaaaaagtgaatatcaatggaggagctgtttctctgggacatccaattgggatgtctggagccaggattgttggtcatttgactcatgccttgaagcaaggagaatacggtcttgccagtatttgcaatggaggaggaggtgcttctgccatgctaattcagaagctgtagacaacctctgctatttaaggagacaaccctatgtgaccagaaggcctgctgtaatcagtgtgactactgtgggtcagcttatattcagataagctgtttcattttttattattttctatgttaacttttaaaaatcaaaatgatgaaatcccaaaacatgctaataaattaaaaaacaaacatctgcccaaacaaattttcctcgggggggggcccggtaaccattcccccctagttcgcctcttattaaaattcacgggccgctcctttaacaacgtcgtgaacggggaaaaacccgggggtttacccaag

SEQ ID NO: 287218 - DNA, 1554 bp, Homo sapiens
aggccgctagggtgcggggttggggaggaggccgctagtctacgcctgtggagccgatactcagccctctgcgaccatggctgtgctggcggcacttctgcgcagcggcgcccgcagccgcagccccctgctccggaggctggtgcaggaaataagatatgtggaacggagttatgtatcaaaacccactttgaaggaagtggtcatagtaagtgctacaagaacacccattggatcttttttaggcagcctttccttgctgccagccactaagcttggttccattgcaattcagggagccattgaaaaggcagggattccaaaagaagaagtgaaagaagcatacatgggtaatgttctacaaggaggtgaaggacaagctcctacaaggcaggcagtattgggtgcaggcttacctatttctactccatgtaccaccataaacaaagtttgtgcttcaggaatgaaagccatcatgatggcctctcaaagtcttatgtgtggacatcaggatgtgatggtggcaggtgggatggagagcatgtccaatgttccatatgtaatgaacagaggatcaacaccatatggtggggtaaagcttgaagatttgattgtaaaagacgggctaactgatgtctacaataaaattcatatgggcagctgtgctgagaatacagcaaagaagctgaatattgcacgaaatgaacaggacgcttatgctattaattcttataccagaagtaaagcagcatgggaagctgggaaatttggaaatgaagttattcctgtcacagttacagtaaaaggtcaaccagatgtagtggtgaaagaagatgaagaatataaacgtgttgattttagcaaagttccaaagctgaagacagttttccagaaagaaaatggcacagtaacagctgccaatgccagtacactgaatgatggagcagctgctctggttctcatgacggcagatgcagcgaagaggctcaatgttacaccactggcaagaatagtagcatttgctgacgctgctgtagaacctattgattttccaattgctcctgtatatgctgcatctatggttcttaaagatgtgggattgaaaaaagaagatattgcaatgtgggaagtaaatgaagcctttagtctggttgtactagcaaacattaaaatgttggagattgatccccaaaaagtgaatatcaatggaggagctgtttctctgggacatccaattgggatgtctggagccaggattgttggtcatttgactcatgccttgaagcaaggagaatacggtcttgccagtatttgcaatggaggaggaggtgcttctgccatgctaattcagaagctgtagacaacctctgctatttaaggagacaaccctatgtgaccagaaggcctgctgtaatcagtgtgactactgtgggtcagcttatattcagataagctgtttcattttttattattttctatgttaacttttaaaaatcaaaatgatgaaatcccaaaacattttttaaaagttaacatagaacaaaaaaaaaaaag

SEQ ID NO: 287219 - DNA, 1956 bp, Homo sapiens
gatccccggaccccatacacagttgtagacgagcatttatccagtgccatcatgcatgtttgtgatgtttgagaaaactgttttatgtacacaaaaaggcattcttacattgtcttgcagttagctgtgtacatgtttcctgagggcaggaattgtctccacccatatttgtaatttctttaaacatttagcagcccaggcaataggtatttgttgaattgaaccaaatacatttattgtgaaggaatgttttgacttcaacctcatttttgctttcaggcacagtaacagctgccaatgccagtacactgaatgatggagcagctgctctggttctcatgacggcagatgcagcgaagaggctcaatgttacaccactggcaagaatagtagcatttgctgacgctgctgtagaacctattgattttccaattgctcctgtatatgctgcatctatggttcttaaagatgtgggattgaaaaaagaagatattgcaatgtgggaagtaaatgaagcctttagtctggttgtactagcaaacattaaaatgttggagattgatccccaaaaagtgaatatcaatggaggagctgtttctctgggacatccaattgggatgtctggagccaggattgttggtcatttgactcatgccttgaagcaaggagaatacggtcttgccagtatttgcaatggaggaggaggtgcttctgccatgctaattcagaagctgtagacaacctctgctatttaaggagacaaccctatgtgaccagaaggcctgctgtaatcagtgtgactactgtgggtcagcttatattcagataagctgtttcattttttattattttctatgttaacttttaaaaatcaaaatgatgaaatcccaaaacattttgaaattaaaaataaatttcttcttctgcttttttcttggtaaccttgaaaagtttgatacatttttgcattctgagtctatacttatcgaaatatggtagaaataccaatgtgtaatattagtgacttacataagtagctagaagtttccatttgtgagaacacatttatatttttgaggattgttaaaggtcaagtgaatgctctttataggtaatttacatttagtaaattacggtaaattaaattacttctctttacagtaagagttggctattctggacaaactagcagtgcttcatataatcactcaaaccacagtgtgtgcagcagtactagaaacaagacagaagcccatgtcctcagggtctagagtgggggcaatttcttataacctcaacattcagggttgggggaggtcaagcagaaaaccctggagtttgggctctgaattactatagcagcatagagagtgggaagggaggtagaaactgatatgctgaatggatatataaaaaagggaacagatcaccacttccaatacacgacaatgcctgttcttaagcaggacagactgtaacagaagtatctcgcattgcattttatctgggaaaaaattaattaaaacgctacaggcaggggctatgcacactaccctcaattgcagctctgaagagggaaaactccccctcaggaagaggagggggcagtaaaggtcattgtgtacacattatctgttggcaaataatgtattgtagatcttttgaaggagcaaaatgacaatatatgggagaaatagattagattgctcttcagattcagaggaagagtagagtattttcaaaaacatctgtaatcatcaccaacttttgaggcttgttatgtgctttatatgtataaactcatttaattgtcacaaaaacttctaagagtgggtaccattattatccctcctttataaacaaggaaattgaggcatagagtagctaaataaattccaagggcaaaaagctggctaggattcaactccaagttagtcaagctccagagcccacgtt

SEQ ID NO: 287220 - DNA, 1252 bp, Homo sapiens
aggccgctagggtgcggggttggggaggaggccgctagtctacgcctgtggagccgatactcagccctctgcgaccatggctgtgctggcggcacttctgcgcagcggcgcccgcagccgcagccccctgctccggaggctggtgcaggaaataagatatgtggaacggagttatgtatcaaaacccactttgaaggaagtggtcatagtaagtgctacaagaacacccattggatcttttttaggcagcctttccttgctgccagccactaagcttggttccattgcaattcagggagccattgaaaaggcagggattccaaaagaagaagtgaaagaagcatacatgggtaatgttctacaaggaggtgaaggacaagctcctacaaggcaggcagtattgggtgcaggcttacctatttctactccatgtaccaccataaacaaagtttgtgcttcaggaatgaaagccatcatgatggcctctcaaagtcttatgtgtggacatcaggatgtgatggtggcaggtgggatggagagcatgtccaatgttccatatgtaatgaacagaggatcaacaccatatggtggggtaaagcttgaagatttgattgtaaaagacgggctaactgatgtctacaataaaattcatatgggcagctgtgctgagaatacagcaaagaagctgaatattgcacgaaatgaacaggacgcttatgctattaattcttataccagaagtaaagcagcatgggaagctgggaaatttggaaatgaagttattcctgtcacagttacagtaaaaggtcaaccagatgtagtggtgaaagaagatgaagaatataaacgtgttgattttagcaaagttccaaagctgaagacagttttccagaaagaaaatggcacagtaacagctgccaatgccagtacactgaatgatggagcagctgctctggttctcatgacggcagatgcagcgaagaggctcaatgttacaccactggcaagaatagtagcatttgctgacgctgctgtagaacctattgattttccaattgctcctgtatatgctgcatctatggtgagaacaaagtgaggggcgatactccattatgctagcttctggtttgcttataccaaggttgcagtttttaagattttaaatgttatctgccaaagcagagagatagcttggtttcaaatcttcccatgtcttctcctgaaaagagtaagagcaacaaggataacaaac

SEQ ID NO: 287221 - DNA, 473 bp, Homo sapiens
ctgttgaagatggagttgctctggttcaaagagctctgacaataacaattagaaccccatgtgaagtagatttttctggatgaaattgtttagagaagttccattgtaaacaaagccacatagcatcacactttttacccaaggttttactatactgcagacttttgtgtacgttttgagaacatccaagacataaacctgaccagagaagaagggagattgtatccaagaataatagggatttagatttgctggtcagaatggagccagacattcagtttgagtacggttgatggtacgtttttgagatgacttccagctgcagcggcgactttcagtttcatttccacggacccatttataaccgcgacttcaagatcagagacagggttacccaagctctgttaaccaagctggagtgcagtggcgtaatcacagctcactgcagccttgacctcctgggctcaagtgat

SEQ ID NO: 287222 - DNA, 287 bp, Homo sapiens
actgccgtttgtggcgacctagaggatcccctgctgcaactgggacgcaaagaagggggagtatgtatttcccgccaagaagaagctgcaggaataccgggtcttaattaccaccctcatcactgccggcaggttcgtcctcaagaacacccagtgcatcccagaaggcttggagagctactacgcggagcaagactccagtgcccgggagaaattttacacagtcataagccactacaacctggccaagcagagcatcacgcgctccgtatcgtcccggatatgct

SEQ ID NO: 287223 - DNA, 3803 bp, Homo sapiens
  misc_feature (3803)..(3803): n is a, c, g, or t
ctgccttttgctctgttgcttttcactgagtcccgaggctctggagggtgggcgtgagggtagccctggctgaggctcggaggtcctcccgggctgttcagagggccccaagcggtagccacgttctgatactggctagaagccagggagggagcttggggtaaggggagggccctgagggaggggtcagacgctttaggaaagagttaatgcgaagagggggaggggataggacgaagaaaccgaagggaaagctcagacttccagctgcagcggcgactttcagtttcatttccacggaccctcctgcctgggccgcagccgccgccgcgatgcccagtaagttcagctgccggcagctccgggaggcgggccagtgtttcgagagtttcctggtcgttcggggactggacatggagacagatcgcgagcggctgcggaccatttataaccgcgacttcaagatcagctttgggacccccgcccctggcttctcctccatgctgtatggaatgaagattgcaaatctggcctacgtcaccaagactcgggtcaggttcttcagactcgaccgctgggccgacgtgcggttcccagaaaagaggagaatgaagctggggtcagatatcagcaaacaccacaagtcactgctagccaagatcttttatgacagggctgagtatcttcatgggaaacatggtgtggatgtggaagtccaggggccccatgaagcccgagatgggcagctccttatccgcctggatttgaaccgcaaagaggtgctgaccctgaggcttcggaatggcggaacccagtctgttaccctcactcacctcttcccactctgccggacaccccagtttgctttctacaatgaagaccaggagttgccctgtccactgggccccggtgaatgctatgaactccatgtccattgtaagaccagctttgtgggctacttcccagccacagtgctctgggagctgctgggacctggggagtcgggttcagaaggagccggcacattctacattgcccgcttcttggctgccgtcgcccacagccccctggctgcacagctgaagcccatgactcccttcaagcggacccggatcaccggaaaccctgtggtgaccaatcggatagaggaaggagagagacctgaccgcgctaagggctatgacctggagttaagtatggcgctggggacatactacccacctccccgcctcaggcagctgctccccatgcttcttcagggaacaagtatcttcactgcccctaaggagatcgcagagatcaaggcccagctggagacagccctgaagtggaggaactatgaggtgaagctgcggctgctgctgcacctggaggaactgcagatggagcatgatatccggcactatgacctggagtcggtgcccatgacctgggaccctgtggaccagaaccccaggctgctcacgctggaggttcctggagtgactgagagccgcccctcagtgctacggggcgaccacctgtttgcccttttgtcctcggagacacaccaggaggaccccatcacatataagggctttgtgcacaaggtggaattggaccgtgtcaagctgagcttttccatgagcctcctgagccgctttgtggatgggctgaccttcaaggtgaactttaccttcaaccgccagccgctgcgagtccagcaccgtgccctggagctgacagggcgctggctgctgtggcccatgctctttcctgtggcacctcgggacgtcccgctgctgccctcagatgtgaaactcaagctgtacgaccggagtctggagtcaaacccagagcagctgcaggccatgaggcacattgttacgggcaccacccgtccagccccctacatcatctttgggcctccaggcaccggcaagactgtcacgttagtggaggcaattaagcaggtggtgaagcacttgcccaaagcccacatcttggcctgcgctccatccaactcaggggctgacctactctgtcaaaggctccgggtccaccttcctagctccatctaccgcctcctggcccccagcagggacatccgcatggtacctgaggacatcaagccctgctgcaactgggacgcaaagaagggggagtatgtatttcccgccaagaagaagctgcaggaataccgggtcttaattaccaccctcatcactgccggcaggttggtctcggcccagtttcccattgatcacttcacacacatcttcatcgatgaggctggccactgcatggagcctgagagtctggtagctatagcagggctgatggaagtaaaggaaacaggtgatccaggagggcagctggtgctggcaggagaccctcggcagctggggcctgtgctgcgttccccactgacccagaagcatggactgggatactcactgctggagcggctgctcacctacaactccctgtacaagaagggccctgatggctatgacccccagttcataaccaagctgctccgcaactacaggtctcatcccaccatcctggacattcctaaccagctctattatgaaggggagctgcaggcctgtgctgatgtcgtggatcgagaacgcttctgccgctgggcgggcctacctcgacagggctttcccatcatctttcacggcgtaatgggcaaagatgagcgtgaaggcaacagcccatccttcttcaaccctgaagaggctgccacagtgacttcctacctgaagctgctcctggccccctcctccaagaagggcaaagctcgcctgagccctcgaagtgtgggcgtcatctccccgtaccggaaacaggtggagaaaatccgttactgcatcaccaaacttgacagggagcttcgaggactggatgacatcaaggacttgaaggtgggttcagtagaagaattccaaggccaagaacgaagcgtcatcctcatctccaccgtgcgaagcagccagagctttgtgcagctggatctggactttaatctgggtttccttaagaaccccaagaggttcaatgtagctgtgacccgggccaaggccctgctcatcatcgtggggaacccccttctcctgggccatgaccctgactggaaagtattcctggagttctgtaaagaaaacggagggtataccgggtgtcccttccctgccaaactggacctgcaacagggacagaatttactgcaaggtctgagcaagctcagcccctctacctcagggccccacagccatgactacctcccccaggagcgggagggtgaagggggcctgtctctgcaagtggagccagagtggaggaatgagctctgaagacacagcacccagccttctcgcaccagccaagccttaactgcctgcctgaccctgaaccagaacccagctgaactgcccctccaagggacaggaaggctgggggagggagtttacaacccaagccattccaccccctcccctgctggggagaatgacacatcaagctgctaacaattgggggaaggggaaggaagaaaactctgaaaacaaaatcttgttctatgcaaaaaaaaaaaacacacccgagagcgactccaagtagacggggaatgcgacacaacaccagcggttatctgcacagtgcggcccaaggggccacaataacgcatggtccccagaggacccaaagacgtccgtgtgctccaccagggggaaagactacctgccgggaactccctaataggaagaagacgataaacaatttcgaatagagccagggttaacccggagtatgan

SEQ ID NO: 287224 - DNA, 3913 bp, Homo sapiens
  misc_feature (3913)..(3913): n is a, c, g, or t
ctgccttttgctctgttgcttttcactgagtcccgaggctctggagggtgggcgtgagggtagccctggctgaggctcggaggtcctcccgggctgttcagagggccccaagcggtagccacgttctgatactggctagaagccagggagggagcttggggtaaggggagggccctgagggaggggtcagacgctttaggaaagagttaatgcgaagagggggaggggataggacgaagaaaccgaagggaaagctcaggtaagaaaagaacggaggagggaagcctggtggggagaagggagcccgcaggatcaggggtcagagttagggggcttccctcctgctgcaccctcatctcagggccgccaacttccagctgcagcggcgactttcagtttcatttccacggaccctcctgcctgggccgcagccgccgccgcgatgcccagtaagttcagctgccggcagctccgggaggcgggccagtgtttcgagagtttcctggtcgttcggggactggacatggagacagatcgcgagcggctgcggaccatttataaccgcgacttcaagatcagctttgggacccccgcccctggcttctcctccatgctgtatggaatgaagattgcaaatctggcctacgtcaccaagactcgggtcaggttcttcagactcgaccgctgggccgacgtgcggttcccagaaaagaggagaatgaagctggggtcagatatcagcaaacaccacaagtcactgctagccaagatcttttatgacagggctgagtatcttcatgggaaacatggtgtggatgtggaagtccaggggccccatgaagcccgagatgggcagctccttatccgcctggatttgaaccgcaaagaggtgctgaccctgaggcttcggaatggcggaacccagtctgttaccctcactcacctcttcccactctgccggacaccccagtttgctttctacaatgaagaccaggagttgccctgtccactgggccccggtgaatgctatgaactccatgtccattgtaagaccagctttgtgggctacttcccagccacagtgctctgggagctgctgggacctggggagtcgggttcagaaggagccggcacattctacattgcccgcttcttggctgccgtcgcccacagccccctggctgcacagctgaagcccatgactcccttcaagcggacccggatcaccggaaaccctgtggtgaccaatcggatagaggaaggagagagacctgaccgcgctaagggctatgacctggagttaagtatggcgctggggacatactacccacctccccgcctcaggcagctgctccccatgcttcttcagggaacaagtatcttcactgcccctaaggagatcgcagagatcaaggcccagctggagacagccctgaagtggaggaactatgaggtgaagctgcggctgctgctgcacctggaggaactgcagatggagcatgatatccggcactatgacctggagtcggtgcccatgacctgggaccctgtggaccagaaccccaggctgctcacgctggaggttcctggagtgactgagagccgcccctcagtgctacggggcgaccacctgtttgcccttttgtcctcggagacacaccaggaggaccccatcacatataagggctttgtgcacaaggtggaattggaccgtgtcaagctgagcttttccatgagcctcctgagccgctttgtggatgggctgaccttcaaggtgaactttaccttcaaccgccagccgctgcgagtccagcaccgtgccctggagctgacagggcgctggctgctgtggcccatgctctttcctgtggcacctcgggacgtcccgctgctgccctcagatgtgaaactcaagctgtacgaccggagtctggagtcaaacccagagcagctgcaggccatgaggcacattgttacgggcaccacccgtccagccccctacatcatctttgggcctccaggcaccggcaagactgtcacgttagtggaggcaattaagcaggtggtgaagcacttgcccaaagcccacatcttggcctgcgctccatccaactcaggggctgacctactctgtcaaaggctccgggtccaccttcctagctccatctaccgcctcctggcccccagcagggacatccgcatggtacctgaggacatcaagccctgctgcaactgggacgcaaagaagggggagtatgtatttcccgccaagaagaagctgcaggaataccgggtcttaattaccaccctcatcactgccggcaggttggtctcggcccagtttcccattgatcacttcacacacatcttcatcgatgaggctggccactgcatggagcctgagagtctggtagctatagcagggctgatggaagtaaaggaaacaggtgatccaggagggcagctggtgctggcaggagaccctcggcagctggggcctgtgctgcgttccccactgacccagaagcatggactgggatactcactgctggagcggctgctcacctacaactccctgtacaagaagggccctgatggctatgacccccagttcataaccaagctgctccgcaactacaggtctcatcccaccatcctggacattcctaaccagctctattatgaaggggagctgcaggcctgtgctgatgtcgtggatcgagaacgcttctgccgctgggcgggcctacctcgacagggctttcccatcatctttcacggcgtaatgggcaaagatgagcgtgaaggcaacagcccatccttcttcaaccctgaagaggctgccacagtgacttcctacctgaagctgctcctggccccctcctccaagaagggcaaagctcgcctgagccctcgaagtgtgggcgtcatctccccgtaccggaaacaggtggagaaaatccgttactgcatcaccaaacttgacagggagcttcgaggactggatgacatcaaggacttgaaggtgggttcagtagaagaattccaaggccaagaacgaagcgtcatcctcatctccaccgtgcgaagcagccagagctttgtgcagctggatctggactttaatctgggtttccttaagaaccccaagaggttcaatgtagctgtgacccgggccaaggccctgctcatcatcgtggggaacccccttctcctgggccatgaccctgactggaaagtattcctggagttctgtaaagaaaacggagggtataccgggtgtcccttccctgccaaactggacctgcaacagggacagaatttactgcaaggtctgagcaagctcagcccctctacctcagggccccacagccatgactacctcccccaggagcgggagggtgaagggggcctgtctctgcaagtggagccagagtggaggaatgagctctgaagacacagcacccagccttctcgcaccagccaagccttaactgcctgcctgaccctgaaccagaacccagctgaactgcccctccaagggacaggaaggctgggggagggagtttacaacccaagccattccaccccctcccctgctggggagaatgacacatcaagctgctaacaattgggggaaggggaaggaagaaaactctgaaaacaaaatcttgttctatgcaaaaaaaaaaaacacacccgagagcgactccaagtagacggggaatgcgacacaacaccagcggttatctgcacagtgcggcccaaggggccacaataacgcatggtccccagaggacccaaagacgtccgtgtgctccaccagggggaaagactacctgccgggaactccctaataggaagaagacgataaacaatttcgaatagagccagggttaacccggagtatgan

SEQ ID NO: 287225 - DNA, 4551 bp, Homo sapiens
  misc_feature (4551)..(4551): n is a, c, g, or t
ctgccttttgctctgttgcttttcactgagtcccgaggctctggagggtgggcgtgagggtagccctggctgaggctcggaggtcctcccgggctgttcagagggccccaagcggtagccacgttctgatactggctagaagccagggagggagcttggggtaaggggagggccctgagggaggggtcagacgctttaggaaagagttaatgcgaagagggggaggggataggacgaagaaaccgaagggaaagctcagacttccagctgcagcggcgactttcagtttcatttccacggaccctcctgcctgggccgcagccgccgccgcgatgcccagtaagttcagctgccggcagctccgggaggcgggccagtgtttcgagagtttcctggtcgttcggggactggacatggagacagatcgcgagcggctgcggaccatttataaccgcgacttcaagatcagtcttgcctccagcaaatccatcctccaatcctgatgccagagtgatctgaaatgcaaatatgatcttgccactcccctgcttaaaacccaccaaccgcagtggttctgtaaccacagtgtagcctctgacgtgggctgaaagcacaaagccaggctatttgatctctggagaaggatcctttcccttcctgcttgggttccacctgcaccctatgacttcgggtggaaactgctgtctgatcagccaccttgcccacacacttggacatctgtactgtctctgatcccttctctcctcaccaacaggctggaccccacatccacccctctgaatcaaatcattccgcttccccttagcctcagctctttcttctgggttgtttgtattttcttttctgtcccaaacagtttcccccacaaaaagaactttatgtctttctctgtcttccctcagtccttccagtcagcagcctgtgattgggcttttcccctcagaaacgaacaatccagaacccactgtttaaaacaactgtattttgccttgggaagtcccattgccttccctgaaaacattaaacattcctccgatccccagcctgagtctctctgtctctgggccccatcctgctccacagcagggctggtgtgtccagcacagagtgaccctccgatgccctttcccacccgccgccctgcctccctcgagccctgccttccctcacttcccagtctcctctgcttctggcagctttgggacccccgcccctggcttctcctccatgctgtatggaatgaagattgcaaatctggcctacgtcaccaagactcgggtcaggttcttcagactcgaccgctgggccgacgtgcggttcccagaaaagaggagaatgaagctggggtcagatatcagcaaacaccacaagtcactgctagccaagatcttttatgacagggctgagtatcttcatgggaaacatggtgtggatgtggaagtccaggggccccatgaagcccgagatgggcagctccttatccgcctggatttgaaccgcaaagaggtgctgaccctgaggcttcggaatggcggaacccagtctgttaccctcactcacctcttcccactctgccggacaccccagtttgctttctacaatgaagaccaggagttgccctgtccactgggccccggtgaatgctatgaactccatgtccattgtaagaccagctttgtgggctacttcccagccacagtgctctgggagctgctgggacctggggagtcgggttcagaaggagccggcacattctacattgcccgcttcttggctgccgtcgcccacagccccctggctgcacagctgaagcccatgactcccttcaagcggacccggatcaccggaaaccctgtggtgaccaatcggatagaggaaggagagagacctgaccgcgctaagggctatgacctggagttaagtatggcgctggggacatactacccacctccccgcctcaggcagctgctccccatgcttcttcagggaacaagtatcttcactgcccctaaggagatcgcagagatcaaggcccagctggagacagccctgaagtggaggaactatgaggtgaagctgcggctgctgctgcacctggaggaactgcagatggagcatgatatccggcactatgacctggagtcggtgcccatgacctgggaccctgtggaccagaaccccaggctgctcacgctggaggttcctggagtgactgagagccgcccctcagtgctacggggcgaccacctgtttgcccttttgtcctcggagacacaccaggaggaccccatcacatataagggctttgtgcacaaggtggaattggaccgtgtcaagctgagcttttccatgagcctcctgagccgctttgtggatgggctgaccttcaaggtgaactttaccttcaaccgccagccgctgcgagtccagcaccgtgccctggagctgacagggcgctggctgctgtggcccatgctctttcctgtggcacctcgggacgtcccgctgctgccctcagatgtgaaactcaagctgtacgaccggagtctggagtcaaacccagagcagctgcaggccatgaggcacattgttacgggcaccacccgtccagccccctacatcatctttgggcctccaggcaccggcaagactgtcacgttagtggaggcaattaagcaggtggtgaagcacttgcccaaagcccacatcttggcctgcgctccatccaactcaggggctgacctactctgtcaaaggctccgggtccaccttcctagctccatctaccgcctcctggcccccagcagggacatccgcatggtacctgaggacatcaagccctgctgcaactgggacgcaaagaagggggagtatgtatttcccgccaagaagaagctgcaggaataccgggtcttaattaccaccctcatcactgccggcaggttggtctcggcccagtttcccattgatcacttcacacacatcttcatcgatgaggctggccactgcatggagcctgagagtctggtagctatagcagggctgatggaagtaaaggaaacaggtgatccaggagggcagctggtgctggcaggagaccctcggcagctggggcctgtgctgcgttccccactgacccagaagcatggactgggatactcactgctggagcggctgctcacctacaactccctgtacaagaagggccctgatggctatgacccccagttcataaccaagctgctccgcaactacaggtctcatcccaccatcctggacattcctaaccagctctattatgaaggggagctgcaggcctgtgctgatgtcgtggatcgagaacgcttctgccgctgggcgggcctacctcgacagggctttcccatcatctttcacggcgtaatgggcaaagatgagcgtgaaggcaacagcccatccttcttcaaccctgaagaggctgccacagtgacttcctacctgaagctgctcctggccccctcctccaagaagggcaaagctcgcctgagccctcgaagtgtgggcgtcatctccccgtaccggaaacaggtggagaaaatccgttactgcatcaccaaacttgacagggagcttcgaggactggatgacatcaaggacttgaaggtgggttcagtagaagaattccaaggccaagaacgaagcgtcatcctcatctccaccgtgcgaagcagccagagctttgtgcagctggatctggactttaatctgggtttccttaagaaccccaagaggttcaatgtagctgtgacccgggccaaggccctgctcatcatcgtggggaacccccttctcctgggccatgaccctgactggaaagtattcctggagttctgtaaagaaaacggagggtataccgggtgtcccttccctgccaaactggacctgcaacagggacagaatttactgcaaggtctgagcaagctcagcccctctacctcagggccccacagccatgactacctcccccaggagcgggagggtgaagggggcctgtctctgcaagtggagccagagtggaggaatgagctctgaagacacagcacccagccttctcgcaccagccaagccttaactgcctgcctgaccctgaaccagaacccagctgaactgcccctccaagggacaggaaggctgggggagggagtttacaacccaagccattccaccccctcccctgctggggagaatgacacatcaagctgctaacaattgggggaaggggaaggaagaaaactctgaaaacaaaatcttgttctatgcaaaaaaaaaaaacacacccgagagcgactccaagtagacggggaatgcgacacaacaccagcggttatctgcacagtgcggcccaaggggccacaataacgcatggtccccagaggacccaaagacgtccgtgtgctccaccagggggaaagactacctgccgggaactccctaataggaagaagacgataaacaatttcgaatagagccagggttaacccggagtatgan

SEQ ID NO: 287226 - DNA, 4039 bp, Homo sapiens
  misc_feature (4039)..(4039): n is a, c, g, or t
ctgccttttgctctgttgcttttcactgagtcccgaggctctggagggtgggcgtgagggtagccctggctgaggctcggaggtcctcccgggctgttcagagggccccaagcggtagccacgttctgatactggctagaagccagggagggagcttggggtaaggggagggccctgagggaggggtcagacgctttaggaaagagttaatgcgaagagggggaggggataggacgaagaaaccgaagggaaagctcagacttccagctgcagcggcgactttcagtttcatttccacggaccctcctgcctgggccgcagccgccgccgcgatgcccagtaagttcagctgccggcagctccgggaggcgggccagtgtttcgagagtttcctggtcgttcggggactggacatggagacagatcgcgagcggctgcggaccatttataaccgcgacttcaagatcagctttgggacccccgcccctggcttctcctccatgctgtatggaatgaagattgcaaatctggcctacgtcaccaagactcgggtcaggttcttcagactcgaccgctgggccgacgtgcggttcccagaaaagaggagaatgaagctggggtcagatatcagcaaacaccacaagtcactgctagccaagatcttttatgacagggctgagtatcttcatgggaaacatggtgtggatgtggaagtccaggggccccatgaagcccgagatgggcagctccttatccgcctggatttgaaccgcaaagaggtgctgaccctgaggcttcggaatggcggaacccagtctgttaccctcactcacctcttcccactctgccggacaccccagtttgctttctacaatgaagaccaggagttgccctgtccactgggccccggtgaatgctatgaactccatgtccattgtaagaccagctttgtgggctacttcccagccacagtgctctgggagctgctgggacctggggagtcgggttcagaaggagccggcacattctacattgcccgcttcttggctgccgtcgcccacagccccctggctgcacagctgaagcccatgactcccttcaagcggacccggatcaccggaaaccctgtggtgaccaatcggatagaggaaggagagagacctgaccgcgctaagggctatgacctggagttaagtatggcgctggggacatactacccacctccccgcctcaggcagctgctccccatgcttcttcagggaacaagtatcttcactgcccctaaggagatcgcagagatcaaggcccagctggagacagccctgaagtggaggaactatgaggtgaagctgcggctgctgctgcacctggaggaactgcagatggagcatgatatccggcactatgacctggagtcggtgcccatgacctgggaccctgtggaccagaaccccaggctgctcacgctggaggttcctggagtgactgagagccgcccctcagtgctacggggcgaccacctgtttgcccttttgtcctcggagacacaccaggaggaccccatcacatataagggctttgtgcacaaggtggaattggaccgtgtcaagctgagcttttccatgagcctcctgagccgctttgtggatgggctgaccttcaaggtgaactttaccttcaaccgccagccgctgcgagtccagcaccgtgccctggagctgacagggcgctggctgctgtggcccatgctctttcctgtggcacctcgggacgtcccgctgctgccctcagatgtgaaactcaagctgtacgaccggagtctggagtcaaacccagagcagctgcaggccatgaggcacattgttacgggcaccacccgtccagccccctacatcatctttgggcctccaggcaccggcaagactgtcacgttagtggaggcaattaagcaggtggtgaagcacttgcccaaagcccacatcttggcctgcgctccatccaactcaggggctgacctactctgtcaaaggctccgggtccaccttcctagctccatctaccgcctcctggcccccagcagggacatccgcatggtacctgaggacatcaagccctgctgcaactgggacgcaaagaagggggagtatgtatttcccgccaagaagaagctgcaggaataccgggtcttaattaccaccctcatcactgccggcaggttggtctcggcccagtttcccattgatcacttcacacacatcttcatcgatgaggctggccactgcatggagcctgagagtctggtagctatagcagggctgatggaagtaaaggaaacaggtgatccaggagggcagctggtgctggcaggagaccctcggcagctggggcctgtgctgcgttccccactgacccagaagcatggactgggatactcactgctggagcggctgctcacctacaactccctgtacaagaagggccctgatggctatgacccccagttcataaccaagctgctccgcaactacaggtctcatcccaccatcctggacattcctaaccagctctattatgaaggggagctgcaggcctgtgctgatgtcgtggatcgagaacgcttctgccgctgggcgggcctacctcgacagggctttcccatcatctttcacggcgtaatgggcaaagatgagcgtgaaggcaacagcccatccttcttcaaccctgaagaggctgccacagtgacttcctacctgaagctgctcctggccccctcctccaagaagggcaaagctcgcctgagccctcgaagtgtgggcgtcatctccccgtaccggaaacaggtcaggtcctcagttaccagcaagggtggggcccctcccccagatggtacctccttaatatccagaccactaggcagaggctccaggagcttaggcctctgctggctccgtatctcagaagagcaccaaggtcagctgccgcctccctttgttccccagctccctggcctcctgccaggctccctcttgcattaggttaatggcacgagagaaaggcacctgtcccctccttccaggtggagaaaatccgttactgcatcaccaaacttgacagggagcttcgaggactggatgacatcaaggacttgaaggtgggttcagtagaagaattccaaggccaagaacgaagcgtcatcctcatctccaccgtgcgaagcagccagagctttgtgcagctggatctggactttaatctgggtttccttaagaaccccaagaggttcaatgtagctgtgacccgggccaaggccctgctcatcatcgtggggaacccccttctcctgggccatgaccctgactggaaagtattcctggagttctgtaaagaaaacggagggtataccgggtgtcccttccctgccaaactggacctgcaacagggacagaatttactgcaaggtctgagcaagctcagcccctctacctcagggccccacagccatgactacctcccccaggagcgggagggtgaagggggcctgtctctgcaagtggagccagagtggaggaatgagctctgaagacacagcacccagccttctcgcaccagccaagccttaactgcctgcctgaccctgaaccagaacccagctgaactgcccctccaagggacaggaaggctgggggagggagtttacaacccaagccattccaccccctcccctgctggggagaatgacacatcaagctgctaacaattgggggaaggggaaggaagaaaactctgaaaacaaaatcttgttctatgcaaaaaaaaaaaacacacccgagagcgactccaagtagacggggaatgcgacacaacaccagcggttatctgcacagtgcggcccaaggggccacaataacgcatggtccccagaggacccaaagacgtccgtgtgctccaccagggggaaagactacctgccgggaactccctaataggaagaagacgataaacaatttcgaatagagccagggttaacccggagtatgan

SEQ ID NO: 287227 - DNA, 3880 bp, Homo sapiens
  misc_feature (3880)..(3880): n is a, c, g, or t
ctgccttttgctctgttgcttttcactgagtcccgaggctctggagggtgggcgtgagggtagccctggctgaggctcggaggtcctcccgggctgttcagagggccccaagcggtagccacgttctgatactggctagaagccagggagggagcttggggtaaggggagggccctgagggaggggtcagacgctttaggaaagagttaatgcgaagagggggaggggataggacgaagaaaccgaagggaaagctcagacttccagctgcagcggcgactttcagtttcatttccacggaccctcctgcctgggccgcagccgccgccgcgatgcccagtaagttcagctgccggcagctccgggaggcgggccagtgtttcgagagtttcctggtcgttcggggactggacatggagacagatcgcgagcggctgcggaccatttataaccgcgacttcaagatcagctttgggacccccgcccctggcttctcctccatgctgtatggaatgaagattgcaaatctggcctacgtcaccaagactcgggtcaggttcttcagactcgaccgctgggccgacgtgcggttcccagaaaagaggagaatgaagctggggtcagatatcagcaaacaccacaagtcactgctagccaagatcttttatgacagggctgagtatcttcatgggaaacatggtgtggatgtggaagtccaggggccccatgaagcccgagatgggcagctccttatccgcctggatttgaaccgcaaagaggtgctgaccctgaggcttcggaatggcggaacccagtctgttaccctcactcacctcttcccactctgccggacaccccagtttgctttctacaatgaagaccaggagttgccctgtccactgggccccggtgaatgctatgaactccatgtccattgtaagaccagctttgtgggctacttcccagccacagtgctctgggagctgctgggacctggggagtcgggttcagaaggagccggcacattctacattgcccgcttcttggctgccgtcgcccacagccccctggctgcacagctgaagcccatgactcccttcaagcggacccggatcaccggaaaccctgtggtgaccaatcggatagaggaaggagagagacctgaccgcgctaagggctatgacctggagttaagtatggcgctggggacatactacccacctccccgcctcaggcagctgctccccatgcttcttcagggaacaagtatcttcactgcccctaaggagatcgcagagatcaaggcccagctggagacagccctgaagtggaggaactatgaggtgaagctgcggctgctgctgcacctggaggaactgcagatggagcatgatatccggcactatgacctggagtcggtgcccatgacctgggaccctgtggaccagaaccccaggctgctcacgctggaggttcctggagtgactgagagccgcccctcagtgctacggggcgaccacctgtttgcccttttgtcctcggagacacaccaggaggaccccatcacatataagggctttgtgcacaaggtggaattggaccgtgtcaagctgagcttttccatgagcctcctgagccgctttgtggatgggctgaccttcaaggtgaactttaccttcaaccgccagccgctgcgagtccagcaccgtgccctggagctgacagggcgctggctgctgtggcccatgctctttcctgtggcacctcgggacgtcccgctgctgccctcagatgtgaaactcaagctgtacgaccggagtctggagtcaaacccagagcagctgcaggccatgaggcacattgttacgggcaccacccgtccagccccctacatcatctttgggcctccaggcaccggcaagactgtcacgttagtggaggcaattaagcaggtggtgaagcacttgcccaaagcccacatcttggcctgcgctccatccaactcaggggctgacctactctgtcaaaggctccgggtccaccttcctagctccatctaccgcctcctggcccccagcagggacatccgcatggtacctgaggacatcaagccctgctgcaactgggacgcaaagaagggggagtatgtatttcccgccaagaagaagctgcaggaataccgggtcttaattaccaccctcatcactgccggcaggttggtctcggcccagtttcccattgatcacttcacacacatcttcatcgatgaggctggccactgcatggagcctgagagtctggtagctatagcagggctgatggaagtaaaggaaacaggtgatccaggagggcagctggtgctggcaggagaccctcggcagctggggcctgtgctgcgttccccactgacccagaagcatggactgggatactcactgctggagcggctgctcacctacaactccctgtacaagaagggccctgatggctatgacccccagttcataaccaagctgctccgcaactacaggtctcatcccaccatcctggacattcctaaccagctctattatgaaggggagctgcaggcctgtgctgatgtcgtggatcgagaacgcttctgccgctgggcgggcctacctcgacagggctttcccatcatctttcacggcgtaatgggcaaagatgagcgtgaaggcaacagcccatccttcttcaaccctgaagaggctgccacagtgacttcctacctgaagctgctcctggccccctcctccaagaagggcaaagctcgcctgagccctcgaagtgtgggcgtcatctccccgtaccggaaacagctccctggcctcctgccaggctccctcttgcattaggttaatggcacgagagaaaggcacctgtcccctccttccaggtggagaaaatccgttactgcatcaccaaacttgacagggagcttcgaggactggatgacatcaaggacttgaaggtgggttcagtagaagaattccaaggccaagaacgaagcgtcatcctcatctccaccgtgcgaagcagccagagctttgtgcagctggatctggactttaatctgggtttccttaagaaccccaagaggttcaatgtagctgtgacccgggccaaggccctgctcatcatcgtggggaacccccttctcctgggccatgaccctgactggaaagtattcctggagttctgtaaagaaaacggagggtataccgggtgtcccttccctgccaaactggacctgcaacagggacagaatttactgcaaggtctgagcaagctcagcccctctacctcagggccccacagccatgactacctcccccaggagcgggagggtgaagggggcctgtctctgcaagtggagccagagtggaggaatgagctctgaagacacagcacccagccttctcgcaccagccaagccttaactgcctgcctgaccctgaaccagaacccagctgaactgcccctccaagggacaggaaggctgggggagggagtttacaacccaagccattccaccccctcccctgctggggagaatgacacatcaagctgctaacaattgggggaaggggaaggaagaaaactctgaaaacaaaatcttgttctatgcaaaaaaaaaaaacacacccgagagcgactccaagtagacggggaatgcgacacaacaccagcggttatctgcacagtgcggcccaaggggccacaataacgcatggtccccagaggacccaaagacgtccgtgtgctccaccagggggaaagactacctgccgggaactccctaataggaagaagacgataaacaatttcgaatagagccagggttaacccggagtatgan

SEQ ID NO: 287228 - DNA, 4721 bp, Homo sapiens
  misc_feature (4721)..(4721): n is a, c, g, or t
ctgccttttgctctgttgcttttcactgagtcccgaggctctggagggtgggcgtgagggtagccctggctgaggctcggaggtcctcccgggctgttcagagggccccaagcggtagccacgttctgatactggctagaagccagggagggagcttggggtaaggggagggccctgagggaggggtcagacgctttaggaaagagttaatgcgaagagggggaggggataggacgaagaaaccgaagggaaagctcagacttccagctgcagcggcgactttcagtttcatttccacggaccctcctgcctgggccgcagccgccgccgcgatgcccagtaagttcagctgccggcagctccgggaggcgggccagtgtttcgagagtttcctggtcgttcggggactggacatggagacagatcgcgagcggctgcggaccatttataaccgcgacttcaagatcagctttgggacccccgcccctggcttctcctccatgctgtatggaatgaagattgcaaatctggcctacgtcaccaagactcgggtcaggttcttcagactcgaccgctgggccgacgtgcggttcccagaaaagaggagaatgaagctggggtcagatatcagcaaacaccacaagtcactgctagccaagatcttttatgacagggctgagtatcttcatgggaaacatggtgtggatgtggaagtccaggggccccatgaagcccgagatgggcagctccttatccgcctggatttgaaccgcaaagaggtgctgaccctgaggcttcggaatggcggaacccagtctgttaccctcactcacctcttcccactctgccggacaccccagtttgctttctacaatgaagaccaggagttgccctgtccactgggccccggtgaatgctatgaactccatgtccattgtaagaccagctttgtgggctacttcccagccacagtgctctgggagctgctgggacctggggagtcgggttcagaaggagccggcacattctacattgcccgcttcttggctgccgtcgcccacagccccctggctgcacagctgaagcccatgactcccttcaagcggacccggatcaccggaaaccctgtggtgaccaatcggatagaggaaggagagagacctgaccgcgctaagggctatgacctggagttaagtatggcgctggggacatactacccacctccccgcctcaggcagctgctccccatgcttcttcagggaacaagtatcttcactgcccctaaggagatcgcagagatcaaggcccagctggagacagccctgaagtggaggaactatgaggtgaagctgcggctgctgctgcacctggaggaactgcagatggagcatgatatccggcactatgacctggagtcggtgcccatgacctgggaccctgtggaccagaaccccaggctgctcacgctggaggttcctggagtgactgagagccgcccctcagtgctacggggcgaccacctgtttgcccttttgtcctcggagacacaccaggaggaccccatcacatataagggctttgtgcacaaggtggaattggaccgtgtcaagctgagcttttccatgagcctcctgagccgctttgtggatgggctgaccttcaaggtgaactttaccttcaaccgccagccgctgcgagtccagcaccgtgccctggagctgacagggcgctggctgctgtggcccatgctctttcctgtggcacctcgggacgtcccgctgctgccctcagatgtgaaactcaagctgtacgaccggagtctggagtcaaacccagagcagctgcaggccatgaggcacattgttacgggcaccacccgtccagccccctacatcatctttgggcctccaggcaccggcaagactgtcacgttagtggaggcaattaagcaggtggtgaagcacttgcccaaagcccacatcttggcctgcgctccatccaactcaggggctgacctactctgtcaaaggctccgggtccaccttcctagctccatctaccgcctcctggcccccagcagggacatccgcatggtacctgaggacatcaagccctgctgcaactgggacgcaaagaagggggagtatgtatttcccgccaagaagaagctgcaggaataccgggtcttaattaccaccctcatcactgccggcaggttggtctcggcccagtttcccattgatcacttcacacacatcttcatcgatgaggctggccactgcatggagcctgagagtctggtagctatagcagggctgatggaagtaaaggaaacaggtgatccaggagggcagctggtgctggcaggagaccctcggcagctggggcctgtgctgcgttccccactgacccagaagcatggactgggatactcactgctggagcggctgctcacctacaactccctgtacaagaagggccctgatggctatgacccccagttcataaccaagctgctccgcaactacaggtctcatcccaccatcctggacattcctaaccagctctattatgaaggggagctgcaggcctgtgctgatgtcgtggatcgagaacgcttctgccgctgggcgggcctacctcgacagggctttcccatcatctttcacggcgtaatgggcaaagatgagcgtgaaggcaacagcccatccttcttcaaccctgaagaggctgccacagtgacttcctacctgaagctgctcctggccccctcctccaagaagggcaaagctcgcctgagccctcgaagtgtgggcgtcatctccccgtaccggaaacagctccctggcctcctgccaggctccctcttgcattaggttaatggcacgagagaaaggcacctgtcccctccttccaggtggagaaaatccgttactgcatcaccaaacttgacagggagcttcgaggactggatgacatcaaggacttgaaggtgacatgctgttccacagtcactccctgccttccgtgtgcccccacttgcccacttccagagacttcctcaagcttccactccagcccacgtccccgtcccacccctgctgccttgaatagagctcgagctctccctgagcctctcactcctggagattccaacttaagggtctgggatgggatcaggaagcctgcatgtttaacaaacacctcctgtcattcttagactgaggcaggtttgaggcctctgccctaaggataaagtccaaattccgtggcctgtcatgtgatgctgccacccccacccccagtagcctctctcttaaggttctggtctcaacactggctgcagataacaatcacctggagagcttttaataccccgcccccatgccagggccccacccaccagctcatacagctatcggggcagagccagggcactggtagtttttacagcttctcaggtgattctaatatgcagccagggttgccgggttagggcccagggttgtatattcttaacagatacttagtgattgttttcaggaaagtttgaaagtcactgctctgagttcccgtgttctttgcaatgctgttttctttccttagaacactttgcaggccccagccctcagcaggattcaaccttcatgtttcagcttccacagcctacctcccatcccctttccctgggccgtgtcgcagcactggttcactcactgatctacaattgcccagtgacctctctgtaccctccttggaaggcaagctccctggggtagggcacccctttgacacccctggctggtctcaggccctgcctctttccccactaggtgggttcagtagaagaattccaaggccaagaacgaagcgtcatcctcatctccaccgtgcgaagcagccagagctttgtgcagctggatctggactttaatctgggtttccttaagaaccccaagaggttcaatgtagctgtgacccgggccaaggccctgctcatcatcgtggggaacccccttctcctgggccatgaccctgactggaaagtattcctggagttctgtaaagaaaacggagggtataccgggtgtcccttccctgccaaactggacctgcaacagggacagaatttactgcaaggtctgagcaagctcagcccctctacctcagggccccacagccatgactacctcccccaggagcgggagggtgaagggggcctgtctctgcaagtggagccagagtggaggaatgagctctgaagacacagcacccagccttctcgcaccagccaagccttaactgcctgcctgaccctgaaccagaacccagctgaactgcccctccaagggacaggaaggctgggggagggagtttacaacccaagccattccaccccctcccctgctggggagaatgacacatcaagctgctaacaattgggggaaggggaaggaagaaaactctgaaaacaaaatcttgttctatgcaaaaaaaaaaaacacacccgagagcgactccaagtagacggggaatgcgacacaacaccagcggttatctgcacagtgcggcccaaggggccacaataacgcatggtccccagaggacccaaagacgtccgtgtgctccaccagggggaaagactacctgccgggaactccctaataggaagaagacgataaacaatttcgaatagagccagggttaacccggagtatgan

SEQ ID NO: 287229 - DNA, 4775 bp, Homo sapiens
  misc_feature (4775)..(4775): n is a, c, g, or t
ctgccttttgctctgttgcttttcactgagtcccgaggctctggagggtgggcgtgagggtagccctggctgaggctcggaggtcctcccgggctgttcagagggccccaagcggtagccacgttctgatactggctagaagccagggagggagcttggggtaaggggagggccctgagggaggggtcagacgctttaggaaagagttaatgcgaagagggggaggggataggacgaagaaaccgaagggaaagctcagacttccagctgcagcggcgactttcagtttcatttccacggaccctcctgcctgggccgcagccgccgccgcgatgcccagtaagttcagctgccggcagctccgggaggcgggccagtgtttcgagagtttcctggtcgttcggggactggacatggagacagatcgcgagcggctgcggaccatttataaccgcgacttcaagatcagctttgggacccccgcccctggcttctcctccatgctgtatggaatgaagattgcaaatctggcctacgtcaccaagactcgggtcaggttcttcagactcgaccgctgggccgacgtgcggttcccagaaaagaggagaatgaagctggggtcagatatcagcaaacaccacaagtcactgctagccaagatcttttatgacagggctgagtatcttcatgggaaacatggtgtggatgtggaagtccaggggccccatgaagcccgagatgggcagctccttatccgcctggatttgaaccgcaaagaggtgctgaccctgaggcttcggaatggcggaacccagtctgttaccctcactcacctcttcccactctgccggacaccccagtttgctttctacaatgaagaccaggagttgccctgtccactgggccccggtgaatgctatgaactccatgtccattgtaagaccagctttgtgggctacttcccagccacagtgctctgggagctgctgggacctggggagtcgggttcagaaggagccggcacattctacattgcccgcttcttggctgccgtcgcccacagccccctggctgcacagctgaagcccatgactcccttcaagcggacccggatcaccggaaaccctgtggtgaccaatcggatagaggaaggagagagacctgaccgcgctaagggctatgacctggagttaagtatggcgctggggacatactacccacctccccgcctcaggcagctgctccccatgcttcttcagggaacaagtatcttcactgcccctaaggagatcgcagagatcaaggcccagctggagacagccctgaagtggaggaactatgaggtgaagctgcggctgctgctgcacctggaggaactgcagatggagcatgatatccggcactatgacctggagtcggtgcccatgacctgggaccctgtggaccagaaccccaggctgctcacgctggaggttcctggagtgactgagagccgcccctcagtgctacggggcgaccacctgtttgcccttttgtcctcggagacacaccaggaggaccccatcacatataagggctttgtgcacaaggtggaattggaccgtgtcaagctgagcttttccatgagcctcctgagccgctttgtggatgggctgaccttcaaggtgaactttaccttcaaccgccagccgctgcgagtccagcaccgtgccctggagctgacagggcgctggctgctgtggcccatgctctttcctgtggcacctcgggacgtcccgctgctgccctcagatgtgaaactcaagctgtacgaccggagtctggagtcaaacccagagcagctgcaggccatgaggcacattgttacgggcaccacccgtccagccccctacatcatctttgggcctccaggcaccggcaagactgtcacgttagtggaggcaattaagcaggtggtgaagcacttgcccaaagcccacatcttggcctgcgctccatccaactcaggggctgacctactctgtcaaaggctccgggtccaccttcctagctccatctaccgcctcctggcccccagcagggacatccgcatggtacctgaggacatcaagccctgctgcaactgggacgcaaagaagggggagtatgtatttcccgccaagaagaagctgcaggaataccgggtcttaattaccaccctcatcactgccggcaggttggtctcggcccagtttcccattgatcacttcacacacatcttcatcgatgaggctggccactgcatggagcctgagagtctggtagctatagcagggctgatggaagtaaaggaaacaggtgatccaggagggcagctggtgctggcaggagaccctcggcagctggggcctgtgctgcgttccccactgacccagaagcatggactgggatactcactgctggagcggctgctcacctacaactccctgtacaagaagggccctgatggctatgacccccagttcataaccaagctgctccgcaactacaggtctcatcccaccatcctggacattcctaaccagctctattatgaaggggagctgcaggcctgtgctgatgtcgtggatcgagaacgcttctgccgctgggcgggcctacctcgacagggctttcccatcatctttcacggcgtaatgggcaaagatgagcgtgaaggcaacagcccatccttcttcaaccctgaagaggctgccacagtgacttcctacctgaagctgctcctggccccctcctccaagaagggcaaagctcgcctgagccctcgaagtgtgggcgtcatctccccgtaccggaaacagctccctggcctcctgccaggctccctcttgcattaggttaatggcacgagagaaaggcacctgtcccctccttccaggtggagaaaatccgttactgcatcaccaaacttgacagggagcttcgaggactggatgacatcaaggacttgaaggtgacatgctgttccacagtcactccctgccttccgtgtgcccccacttgcccacttccagagacttcctcaagcttccactccagcccacgtccccgtcccacccctgctgccttgaatagagctcgagctctccctgagcctctcactcctggagattccaacttaagggtctgggatgggatcaggaagcctgcatgtttaacaaacacctcctgtcattcttagactgaggcaggtttgaggcctctgccctaaggataaagtccaaattccgtggcctgtcatgtgatgctgccacccccacccccagtagcctctctcttaaggttctggtctcaacactggctgcagataacaatcacctggagagcttttaataccccgcccccatgccagggccccacccaccagctcatacagctatcggggcagagccagggcactggtagtttttacagcttctcaggtgattctaatatgcagccagggttgaaaacactgctctaagacttacaggcctctctcttggaaattctgatcgggggtccgggttagggcccagggttgtatattcttaacagatacttagtgattgttttcaggaaagtttgaaagtcactgctctgagttcccgtgttctttgcaatgctgttttctttccttagaacactttgcaggccccagccctcagcaggattcaaccttcatgtttcagcttccacagcctacctcccatcccctttccctgggccgtgtcgcagcactggttcactcactgatctacaattgcccagtgacctctctgtaccctccttggaaggcaagctccctggggtagggcacccctttgacacccctggctggtctcaggccctgcctctttccccactaggtgggttcagtagaagaattccaaggccaagaacgaagcgtcatcctcatctccaccgtgcgaagcagccagagctttgtgcagctggatctggactttaatctgggtttccttaagaaccccaagaggttcaatgtagctgtgacccgggccaaggccctgctcatcatcgtggggaacccccttctcctgggccatgaccctgactggaaagtattcctggagttctgtaaagaaaacggagggtataccgggtgtcccttccctgccaaactggacctgcaacagggacagaatttactgcaaggtctgagcaagctcagcccctctacctcagggccccacagccatgactacctcccccaggagcgggagggtgaagggggcctgtctctgcaagtggagccagagtggaggaatgagctctgaagacacagcacccagccttctcgcaccagccaagccttaactgcctgcctgaccctgaaccagaacccagctgaactgcccctccaagggacaggaaggctgggggagggagtttacaacccaagccattccaccccctcccctgctggggagaatgacacatcaagctgctaacaattgggggaaggggaaggaagaaaactctgaaaacaaaatcttgttctatgcaaaaaaaaaaaacacacccgagagcgactccaagtagacggggaatgcgacacaacaccagcggttatctgcacagtgcggcccaaggggccacaataacgcatggtccccagaggacccaaagacgtccgtgtgctccaccagggggaaagactacctgccgggaactccctaataggaagaagacgataaacaatttcgaatagagccagggttaacccggagtatgan

SEQ ID NO: 287230 - DNA, 4644 bp, Homo sapiens
  misc_feature (4644)..(4644): n is a, c, g, or t
ctgccttttgctctgttgcttttcactgagtcccgaggctctggagggtgggcgtgagggtagccctggctgaggctcggaggtcctcccgggctgttcagagggccccaagcggtagccacgttctgatactggctagaagccagggagggagcttggggtaaggggagggccctgagggaggggtcagacgctttaggaaagagttaatgcgaagagggggaggggataggacgaagaaaccgaagggaaagctcagacttccagctgcagcggcgactttcagtttcatttccacggaccctcctgcctgggccgcagccgccgccgcgatgcccagtaagttcagctgccggcagctccgggaggcgggccagtgtttcgagagtttcctggtcgttcggggactggacatggagacagatcgcgagcggctgcggaccatttataaccgcgacttcaagatcagctttgggacccccgcccctggcttctcctccatgctgtatggaatgaagattgcaaatctggcctacgtcaccaagactcgggtcaggttcttcagactcgaccgctgggccgacgtgcggttcccagaaaagaggagaatgaagctggggtcagatatcagcaaacaccacaagtcactgctagccaagatcttttatgacagggctgagtatcttcatgggaaacatggtgtggatgtggaagtccaggggccccatgaagcccgagatgggcagctccttatccgcctggatttgaaccgcaaagaggtgctgaccctgaggcttcggaatggcggaacccagtctgttaccctcactcacctcttcccactctgccggacaccccagtttgctttctacaatgaagaccaggagttgccctgtccactgggccccggtgaatgctatgaactccatgtccattgtaagaccagctttgtgggctacttcccagccacagtgctctgggagctgctgggacctggggagtcgggttcagaaggagccggcacattctacattgcccgcttcttggctgccgtcgcccacagccccctggctgcacagctgaagcccatgactcccttcaagcggacccggatcaccggaaaccctgtggtgaccaatcggatagaggaaggagagagacctgaccgcgctaagggctatgacctggagttaagtatggcgctggggacatactacccacctccccgcctcaggcagctgctccccatgcttcttcagggaacaagtatcttcactgcccctaaggagatcgcagagatcaaggcccagctggagacagccctgaagtggaggaactatgaggtgaagctgcggctgctgctgcacctggaggaactgcagatggagcatgatatccggcactatgacctggagtcggtgcccatgacctgggaccctgtggaccagaaccccaggctgctcacgctggaggttcctggagtgactgagagccgcccctcagtgctacggggcgaccacctgtttgcccttttgtcctcggagacacaccaggaggaccccatcacatataagggctttgtgcacaaggtggaattggaccgtgtcaagctgagcttttccatgagcctcctgagccgctttgtggatgggctgaccttcaaggtgaactttaccttcaaccgccagccgctgcgagtccagcaccgtgccctggagctgacagggcgctggctgctgtggcccatgctctttcctgtggcacctcgggacgtcccgctgctgccctcagatgtgaaactcaagctgtacgaccggagtctggagtcaaacccagagcagctgcaggccatgaggcacattgttacgggcaccacccgtccagccccctacatcatctttgggcctccaggcaccggcaagactgtcacgttagtggaggcaattaagcaggtggtgaagcacttgcccaaagcccacatcttggcctgcgctccatccaactcaggggctgacctactctgtcaaaggctccgggtccaccttcctagctccatctaccgcctcctggcccccagcagggacatccgcatggtacctgaggacatcaagccctgctgcaactgggacgcaaagaagggggagtatgtatttcccgccaagaagaagctgcaggaataccgggtcttaattaccaccctcatcactgccggcaggttggtctcggcccagtttcccattgatcacttcacacacatcttcatcgatgaggctggccactgcatggagcctgagagtctggtagctatagcagggctgatggaagtaaaggaaacaggtgatccaggagggcagctggtgctggcaggagaccctcggcagctggggcctgtgctgcgttccccactgacccagaagcatggactgggatactcactgctggagcggctgctcacctacaactccctgtacaagaagggccctgatggctatgacccccagttcataaccaagctgctccgcaactacaggtctcatcccaccatcctggacattcctaaccagctctattatgaaggggagctgcaggcctgtgctgatgtcgtggatcgagaacgcttctgccgctgggcgggcctacctcgacagggctttcccatcatctttcacggcgtaatgggcaaagatgagcgtgaaggcaacagcccatccttcttcaaccctgaagaggctgccacagtgacttcctacctgaagctgctcctggccccctcctccaagaagggcaaagctcgcctgagccctcgaagtgtgggcgtcatctccccgtaccggaaacaggtggagaaaatccgttactgcatcaccaaacttgacagggagcttcgaggactggatgacatcaaggacttgaaggtgacatgctgttccacagtcactccctgccttccgtgtgcccccacttgcccacttccagagacttcctcaagcttccactccagcccacgtccccgtcccacccctgctgccttgaatagagctcgagctctccctgagcctctcactcctggagattccaacttaagggtctgggatgggatcaggaagcctgcatgtttaacaaacacctcctgtcattcttagactgaggcaggtttgaggcctctgccctaaggataaagtccaaattccgtggcctgtcatgtgatgctgccacccccacccccagtagcctctctcttaaggttctggtctcaacactggctgcagataacaatcacctggagagcttttaataccccgcccccatgccagggccccacccaccagctcatacagctatcggggcagagccagggcactggtagtttttacagcttctcaggtgattctaatatgcagccagggttgccgggttagggcccagggttgtatattcttaacagatacttagtgattgttttcaggaaagtttgaaagtcactgctctgagttcccgtgttctttgcaatgctgttttctttccttagaacactttgcaggccccagccctcagcaggattcaaccttcatgtttcagcttccacagcctacctcccatcccctttccctgggccgtgtcgcagcactggttcactcactgatctacaattgcccagtgacctctctgtaccctccttggaaggcaagctccctggggtagggcacccctttgacacccctggctggtctcaggccctgcctctttccccactaggtgggttcagtagaagaattccaaggccaagaacgaagcgtcatcctcatctccaccgtgcgaagcagccagagctttgtgcagctggatctggactttaatctgggtttccttaagaaccccaagaggttcaatgtagctgtgacccgggccaaggccctgctcatcatcgtggggaacccccttctcctgggccatgaccctgactggaaagtattcctggagttctgtaaagaaaacggagggtataccgggtgtcccttccctgccaaactggacctgcaacagggacagaatttactgcaaggtctgagcaagctcagcccctctacctcagggccccacagccatgactacctcccccaggagcgggagggtgaagggggcctgtctctgcaagtggagccagagtggaggaatgagctctgaagacacagcacccagccttctcgcaccagccaagccttaactgcctgcctgaccctgaaccagaacccagctgaactgcccctccaagggacaggaaggctgggggagggagtttacaacccaagccattccaccccctcccctgctggggagaatgacacatcaagctgctaacaattgggggaaggggaaggaagaaaactctgaaaacaaaatcttgttctatgcaaaaaaaaaaaacacacccgagagcgactccaagtagacggggaatgcgacacaacaccagcggttatctgcacagtgcggcccaaggggccacaataacgcatggtccccagaggacccaaagacgtccgtgtgctccaccagggggaaagactacctgccgggaactccctaataggaagaagacgataaacaatttcgaatagagccagggttaacccggagtatgan

SEQ ID NO: 287231 - DNA, 4717 bp, Homo sapiens
  misc_feature (4717)..(4717): n is a, c, g, or t
ctgccttttgctctgttgcttttcactgagtcccgaggctctggagggtgggcgtgagggtagccctggctgaggctcggaggtcctcccgggctgttcagagggccccaagcggtagccacgttctgatactggctagaagccagggagggagcttggggtaaggggagggccctgagggaggggtcagacgctttaggaaagagttaatgcgaagagggggaggggataggacgaagaaaccgaagggaaagctcagacttccagctgcagcggcgactttcagtttcatttccacggaccctcctgcctgggccgcagccgccgccgcgatgcccagtaagttcagctgccggcagctccgggaggcgggccagtgtttcgagagtttcctggtcgttcggggactggacatggagacagatcgcgagcggctgcggaccatttataaccgcgacttcaagatcagctttgggacccccgcccctggcttctcctccatgctgtatggaatgaagattgcaaatctggcctacgtcaccaagactcgggtcaggttcttcagactcgaccgctgggccgacgtgcggttcccagaaaagaggagaatgaagctggggtcagatatcagcaaacaccacaagtcactgctagccaagatcttttatgacagggctgagtatcttcatgggaaacatggtgtggatgtggaagtccaggggccccatgaagcccgagatgggcagctccttatccgcctggatttgaaccgcaaagaggtgctgaccctgaggcttcggaatggcggaacccagtctgttaccctcactcacctcttcccactctgccggacaccccagtttgctttctacaatgaagaccaggagttgccctgtccactgggccccggtgaatgctatgaactccatgtccattgtaagaccagctttgtgggctacttcccagccacagtgctctgggagctgctgggacctggggagtcgggttcagaaggagccggcacattctacattgcccgcttcttggctgccgtcgcccacagccccctggctgcacagctgaagcccatgactcccttcaagcggacccggatcaccggaaaccctgtggtgaccaatcggatagaggaaggagagagacctgaccgcgctaagggctatgacctggagttaagtatggcgctggggacatactacccacctccccgcctcaggcagctgctccccatgcttcttcagggaacaagtatcttcactgcccctaaggagatcgcagagatcaaggcccagctggagacagccctgaagtggaggaactatgaggtgaagctgcggctgctgctgcacctggaggaactgcagatggagcatgatatccggcactatgacctggagtcggtgcccatgacctgggaccctgtggaccagaaccccaggctgctcacgctggaggttcctggagtgactgagagccgcccctcagtgctacggggcgaccacctgtttgcccttttgtcctcggagacacaccaggaggaccccatcacatataagggctttgtgcacaaggtggaattggaccgtgtcaagctgagcttttccatgagcctcctgagccgctttgtggatgggctgaccttcaaggtgaactttaccttcaaccgccagccgctgcgagtccagcaccgtgccctggagctgacagggcgctggctgctgtggcccatgctctttcctgtggcacctcgggacgtcccgctgctgccctcagatgtgaaactcaagctgtacgaccggagtctggagtcaaacccagagcagctgcaggccatgaggcacattgttacgggcaccacccgtccagccccctacatcatctttgggcctccaggcaccggcaagactgtcacgttagtggaggcaattaagcaggtggtgaagcacttgcccaaagcccacatcttggcctgcgctccatccaactcaggggctgacctactctgtcaaaggctccgggtccaccttcctagctccatctaccgcctcctggcccccagcagggacatccgcatggtacctgaggacatcaagccctgctgcaactgggacgcaaagaagggggagtatgtatttcccgccaagaagaagctgcaggaataccgggtcttaattaccaccctcatcactgccggcaggttggtctcggcccagtttcccattgatcacttcacacacatcttcatcgatgaggctggccactgcatggagcctgagagtctggtagctatagcagggctgatggaagtaaaggaaacaggtgatccaggagggcagctggtgctggcaggagaccctcggcagctggggcctgtgctgcgttccccactgacccagaagcatggactgggatactcactgctggagcggctgctcacctacaactccctgtacaagaagggccctgatggctatgacccccagttcataaccaagctgctccgcaactacaggtctcatcccaccatcctggacattcctaaccagctctattatgaaggggagctgcaggcctgtgctgatgtcgtggatcgagaacgcttctgccgctgggcgggcctacctcgacagggctttcccatcatctttcacggcgtaatgggcaaagatgagcgtgaaggcaacagcccatccttcttcaaccctgaagaggctgccacagtgacttcctacctgaagctgctcctggccccctcctccaagaagggcaaagctcgcctgagccctcgaagtgtgggcgtcatctccccgtaccggaaacagctccctggcctcctgccaggctccctcttgcattaggttaatggcacgagagaaaggcacctgtcccctccttccaggtggagaaaatccgttactgcatcaccaaacttgacagggagcttcgaggactggatgacatcaaggacttgaaggtgacatgctgttccacagtcactccctgccttccgtgtgcccccacttgcccacttccagagacttcctcaagcttccactccagcccacgtccccgtcccacccctgctgccttgaatagagctcgagctctccctgagcctctcactcctggagattccaacttaagggtctgggatgggatcaggaagcctgcatgtttaacaaacacctcctgtcattcttagactgaggcaggtttgaggcctctgccctaaggataaagtccaaattccgtggcctgtcatgtgatgctgccacccccacccccagtagcctctctcttaaggttctggtctcaacactggctgcagataacaatcacctggagagcttttaataccccgcccccatgccagggccccacccaccagctcatacagctatcggggcagagccagggcactggtagtttttacagcttctcaggtgattctaatatgcagccagggttgaaaacactgctctaagacttacaggcctctctcttggaaattctgatcgggggtccgggttagggcccagggttgtatattcttaacagatacttagtgattgttttcaggaaagtttgaaagtcactgctctgagttcccgtgttctttgcaatgctgttttctttccttagaactacctcccatcccctttccctgggccgtgtcgcagcactggttcactcactgatctacaattgcccagtgacctctctgtaccctccttggaaggcaagctccctggggtagggcacccctttgacacccctggctggtctcaggccctgcctctttccccactaggtgggttcagtagaagaattccaaggccaagaacgaagcgtcatcctcatctccaccgtgcgaagcagccagagctttgtgcagctggatctggactttaatctgggtttccttaagaaccccaagaggttcaatgtagctgtgacccgggccaaggccctgctcatcatcgtggggaacccccttctcctgggccatgaccctgactggaaagtattcctggagttctgtaaagaaaacggagggtataccgggtgtcccttccctgccaaactggacctgcaacagggacagaatttactgcaaggtctgagcaagctcagcccctctacctcagggccccacagccatgactacctcccccaggagcgggagggtgaagggggcctgtctctgcaagtggagccagagtggaggaatgagctctgaagacacagcacccagccttctcgcaccagccaagccttaactgcctgcctgaccctgaaccagaacccagctgaactgcccctccaagggacaggaaggctgggggagggagtttacaacccaagccattccaccccctcccctgctggggagaatgacacatcaagctgctaacaattgggggaaggggaaggaagaaaactctgaaaacaaaatcttgttctatgcaaaaaaaaaaaacacacccgagagcgactccaagtagacggggaatgcgacacaacaccagcggttatctgcacagtgcggcccaaggggccacaataacgcatggtccccagaggacccaaagacgtccgtgtgctccaccagggggaaagactacctgccgggaactccctaataggaagaagacgataaacaatttcgaatagagccagggttaacccggagtatgan

SEQ ID NO: 287232 - DNA, 3115 bp, Homo sapiens
  misc_feature (3115)..(3115): n is a, c, g, or t
tagttcctccacttcagggctgtctccagctgggccttgatctctgcgatctccttaggggcagtgaagatacttgttccctgaagaagcatggggagcagctgcctgaggcggggaggtgggtagtatgtccccagcgccatacttaactccaggtcatagcccttagcgcggtcaggtctctctccttcctctatccgattggtcaccactgggccccggtgaatgctatgaactccatgtccattgtaagaccagctttgtgggctacttcccagccacagtgctctgggagctgctgggacctggggagtcgggttcagaaggagccggcacattctacattgcccgcttcttggctgccgtcgcccacagccccctggctgcacagctgaagcccatgactcccttcaagcggacccggatcaccggaaaccctgtggtgaccaatcggatagaggaaggagagagacctgaccgcgctaagggctatgacctggagttaagtatggcgctggggacatactacccacctccccgcctcaggcagctgctccccatgcttcttcagggaacaagtatcttcactgcccctaaggagatcgcagagatcaaggcccagctggagacagccctgaagtggaggaactatgaggtgaagctgcggctgctgctgcacctggaggaactgcagatggagcatgatatccggcactatgacctggagtcggtgcccatgacctgggaccctgtggaccagaaccccaggctgctcacgctggaggttcctggagtgactgagagccgcccctcagtgctacggggcgaccacctgtttgcccttttgtcctcggagacacaccaggaggaccccatcacatataagggctttgtgcacaaggtggaattggaccgtgtcaagctgagcttttccatgagcctcctgagccgctttgtggatgggctgaccttcaaggtgaactttaccttcaaccgccagccgctgcgagtccagcaccgtgccctggagctgacagggcgctggctgctgtggcccatgctctttcctgtggcacctcgggacgtcccgctgctgccctcagatgtgaaactcaagctgtacgaccggagtctggagtcaaacccagagcagctgcaggccatgaggcacattgttacgggcaccacccgtccagccccctacatcatctttgggcctccaggcaccggcaagactgtcacgttagtggaggcaattaagcaggtggtgaagcacttgcccaaagcccacatcttggcctgcgctccatccaactcaggggctgacctactctgtcaaaggctccgggtccaccttcctagctccatctaccgcctcctggcccccagcagggacatccgcatggtacctgaggacatcaagccctgctgcaactgggacgcaaagaagggggagtatgtatttcccgccaagaagaagctgcaggaataccgggtcttaattaccaccctcatcactgccggcaggttggtctcggcccagtttcccattgatcacttcacacacatcttcatcgatgaggctggccactgcatggagcctgagagtctggtagctatagcagggctgatggaagtaaaggaaacaggtgatccaggagggcagctggtgctggcaggagaccctcggcagctggggcctgtgctgcgttccccactgacccagaagcatggactgggatactcactgctggagcggctgctcacctacaactccctgtacaagaagggccctgatggctatgacccccagttcataaccaagctgctccgcaactacaggtctcatcccaccatcctggacattcctaaccagctctattatgaaggggagctgcaggcctgtgctgatgtcgtggatcgagaacgcttctgccgctgggcgggcctacctcgacagggctttcccatcatctttcacggcgtaatgggcaaagatgagcgtgaaggcaacagcccatccttcttcaaccctgaagaggctgccacagtgacttcctacctgaagctgctcctggccccctcctccaagaagggcaaagctcgcctgagccctcgaagtgtgggcgtcatctccccgtaccggaaacaggtggagaaaatccgttactgcatcaccaaacttgacagggagcttcgaggactggatgacatcaaggacttgaaggtgggttcagtagaagaattccaaggccaagaacgaagcgtcatcctcatctccaccgtgcgaagcagccagagctttgtgcagctggatctggactttaatctgggtttccttaagaaccccaagaggttcaatgtagctgtgacccgggccaaggccctgctcatcatcgtggggaacccccttctcctgggccatgaccctgactggaaagtattcctggagttctgtaaagaaaacggagggtataccgggtgtcccttccctgccaaactggacctgcaacagggacagaatttactgcaaggtctgagcaagctcagcccctctacctcagggccccacagccatgactacctcccccaggagcgggagggtgaagggggcctgtctctgcaagtggagccagagtggaggaatgagctctgaagacacagcacccagccttctcgcaccagccaagccttaactgcctgcctgaccctgaaccagaacccagctgaactgcccctccaagggacaggaaggctgggggagggagtttacaacccaagccattccaccccctcccctgctggggagaatgacacatcaagctgctaacaattgggggaaggggaaggaagaaaactctgaaaacaaaatcttgttctatgcaaaaaaaaaaaacacacccgagagcgactccaagtagacggggaatgcgacacaacaccagcggttatctgcacagtgcggcccaaggggccacaataacgcatggtccccagaggacccaaagacgtccgtgtgctccaccagggggaaagactacctgccgggaactccctaataggaagaagacgataaacaatttcgaatagagccagggttaacccggagtatgan

SEQ ID NO: 287233 - DNA, 3044 bp, Homo sapiens
  misc_feature (3044)..(3044): n is a, c, g, or t
cgagctcggtaccctttgggctcccttcagggggctcaggctttactggagcaaggaggaaggctgtcttctttctacccccctggggccggtgtcacagctctcagcccggacccaccaaggattttgagtttccgggctcagcatcatgtgaatgctatgaactccatgtccattgtaagaccagctttgtgggctacttcccagccacagtgctctgggagctgctgggacctggggagtcgggttcagaaggagccggcacattctacattgcccgcttcttggctgccgtcgcccacagccccctggctgcacagctgaagcccatgactcccttcaagcggacccggatcaccggaaaccctgtggtgaccaatcggatagaggaaggagagagacctgaccgcgctaagggctatgacctggagttaagtatggcgctggggacatactacccacctccccgcctcaggcagctgctccccatgcttcttcagggaacaagtatcttcactgcccctaaggagatcgcagagatcaaggcccagctggagacagccctgaagtggaggaactatgaggtgaagctgcggctgctgctgcacctggaggaactgcagatggagcatgatatccggcactatgacctggagtcggtgcccatgacctgggaccctgtggaccagaaccccaggctgctcacgctggaggttcctggagtgactgagagccgcccctcagtgctacggggcgaccacctgtttgcccttttgtcctcggagacacaccaggaggaccccatcacatataagggctttgtgcacaaggtggaattggaccgtgtcaagctgagcttttccatgagcctcctgagccgctttgtggatgggctgaccttcaaggtgaactttaccttcaaccgccagccgctgcgagtccagcaccgtgccctggagctgacagggcgctggctgctgtggcccatgctctttcctgtggcacctcgggacgtcccgctgctgccctcagatgtgaaactcaagctgtacgaccggagtctggagtcaaacccagagcagctgcaggccatgaggcacattgttacgggcaccacccgtccagccccctacatcatctttgggcctccaggcaccggcaagactgtcacgttagtggaggcaattaagcaggtggtgaagcacttgcccaaagcccacatcttggcctgcgctccatccaactcaggggctgacctactctgtcaaaggctccgggtccaccttcctagctccatctaccgcctcctggcccccagcagggacatccgcatggtacctgaggacatcaagccctgctgcaactgggacgcaaagaagggggagtatgtatttcccgccaagaagaagctgcaggaataccgggtcttaattaccaccctcatcactgccggcaggttggtctcggcccagtttcccattgatcacttcacacacatcttcatcgatgaggctggccactgcatggagcctgagagtctggtagctatagcagggctgatggaagtaaaggaaacaggtgatccaggagggcagctggtgctggcaggagaccctcggcagctggggcctgtgctgcgttccccactgacccagaagcatggactgggatactcactgctggagcggctgctcacctacaactccctgtacaagaagggccctgatggctatgacccccagttcataaccaagctgctccgcaactacaggtctcatcccaccatcctggacattcctaaccagctctattatgaaggggagctgcaggcctgtgctgatgtcgtggatcgagaacgcttctgccgctgggcgggcctacctcgacagggctttcccatcatctttcacggcgtaatgggcaaagatgagcgtgaaggcaacagcccatccttcttcaaccctgaagaggctgccacagtgacttcctacctgaagctgctcctggccccctcctccaagaagggcaaagctcgcctgagccctcgaagtgtgggcgtcatctccccgtaccggaaacaggtggagaaaatccgttactgcatcaccaaacttgacagggagcttcgaggactggatgacatcaaggacttgaaggtgggttcagtagaagaattccaaggccaagaacgaagcgtcatcctcatctccaccgtgcgaagcagccagagctttgtgcagctggatctggactttaatctgggtttccttaagaaccccaagaggttcaatgtagctgtgacccgggccaaggccctgctcatcatcgtggggaacccccttctcctgggccatgaccctgactggaaagtattcctggagttctgtaaagaaaacggagggtataccgggtgtcccttccctgccaaactggacctgcaacagggacagaatttactgcaaggtctgagcaagctcagcccctctacctcagggccccacagccatgactacctcccccaggagcgggagggtgaagggggcctgtctctgcaagtggagccagagtggaggaatgagctctgaagacacagcacccagccttctcgcaccagccaagccttaactgcctgcctgaccctgaaccagaacccagctgaactgcccctccaagggacaggaaggctgggggagggagtttacaacccaagccattccaccccctcccctgctggggagaatgacacatcaagctgctaacaattgggggaaggggaaggaagaaaactctgaaaacaaaatcttgttctatgcaaaaaaaaaaaacacacccgagagcgactccaagtagacggggaatgcgacacaacaccagcggttatctgcacagtgcggcccaaggggccacaataacgcatggtccccagaggacccaaagacgtccgtgtgctccaccagggggaaagactacctgccgggaactccctaataggaagaagacgataaacaatttcgaatagagccagggttaacccggagtatgan

SEQ ID NO: 287234 - DNA, 4591 bp, Homo sapiens
  misc_feature (4591)..(4591): n is a, c, g, or t
ctgccttttgctctgttgcttttcactgagtcccgaggctctggagggtgggcgtgagggtagccctggctgaggctcggaggtcctcccgggctgttcagagggccccaagcggtagccacgttctgatactggctagaagccagggagggagcttggggtaaggggagggccctgagggaggggtcagacgctttaggaaagagttaatgcgaagagggggaggggataggacgaagaaaccgaagggaaagctcagacttccagctgcagcggcgactttcagtttcatttccacggaccctcctgcctgggccgcagccgccgccgcgatgcccagtaagttcagctgccggcagctccgggaggcgggccagtgtttcgagagtttcctggtcgttcggggactggacatggagacagatcgcgagcggctgcggaccatttataaccgcgacttcaagatcagctttgggacccccgcccctggcttctcctccatgctgtatggaatgaagattgcaaatctggcctacgtcaccaagactcgggtcaggttcttcagactcgaccgctgggccgacgtgcggttcccagaaaagaggagaatgaagctggggtcagatatcagcaaacaccacaagtcactgctagccaagatcttttatgacagggctgagtatcttcatgggaaacatggtgtggatgtggaagtccaggggccccatgaagcccgagatgggcagctccttatccgcctggatttgaaccgcaaagaggtgctgaccctgaggcttcggaatggcggaacccagtctgttaccctcactcacctcttcccactctgccggacaccccagtttgctttctacaatgaagaccaggagttgccctgtccactgggccccggtgaatgctatgaactccatgtccattgtaagaccagctttgtgggctacttcccagccacagtgctctgggagctgctgggacctggggagtcgggttcagaaggagccggcacattctacattgcccgcttcttggctgccgtcgcccacagccccctggctgcacagctgaagcccatgactcccttcaagcggacccggatcaccggaaaccctgtggtgaccaatcggatagaggaaggagagagacctgaccgcgctaagggctatgacctggagttaagtatggcgctggggacatactacccacctccccgcctcaggcagctgctccccatgcttcttcagggaacaagtatcttcactgcccctaaggagatcgcagagatcaaggcccagctggagacagccctgaagtggaggaactatgaggtgaagctgcggctgctgctgcacctggaggaactgcagatggagcatgatatccggcactatgacctggagtcggtgcccatgacctgggaccctgtggaccagaaccccaggctgctcacgctggaggttcctggagtgactgagagccgcccctcagtgctacggggcgaccacctgtttgcccttttgtcctcggagacacaccaggaggaccccatcacatataagggctttgtgcacaaggtggaattggaccgtgtcaagctgagcttttccatgagcctcctgagccgctttgtggatgggctgaccttcaaggtgaactttaccttcaaccgccagccgctgcgagtccagcaccgtgccctggagctgacagggcgctggctgctgtggcccatgctctttcctgtggcacctcgggacgtcccgctgctgccctcagatgtgaaactcaagctgtacgaccggagtctggagtcaaacccagagcagctgcaggccatgaggcacattgttacgggcaccacccgtccagccccctacatcatctttgggcctccaggcaccggcaagactgtcacgttagtggaggcaattaagcaggtggtgaagcacttgcccaaagcccacatcttggcctgcgctccatccaactcaggggctgacctactctgtcaaaggctccgggtccaccttcctagctccatctaccgcctcctggcccccagcagggacatccgcatggtacctgaggacatcaagccctgctgcaactgggacgcaaagaagggggagtatgtatttcccgccaagaagaagctgcaggaataccgggtcttaattaccaccctcatcactgccggcaggttggtctcggcccagtttcccattgatcacttcacacacatcttcatcgatgaggctggccactgcatggagcctgagagtctggtagctatagcagggctgatggaagtaaaggaaacaggtgatccaggagggcagctggtgctggcaggagaccctcggcagctggggcctgtgctgcgttccccactgacccagaagcatggactgggatactcactgctggagcggctgctcacctacaactccctgtacaagaagggccctgatggctatgacccccagttcataaccaagctgctccgcaactacaggtctcatcccaccatcctggacattcctaaccagctctattatgaaggggagctgcaggcctgtgctgatgtcgtggatcgagaacgcttctgccgctgggcgggcctacctcgacagggctttcccatcatctttcacggcgtaatgggcaaagatgagcgtgaaggcaacagcccatccttcttcaaccctgaagaggctccctcttgcattaggttaatggcacgagagaaaggcacctgtcccctccttccaggtggagaaaatccgttactgcatcaccaaacttgacagggagcttcgaggactggatgacatcaaggacttgaaggtgacatgctgttccacagtcactccctgccttccgtgtgcccccacttgcccacttccagagacttcctcaagcttccactccagcccacgtccccgtcccacccctgctgccttgaatagagctcgagctctccctgagcctctcactcctggagattccaacttaagggtctgggatgggatcaggaagcctgcatgtttaacaaacacctcctgtcattcttagactgaggcaggtttgaggcctctgccctaaggataaagtccaaattccgtggcctgtcatgtgatgctgccacccccacccccagtagcctctctcttaaggttctggtctcaacactggctgcagataacaatcacctggagagcttttaataccccgcccccatgccagggccccacccaccagctcatacagctatcggggcagagccagggcactggtagtttttacagcttctcaggtgattctaatatgcagccagggttgccgggttagggcccagggttgtatattcttaacagatacttagtgattgttttcaggaaagtttgaaagtcactgctctgagttcccgtgttctttgcaatgctgttttctttccttagaacactttgcaggccccagccctcagcaggattcaaccttcatgtttcagcttccacagcctacctcccatcccctttccctgggccgtgtcgcagcactggttcactcactgatctacaattgcccagtgacctctctgtaccctccttggaaggcaagctccctggggtagggcacccctttgacacccctggctggtctcaggccctgcctctttccccactaggtgggttcagtagaagaattccaaggccaagaacgaagcgtcatcctcatctccaccgtgcgaagcagccagagctttgtgcagctggatctggactttaatctgggtttccttaagaaccccaagaggttcaatgtagctgtgacccgggccaaggccctgctcatcatcgtggggaacccccttctcctgggccatgaccctgactggaaagtattcctggagttctgtaaagaaaacggagggtataccgggtgtcccttccctgccaaactggacctgcaacagggacagaatttactgcaaggtctgagcaagctcagcccctctacctcagggccccacagccatgactacctcccccaggagcgggagggtgaagggggcctgtctctgcaagtggagccagagtggaggaatgagctctgaagacacagcacccagccttctcgcaccagccaagccttaactgcctgcctgaccctgaaccagaacccagctgaactgcccctccaagggacaggaaggctgggggagggagtttacaacccaagccattccaccccctcccctgctggggagaatgacacatcaagctgctaacaattgggggaaggggaaggaagaaaactctgaaaacaaaatcttgttctatgcaaaaaaaaaaaacacacccgagagcgactccaagtagacggggaatgcgacacaacaccagcggttatctgcacagtgcggcccaaggggccacaataacgcatggtccccagaggacccaaagacgtccgtgtgctccaccagggggaaagactacctgccgggaactccctaataggaagaagacgataaacaatttcgaatagagccagggttaacccggagtatgan

SEQ ID NO: 287235 - DNA, 2444 bp, Homo sapiens
  misc_feature (2444)..(2444): n is a, c, g, or t
aggttagaaggccagtctcagtccttgtcccttaaaggtctggggaacctgggggctgggccctccagcgtccatccctgggacagaagcttgcttgtgttcacaccccataggttcctggagtgactgagagccgcccctcagtgctacggggcgaccacctgtttgcccttttgtcctcggagacacaccaggaggaccccatcacatataagggctttgtgcacaaggtggaattggaccgtgtcaagctgagcttttccatgagcctcctgagccgctttgtggatgggctgaccttcaaggtgaactttaccttcaaccgccagccgctgcgagtccagcaccgtgccctggagctgacagggcgctggctgctgtggcccatgctctttcctgtggcacctcgggacgtcccgctgctgccctcagatgtgaaactcaagctgtacgaccggagtctggagtcaaacccagagcagctgcaggccatgaggcacattgttacgggcaccacccgtccagccccctacatcatctttgggcctccaggcaccggcaagactgtcacgttagtggaggcaattaagcaggtggtgaagcacttgcccaaagcccacatcttggcctgcgctccatccaactcaggggctgacctactctgtcaaaggctccgggtccaccttcctagctccatctaccgcctcctggcccccagcagggacatccgcatggtacctgaggacatcaagccctgctgcaactgggacgcaaagaagggggagtatgtatttcccgccaagaagaagctgcaggaataccgggtcttaattaccaccctcatcactgccggcaggttggtctcggcccagtttcccattgatcacttcacacacatcttcatcgatgaggctggccactgcatggagcctgagagtctggtagctatagcagggctgatggaagtaaaggaaacaggtgatccaggagggcagctggtgctggcaggagaccctcggcagctggggcctgtgctgcgttccccactgacccagaagcatggactgggatactcactgctggagcggctgctcacctacaactccctgtacaagaagggccctgatggctatgacccccagttcataaccaagctgctccgcaactacaggtctcatcccaccatcctggacattcctaaccagctctattatgaaggggagctgcaggcctgtgctgatgtcgtggatcgagaacgcttctgccgctgggcgggcctacctcgacagggctttcccatcatctttcacggcgtaatgggcaaagatgagcgtgaaggcaacagcccatccttcttcaaccctgaagaggctgccacagtgacttcctacctgaagctgctcctggccccctcctccaagaagggcaaagctcgcctgagccctcgaagtgtgggcgtcatctccccgtaccggaaacaggtggagaaaatccgttactgcatcaccaaacttgacagggagcttcgaggactggatgacatcaaggacttgaaggtgggttcagtagaagaattccaaggccaagaacgaagcgtcatcctcatctccaccgtgcgaagcagccagagctttgtgcagctggatctggactttaatctgggtttccttaagaaccccaagaggttcaatgtagctgtgacccgggccaaggccctgctcatcatcgtggggaacccccttctcctgggccatgaccctgactggaaagtattcctggagttctgtaaagaaaacggagggtataccgggtgtcccttccctgccaaactggacctgcaacagggacagaatttactgcaaggtctgagcaagctcagcccctctacctcagggccccacagccatgactacctcccccaggagcgggagggtgaagggggcctgtctctgcaagtggagccagagtggaggaatgagctctgaagacacagcacccagccttctcgcaccagccaagccttaactgcctgcctgaccctgaaccagaacccagctgaactgcccctccaagggacaggaaggctgggggagggagtttacaacccaagccattccaccccctcccctgctggggagaatgacacatcaagctgctaacaattgggggaaggggaaggaagaaaactctgaaaacaaaatcttgttctatgcaaaaaaaaaaaacacacccgagagcgactccaagtagacggggaatgcgacacaacaccagcggttatctgcacagtgcggcccaaggggccacaataacgcatggtccccagaggacccaaagacgtccgtgtgctccaccagggggaaagactacctgccgggaactccctaataggaagaagacgataaacaatttcgaatagagccagggttaacccggagtatgan

SEQ ID NO: 287236 - DNA, 4039 bp, Homo sapiens
  misc_feature (4039)..(4039): n is a, c, g, or t
ctgccttttgctctgttgcttttcactgagtcccgaggctctggagggtgggcgtgagggtagccctggctgaggctcggaggtcctcccgggctgttcagagggccccaagcggtagccacgttctgatactggctagaagccagggagggagcttggggtaaggggagggccctgagggaggggtcagacgctttaggaaagagttaatgcgaagagggggaggggataggacgaagaaaccgaagggaaagctcagacttccagctgcagcggcgactttcagtttcatttccacggaccctcctgcctgggccgcagccgccgccgcgatgcccagtaagttcagctgccggcagctccgggaggcgggccagtgtttcgagagtttcctggtcgttcggggactggacatggagacagatcgcgagcggctgcggaccatttataaccgcgacttcaagatcagctttgggacccccgcccctggcttctcctccatgctgtatggaatgaagattgcaaatctggcctacgtcaccaagactcgggtcaggttcttcagactcgaccgctgggccgacgtgcggttcccagaaaagaggagaatgaagctggggtcagatatcagcaaacaccacaagtcactgctagccaagatcttttatgacagggctgagtatcttcatgggaaacatggtgtggatgtggaagtccaggggccccatgaagcccgagatgggcagctccttatccgcctggatttgaaccgcaaagaggtgctgaccctgaggcttcggaatggcggaacccagtctgttaccctcactcacctcttcccactctgccggacaccccagtttgctttctacaatgaagaccaggagttgccctgtccactgggccccggtgaatgctatgaactccatgtccattgtaagaccagctttgtgggctacttcccagccacagtgctctgggagctgctgggacctggggagtcgggttcagaaggagccggcacattctacattgcccgcttcttggctgccgtcgcccacagccccctggctgcacagctgaagcccatgactcccttcaagcggacccggatcaccggaaaccctgtggtgaccaatcggatagaggaaggagagagacctgaccgcgctaagggctatgacctggagttaagtatggcgctggggacatactacccacctccccgcctcaggcagctgctccccatgcttcttcagggaacaagtatcttcactgcccctaaggagatcgcagagatcaaggcccagctggagacagccctgaagtggaggaactatgaggtgaagctgcggctgctgctgcacctggaggaactgcagatggagcatgatatccggcactatgacctggagtcggtgcccatgacctgggaccctgtggaccagaaccccaggctgctcacgctggaggttcctggagtgactgagagccgcccctcagtgctacggggcgaccacctgtttgcccttttgtcctcggagacacaccaggaggaccccatcacatataagggctttgtgcacaaggtggaattggaccgtgtcaagctgagcttttccatgagcctcctgagccgctttgtggatgggctgaccttcaaggtgaactttaccttcaaccgccagccgctgcgagtccagcaccgtgccctggagctgacagggcgctggctgctgtggcccatgctctttcctgtggcacctcgggacgtcccgctgctgccctcagatgtgaaactcaagctgtacgaccggagtctggagtcaaacccagagcagctgcaggccatgaggcacattgttacgggcaccacccgtccagccccctacatcatctttgggcctccaggcaccggcaagactgtcacgttagtggaggcaattaagcaggtggtgaagcacttgcccaaagcccacatcttggcctgcgctccatccaactcaggggctgacctactctgtcaaaggctccgggtccaccttcctagctccatctaccgcctcctggcccccagcagggacatccgcatggtacctgaggacatcaagccctgctgcaactgggacgcaaagaagggggagtatgtatttcccgccaagaagaagctgcaggaataccgggtcttaattaccaccctcatcactgccggcaggttggtctcggcccagtttcccattgatcacttcacacacatcttcatcgatgaggctggccactgcatggagcctgagagtctggtagctatagcagggctgatggaagtaaaggaaacaggtgatccaggagggcagctggtgctggcaggagaccctcggcagctggggcctgtgctgcgttccccactgacccagaagcatggactgggatactcactgctggagcggctgctcacctacaactccctgtacaagaagggccctgatggctatgacccccagttcataaccaagctgctccgcaactacaggtctcatcccaccatcctggacattcctaaccagctctattatgaaggggagctgcaggcctgtgctgatgtcgtggatcgagaacgcttctgccgctgggcgggcctacctcgacagggctttcccatcatctttcacggcgtaatgggcaaagatgagcgtgaaggcaacagcccatccttcttcaaccctgaagaggctgccacagtgacttcctacctgaagctgctcctggccccctcctccaagaagggcaaagctcgcctgagccctcgaagtgtgggcgtcatctccccgtaccggaaacaggtggagaaaatccgttactgcatcaccaaacttgacagggagcttcgaggactggatgacatcaaggacttgaaggtgggttcagtagaagaattccaaggccaagaacgaagcgtcatcctcatctccaccgtgcgaagcagccagagctttgtgcagctggatctggactttaatctgggtttccttaagaaccccaagaggttcaatgtagctgtgacccgggccaaggccctgctcatcatcgtggggaacccccttctcctgggccatgaccctgactggaaagtgtgagcattcccaccccattctccctcttagtggccacagcccctgcctagggcaggtggatcttttttaagcgcttgcttatcgctcagttaatcctcagatgtgtccattttcacagcatcactattgtatttataagttaaatgacatccagaggttgagcaagtacagctcagatgggacaggaccgtggcttagcctccagtctctgctggcactcctctgtaccccacagattcctggagttctgtaaagaaaacggagggtataccgggtgtcccttccctgccaaactggacctgcaacagggacagaatttactgcaaggtctgagcaagctcagcccctctacctcagggccccacagccatgactacctcccccaggagcgggagggtgaagggggcctgtctctgcaagtggagccagagtggaggaatgagctctgaagacacagcacccagccttctcgcaccagccaagccttaactgcctgcctgaccctgaaccagaacccagctgaactgcccctccaagggacaggaaggctgggggagggagtttacaacccaagccattccaccccctcccctgctggggagaatgacacatcaagctgctaacaattgggggaaggggaaggaagaaaactctgaaaacaaaatcttgttctatgcaaaaaaaaaaaacacacccgagagcgactccaagtagacggggaatgcgacacaacaccagcggttatctgcacagtgcggcccaaggggccacaataacgcatggtccccagaggacccaaagacgtccgtgtgctccaccagggggaaagactacctgccgggaactccctaataggaagaagacgataaacaatttcgaatagagccagggttaacccggagtatgan

SEQ ID NO: 287237 - DNA, 4341 bp, Homo sapiens
  misc_feature (4341)..(4341): n is a, c, g, or t
ctgccttttgctctgttgcttttcactgagtcccgaggctctggagggtgggcgtgagggtagccctggctgaggctcggaggtcctcccgggctgttcagagggccccaagcggtagccacgttctgatactggctagaagccagggagggagcttggggtaaggggagggccctgagggaggggtcagacgctttaggaaagagttaatgcgaagagggggaggggataggacgaagaaaccgaagggaaagctcagacttccagctgcagcggcgactttcagtttcatttccacggaccctcctgcctgggccgcagccgccgccgcgatgcccagtaagttcagctgccggcagctccgggaggcgggccagtgtttcgagagtttcctggtcgttcggggactggacatggagacagatcgcgagcggctgcggaccatttataaccgcgacttcaagatcagctttgggacccccgcccctggcttctcctccatgctgtatggaatgaagattgcaaatctggcctacgtcaccaagactcgggtcaggttcttcagactcgaccgctgggccgacgtgcggttcccagaaaagaggagaatgaagctggggtcagatatcagcaaacaccacaagtcactgctagccaagatcttttatgacagggctgagtatcttcatgggaaacatggtgtggatgtggaagtccaggggccccatgaagcccgagatgggcagctccttatccgcctggatttgaaccgcaaagaggtgctgaccctgaggcttcggaatggcggaacccagtctgttaccctcactcacctcttcccactctgccggacaccccagtttgctttctacaatgaagaccaggagttgccctgtccactgggccccggtgaatgctatgaactccatgtccattgtaagaccagctttgtgggctacttcccagccacagtgctctgggagctgctgggacctggggagtcgggttcagaaggagccggcacattctacattgcccgcttcttggctgccgtcgcccacagccccctggctgcacagctgaagcccatgactcccttcaagcggacccggatcaccggaaaccctgtggtgaccaatcggatagaggaaggagagagacctgaccgcgctaagggctatgacctggagttaagtatggcgctggggacatactacccacctccccgcctcaggcagctgctccccatgcttcttcagggaacaagtatcttcactgcccctaaggagatcgcagagatcaaggcccagctggagacagccctgaagtggaggaactatgaggtgaagctgcggctgctgctgcacctggaggaactgcagatggagcatgatatccggcactatgacctggagtcggtgcccatgacctgggaccctgtggaccagaaccccaggctgctcacgctggaggttcctggagtgactgagagccgcccctcagtgctacggggcgaccacctgtttgcccttttgtcctcggagacacaccaggaggaccccatcacatataagggctttgtgcacaaggtggaattggaccgtgtcaagctgagcttttccatgagcctcctgagccgctttgtggatgggctgaccttcaaggtgaactttaccttcaaccgccagccgctgcgagtccagcaccgtgccctggagctgacagggcgctggctgctgtggcccatgctctttcctgtggcacctcgggacgtcccgctgctgccctcagatgtgaaactcaagctgtacgaccggagtctggagtcaaacccagagcagctgcaggccatgaggcacattgttacgggcaccacccgtccagccccctacatcatctttgggcctccaggcaccggcaagactgtcacgttagtggaggcaattaagcaggtggtgaagcacttgcccaaagcccacatcttggcctgcgctccatccaactcaggggctgacctactctgtcaaaggctccgggtccaccttcctagctccatctaccgcctcctggcccccagcagggacatccgcatggtacctgaggacatcaagccctgctgcaactgggacgcaaagaagggggagtatgtatttcccgccaagaagaagctgcaggaataccgggtcttaattaccaccctcatcactgccggcaggttggtctcggcccagtttcccattgatcacttcacacacatcttcatcgatgaggctggccactgcatggagcctgagagtctggtagctatagcagggctgatggaagtaaaggaaacaggtgatccaggagggcagctggtgctggcaggagaccctcggcagctggggcctgtgctgcgttccccactgacccagaagcatggactgggatactcactgctggagcggctgctcacctacaactccctgtacaagaagggccctgatggctatgacccccagttcataaccaagctgctccgcaactacaggtctcatcccaccatcctggacattcctaaccagctctattatgaaggggagctgcaggcctgtgctgatgtcgtggatcgagaacgcttctgccgctgggcgggcctacctcgacagggctttcccatcatctttcacggcgtaatgggcaaagatgagcgtgaaggcaacagcccatccttcttcaaccctgaagaggctgccacagtgacttcctacctgaagctgctcctggccccctcctccaagaagggcaaagctcgcctgagccctcgaagtgtgggcgtcatctccccgtaccggaaacagctccctggcctcctgccaggctccctcttgcattaggttaatggcacgagagaaaggcacctgtcccctccttccaggtggagaaaatccgttactgcatcaccaaacttgacagggagcttcgaggactggatgacatcaaggacttgaagcactttgcaggccccagccctcagcaggattcaaccttcatgtttcagcttccacagcctacctcccatcccctttccctgggccgtgtcgcagcactggttcactcactgatctacaattgcccagtgacctctctgtaccctccttggaaggcaagctccctggggtagggcacccctttgacacccctggctggtctcaggccctgcctctttccccactaggtgggttcagtagaagaattccaaggccaagaacgaagcgtcatcctcatctccaccgtgcgaagcagccagagctttgtgcagctggatctggactttaatctgggtttccttaagaaccccaagaggttcaatgtagctgtgacccgggccaaggccctgctcatcatcgtggggaacccccttctcctgggccatgaccctgactggaaagtgtgagcattcccaccccattctccctcttagtggccacagcccctgcctagggcaggtggatcttttttaagcgcttgcttatcgctcagttaatcctcagatgtgtccattttcacagcatcactattgtatttataagttaaatgacatccagaggttgagcaagtacagctcagatgggacaggaccgtggcttagcctccagtctctgctggcactcctctgtaccccacagattcctggagttctgtaaagaaaacggagggtataccgggtgtcccttccctgccaaactggacctgcaacagggacagaatttactgcaaggtctgagcaagctcagcccctctacctcagggccccacagccatgactacctcccccaggagcgggagggtgaagggggcctgtctctgcaagtggagccagagtggaggaatgagctctgaagacacagcacccagccttctcgcaccagccaagccttaactgcctgcctgaccctgaaccagaacccagctgaactgcccctccaagggacaggaaggctgggggagggagtttacaacccaagccattccaccccctcccctgctggggagaatgacacatcaagctgctaacaattgggggaaggggaaggaagaaaactctgaaaacaaaatcttgttctatgcaaaaaaaaaaaacacacccgagagcgactccaagtagacggggaatgcgacacaacaccagcggttatctgcacagtgcggcccaaggggccacaataacgcatggtccccagaggacccaaagacgtccgtgtgctccaccagggggaaagactacctgccgggaactccctaataggaagaagacgataaacaatttcgaatagagccagggttaacccggagtatgan

SEQ ID NO: 287238 - DNA, 3773 bp, Homo sapiens
  misc_feature (3773)..(3773): n is a, c, g, or t
ctgccttttgctctgttgcttttcactgagtcccgaggctctggagggtgggcgtgagggtagccctggctgaggctcggaggtcctcccgggctgttcagagggccccaagcggtagccacgttctgatactggctagaagccagggagggagcttggggtaaggggagggccctgagggaggggtcagacgctttaggaaagagttaatgcgaagagggggaggggataggacgaagaaaccgaagggaaagctcagacttccagctgcagcggcgactttcagtttcatttccacggaccctcctgcctgggccgcagccgccgccgcgatgcccagtaagttcagctgccggcagctccgggaggcgggccagtgtttcgagagtttcctggtcgttcggggactggacatggagacagatcgcgagcggctgcggaccatttataaccgcgacttcaagatcagctttgggacccccgcccctggcttctcctccatgctgtatggaatgaagattgcaaatctggcctacgtcaccaagactcgggtcaggttcttcagactcgaccgctgggccgacgtgcggttcccagaaaagaggagaatgaagctggggtcagatatcagcaaacaccacaagtcactgctagccaagatcttttatgacagggctgagtatcttcatgggaaacatggtgtggatgtggaagtccaggggccccatgaagcccgagatgggcagctccttatccgcctggatttgaaccgcaaagaggtgctgaccctgaggcttcggaatggcggaacccagtctgttaccctcactcacctcttcccactctgccggacaccccagtttgctttctacaatgaagaccaggagttgccctgtccactgggccccggtgaatgctatgaactccatgtccattgtaagaccagctttgtgggctacttcccagccacagtgctctgggagctgctgggacctggggagtcgggttcagaaggagccggcacattctacattgcccgcttcttggctgccgtcgcccacagccccctggctgcacagctgaagcccatgactcccttcaagcggacccggatcaccggaaaccctgtggtgaccaatcggatagaggaaggagagagacctgaccgcgctaagggctatgacctggagttaagtatggcgctggggacatactacccacctccccgcctcaggcagctgctccccatgcttcttcagggaacaagtatcttcactgcccctaaggagatcgcagagatcaaggcccagctggagacagccctgaagtggaggaactatgaggtgaagctgcggctgctgctgcacctggaggaactgcagatggagcatgatatccggcactatgacctggagtcggtgcccatgacctgggaccctgtggaccagaaccccaggctgctcacgctggaggttcctggagtgactgagagccgcccctcagtgctacggggcgaccacctgtttgcccttttgtcctcggagacacaccaggaggaccccatcacatataagggctttgtgcacaaggtggaattggaccgtgtcaagctgagcttttccatgagcctcctgagccgctttgtggatgggctgaccttcaaggtgaactttaccttcaaccgccagccgctgcgagtccagcaccgtgccctggagctgacagggcgctggctgctgtggcccatgctctttcctgtggcacctcgggacgtcccgctgctgccctcagatgtgaaactcaagctgtacgaccggagtctggagtcaaacccagagcagctgcaggccatgaggcacattgttacgggcaccacccgtccagccccctacatcatctttgggcctccaggcaccggcaagactgtcacgttagtggaggcaattaagcaggtggtgaagcacttgcccaaagcccacatcttggcctgcgctccatccaactcaggggctgacctactctgtcaaaggctccgggtccaccttcctagctccatctaccgcctcctggcccccagcagggacatccgcatggtacctgaggacatcaagccctgctgcaactgggacgcaaagaagggggagtatgtatttcccgccaagaagaagctgcaggaataccgggtcttaattaccaccctcatcactgccggcaggttggtctcggcccagtttcccattgatcacttcacacacatcttcatcgatgaggctggccactgcatggagcctgagagtctggtagctatagcagggctgatggaagtaaaggaaacaggtgatccaggagggcagctggtgctggcaggagaccctcggcagctggggcctgtgctgcgttccccactgacccagaagcatggactgggatactcactgctggagcggctgctcacctacaactccctgtacaagaagggccctgatggctatgacccccagttcataaccaagctgctccgcaactacaggtctcatcccaccatcctggacattcctaaccagctctattatgaaggggagctgcaggcctgtgctgatgtcgtggatcgagaacgcttctgccgctgggcgggcctacctcgacagggctttcccatcatctttcacggcgtaatgggcaaagatgagcgtgaaggcaacagcccatccttcttcaaccctgaagaggctgccacagtgacttcctacctgaagctgctcctggccccctcctccaagaagggcaaagctcgcctgagccctcgaagtgtgggcgtcatctccccgtaccggaaacaggtggagaaaatccgttactgcatcaccaaacttgacagggagcttcgaggactggatgacatcaaggacttgaaggtgggttcagtagaagaattccaaggccaagaacgaagcgtcatcctcatctccaccgtgcgaagcagccagagctttgtgcagctggatctggactttaatctgggtttccttaagaaccccaagaggttcaatgtagctgtgacccgggccaaggccctgctcatcatcgtggggaacccccttctcctgggccatgaccctgactggaaagtattcctggagttctgtaaagaaaacggagggtataccgggtgtcccttccctgccaaactggacctgcaacagggacagaatttactgcaagggccccacagccatgactacctcccccaggagcgggagggtgaagggggcctgtctctgcaagtggagccagagtggaggaatgagctctgaagacacagcacccagccttctcgcaccagccaagccttaactgcctgcctgaccctgaaccagaacccagctgaactgcccctccaagggacaggaaggctgggggagggagtttacaacccaagccattccaccccctcccctgctggggagaatgacacatcaagctgctaacaattgggggaaggggaaggaagaaaactctgaaaacaaaatcttgttctatgcaaaaaaaaaaaacacacccgagagcgactccaagtagacggggaatgcgacacaacaccagcggttatctgcacagtgcggcccaaggggccacaataacgcatggtccccagaggacccaaagacgtccgtgtgctccaccagggggaaagactacctgccgggaactccctaataggaagaagacgataaacaatttcgaatagagccagggttaacccggagtatgan

SEQ ID NO: 287239 - DNA, 3092 bp, Homo sapiens
ctgccttttgctctgttgcttttcactgagtcccgaggctctggagggtgggcgtgagggtagccctggctgaggctcggaggtcctcccgggctgttcagagggccccaagcggtagccacgttctgatactggctagaagccagggagggagcttggggtaaggggagggccctgagggaggggtcagacgctttaggaaagagttaatgcgaagagggggaggggataggacgaagaaaccgaagggaaagctcagacttccagctgcagcggcgactttcagtttcatttccacggaccctcctgcctgggccgcagccgccgccgcgatgcccagtaagttcagctgccggcagctccgggaggcgggccagtgtttcgagagtttcctggtcgttcggggactggacatggagacagatcgcgagcggctgcggaccatttataaccgcgacttcaagatcagctttgggacccccgcccctggcttctcctccatgctgtatggaatgaagattgcaaatctggcctacgtcaccaagactcgggtcaggttcttcagactcgaccgctgggccgacgtgcggttcccagaaaagaggagaatgaagctggggtcagatatcagcaaacaccacaagtcactgctagccaagatcttttatgacagggctgagtatcttcatgggaaacatggtgtggatgtggaagtccaggggccccatgaagcccgagatgggcagctccttatccgcctggatttgaaccgcaaagaggtgctgaccctgaggcttcggaatggcggaacccagtctgttaccctcactcacctcttcccactctgccggacaccccagtttgctttctacaatgaagaccaggagttgccctgtccactgggccccggtgaatgctatgaactccatgtccattgtaagaccagctttgtgggctacttcccagccacagtgctctgggagctgctgggacctggggagtcgggttcagaaggagccggcacattctacattgcccgcttcttggctgccgtcgcccacagccccctggctgcacagctgaagcccatgactcccttcaagcggacccggatcaccggaaaccctgtggtgaccaatcggatagaggaaggagagagacctgaccgcgctaagggctatgacctggagttaagtatggcgctggggacatactacccacctccccgcctcaggcagctgctccccatgcttcttcagggaacaagtatcttcactgcccctaaggagatcgcagagatcaaggcccagctggagacagccctgaagtggaggaactatgaggtgaagctgcggctgctgctgcacctggaggaactgcagatggagcatgatatccggcactatgacctggagtcggtgcccatgacctgggaccctgtggaccagaaccccaggctgctcacgctggaggttcctggagtgactgagagccgcccctcagtgctacggggcgaccacctgtttgcccttttgtcctcggagacacaccaggaggaccccatcacatataagggctttgtgcacaaggtggaattggaccgtgtcaagctgagcttttccatgagcctcctgagccgctttgtggatgggctgaccttcaaggtgaactttaccttcaaccgccagccgctgcgagtccagcaccgtgccctggagctgacagggcgctggctgctgtggcccatgctctttcctgtggcacctcgggacgtcccgctgctgccctcagatgtgaaactcaagctgtacgaccggagtctggagtcaaacccagagcagctgcaggccatgaggcacattgttacgggcaccacccgtccagccccctacatcatctttgggcctccaggcaccggcaagactgtcacgttagtggaggcaattaagcaggtggtgaagcacttgcccaaagcccacatcttggcctgcgctccatccaactcaggggctgacctactctgtcaaaggctccgggtccaccttcctagctccatctaccgcctcctggcccccagcagggacatccgcatggtacctgaggacatcaagccctgctgcaactgggacgcaaagaagggggagtatgtatttcccgccaagaagaagctgcaggaataccgggtcttaattaccaccctcatcactgccggcaggttggtctcggcccagtttcccattgatcacttcacacacatcttcatcgatgaggctggccactgcatggagcctgagagtctggtagctatagcagggctgatggaagtaaaggaaacaggtgatccaggagggcagctggtgctggcaggagaccctcggcagctggggcctgtgctgcgttccccactgacccagaagcatggactgggatactcactgctggagcggctgctcacctacaactccctgtacaagaagggccctgatggctatgacccccagttcataaccaagctgctccgcaactacaggtctcatcccaccatcctggacattcctaaccagctctattatgaaggggagctgcaggcctgtgctgatgtcgtggatcgagaacgcttctgccgctgggcgggcctacctcgacagggctttcccatcatctttcacggcgtaatgggcaaagatgagcgtgaaggcaacagcccatccttcttcaaccctgaagaggctgccacagtgacttcctacctgaagctgctcctggccccctcctccaagaagggcaaagctcgcctgagccctcgaagtgtgggcgtcatctccccgtaccggaaacagctccctggcctcctgccaggctccctcttgcattaggttaatggcacgagagaaaggcacctgtcccctccttccaggtggagaaaatccgttactgcatcaccaaacttgacagggagcttcgaggactggatgacatcaaggacttgaaggtgacatgctgttccacagtcactccctgccttccgtgtgcccccacttgcccacttccagagacttcctcaagcacgtgagcagcatggtaccgagctg

SEQ ID NO: 287240 - DNA, 1304 bp, Homo sapiens
  misc_feature (1304)..(1304): n is a, c, g, or t
ggagtgtcctgctatccagggagccagcggggtctcatcccaccatcctggacattcctaaccagctctattatgaaggggagctgcaggcctgtgctgatgtcgtggatcgagaacgcttctgccgctgggcgggcctacctcgacagggctttcccatcatctttcacggcgtaatgggcaaagatgagcgtgaaggcaacagcccatccttcttcaaccctgaagaggctgccacagtgacttcctacctgaagctgctcctggccccctcctccaagaagggcaaagctcgcctgagccctcgaagtgtgggcgtcatctccccgtaccggaaacaggtggagaaaatccgttactgcatcaccaaacttgacagggagcttcgaggactggatgacatcaaggacttgaaggtgggttcagtagaagaattccaaggccaagaacgaagcgtcatcctcatctccaccgtgcgaagcagccagagctttgtgcagctggatctggactttaatctgggtttccttaagaaccccaagaggttcaatgtagctgtgacccgggccaaggccctgctcatcatcgtggggaacccccttctcctgggccatgaccctgactggaaagtattcctggagttctgtaaagaaaacggagggtataccgggtgtcccttccctgccaaactggacctgcaacagggacagaatttactgcaaggtctgagcaagctcagcccctctacctcagggccccacagccatgactacctcccccaggagcgggagggtgaagggggcctgtctctgcaagtggagccagagtggaggaatgagctctgaagacacagcacccagccttctcgcaccagccaagccttaactgcctgcctgaccctgaaccagaacccagctgaactgcccctccaagggacaggaaggctgggggagggagtttacaacccaagccattccaccccctcccctgctggggagaatgacacatcaagctgctaacaattgggggaaggggaaggaagaaaactctgaaaacaaaatcttgttctatgcaaaaaaaaaaaacacacccgagagcgactccaagtagacggggaatgcgacacaacaccagcggttatctgcacagtgcggcccaaggggccacaataacgcatggtccccagaggacccaaagacgtccgtgtgctccaccagggggaaagactacctgccgggaactccctaataggaagaagacgataaacaatttcgaatagagccagggttaacccggagtatgan

SEQ ID NO: 287241 - DNA, 1131 bp, Homo sapiens
  misc_feature (1131)..(1131): n is a, c, g, or t
ttcgagtcgcgtcttgagtggttcttcttagaatttgaggccagctcagagatcaactcagttcagttcaaagctactacctcccatcccctttccctgggccgtgtcgcagcactggttcactcactgatctacaattgcccagtgacctctctgtaccctccttggaaggcaagctccctggggtagggcacccctttgacacccctggctggtctcaggccctgcctctttccccactaggtgggttcagtagaagaattccaaggccaagaacgaagcgtcatcctcatctccaccgtgcgaagcagccagagctttgtgcagctggatctggactttaatctgggtttccttaagaaccccaagaggttcaatgtagctgtgacccgggccaaggccctgctcatcatcgtggggaacccccttctcctgggccatgaccctgactggaaagtattcctggagttctgtaaagaaaacggagggtataccgggtgtcccttccctgccaaactggacctgcaacagggacagaatttactgcaaggtctgagcaagctcagcccctctacctcagggccccacagccatgactacctcccccaggagcgggagggtgaagggggcctgtctctgcaagtggagccagagtggaggaatgagctctgaagacacagcacccagccttctcgcaccagccaagccttaactgcctgcctgaccctgaaccagaacccagctgaactgcccctccaagggacaggaaggctgggggagggagtttacaacccaagccattccaccccctcccctgctggggagaatgacacatcaagctgctaacaattgggggaaggggaaggaagaaaactctgaaaacaaaatcttgttctatgcaaaaaaaaaaaacacacccgagagcgactccaagtagacggggaatgcgacacaacaccagcggttatctgcacagtgcggcccaaggggccacaataacgcatggtccccagaggacccaaagacgtccgtgtgctccaccagggggaaagactacctgccgggaactccctaataggaagaagacgataaacaatttcgaatagagccagggttaacccggagtatgan

SEQ ID NO: 287242 - DNA, 2309 bp, Homo sapiens
  misc_feature (2309)..(2309): n is a, c, g, or t
ctgccttttgctctgttgcttttcactgagtcccgaggctctggagggtgggcgtgagggtagccctggctgaggctcggaggtcctcccgggctgttcagagggccccaagcggtagccacgttctgatactggctagaagccagggagggagcttggggtaaggggagggccctgagggaggggtcagacgctttaggaaagagttaatgcgaagagggggaggggataggacgaagaaaccgaagggaaagctcagacttccagctgcagcggcgactttcagtttcatttccacggaccctcctgcctgggccgcagccgccgccgcgatgcccagtaagttcagctgccggcagctccgggaggcgggccagtgtttcgagagtttcctggtcgttcggggactggacatggagacagatcgcgagcggctgcggaccatttataaccgcgacttcaagatcagctttgggacccccgcccctggcttctcctccatgctgtatggaatgaagattgcaaatctggcctacgtcaccaagactcgggtcaggttcttcagactcgaccgctgggccgacgtgcggttcccagaaaagaggagaatgaagctggggtcagatatcagcaaacaccacaagtcactgctagccaagatcttttatgacagggctgagtatcttcatgggaaacatggtgtggatgtggaagtccaggggccccatgaagcccgagatgggcagctccttatccgcctggatttgaaccgcaaagaggtgctgaccctgaggcttcggaatggcggaacccagtctgttaccctcactcacctcttcccactctgccggacaccccagtttgctttctacaatgaagaccaggagttgccctgtccactgggccccggtgaatgctatgaactccatgtccattgtaagaccagctttgtgggctacttcccagccacagtgctctgggagctgctgggacctggggagtcgggttcagaaggagccggcacattctacattgcccgcttcttggctgccgtcgcccacagccccctggctgcacagctgaagcccatgactcccttcaagcggacccggatcaccggaaaccctgtggtgaccaatcggatagaggaaggagagagacctgaccgcgctaagggctatgacctggagttaagtatggcgctggggacatactacccacctccccgcctcaggcagctgctccccatgcttcttcagggaacaagtatcttcactgcccctaaggagatcgcagagatcaaggcccagctggagacagccctgaagtggaggaactatgaggtgaagctgcggctgctgctgcacctggaggaactgcagatggagcatgatatccggcactatgacctggagtcggtgcccatgacctgggaccctgtggaccagaaccccaggctgctcacgctggaggttcctggagtgactgagagccgcccctcagtgctacggggcgaccacctgtttgcccttttgtcctcggagacacaccaggaggaccccatcacatataagggctttgtgcacaaggtggaattggaccgtgtcaagctgagcttttccatgagcctcctgagccgctttgtggatgggctgaccttcaaggtgaactttaccttcaaccgccagccgctgcgagtccagcaccgtgccctggagctgacagggcgctggctgctgtggcccatgctctttcctgtggcacctcgggacgtcccgctgctgccctcagatgtgaaactcaagctgtacgaccggagtctggagtcaaacccagagcagctgcaggccatgaggcacattgttacgggcaccacccgtccagccttaactgcctgcctgaccctgaaccagaacccagctgaactgcccctccaagggacaggaaggctgggggagggagtttacaacccaagccattccaccccctcccctgctggggagaatgacacatcaagctgctaacaattgggggaaggggaaggaagaaaactctgaaaacaaaatcttgttctatgcaaaaaaaaaaaacacacccgagagcgactccaagtagacggggaatgcgacacaacaccagcggttatctgcacagtgcggcccaaggggccacaataacgcatggtccccagaggacccaaagacgtccgtgtgctccaccagggggaaagactacctgccgggaactccctaataggaagaagacgataaacaatttcgaatagagccagggttaacccggagtatgan

SEQ ID NO: 287243 - DNA, 1753 bp, Homo sapiens
ctgccttttgctctgttgcttttcactgagtcccgaggctctggagggtgggcgtgagggtagccctggctgaggctcggaggtcctcccgggctgttcagagggccccaagcggtagccacgttctgatactggctagaagccagggagggagcttggggtaaggggagggccctgagggaggggtcagacgctttaggaaagagttaatgcgaagagggggaggggataggacgaagaaaccgaagggaaagctcagacttccagctgcagcggcgactttcagtttcatttccacggaccctcctgcctgggccgcagccgccgccgcgatgcccagtaagttcagctgccggcagctccgggaggcgggccagtgtttcgagagtttcctggtcgttcggggactggacatggagacagatcgcgagcggctgcggaccatttataaccgcgacttcaagatcagctttgggacccccgcccctggcttctcctccatgctgtatggaatgaagattgcaaatctggcctacgtcaccaagactcgggtcaggttcttcagactcgaccgctgggccgacgtgcggttcccagaaaagaggagaatgaagctggggtcagatatcagcaaacaccacaagtcactgctagccaagatcttttatgacagggctgagtatcttcatgggaaacatggtgtggatgtggaagtccaggggccccatgaagcccgagatgggcagctccttatccgcctggatttgaaccgcaaagaggtgctgaccctgaggcttcggaatggcggaacccagtctgttaccctcactcacctcttcccactctgccggacaccccagtttgctttctacaatgaagaccaggagttgccctgtccactgggccccggtgaatgctatgaactccatgtccattgtaagaccagctttgtgggctacttcccagccacagtgctctgggagctgctgggacctggggagtcgggttcagaaggagccggcacattctacattgcccgcttcttggctgccgtcgcccacagccccctggctgcacagctgaagcccatgactcccttcaagcggacccggatcaccggaaaccctgtggtgaccaatcggatagaggaaggagagagacctgaccgcgctaagggctatgacctggagttaagtatggcgctggggacatactacccacctccccgcctcaggcagctgctccccatgcttcttcagggaacaagtatcttcactgcccctaaggagatcgcagagatcaaggcccagctggagacagccctgaagtggaggaactatgaggtgaagctgcggctgctgctgcacctggaggaactgcagatggagcatgatatccggcactatgacctggagtcggtgcccatgacctgggaccctgtggaccagaaccccaggctgctcacgctggaggtcagggctcagattgagtgtgaggagggtgggctcaagccagccaagctagaggctgtgggcagaactattcctgacagcagggcagaacaagaggaaagttgaagtggttcccagggctccgcaagaagcagggtgggcatcctgtgcccaaagatgtgttggagcagggaaatggggaagatctgggttctagtccaggctttgctaccaccttgggtaagtccctggctttctctaagccttagttcccttatctgaaaagcacagagctggactgg

SEQ ID NO: 287244 - DNA, 1422 bp, Homo sapiens
  misc_feature (1422)..(1422): n is a, c, g, or t
tatcctcccgtgaaaataatataatctctaaacataactaaactccatccttgacgacacaccaatttcttttttcctacccccccccctcagcatataatactcgccctgttgtttttatcctccccctcatatctctacaccctatcaccgcatatttatttattattattttcttcctcagcctgatcggcgctgtatctatcaatctttcctcggcgaaggaggtgtgtgtgtcttccctcgcttttgtgtttcctccccctctccgcagcgaatagttggattcttcttttcttccctcagtagtatcgctcctctctcgcgctttttttgtcctcctcgccctcccttgtttgttgttttttataagaccggccccgccggcgtgcgtttatttagtctcctcctctctgagggggcgccccttccttcttattcacaaacgggtgtggcgtgctgcatggtgtgggtgcgcgccctccgggaggaaatgaatatggggcgggcgcccgcccctctctcttttttttttttttttttttttttttttttttttttttttttttttttttttttttttttttttttttttttttttttttttttttttttttttttttttttcacagcatcactattgtatttataagttaaatgacatccagaggttgagcaagtacagctcagatgggacaggaccgtggcttagcctccagtctctgctggcactcctctgtaccccacagattcctggagttctgtaaagaaaacggagggtataccgggtgtcccttccctgccaaactggacctgcaacagggacagaatttactgcaaggtctgagcaagctcagcccctctacctcagggccccacagccatgactacctcccccaggagcgggagggtgaagggggcctgtctctgcaagtggagccagagtggaggaatgagctctgaagacacagcacccagccttctcgcaccagccaagccttaactgcctgcctgaccctgaaccagaacccagctgaactgcccctccaagggacaggaaggctgggggagggagtttacaacccaagccattccaccccctcccctgctggggagaatgacacatcaagctgctaacaattgggggaaggggaaggaagaaaactctgaaaacaaaatcttgttctatgcaaaaaaaaaaaacacacccgagagcgactccaagtagacggggaatgcgacacaacaccagcggttatctgcacagtgcggcccaaggggccacaataacgcatggtccccagaggacccaaagacgtccgtgtgctccaccagggggaaagactacctgccgggaactccctaataggaagaagacgataaacaatttcgaatagagccagggttaacccggagtatgan

SEQ ID NO: 287245 - DNA, 628 bp, Homo sapiens
  misc_feature (628)..(628): n is a, c, g, or t
ctggaaagtattcctggagttctgtaaaggacagaatttactgcaaggtctgagcaagctcagcccctctacctcagggccccacagccatgactacctcccccaggagcgggagggtgaagggggcctgtctctgcaagtggagccagagtggaggaatgagctctgaagacacagcacccagccttctcgcaccagccaagccttaactgcctgcctgaccctgaaccagaacccagctgaactgcccctccaagggacaggaaggctgggggagggagtttacaacccaagccattccaccccctcccctgctggggagaatgacacatcaagctgctaacaattgggggaaggggaaggaagaaaactctgaaaacaaaatcttgttctatgcaaaaaaaaaaaacacacccgagagcgactccaagtagacggggaatgcgacacaacaccagcggttatctgcacagtgcggcccaaggggccacaataacgcatggtccccagaggacccaaagacgtccgtgtgctccaccagggggaaagactacctgccgggaactccctaataggaagaagacgataaacaatttcgaatagagccagggttaacccggagtatgan

SEQ ID NO: 287246 - DNA, 833 bp, Homo sapiens
ctgccttttgctctgttgcttttcactgagtcccgaggctctggagggtgggcgtgagggtagccctggctgaggctcggaggtcctcccgggctgttcagagggccccaagcggtagccacgttctgatactggctagaagccagggagggagcttggggtaaggggagggccctgagggaggggtcagacgctttaggaaagagttaatgcgaagagggggaggggataggacgaagaaaccgaagggaaagctcagacttccagctgcagcggcgactttcagtttcatttccacggaccctcctgcctgggccgcagccgccgccgcgatgcccagtaagttcagctgccggcagctccgggaggcgggccagtgtttcgagagtttcctggtcgttcggggactggacatggagacagatcgcgagcggctgcggaccatttataaccgcgacttcaagatcagctttgggacccccgcccctggcttctcctccatgctgtatggaatgaagattgcaaatctggcctacgtcaccaagactcgggtcaggttcttcagactcgaccgctgggccgacgtgcggttcccagaaaagaggagaatgaagctggggtcagatatcagcaaacaccacaagtcactgctagccaagatcttttatgacagggctgagtatcttcatgggaaacatggtgtggatgtggcaatcccctggcccccatttcaaccccccaatggccagctcccctaaccccccctggactctaccccctaacacgggccccctccctctgggcccttcgaatagccggacccccctcttgtt

SEQ ID NO: 287247 - DNA, 287 bp, Homo sapiens
ttttcacagcatcactattgtatttataagttaaatgacatccagaggttgagcaagtacagctcagatgggacaggaccgtggcttagcctccagtctctgctggcactcctctgtaccccacagattcctggagttctgtaaagaaaacggagggtataccgggtgtcccttccctgccaaactggacctgcaacagggacagaatttactgcaaggtctgagcaagctcagcccctctacctcaggtatggctgggccagggtggggacagtgccagaggaggt

SEQ ID NO: 287248 - DNA, 603 bp, Homo sapiens
cgacaccagacgaccacctgtctgggagtgcaatctcaccatcacaacgcctgaaggactgaaggccagccagagccgggcagggcagactgacggacggacgacggacatgcggatgtgtcccacgcctctgcgctgaggacagggacgccctgcgccagctgcagcccagtcggccgggccccggcgagtgcacgctggaccacggctccaagctcttctttcggcgcctctgaccctggcgctgcctttccccaccctcaccgaagcccctaataaatgaagctgctggccgggcgcggtggctcacgcctgtaatcccaacactttgggaggcccaggcgggcggatcacgaggtcaggagatcgagaccatcctggctaacatggtgaaaccccgtctctactaaaaataccaaaaattagccgggcgtggtggtggaagcctgtagtcccagctactccggaggctgaggcaggagaatggcgtgaacccgggaggcggagcttgcagtgagccgagatcgcaccactgcactccagcctgggcgacagaccgagactccgtctcaaaaaaaaaaaaaaataaaataaatgaagctg

SEQ ID NO: 287249 - DNA, 269 bp, Homo sapiens
cctccctgtgctgtccacctcctctgtgctgcctcctcagtgctcctcctctgggacagcacagaggaggccggcgaggtggagctctcagagagcggtgagggccagcggcaccttgcatttccctgggcctgctctgggccgggctggagaggggtgtgctgtgctgctgtggagcctgcttagggctgtagcaggaacagccacaggccgccccaggctcccggcgggtcaccacctcctctgtgctgtcggacagcacagaggag

SEQ ID NO: 287250 - DNA, 4352 bp, Homo sapiens
  misc_feature (2890)..(2890): n is a, c, g, or t
aattcgcgtactagccggacttggattttctggaaagatttcagttgaggaacgggaacaaagattatgatagctttccgaccaccaccaacttcaatttccttagctgccgtaatatcagctccctgagctgagccttgaggtccgagttcatctccagctccagaagagcctgggagatgccggactcgaactcgtccgcttctcgccattgggcttcacgatcttggcgctcgaactgaacatggcttctcctttgagaagagcttggctattgtggatgaggagctggaggggacactggcccagggagagctgaatgagatgaggacccgcctctatctcaacctgggcctcacctttgagagcctgcagcagacagccctgtgcaacgattacttcaggaagagcatcttccttgcggagcagaaccacctttacgaggacctattccgcgcccgctacaacctgggcaccatccactggcgcgcgggccagcactcccaggctatgcgctgcttggagggtgcccgggagtgtgcgcacaccatgaggaagcggttcatggagagcgagtgctgcgtggttattgcacaggtcctccaagacctgggagactttttggctgccaagcgagccctgaagaaggcgctacaggctgggctcccagaagcctgtgcagagggcagccatctgtcagaacctccagcatgtgctggcagtggtccggctgcagcaacagctggaagaggctgagggcagagaccctcagggtgccatggtcatctgtgagcagctaggggacctcttctccaaggcaggagactttcccagggcagctgaggcttaccagaagcagctgcgttttgctgagctgctggacagaccgggtgctgagcgggccatcatccacgtgtccctggccaccacactgggagacatgaaggaccaccatggggccgtgcgccactatgaggaggaactgaggctgcgcagcggcaacgtgctggaggaggccaagacctggctgaacattgcactgtcccgcgaggaggccggcgatgcctacgagctgctggccccgtgcttccagaaagcgctcagctgtgcccagcaggcccagcgtccccagctgcagaggcaggtcttgcagcatctccataccgtgcagctgaggctgcagccccaggaggcccctgagaccgaaaccagactgcgggagctcagtgtagctgaagatgaagatgaggaggaggaggcggaggaggcggcagccacagcggagagcgaagccctggaggccggcgaggtggagctctcagagagcgaggacgacaccgatggcctgaccccgcagctggaggaggacgaggagcttcagggccacctgggccggcggaaggggagcaagtggaaccggcgaaacgacatgggggagaccctgctgcaccgagcctgcatcgagggccagctgcgccgcgtccaggaccttgtgaggcagggccacccccttaaccctcgggactactgtggctggacacctctgcacgaggcctgcaactacgggcatctagaaattgtccgcttcctgctggaccacggggccgcagtggacgacccaggtggccagggctgcgaaggcatcacccccctccacgatgccctcaactgtggccacttcgaggtggctgagctgctgcttgaacggggggcgtccgtcaccctccgcactcgaaagggcctcagcccgctggagacgctgcagcagtgggtgaagctgtaccgcagggacctggacctggagacgcggcagaaggccagggccatggagatgctgctccaggcggctgcctcgggccaagatccccacagctcccaggccttccacaccccaagcagccttctgtttgaccccgagacctctcctcctttgagcccctgcccagaacccccctctaatagcactagactcccagaggcctctcaggcccatgtcagggtctccccagggcaggcggcaccagccatggccaggcctcggaggagcaggcatgggccagccagcagcagcagcagctcagaaggcgaggacagcgcaggccccgcacggccgtcccagaagaggcctcggtgctcggccacagcacaacgggtggcagcctggacgcctggccccgccagcaacagggaagcagccacagccagcaccagccgggcagcctaccaggcagccatccggggtgtgggcagtgctcagagccggctggggcctggcccaccgcggggccacagcaaagcccttgccccccaggcagcgctcatcccggaggaggagtgcctggctggggactggctggagctggacatgcccctgacccgcagccgccggccccgcccccggggcactggagacaaccgcaggcccagtagtacctctgggtcggacagtgaggagagcaggccccgtgcccgagccaagcaggtccgcctgacctgcatgcagagttgcagtgcgccagttaacgcagggcccagcagcctggcttcagaacctccagggagccccagcacccccagggtctcagagcccagtggggacagctctgcggcaggccagcccttgggtccggccccgccccctcccatccgggttcgagttcaagttcaggatcatctcttcctcatccctgtcccacacagcagtgacacccactctgtggcctggctggccgagcaggcggcccagcgctactaccagacctgcgggctgctgcccaggctcaccctacggaaagagggggccctgctggccccacaggacctcatccctgatgtgctgcagagcaatgacgaggtgttggctgaggtgacttcgtgggacctgcccccnttgactgaccgctaccgcagggcctgccagagcctggggcaaggggagcaccaacaggtgctgcaggccgtggagctccagggcttgggcctctcgttcagcgcctgctccctggccctggaccaggcccagcttacacccctgctgcgggccctcaagctgcacacagcactccgggagctgcgcctggcagggaaccggctgggggacaagtgtgtggctgagctggtggctgccctgggcaccatgcccagcctggccctccttgacctctcctccaatcacctgggtcccgaaggcctgcgccagcttgccatggggctcccaggccaagccaccttgcagagtttggaggagctggacttaagcatgaaccccctgggggacggctgtggccagtccctggcctccctcctgcacgcctgccccttactcagcaccctgcgcctgcaggcgtgtggcttcggccccagcttctttctgagccaccagacagcactgggtagtgctttccaagatgctgagcacctgaagaccctgtccctgtcctacaacgccctgggagcccctgccctggccaggaccctgcagagcctgcccgccggcaccctcctgcacttagagctcagctccgtggcagccggcaagggtgattcggacctcatggagcctgtattccgatacctggccaaggaaggctgtgctctagcccacctgaccctgtctgcaaaccacctgggggacaaggctgttagagacctgtgcagatgtctctctctgtgcccctcactcatctcactggatctgtctgccaaccctgagatcagctgtgccagcttggaagagctcctgtccaccctccaaaagcggccccaaggccttagcttccttggcctgtcaggctgcgccgtccagggtcccctgggcctgggcctgtgggacaagatagccgcgcagctccgggaactgcagctgtgcagcagacgcctctgcgctgaggacagggacgccctgcgccagctgcagcccagtcggccgggccccggcgagtgcacgctggaccacggctccaagctcttctttcggcgcctctgaccctggcgctgcctttccccaccctcaccgaagcccctaataaatgaagctgctggccgggcgcggtggctcacgcctgtaatcccaacactttgggaggcccaggcgggcggatcacgaggtcaggagatcgagaccatcctggctaacatggtgaaaccccgtctctactaaaaataccaaaaattagccgggcgtggtggtggaagcctgtagtcccagctactccggaggctgaggcaggagaatggcgtgaacccgggaggcggagcttgcagtgagccgagatcgcaccactgcactccagcctgggcgacagaccgagactccgtctcaaaaaaaaaaaaaaataaaataaatgaagctg

SEQ ID NO: 287251 - DNA, 3099 bp, Homo sapiens
  misc_feature (1637)..(1637): n is a, c, g, or t
ttgaccagctgggcttttatttcgcagccaccatcttcattggcaaactggagacagtagttgtacccctagcctcccagggtgggagaggagatggcacgcgtggtccaggagtgctgatggcagagaccaccattggaggttggcagccgtcagccctcactttgagccaggcaccatccatgttgtgttgtttttttttcttgagatggagtctcgctctgtcacccaggctggagtgagacccttggtggacacgtggggcgaagagtcagtcctggcggggcatcgggagctgggcttacgtctcctggtctgcagaaattgtccgcttcctgctggaccacggggccgcagtggacgacccaggtggccagggctgcgaaggcatcacccccctccacgatgccctcaactgtggccacttcgaggtggctgagctgctgcttgaacggggggcgtccgtcaccctccgcactcgaaagggcctcagcccgctggagacgctgcagcagtgggtgaagctgtaccgcagggacctggacctggagacgcggcagaaggccagggccatggagatgctgctccaggcggctgcctcgggccaagatccccacagctcccaggccttccacaccccaagcagccttctgtttgaccccgagacctctcctcctttgagcccctgcccagaacccccctctaatagcactagactcccagaggcctctcaggcccatgtcagggtctccccagggcaggcggcaccagccatggccaggcctcggaggagcaggcatgggccagccagcagcagcagcagctcagaaggcgaggacagcgcaggccccgcacggccgtcccagaagaggcctcggtgctcggccacagcacaacgggtggcagcctggacgcctggccccgccagcaacagggaagcagccacagccagcaccagccgggcagcctaccaggcagccatccggggtgtgggcagtgctcagagccggctggggcctggcccaccgcggggccacagcaaagcccttgccccccaggcagcgctcatcccggaggaggagtgcctggctggggactggctggagctggacatgcccctgacccgcagccgccggccccgcccccggggcactggagacaaccgcaggcccagtagtacctctgggtcggacagtgaggagagcaggccccgtgcccgagccaagcaggtccgcctgacctgcatgcagagttgcagtgcgccagttaacgcagggcccagcagcctggcttcagaacctccagggagccccagcacccccagggtctcagagcccagtggggacagctctgcggcaggccagcccttgggtccggccccgccccctcccatccgggttcgagttcaagttcaggatcatctcttcctcatccctgtcccacacagcagtgacacccactctgtggcctggctggccgagcaggcggcccagcgctactaccagacctgcgggctgctgcccaggctcaccctacggaaagagggggccctgctggccccacaggacctcatccctgatgtgctgcagagcaatgacgaggtgttggctgaggtgacttcgtgggacctgcccccnttgactgaccgctaccgcagggcctgccagagcctggggcaaggggagcaccaacaggtgctgcaggccgtggagctccagggcttgggcctctcgttcagcgcctgctccctggccctggaccaggcccagcttacacccctgctgcgggccctcaagctgcacacagcactccgggagctgcgcctggcagggaaccggctgggggacaagtgtgtggctgagctggtggctgccctgggcaccatgcccagcctggccctccttgacctctcctccaatcacctgggtcccgaaggcctgcgccagcttgccatggggctcccaggccaagccaccttgcagagtttggaggagctggacttaagcatgaaccccctgggggacggctgtggccagtccctggcctccctcctgcacgcctgccccttactcagcaccctgcgcctgcaggcgtgtggcttcggccccagcttctttctgagccaccagacagcactgggtagtgctttccaagatgctgagcacctgaagaccctgtccctgtcctacaacgccctgggagcccctgccctggccaggaccctgcagagcctgcccgccggcaccctcctgcacttagagctcagctccgtggcagccggcaagggtgattcggacctcatggagcctgtattccgatacctggccaaggaaggctgtgctctagcccacctgaccctgtctgcaaaccacctgggggacaaggctgttagagacctgtgcagatgtctctctctgtgcccctcactcatctcactggatctgtctgccaaccctgagatcagctgtgccagcttggaagagctcctgtccaccctccaaaagcggccccaaggccttagcttccttggcctgtcaggctgcgccgtccagggtcccctgggcctgggcctgtgggacaagatagccgcgcagctccgggaactgcagctgtgcagcagacgcctctgcgctgaggacagggacgccctgcgccagctgcagcccagtcggccgggccccggcgagtgcacgctggaccacggctccaagctcttctttcggcgcctctgaccctggcgctgcctttccccaccctcaccgaagcccctaataaatgaagctgctggccgggcgcggtggctcacgcctgtaatcccaacactttgggaggcccaggcgggcggatcacgaggtcaggagatcgagaccatcctggctaacatggtgaaaccccgtctctactaaaaataccaaaaattagccgggcgtggtggtggaagcctgtagtcccagctactccggaggctgaggcaggagaatggcgtgaacccgggaggcggagcttgcagtgagccgagatcgcaccactgcactccagcctgggcgacagaccgagactccgtctcaaaaaaaaaaaaaaataaaataaatgaagctg

SEQ ID NO: 287252 - DNA, 1875 bp, Homo sapiens
ggcacgagggcgagcttcgccagctgagcaaggcgaaagccaaggcgcagagggccgggcagcggcgcgaagaggccgcgctgtgccaccagctgggggagctcctggccggccatggccgctacgccgaggctctggagcagcactggcaggagctgcagcttcgggagcgcgctgacgaccctctgggctgtgccgtggcccaccgcaagatcggagagcgcctggccgagatggaggactacccggctgccttgcagcaccagcaccagtacctggagctggcacattccctgcgcaaccacacggagctgcagagggcctgggccaccatcggccgcacccacctggacatctatgaccactgccagtcgagggatgctttgctgcaggcacaggctgcctttgagaagagcttggctattgtggatgaggagctggaggggacactggcccagggagagctgaatgagatgaggacccgcctctatctcaacctgggcctcacctttgagagcctgcagcagacagccctgtgcaacgattacttcaggaagagcatcttccttgcggagcagaaccacctttacgaggacctattccgcgcccgctacaacctgggcaccatccactggcgcgcgggccagcactcccaggctatgcgctgcttggagggtgcccgggagtgtgcgcacaccatgaggaagcggttcatggagagcgagtgctgcgtggttattgcacaggtcctccaagacctgggagactttttggctgccaagcgagccctgaagaaggcgctacaggctgggctcccagaagcctgtgcagagggcagccatctgtcagaacctccagcatgtgctggcagtggtccggctgcagcaacagctggaagaggctgagggcagagaccctcagggtgccatggtcatctgtgagcagctaggggacctcttctccaaggcaggagactttcccagggcagctgaggcttaccagaagcagctgcgttttgctgagctgctggacagaccgggtgctgagcgggccatcatccacgtgtccctggccaccacactgggagacatgaaggaccaccatggggccgtgcgccactatgaggaggaactgaggctgcgcagcggcaacgtgctggaggaggccaagacctggctgaacattgcactgtcccgcgaggaggccggcgatgcctacgagctgctggccccgtgcttccagaaagcgctcagctgtgcccagcaggcccagcgtccccagctgcagaggcaggtcttgcagcatctccataccgtgcagctgaggctgcagccccaggaggcccctgagaccgaaaccagactgcgggagctcagtgtagctgaagatgaagatgaggaggaggaggcggaggaggcggcagccacagcggagagcgaagccctggaggccggcgaggtggagctctcagagagcgaggacgacaccgatggcctgaccccgcagctggaggaggacgaggagcttcagggccacctgggccggcggaaggggagcaagtggaaccggcgaaacgacatgggggagaccctgctgcaccgagcctcctctgcaggtcccaccctctccccctgctcgtacccccaagtgatagtcgttcggaccacggcagcatgcacaggggtacaaagaagagacacaagacagaaggaaagccgcacgacgagatcccgcgcgagccagccacaaacaagaacaaaaagaggaaaacaagcaacggacgaggagactaaagaagaggtcaggagcaagagcaaccaagacagagacgaggagcagacagggagcaagagcgaaaaaggaaaaccacaccga

SEQ ID NO: 287253 - DNA, 142 bp, Homo sapiens
ccccaaactctcctcgtgggccatcaaacagctgcctgccgccctcataacctccctcaacctccagcttgaaccacactccactgcagcccccgccccgctctcctgagtgtccatagtacctcactttttctggtagccc

SEQ ID NO: 287254 - DNA, 4501 bp, Homo sapiens
  misc_feature (3039)..(3039): n is a, c, g, or t
ggcacgagggcgagcttcgccagctgagcaaggcgaaagccaaggcgcagagggccgggcagcggcgcgaagaggccgcgctgtgccaccagctgggggagctcctggccggccatggccgctacgccgaggctctggagcagcactggcaggagctgcagcttcgggagcgcgctgacgaccctctgggctgtgccgtggcccaccgcaagatcggagagcgcctggccgagatggaggactacccggctgccttgcagcaccagcaccagtacctggagctggcacattccctgcgcaaccacacggagctgcagagggcctgggccaccatcggccgcacccacctggacatctatgaccactgccagtcgagggatgctttgctgcaggcacaggctgcctttgagaagagcttggctattgtggatgaggagctggaggggacactggcccagggagagctgaatgagatgaggacccgcctctatctcaacctgggcctcacctttgagagcctgcagcagacagccctgtgcaacgattacttcaggaagagcatcttccttgcggagcagaaccacctttacgaggacctattccgcgcccgctacaacctgggcaccatccactggcgcgcgggccagcactcccaggctatgcgctgcttggagggtgcccgggagtgtgcgcacaccatgaggaagcggttcatggagagcgagtgctgcgtggttattgcacaggtcctccaagacctgggagactttttggctgccaagcgagccctgaagaaggcgctacaggctgggctcccagaagcctgtgcagagggcagccatctgtcagaacctccagcatgtgctggcagtggtccggctgcagcaacagctggaagaggctgagggcagagaccctcagggtgccatggtcatctgtgagcagctaggggacctcttctccaaggcaggagactttcccagggcagctgaggcttaccagaagcagctgcgttttgctgagctgctggacagaccgggtgctgagcgggccatcatccacgtgtccctggccaccacactgggagacatgaaggaccaccatggggccgtgcgccactatgaggaggaactgaggctgcgcagcggcaacgtgctggaggaggccaagacctggctgaacattgcactgtcccgcgaggaggccggcgatgcctacgagctgctggccccgtgcttccagaaagcgctcagctgtgcccagcaggcccagcgtccccagctgcagaggcaggtcttgcagcatctccataccgtgcagctgaggctgcagccccaggaggcccctgagaccgaaaccagactgcgggagctcagtgtagctgaagatgaagatgaggaggaggaggcggaggaggcggcagccacagcggagagcgaagccctggaggccggcgaggtggagctctcagagagcgaggacgacaccgatggcctgaccccgcagctggaggaggacgaggagcttcagggccacctgggccggcggaaggggagcaagtggaaccggcgaaacgacatgggggagaccctgctgcaccgagcctgcatcgagggccagctgcgccgcgtccaggaccttgtgaggcagggccacccccttaaccctcgggactactgtggctggacacctctgcacgaggcctgcaactacgggcatctagaaattgtccgcttcctgctggaccacggggccgcagtggacgacccaggtggccagggctgcgaaggcatcacccccctccacgatgccctcaactgtggccacttcgaggtggctgagctgctgcttgaacggggggcgtccgtcaccctccgcactcgaaagggcctcagcccgctggagacgctgcagcagtgggtgaagctgtaccgcagggacctggacctggagacgcggcagaaggccagggccatggagatgctgctccaggcggctgcctcgggccaagatccccacagctcccaggccttccacaccccaagcagccttctgtttgaccccgagacctctcctcctttgagcccctgcccagaacccccctctaatagcactagactcccagaggcctctcaggcccatgtcagggtctccccagggcaggcggcaccagccatggccaggcctcggaggagcaggcatgggccagccagcagcagcagcagctcagaaggcgaggacagcgcaggccccgcacggccgtcccagaagaggcctcggtgctcggccacagcacaacgggtggcagcctggacgcctggccccgccagcaacagggaagcagccacagccagcaccagccgggcagcctaccaggcagccatccggggtgtgggcagtgctcagagccggctggggcctggcccaccgcggggccacagcaaagcccttgccccccaggcagcgctcatcccggaggaggagtgcctggctggggactggctggagctggacatgcccctgacccgcagccgccggccccgcccccggggcactggagacaaccgcaggcccagtagtacctctgggtcggacagtgaggagagcaggccccgtgcccgagccaagcaggtccgcctgacctgcatgcagagttgcagtgcgccagttaacgcagggcccagcagcctggcttcagaacctccagggagccccagcacccccagggtctcagagcccagtggggacagctctgcggcaggccagcccttgggtccggccccgccccctcccatccgggttcgagttcaagttcaggatcatctcttcctcatccctgtcccacacagcagtgacacccactctgtggcctggctggccgagcaggcggcccagcgctactaccagacctgcgggctgctgcccaggctcaccctacggaaagagggggccctgctggccccacaggacctcatccctgatgtgctgcagagcaatgacgaggtgttggctgaggtgacttcgtgggacctgcccccnttgactgaccgctaccgcagggcctgccagagcctggggcaaggggagcaccaacaggtgctgcaggccgtggagctccagggcttgggcctctcgttcagcgcctgctccctggccctggaccaggcccagcttacacccctgctgcgggccctcaagctgcacacagcactccgggagctgcgcctggcagggaaccggctgggggacaagtgtgtggctgagctggtggctgccctgggcaccatgcccagcctggccctccttgacctctcctccaatcacctgggtcccgaaggcctgcgccagcttgccatggggctcccaggccaagccaccttgcagagtttggaggagctggacttaagcatgaaccccctgggggacggctgtggccagtccctggcctccctcctgcacgcctgccccttactcagcaccctgcgcctgcaggcgtgtggcttcggccccagcttctttctgagccaccagacagcactgggtagtgctttccaagatgctgagcacctgaagaccctgtccctgtcctacaacgccctgggagcccctgccctggccaggaccctgcagagcctgcccgccggcaccctcctgcacttagagctcagctccgtggcagccggcaagggtgattcggacctcatggagcctgtattccgatacctggccaaggaaggctgtgctctagcccacctgaccctgtctgcaaaccacctgggggacaaggctgttagagacctgtgcagatgtctctctctgtgcccctcactcatctcactggatctgtctgccaaccctgagatcagctgtgccagcttggaagagctcctgtccaccctccaaaagcggccccaaggccttagcttccttggcctgtcaggctgcgccgtccagggtcccctgggcctgggcctgtgggacaagatagccgcgcagctccgggaactgcagctgtgcagcagacgcctctgcgctgaggacagggacgccctgcgccagctgcagcccagtcggccgggccccggcgagtgcacgctggaccacggctccaagctcttctttcggcgcctctgaccctggcgctgcctttccccaccctcaccgaagcccctaataaatgaagctgctggccgggcgcggtggctcacgcctgtaatcccaacactttgggaggcccaggcgggcggatcacgaggtcaggagatcgagaccatcctggctaacatggtgaaaccccgtctctactaaaaataccaaaaattagccgggcgtggtggtggaagcctgtagtcccagctactccggaggctgaggcaggagaatggcgtgaacccgggaggcggagcttgcagtgagccgagatcgcaccactgcactccagcctgggcgacagaccgagactccgtctcaaaaaaaaaaaaaaataaaataaatgaagctg

SEQ ID NO: 287255 - DNA, 2160 bp, Homo sapiens
aattcgcgtactagccggacttggattttctggaaagatttcagttgaggaacgggaacaaagattatgatagctttccgaccaccaccaacttcaatttccttagctgccgtaatatcagctccctgagctgagccttgaggtccgagttcatctccagctccagaagagcctgggagatgccggactcgaactcgtccgcttctcgccattgggcttcacgatcttggcgctcgaactgaacatggcttctcctttgagaagagcttggctattgtggatgaggagctggaggggacactggcccagggagagctgaatgagatgaggacccgcctctatctcaacctgggcctcacctttgagagcctgcagcagacagccctgtgcaacgattacttcaggaagagcatcttccttgcggagcagaaccacctttacgaggacctattccgcgcccgctacaacctgggcaccatccactggcgcgcgggccagcactcccaggctatgcgctgcttggagggtgcccgggagtgtgcgcacaccatgaggaagcggttcatggagagcgagtgctgcgtggttattgcacaggtcctccaagacctgggagactttttggctgccaagcgagccctgaagaaggcgctacaggctgggctcccagaagcctgtgcagagggcagccatctgtcagaacctccagcatgtgctggcagtggtccggctgcagcaacagctggaagaggctgagggcagagaccctcagggtgccatggtcatctgtgagcagctaggggacctcttctccaaggcaggagactttcccagggcagctgaggcttaccagaagcagctgcgttttgctgagctgctggacagaccgggtgctgagcgggccatcatccacgtgtccctggccaccacactgggagacatgaaggaccaccatggggccgtgcgccactatgaggaggaactgaggctgcgcagcggcaacgtgctggaggaggccaagacctggctgaacattgcactgtcccgcgaggaggccggcgatgcctacgagctgctggccccgtgcttccagaaagcgctcagctgtgcccagcaggcccagcgtccccagctgcagaggcaggtcttgcagcatctccataccgtgcagctgaggctgcagccccaggaggcccctgagaccgaaaccagactgcgggagctcagtgtagctgaagatgaagatgaggaggaggaggcggaggaggcggcagccacagcggagagcgaagccctggaggccggcgaggtggagctctcagagagcgaggacgacaccgatggcctgaccccgcagctggaggaggacgaggagcttcagggccacctgggccggcggaaggggagcaagtggaaccggcgaaacgacatgggggagaccctgctgcaccgagcctgcatcgagggccagctgcgccgcgtccaggaccttgtgaggcagggccacccccttaaccctcgggactactgtggctggacacctctgcacgaggcctgcaactacgggcatctagaaattgtccgcttcctgctggaccacggggccgcagtggacgacccaggtggccagggctgcgaaggcatcacccccctccacgatgccctcaactgtggccacttcgaggtggctgagctgctgcttgaacggggggcgtccgtcaccctccgcactcgaaagggcctcagcccgctggagacgctgcagcagtgggtgaagctgtaccgcagggacctggacctggagacgcggcagaaggccagggccatggagatgctgctccaggcggctgcctcgggccaagatccccacagctcccaggccttccacaccccaagcagccttctgtttgaccccgagacctctcctcctttgagcccctgcccagaacccccctctaatagcactagactcccagaggcctctcaggcccatgtcagggtctccccagggcaggcggcaccagccatggccaggcctcggaggagcaggcatgggccagccagcagctcgcccctgagttagcagctcgcccctgagttagcagctcgcccctgagttagcagctcggccctgagttgtgtatcctctagagtcagctc

SEQ ID NO: 287256 - DNA, 1182 bp, Homo sapiens
  misc_feature (1134)..(1134): n is a, c, g, or t
ttgaccagctgggcttttatttcgcagccaccatcttcattggcaaactggagacagtagttgtacccctagcctcccagggtgggagaggagatggcacgcgtggtccaggagtgctgatggcagagaccaccattggaggttggcagccgtcagccctcactttgagccaggcaccatccatgttgtgttgtttttttttcttgagatggagtctcgctctgtcacccaggctggagtgagacccttggtggacacgtggggcgaagagtcagtcctggcggggcatcgggagctgggcttacgtctcctggtctgcagaaattgtccgcttcctgctggaccacggggccgcagtggacgacccaggtggccagggctgcgaaggcatcacccccctccacgatgccctcaactgtggccacttcgaggtggctgagctgctgcttgaacggggggcgtccgtcaccctccgcactcgaaagctacatgagcggcgacgccctttcccggctcttcctcggctggggcgccccagggcttcggcgcgggcggccttccctcacttctgctcttctcccatccccggtagcaccgtccactcccagttagccggctcagcgctgctctcccgggcctctccaccgagagcttcctgcgcctgcccgccaggcccgctcctcctcccctctccgtctgagtttatcttactgcccggcccattgggccaaaaacaggggtgtcgttcgtaactcctttattttaatcctatctcaaatccctcggcggatctgacggctccactttcaaagagagaacgtctggagctggcccagcttccgtgctaggcaggaccctcccacgggccccgctcccattgtttctccacagctcgctgcccaactaggggcacctctccatcttcattccctaggaccccctctttcgagaagctgcaccttcagcttgttggttcctccaagttcatgcctacttaaaggcgggctgttaagtgtgttgtttcctgtgccccaaactctcctcgtgggccatcaaacagctgcctgccgccctcataacctccctcaacctccagcctgggtgaaagctatatgaccaggcatggtggctcanacctgtattcccaaaactacgggaggttgaggtgggaggattgcttga

SEQ ID NO: 287257 - DNA, 1063 bp, Homo sapiens
  misc_feature (1015)..(1015): n is a, c, g, or t
ggcccggccggtgggcggggaaggggcagagtggggagaggcgactcagggcctggcaccctctgggcgcgcctaggccccggcacagcttcggctgagcgccgcaaaagtcacgttattggcatgttctagaaactggctttccttgctcgttgtccactctgcgaggttgttttgcacatttgcttgtggccgcagaacgtccgctttcgctgttaggcagaagctcctgcgtggttggggcggttggctcctcggcgctctcctgcctggcggctccgtgacggctgccgagcagcctcggtccccaccccgcggctcgcaatggcctcgaccctcggagagcttgacccagacgttccctacctacatgagcggcgacgccctttcccggctcttcctcggctggggcgccccagggcttcggcgcgggcggccttccctcacttctgctcttctcccatccccggtagcaccgtccactcccagttagccggctcagcgctgctctcccgggcctctccaccgagagcttcctgcgcctgcccgccaggcccgctcctcctcccctctccgtctgagtttatcttactgcccggcccattgggccaaaaacaggggtgtcgttcgtaactcctttattttaatcctatctcaaatccctcggcggatctgacggctccactttcaaagagagaacgtctggagctggcccagcttccgtgctaggcaggaccctcccacgggccccgctcccattgtttctccacagctcgctgcccaactaggggcacctctccatcttcattccctaggaccccctctttcgagaagctgcaccttcagcttgttggttcctccaagttcatgcctacttaaaggcgggctgttaagtgtgttgtttcctgtgccccaaactctcctcgtgggccatcaaacagctgcctgccgccctcataacctccctcaacctccagcctgggtgaaagctatatgaccaggcatggtggctcanacctgtattcccaaaactacgggaggttgaggtgggaggattgcttga

SEQ ID NO: 287258 - DNA, 436 bp, Homo sapiens
catccaatctttgcaatattttgcaataggaacatcatgcgcacggatgatcaaaggaaattgtccttttcacctaaatttttgaatatcttggcatgagagcccaagtagagtgcagaatcacctgggttcagacgattctcgtgcctcagcctccggagcagctgggattacaggtaatttacatcgactgcatctgtatggtgaaaatatagtataatggggtgctgctgtgaatctccttccaattctgcattctgtgatatcatagtggtaacctgaaatccaccatagtggggacatttacacaataactggcaaatgctacaaggctgggctttttcagttttgttgattgtctggacataaaaaggtaatacagaaaatgttaccaatacaagcatttgggaaaaataaactaaaaccttttgtgaaa

SEQ ID NO: 287259 - DNA, 430 bp, Homo sapiens
tggtctggatcaagacaatgtggagatctggtgtggaggctgtggccaggcttcctcccaccagtctctgacaatatttcctctgcctgcctctggagctaccaccatgaaaagaagggcttccggctctgaaagctctgtgtgtaggactcgctagaagaccgctggtgggaacgggccgtctcgacaatcacaggtggcatctggacgaggtgcaggggactcttgttgtctttcaaggcctgggtcagatttaagatctgcagtgggaaaaaggagatgggtgagggagaggcctcagcattccagatctgcctctgaaaggagatcagtagagaggacgcctacaaatcaattttttaaaataccaatggaaaatcatgcaaataggccatttacaaaagtaaaaattagcaaaacagaaaatgga

SEQ ID NO: 287260 - DNA, 715 bp, Homo sapiens
cattaggatccactgagagttggttagctgtgattaatactgtcatctgtgaccatgaaaatctatagtggtttgccccattacatatctgaaacattgtcttatgaaaacaaaatgaaacaaaattaaataaaattgaagataaaaatactctggaagcacaggatatctgacaagaatcttcagcacaaagcacatgtttgaaaacgtgaaacgatgactctttggaggacaatagctaaatatccaagaatcatcagtaaagaaaacaaaacgcagcacattcacattttcccgaggaactgtaaagatgatctctacagggataaacgttgtaaagcctgaagctcaatcaactgatgttggaaactctcaaagggagtaaaggcttgatctcaatggtctagaacatgtactgtaatttaatagaagagatggtcgtcttaatatttaatgatttaaaagaacttcccagtccatgcgaagagtacagtccaagaataaatcaaatttctgaacgcattttatgctacatatgtgtatactttgcgatcctcaggtgttcgtgccaaatattctctctcaataagtccttcaatacgtttcttaataacaactggacttggtaagaatcgcgccttcaactgctgagttacctaaaaaagaaagtagatagtatttttatataaacacataaaaattcgtatctttgaac

SEQ ID NO: 287261 - DNA, 1136 bp, Homo sapiens
aggacgagcaggacacgcagccctggggacgaggacaaaggaacccagaacccgagctgggtagggcgggcaggctgggtctgtcacccagagggacacaagcttccatcccctctggtcagagctgagaagaggaaggcaggggaggaggccagaggccccgtcaaggccccgtccaggatggggggctacacccactagggttacgcatgtctgatggcaccaacctatgaagcggtctttccagagaagtggaaaacacaaacaggatcatgaagaagatgtcacgacaccactaacgcaaacctgaaaactcgcgtgaactaaacaatgaatgctggccgggtgcggtggctcatgcctgcaatcccagcactttggcttcagaaaacatggaaaacacagaaaagtataaagaaaaaaagacacccatatgaatcttaccactcaaagttaccacaaacagaagtcttgttctcattgtaattattcaagccatccacatttactataaaaatactgggcgaaaaggctttagagaaagagggaagagcaagtatgggatatgcacagggtctcaggttcatgaggaaaacaaattttttgaattttgaattgggtaaatgaaattcaaaattaagtggcatcaagaattcagttggggccgggcgtagtagctcacgcctgtcatcctagcacttttgagaggccaaggcgggtggatcacctgaggtcaggagttccagaccagcctggccaacgtggtgaaaccccgtctctcctagaaatacaaaaattagccaggcgtggtgacgtgcgcctgtaatcccagctactcaggtggctgaggcaggagaatcgcttgaacctgggaggcggaggtttcagtgagctgagatcacacccctgcactccagcccgggcaacagagtgagactccgttgcaaaaaaacaaaaacgaaaacgaaaacaaacaaaccaagaattcagttggatacattaactatgtaaaaaggaaaaaaaaggccgggcgtggtggctcacgcctgtaatcccagcactttggaaggccgaggagggtggatcatgaggtcaggagatccagaccatcctggctaacacggtgaaaccccgtc

SEQ ID NO: 287262 - DNA, 859 bp, Homo sapiens
cacagtggctctcgcctgtagtcccagcactttgggaggccaaggcaggaggatcacttgaggtcaggagttcaaggccagcctggccaacatggtgaaacccccttcagaaaacatggaaaacacagaaaagtataaagaaaaaaagacacccatatgaatcttaccactcaaagttaccacaaacagaagtcttgttctcattgtaattattcaagccatccacatttactataaaaatactgggcgaaaaggctttagagaaagagggaagagcaagtatgggatatgcacagggtctcaggttcatgaggaaaacaaattttttgaattttgaattgggtaaatgaaattcaaaattaagtggcatcaagaattcagttggggccgggcgtagtagctcacgcctgtcatcctagcacttttgagaggccaaggcgggtggatcacctgaggtcaggagttccagaccagcctggccaacgtggtgaaaccccgtctctcctagaaatacaaaaattagccaggcgtggtgacgtgcgcctgtaatcccagctactcaggtggctgaggcaggagaatcgcttgaacctgggaggcggaggtttcagtgagctgagatcacacccctgcactccagcccgggcaacagagtgagactccgttgcaaaaaaacaaaaacgaaaacgaaaacaaacaaaccaagaattcagttggatacattaactatgtaaaaaggaaaaaaaaggccgggcgtggtggctcacgcctgtaatcccagcactttggaaggccgaggagggtggatcatgaggtcaggagatccagaccatcctggctaacacggtgaaaccccgtc

SEQ ID NO: 287263 - DNA, 472 bp, Homo sapiens
aagaattcttatcttctagaaattttggttgaaatatttatagacaaagtaagatgacatctgtgatttgcttctaaagaactggggcgagggggaaaggtgaatgggggtgaagataaaacaagcctggccacaagatgatagctgctgaagccggccacagccatgtggaagcttgttactctatgtctatgtttgaaattgtccatgataaaaagtatgtatttaaaaaagcagctgggcatggtggctcatgcctgtaatcccaacactttaggaggccaaggtgggaggatcgtttgagagcaggagttccagactaacctgggcaacatggttgagaccctgtctctacaaaattaaaaaataattttaaaaagtaaccacattcacttcagaaaacatggaaaacacagaaaagtataaagaaaaaaagacacccatatgaatcttaccactcaaagttaccaca

SEQ ID NO: 287264 - DNA, 2045 bp, Homo sapiens
tttgagacagactctcactgtattgcccaagctggagtgcagtggtgcgatctcggcttctcttaactactcagagtaaaatgtgagaagaaacaatacaaagatgggatttataacacggaagcaaaatatagagatttgaaaattctcagcctaagcatgtaaataaaaaggtatttaggaaagtaaaccaagggtgtgaccaagtgactttctgatcagagtgtggctagaaagaagccaggtgttttcatcatgacaataggagaatgaacccaatggcacttcagagagcttcaaggccgctcctcccatcacaggcccacagtgcgagggccttgaaggcaggatggtttccagggaagggcgtagaacactcatggaactttggggcttgctgcccggggctgcctcaagtctctgctccccacatcccggcacagtgctccttggctgccgtagttgtggctccagtgggcccaggtgcagtttagtccctgctctggagggcaaagtggtgaacctcagcatccacatggtactgattttgcaagtgtgcagagtgcacaagatgtggaagcatggcatccttcaaagagatttctttttttttttttttgagacagactctcactgtattgcccaagctggagtgcagtggtgcgatctcggcccaccgcaacctccgccttattccattattattccattgtagcttggaagcacgtaactagtttggtttcacaggtacaggactagagagcaatttgcctcaggatgaatcacatgatttagataatacctagatgagactctgccctttaagttgactttaaagtttatgctgaaatgagttttaatactttgggggctattggagtgaaatgaatgtattttgtacatgagaaagacatgaatatagggggggtccaggggcagaatgtaacatgtcctctccaaaattcaggtgttgccaatgtgatagtattagaaggtggagcctggccgggcgcggtggctcatgcctgtaatcctagcactttgggaggccgaggtgggcggatcacgaggtcaggaaatcgagaccatcctggctaacagggtgaaaccccgtctctactaaaaaactacaaaaaaatagccgggcgtggtggcaggtgcctgtagtcccagctactcaggaggctgaggcaggagaatggcaggaacctgggaggcggagcttgcagtgagctgagattgtgccctccagcctgggcgacagagcaacactctgtctccagaaaaaaaaaaaaaaaaagaaggtggagcctttaagaggtgatgaggggctcctccctttgtgaatgggattacagccttcataaaagaggctcaatgcagacttccttgtcctcccttttgcacgtgaggacacacgtcctttctggaggatgcagcatcaaggcacccttggaagaggacatttgaacctgatgatgccttgatcttggacttcataaactacagaactgtgatacatttctgttctttataaatcaggtattttgttatagcagcacaaacagactaagaaagttgcctatgggtgccaggcgcggtggctcacgcctgtaatcccagcactttgggagggtgaggcaggtggatcatgaggtcaggagttcgagaccagtctggccaacatagtgaaaccctgtctatactaaaaatacaccaaaaattagccaggcatggtggtgtgcgcctctaatcctagctactcgggaggctgaggcaggaaaatcgcgtgaacccaggaggcggaggttgcagtaaaccgagatcacaccacagcactccagcctgggcaacagaatgagattgtgtctcaaaaaaaaaaaaaagttgtctatgggtgactcagctgcaaagctgcaaggagattgagagtaagacgatggaaaaaacggtcaagccgagaaccaaatcaggaacacaatcccatttacaattgccactaaaagaataacatacctaagaatacagctaaccagggaggtgaa

SEQ ID NO: 287265 - DNA, 790 bp, Homo sapiens
ctcggcacgacccaggttccatgctacaggcctctacttgtccagacctgagggtcagattcagatggtgcaaatgtttaagacctgggtcttcaacgagatgaattatcagctatttcatagctgcagtgttggatatgccgagacgataaaagcaacagcaatcagaatcaacagttgaaacgacatggcagacgctgtgaatgctatgaactgctgtgctgagcagcaggattcctgtgtcctggcgcaatgcccatggggattcatgctttcagagggtcacgccttaggaacacgtagaagggcaagcatttcatctggcagggcactgatttaatctgcacgcatgtttggctgtaaaactagctcctcccccttaccatttttgagtcgctgccggactcaaattccacagattctggaaggtgtccaggaactcgttgatttgtcaaacttatggctacacacagctggaatggagacggactccactgaggagactcatacaggacaggagggaattttaagaggataaccctgagattgaaaacatcaaaccaaacctgaagcactgagaggttgggtaaccagctctggtcactgagttggtgagggatggattcagaagaggtctccaattgtgacaccgcagaggacctgctcttggccactacactctaccagctctgcaagaagcgcttccacacttttcatctcagacccacagagccagtgtgtgcggctgaggtgctcagactggcaggtgaaatgacttcattagtgccct

SEQ ID NO: 287266 - DNA, 329 bp, Homo sapiens
aaagagggaagacagcacttgaaaggaaagagggtaaagaagaggaagggaggttacaattgagagcactgcagaaggaagcgatgcagatgttgccgcccggctctggcagtccgaaggagcaaccccacgcatagaaaaaaacagattctacttggttctagctgaagtattatcaactccaaataacgctttgaggacctccaaagctgctttcctttgcctgcaagaggtgtcaagatgagttttgcctgacttctttgatgtcctgaactttctgtagtccttttttttcttcaatttgttcattataaatttagcttagcatt

SEQ ID NO: 287267 - DNA, 759 bp, Homo sapiens
caggccatggagaaccatgagaaagctttaaatggggatgtaaaatatgatctgtggaagggagagagcagcatgctggaggggatgatttggcaagtccgctgaagaacacaagcctcgactgctccccggcgtggaagaaggaaggcgataaatactgtaacggaggacgaggaaggagcactgagttctatgtggaaagaaagggtcaaaaagaggaaaacgcctattcacatgcatggcgtttaacagatttattaggttgtttgctgtgtgatgtaaatctcctcctctctctccttgaaatttcttgagtgaattctacattgttcattcattcatgtttatgtgccagcaagctttgggagcactgtaaaaataaaaaaggttagaccactgttagacatctgggaaacatctatgttagagaaggactatatattaatttatctcatttatgggaggcaaatactatgattattgaaggtacatctctttctttatggatggagtacatcttatttttctaaaatttgtatttgaacctatttatttctaattgtcaaaaatgtgaagtgagaaacttaaaaactttttagtttctcttgtcccaccattttatgtacttccaggttgtcaaataatttggaattttagacttagataattctctaatgtatattatagatcttctatttcaataattagcttatattttaattaaattgtataactgcattaaaatatacttaactatgt

SEQ ID NO: 287268 - DNA, 3220 bp, Homo sapiens
tcatctcgggccgctcgcgcgctccgagtccgggtctggtggggcggtgcagagcgggattcccgaggcagggtcgtgggcactctatcgcggcgggcggttgaaggcgttacagtccttggaaaccgagctgctagccggttgctaggagcgtccagtgtctggagtgggaggaacaaaacgcctcacgtcacaaggcgaggaatcgagcgccgagagagcgagtcggtgctactggcgccgggtcggtccgggtaggcgcagcgggactggacctgggtgccgagcggagccgctgccatgggcctgggcgtcagcgctgagcagcccgcaggcggcgccgagggcttccacctccacggggtgcaggagaactccccagcccagcaggcgggcctggagccctactttgacttcatcatcaccattgggcactcgaggctgaacaaggagaatgacaccctgaaggcactactgaaagccaatgtggagaagcccgtgaagctggaggtgttcaatatgaagaccatgagggtgcgcgaggtggaggtggtgcccagcaacatgtggggcggccagggcctactgggtgccagtgtgcgcttctgcagcttccgcagggccagtgagcaggtgtggcatgtgctggatgtggaaccatcttcacctgctgcccttgccggcctgcgcccctacacagactatgtggttggttcggaccagattctccaggagtccgaggacttctttacgctcatcgagtctcatgaggggaagcccttgaagctgatggtgtataactccaagtcagactcctgccgggaggtgactgtaactcccaacgcagcctggggtggagagggcagtctgggatgtggcattggctatgggtatctacaccggatcccaactcagccccccagctaccacaagaagccacctggcaccccaccaccttctgctctaccacttggtgccccaccacctgatgctctaccacctggacccacccccgaggactctccttccctggagacaggttccaggcagagtgactacatggaggccctgctgcaggcacctggctcctccatggaggatccccttcctgggcctgggagtcccagccacagtgctccagaccctgatggacttccccatttcatggagactcctcttcagcccccacctccagtgcagcgagttatggacccaggcttcctggacgtgtcgggaatttctctcttggacaacagcaatgccagtgtgtggcccagcctgccctcttccacagaactgaccaccacagctgtctcaacctcagggccagaggacatctgctccagcagcagttctcatgagcggggtggtgaggctacatggtctgggtcagagtttgaggtctccttcctggacagcccaggtgcccaagcccaggcggaccacctgcctcagctgactcttcctgacagtctcacctctgcagcctcaccagaagatgggctgtccgccgagctgcttgaagctcaggctgaggaggaaccagcaagcacagagggcctagatactgggacggaggctgaggggctggacagccaggcccagatctctaccacagaataacaccctgggctgtgacaaggcccatgatgacatttcatgaggcccagatgtgggcaggcagcccgggctgcactatgcggtcaggattccttgctgctttggtgggacatgaggcctcagtgggtggtgagagggggccatgggccttgtgggaggatatcttttggccgtgtaccctcaggtccagtgcttggtcctgctctggtcactggggcttcccaggaggcagcagggtctggtcataatccagtgtgaagatgaggtgaggaaggaaggggttgctgtccagtgttggcctggtcgctttgattcttcctgcacagctcagcccaccccatctgtactggaagggaccctggagccctgggaccaccccctttcaagtcccaaacactgagtcctctgtcatgtgtccttgtccctaggctacaatgctacacttggctcaggctgatcaccatgctagtcacaggagggagagagaggcagtgtacttgcccccatctcctggagggaggtgcgttggaaattctaggcccttcagcagagacccatttgtgcccagaccacaatatttcttcttcctcagggactacatgccacagacctgtatccccagtggcaactcctgttagctcccaaacttaaacagtgatctcttctaaatatacaaggcatctacccagccccaatagtgaataaaagtcacaaatttaagttcaacaccctaagcaatttctcaaagccagtctacctgactaggtctatccacgcacggttcccaaccccaagggggaattaggggattagattaagagtaggtaaagacccttttgttctttcctgttgtaggggaggaagctgttctccccaccccaggtgcctttggaggttaaggctaggttaggccctgcactccacctggggacggcccctcatcacctgaagtcctctgctgtgttgactggaccctcagttcccacactgctaattactatgaaagctgctctggcctcgtcttctagcttgtgcctagttgaaagtctcacctttacaggatcatttgtaatgctggtgtacatgcagggaactcacaagctgtgtcaggtatgcaggacaaggaatgtctgctctggggggcacaggccaactatatggagggagggtcccaaattagcaaacccttcatttaaagcaaacccttgtcaagcctaccagagcagctgatacgtgtgcataacagtgaggcattgtgtcctggatcgtctgggagcccagtgtcaagtctgctggaatgcaggaagtagaacagaatcgccacaggactgttctggggccagcttcccttaactctgtagcctggcagtctgacccaaagttgccctcacccaaaggttctggctcttccctccctcacttttactttcccttcccccataagttggaggataaaatgggtatcaatgctaatatttccagggagaacatgaaaccagaggtttctttctttctctgtaatctgctatgaaagaaaataacaaatgaaaataaatgtgtactacactttgaaatattttaactaaagcctttattctat

SEQ ID NO: 287269 - DNA, 3461 bp, Homo sapiens
tcatctcgggccgctcgcgcgctccgagtccgggtctggtggggcggtgcagagcgggattcccgaggcagggtcgtgggcactctatcgcggcgggcggttgaaggcgttacagtccttggaaaccgagctgctagccggttgctaggagcgtccagtgtctggagtgggaggaacaaaacgcctcacgtcacaaggcgaggaatcgagcgccgagagagcgagtcggtgctactggcgccgggtcggtccgggtaggcgcagcgggactggacctgggtgccgagcggagccgctgccatgggcctgggcgtcagcgctgagcagcccgcaggcggcgccgagggcttccacctccacggggtgcaggagaactccccagcccagcaggcgggcctggagccctactttgacttcatcatcaccattgggcactcgaggctgaacaaggagaatgacaccctgaaggcactactgaaagccaatgtggagaagcccgtgaagctggaggtgttcaatatgaagaccatgagggtgcgcgaggtggaggtggtgcccagcaacatgtggggcggccagggcctactgggtgccagtgtgcgcttctgcagcttccgcagggccagtgagcaggtgtggcatgtgctggatgtggaaccatcttcacctgctgcccttgccggcctgcgcccctacacagactatgtggttggttcggaccagattctccaggagtccgaggacttctttacgctcatcgagtctcatgaggggaagcccttgaagctgatggtgtataactccaagtcagactcctgccgggaggtgactgtaactcccaacgcagcctggggtggagagggcaggtacttcgtggggttggagggctgcagggccaggtgggtggggcctgaccattgggcatggacctcagagttctatggtggagatggaggagggttgccctgggcccagggatcctgaggctgaccggtatttcagaagtacccttttcagcccccttattgctggtagtaggtggggatagcaaaggtagggagggccgtgggacaagcccctggattgaatgtttctggccttcggcagtctgggatgtggcattggctatgggtatctacaccggatcccaactcagccccccagctaccacaagaagccacctggcaccccaccaccttctgctctaccacttggtgccccaccacctgatgctctaccacctggacccacccccgaggactctccttccctggagacaggttccaggcagagtgactacatggaggccctgctgcaggcacctggctcctccatggaggatccccttcctgggcctgggagtcccagccacagtgctccagaccctgatggacttccccatttcatggagactcctcttcagcccccacctccagtgcagcgagttatggacccaggcttcctggacgtgtcgggaatttctctcttggacaacagcaatgccagtgtgtggcccagcctgccctcttccacagaactgaccaccacagctgtctcaacctcagggccagaggacatctgctccagcagcagttctcatgagcggggtggtgaggctacatggtctgggtcagagtttgaggtctccttcctggacagcccaggtgcccaagcccaggcggaccacctgcctcagctgactcttcctgacagtctcacctctgcagcctcaccagaagatgggctgtccgccgagctgcttgaagctcaggctgaggaggaaccagcaagcacagagggcctagatactgggacggaggctgaggggctggacagccaggcccagatctctaccacagaataacaccctgggctgtgacaaggcccatgatgacatttcatgaggcccagatgtgggcaggcagcccgggctgcactatgcggtcaggattccttgctgctttggtgggacatgaggcctcagtgggtggtgagagggggccatgggccttgtgggaggatatcttttggccgtgtaccctcaggtccagtgcttggtcctgctctggtcactggggcttcccaggaggcagcagggtctggtcataatccagtgtgaagatgaggtgaggaaggaaggggttgctgtccagtgttggcctggtcgctttgattcttcctgcacagctcagcccaccccatctgtactggaagggaccctggagccctgggaccaccccctttcaagtcccaaacactgagtcctctgtcatgtgtccttgtccctaggctacaatgctacacttggctcaggctgatcaccatgctagtcacaggagggagagagaggcagtgtacttgcccccatctcctggagggaggtgcgttggaaattctaggcccttcagcagagacccatttgtgcccagaccacaatatttcttcttcctcagggactacatgccacagacctgtatccccagtggcaactcctgttagctcccaaacttaaacagtgatctcttctaaatatacaaggcatctacccagccccaatagtgaataaaagtcacaaatttaagttcaacaccctaagcaatttctcaaagccagtctacctgactaggtctatccacgcacggttcccaaccccaagggggaattaggggattagattaagagtaggtaaagacccttttgttctttcctgttgtaggggaggaagctgttctccccaccccaggtgcctttggaggttaaggctaggttaggccctgcactccacctggggacggcccctcatcacctgaagtcctctgctgtgttgactggaccctcagttcccacactgctaattactatgaaagctgctctggcctcgtcttctagcttgtgcctagttgaaagtctcacctttacaggatcatttgtaatgctggtgtacatgcagggaactcacaagctgtgtcaggtatgcaggacaaggaatgtctgctctggggggcacaggccaactatatggagggagggtcccaaattagcaaacccttcatttaaagcaaacccttgtcaagcctaccagagcagctgatacgtgtgcataacagtgaggcattgtgtcctggatcgtctgggagcccagtgtcaagtctgctggaatgcaggaagtagaacagaatcgccacaggactgttctggggccagcttcccttaactctgtagcctggcagtctgacccaaagttgccctcacccaaaggttctggctcttccctccctcacttttactttcccttcccccataagttggaggataaaatgggtatcaatgctaatatttccagggagaacatgaaaccagaggtttctttctttctctgtaatctgctatgaaagaaaataacaaatgaaaataaatgtgtactacactttgaaatattttaactaaagcctttattctat

SEQ ID NO: 287270 - DNA, 3179 bp, Homo sapiens
tcatctcgggccgctcgcgcgctccgagtccgggtctggtggggcggtgcagagcgggattcccgaggcagggtcgtgggcactctatcgcggcgggcggttgaaggcgttacagtccttggaaaccgagctgctagccggttgctaggagcgtccagtgtctggagtgggaggaacaaaacgcctcacgtcacaaggcgaggaatcgagcgccgagagagcgagtcggtgctactggcgccgggtcggtccgggtaggcgcagcgggactggacctgggtgccgagcggagccgctgccatgggcctgggcgtcagcgctgagcagcccgcaggcggcgccgagggcttccacctccacggggtgcaggagaactccccagcccagcaggcgggcctggagccctactttgacttcatcatcaccattgggcactcgaggctgaacaaggagaatgacaccctgaaggcactactgaaagccaatgtggagaagcccgtgaagctggaggtgttcaatatgaagaccatgagggtgcgcgaggtggaggtggtgcccagcaacatgtggggcggccagggcctactgggtgccagtgtgcgcttctgcagcttccgcagggccagtgagcaggtgtggcatgtgctggatgtggaaccatcttcacctgctgcccttgccggcctgcgcccctacacagactatgtggttggttcggaccagattctccaggagtccgaggacttctttacgctcatcgagtctcatgaggggaagcccttgaagctgatggtgtataactccaagtcagactcctgccgggagtctgggatgtggcattggctatgggtatctacaccggatcccaactcagccccccagctaccacaagaagccacctggcaccccaccaccttctgctctaccacttggtgccccaccacctgatgctctaccacctggacccacccccgaggactctccttccctggagacaggttccaggcagagtgactacatggaggccctgctgcaggcacctggctcctccatggaggatccccttcctgggcctgggagtcccagccacagtgctccagaccctgatggacttccccatttcatggagactcctcttcagcccccacctccagtgcagcgagttatggacccaggcttcctggacgtgtcgggaatttctctcttggacaacagcaatgccagtgtgtggcccagcctgccctcttccacagaactgaccaccacagctgtctcaacctcagggccagaggacatctgctccagcagcagttctcatgagcggggtggtgaggctacatggtctgggtcagagtttgaggtctccttcctggacagcccaggtgcccaagcccaggcggaccacctgcctcagctgactcttcctgacagtctcacctctgcagcctcaccagaagatgggctgtccgccgagctgcttgaagctcaggctgaggaggaaccagcaagcacagagggcctagatactgggacggaggctgaggggctggacagccaggcccagatctctaccacagaataacaccctgggctgtgacaaggcccatgatgacatttcatgaggcccagatgtgggcaggcagcccgggctgcactatgcggtcaggattccttgctgctttggtgggacatgaggcctcagtgggtggtgagagggggccatgggccttgtgggaggatatcttttggccgtgtaccctcaggtccagtgcttggtcctgctctggtcactggggcttcccaggaggcagcagggtctggtcataatccagtgtgaagatgaggtgaggaaggaaggggttgctgtccagtgttggcctggtcgctttgattcttcctgcacagctcagcccaccccatctgtactggaagggaccctggagccctgggaccaccccctttcaagtcccaaacactgagtcctctgtcatgtgtccttgtccctaggctacaatgctacacttggctcaggctgatcaccatgctagtcacaggagggagagagaggcagtgtacttgcccccatctcctggagggaggtgcgttggaaattctaggcccttcagcagagacccatttgtgcccagaccacaatatttcttcttcctcagggactacatgccacagacctgtatccccagtggcaactcctgttagctcccaaacttaaacagtgatctcttctaaatatacaaggcatctacccagccccaatagtgaataaaagtcacaaatttaagttcaacaccctaagcaatttctcaaagccagtctacctgactaggtctatccacgcacggttcccaaccccaagggggaattaggggattagattaagagtaggtaaagacccttttgttctttcctgttgtaggggaggaagctgttctccccaccccaggtgcctttggaggttaaggctaggttaggccctgcactccacctggggacggcccctcatcacctgaagtcctctgctgtgttgactggaccctcagttcccacactgctaattactatgaaagctgctctggcctcgtcttctagcttgtgcctagttgaaagtctcacctttacaggatcatttgtaatgctggtgtacatgcagggaactcacaagctgtgtcaggtatgcaggacaaggaatgtctgctctggggggcacaggccaactatatggagggagggtcccaaattagcaaacccttcatttaaagcaaacccttgtcaagcctaccagagcagctgatacgtgtgcataacagtgaggcattgtgtcctggatcgtctgggagcccagtgtcaagtctgctggaatgcaggaagtagaacagaatcgccacaggactgttctggggccagcttcccttaactctgtagcctggcagtctgacccaaagttgccctcacccaaaggttctggctcttccctccctcacttttactttcccttcccccataagttggaggataaaatgggtatcaatgctaatatttccagggagaacatgaaaccagaggtttctttctttctctgtaatctgctatgaaagaaaataacaaatgaaaataaatgtgtactacactttgaaatattttaactaaagcctttattctat

SEQ ID NO: 287271 - DNA, 535 bp, Homo sapiens
catagcatatactccaggtgtctagtaggctatgtgtaggttaagttctatgatgtttgcacaacaatgaagtcaactaacaatgcatttctcagaatatatccctgtcattaagcaatgtgactgtaaatatactgttttttctggtatattcttatatgattaatcgatatcttaacctcagtgaccaagctgtcatagatgttagtctgtccacagacacacatgcacacccaacacctgtgcccattgatggtatctaagttcttgaatgctcagtcctgtagcctggtggaaggagggtgctctgaactagaagttggctgatttgttttctagccacttatttttctcattttactttcccttcccccataagttggaggataaaatgggtatcaatgctaatatttccagggagaacatgaaaccagaggtttctttctttctctgtaatctgctatgaaagaaaataacaaatgaaaataaatgtgtactacactttgaaatattttaactaaagcctttattctat

SEQ ID NO: 287272 - DNA, 781 bp, Homo sapiens
tcatctcgggccgctcgcgcgctccgagtccgggtctggtggggcggtgcagagcgggattcccgaggcagggtcgtgggcactctatcgcggcgggcggttgaaggcgttacagtccttggaaaccgagctgctagccggttgctaggagcgtccagtgtctggagtgggaggaacaaaacgcctcacgtcacaaggcgaggaatcgagcgccgagagagcgagtcggtgctactggcgccgggtcggtccgggtaggcgcagcgggactggacctgggtgccgagcggagccgctgccatgggcctgggcgtcagcgctgagcagcccgcaggcggcgccgagggcttccacctccacggggtgcaggagaactccccagcccagcaggcgggcctggagccctactttgacttcatcatcaccattgggcactcgaggctggtgagttccccaacctgcctctgctttgcttgcttatgtgtgtttgtgtgtcttcatctgtcccacagggggccccagtctacccttccctccctttttttctaaagggagtcccagccctgtctccccttcttccagggctgtactcagagcctgactggggccctgcccagtgctcagcttctgagctctgtggggtggacagaggacatatggcctcttggaggtggcaacaaggcccaaggcctgcctcctggggcatgagggatatgagggccctggccaaggggcagctcagagtggggcagcactggaatgctgtggatctgggaggctt

SEQ ID NO: 287273 - DNA, 429 bp, Homo sapiens
gactctagaggactcccgctctcacccacccccgaggactctccttccctggagacaggttccaggcagagtgactacatggagactacatggaggccctgctgcaggcacctggctcctccatggaggatccccttcctgggcctgggagtcccagccacagtgctccagaccctgatggacttccccatttcatggagactcctcttcagcccccacctccagtgcagcgagttatggacccaggcttcctggacgtgtcgggaatttctctcttggacaacagcaatgccagtgtgtggcccagcctgccctcttccacagaactgaccaccacagctgtctcaacctcagggccagaggacatctgctccagcagcagttctcatgagcggggtgtgtggagagcggggggtgggtggagagcgg

SEQ ID NO: 287274 - DNA, 3020 bp, Homo sapiens
tcatctcgggccgctcgcgcgctccgagtccgggtctggtggggcggtgcagagcgggattcccgaggcagggtcgtgggcactctatcgcggcgggcggttgaaggcgttacagtccttggaaaccgagctgctagccggttgctaggagcgtccagtgtctggagtgggaggaacaaaacgcctcacgtcacaaggcgaggaatcgagcgccgagagagcgagtcggtgctactggcgccgggtcggtccgggtaggcgcagcgggactggacctgggtgccgagcggagccgctgccatgggcctgggcgtcagcgctgagcagcccgcaggcggcgccgagggcttccacctccacggggtgcaggagaactccccagcccagcaggcgggcctggagccctactttgacttcatcatcaccattgggcactcgaggctgaacaaggagaatgacaccctgaaggcactactgaaagccaatgtggagaagcccgtgaagctggaggtgttcaatatgaagaccatgagggtgcgcgaggtggaggtggtgcccagcaacatgtggggcggccagggcctactgggtgccagtgtgcgcttctgcagcttccgcagggccagtgagcaggtgtggcatgtgctggatgtggaaccatcttcacctgctgcccttgccggcctgcgcccctacacagactatgtggttggttcggaccagattctccaggagtccgaggacttctttacgctcatcgagtctcatgaggggaagcccttgaagctgatggtgtataactccaagtcagactcctgccgggaggtgactgtaactcccaacgcagcctggggtggagagggcagtctgggatgtggcattggctatgggtatctacaccggatcccaactcagccccccagctaccacaagaagccacctggcaccccaccaccttctgctctaccacttggtgccccaccacctgatgctctaccacctggacccacccccgaggactctccttccctggagacaggttccaggcagagtgactacatggaggccctgctgcaggcacctggctcctccatggaggatccccttcctgggcctgggagtcccagccacagtgctccagaccctgatggacttccccatttcatggagactcctcttcagcccccacctccagtgcagcgagttatggacccaggcttcctggacgtgtcgggaatttctctcttggacaacactgactcttcctgacagtctcacctctgcagcctcaccagaagatgggctgtccgccgagctgcttgaagctcaggctgaggaggaaccagcaagcacagagggcctagatactgggacggaggctgaggggctggacagccaggcccagatctctaccacagaataacaccctgggctgtgacaaggcccatgatgacatttcatgaggcccagatgtgggcaggcagcccgggctgcactatgcggtcaggattccttgctgctttggtgggacatgaggcctcagtgggtggtgagagggggccatgggccttgtgggaggatatcttttggccgtgtaccctcaggtccagtgcttggtcctgctctggtcactggggcttcccaggaggcagcagggtctggtcataatccagtgtgaagatgaggtgaggaaggaaggggttgctgtccagtgttggcctggtcgctttgattcttcctgcacagctcagcccaccccatctgtactggaagggaccctggagccctgggaccaccccctttcaagtcccaaacactgagtcctctgtcatgtgtccttgtccctaggctacaatgctacacttggctcaggctgatcaccatgctagtcacaggagggagagagaggcagtgtacttgcccccatctcctggagggaggtgcgttggaaattctaggcccttcagcagagacccatttgtgcccagaccacaatatttcttcttcctcagggactacatgccacagacctgtatccccagtggcaactcctgttagctcccaaacttaaacagtgatctcttctaaatatacaaggcatctacccagccccaatagtgaataaaagtcacaaatttaagttcaacaccctaagcaatttctcaaagccagtctacctgactaggtctatccacgcacggttcccaaccccaagggggaattaggggattagattaagagtaggtaaagacccttttgttctttcctgttgtaggggaggaagctgttctccccaccccaggtgcctttggaggttaaggctaggttaggccctgcactccacctggggacggcccctcatcacctgaagtcctctgctgtgttgactggaccctcagttcccacactgctaattactatgaaagctgctctggcctcgtcttctagcttgtgcctagttgaaagtctcacctttacaggatcatttgtaatgctggtgtacatgcagggaactcacaagctgtgtcaggtatgcaggacaaggaatgtctgctctggggggcacaggccaactatatggagggagggtcccaaattagcaaacccttcatttaaagcaaacccttgtcaagcctaccagagcagctgatacgtgtgcataacagtgaggcattgtgtcctggatcgtctgggagcccagtgtcaagtctgctggaatgcaggaagtagaacagaatcgccacaggactgttctggggccagcttcccttaactctgtagcctggcagtctgacccaaagttgccctcacccaaaggttctggctcttccctccctcacttttactttcccttcccccataagttggaggataaaatgggtatcaatgctaatatttccagggagaacatgaaaccagaggtttctttctttctctgtaatctgctatgaaagaaaataacaaatgaaaataaatgtgtactacactttgaaatattttaactaaagcctttattctat

SEQ ID NO: 287275 - DNA, 3207 bp, Homo sapiens
ctggccgcgggttgggcaccagcagcgccgcgcccagagtgcgcagctattgttctcgaagtcggatgcgttattctctggtgccggctcgcgcgggcaattggtcgcctccttcctcgggtcgaaagaatgtcacctactatccatgtcgtggactgcacatccgtgcgacttatgcacaacatttgacgcctcgctctgcctgcgggcctgctctcctgtgcctgggctctggcgaagtagaagtctagccatcgccagaggacacgtcccgaggggcctgggggttaactcgaggtgtgacgcagcatgctcggggagccccgttcggcgcgcgtacctgccagttcgtgcaggagaactccccagcccagcaggcgggcctggagccctactttgacttcatcatcaccattgggcactcgaggctgaacaaggagaatgacaccctgaaggcactactgaaagccaatgtggagaagcccgtgaagctggaggtgttcaatatgaagaccatgagggtgcgcgaggtggaggtggtgcccagcaacatgtggggcggccagggcctactgggtgccagtgtgcgcttctgcagcttccgcagggccagtgagcaggtgtggcatgtgctggatgtggaaccatcttcacctgctgcccttgccggcctgcgcccctacacagactatgtggttggttcggaccagattctccaggagtccgaggacttctttacgctcatcgagtctcatgaggggaagcccttgaagctgatggtgtataactccaagtcagactcctgccgggaggtgactgtaactcccaacgcagcctggggtggagagggcagtctgggatgtggcattggctatgggtatctacaccggatcccaactcagccccccagctaccacaagaagccacctggcaccccaccaccttctgctctaccacttggtgccccaccacctgatgctctaccacctggacccacccccgaggactctccttccctggagacaggttccaggcagagtgactacatggaggccctgctgcaggcacctggctcctccatggaggatccccttcctgggcctgggagtcccagccacagtgctccagaccctgatggacttccccatttcatggagactcctcttcagcccccacctccagtgcagcgagttatggacccaggcttcctggacgtgtcgggaatttctctcttggacaacagcaatgccagtgtgtggcccagcctgccctcttccacagaactgaccaccacagctgtctcaacctcagggccagaggacatctgctccagcagcagttctcatgagcggggtggtgaggctacatggtctgggtcagagtttgaggtctccttcctggacagcccaggtgcccaagcccaggcggaccacctgcctcagctgactcttcctgacagtctcacctctgcagcctcaccagaagatgggctgtccgccgagctgcttgaagctcaggctgaggaggaaccagcaagcacagagggcctagatactgggacggaggctgaggggctggacagccaggcccagatctctaccacagaataacaccctgggctgtgacaaggcccatgatgacatttcatgaggcccagatgtgggcaggcagcccgggctgcactatgcggtcaggattccttgctgctttggtgggacatgaggcctcagtgggtggtgagagggggccatgggccttgtgggaggatatcttttggccgtgtaccctcaggtccagtgcttggtcctgctctggtcactggggcttcccaggaggcagcagggtctggtcataatccagtgtgaagatgaggtgaggaaggaaggggttgctgtccagtgttggcctggtcgctttgattcttcctgcacagctcagcccaccccatctgtactggaagggaccctggagccctgggaccaccccctttcaagtcccaaacactgagtcctctgtcatgtgtccttgtccctaggctacaatgctacacttggctcaggctgatcaccatgctagtcacaggagggagagagaggcagtgtacttgcccccatctcctggagggaggtgcgttggaaattctaggcccttcagcagagacccatttgtgcccagaccacaatatttcttcttcctcagggactacatgccacagacctgtatccccagtggcaactcctgttagctcccaaacttaaacagtgatctcttctaaatatacaaggcatctacccagccccaatagtgaataaaagtcacaaatttaagttcaacaccctaagcaatttctcaaagccagtctacctgactaggtctatccacgcacggttcccaaccccaagggggaattaggggattagattaagagtaggtaaagacccttttgttctttcctgttgtaggggaggaagctgttctccccaccccaggtgcctttggaggttaaggctaggttaggccctgcactccacctggggacggcccctcatcacctgaagtcctctgctgtgttgactggaccctcagttcccacactgctaattactatgaaagctgctctggcctcgtcttctagcttgtgcctagttgaaagtctcacctttacaggatcatttgtaatgctggtgtacatgcagggaactcacaagctgtgtcaggtatgcaggacaaggaatgtctgctctggggggcacaggccaactatatggagggagggtcccaaattagcaaacccttcatttaaagcaaacccttgtcaagcctaccagagcagctgatacgtgtgcataacagtgaggcattgtgtcctggatcgtctgggagcccagtgtcaagtctgctggaatgcaggaagtagaacagaatcgccacaggactgttctggggccagcttcccttaactctgtagcctggcagtctgacccaaagttgccctcacccaaaggttctggctcttccctccctcacttttactttcccttcccccataagttggaggataaaatgggtatcaatgctaatatttccagggagaacatgaaaccagaggtttctttctttctctgtaatctgctatgaaagaaaataacaaatgaaaataaatgtgtactacactttgaaatattttaactaaagcctttattctat

SEQ ID NO: 287276 - DNA, 3338 bp, Homo sapiens
tcatctcgggccgctcgcgcgctccgagtccgggtctggtggggcggtgcagagcgggattcccgaggcagggtcgtgggcactctatcgcggcgggcggttgaaggcgttacagtccttggaaaccgagctgctagccggttgctaggagcgtccagtgtctggagtgggaggaacaaaacgcctcacgtcacaaggcgaggaatcgagcgccgagagagcgagtcggtgctactggcgccgggtcggtccgggtaggcgcagcgggactggacctgggtgccgagcggagccgctgccatgggcctgggcgtcagcgctgagcagcccgcaggcggcgccgagggcttccacctccacggggtgcaggagaactccccagcccagcaggcgggcctggagccctactttgacttcatcatcaccattgggcactcgaggctgtgaccctgctgagggctgctgcccactaaggcccttgccccatctcaggcccagacttgtctgagggtcctagcctgggcatgaggtggccttggagtcagccccattgcccccacagaacaaggagaatgacaccctgaaggcactactgaaagccaatgtggagaagcccgtgaagctggaggtgttcaatatgaagaccatgagggtgcgcgaggtggaggtggtgcccagcaacatgtggggcggccagggcctactgggtgccagtgtgcgcttctgcagcttccgcagggccagtgagcaggtgtggcatgtgctggatgtggaaccatcttcacctgctgcccttgccggcctgcgcccctacacagactatgtggttggttcggaccagattctccaggagtccgaggacttctttacgctcatcgagtctcatgaggggaagcccttgaagctgatggtgtataactccaagtcagactcctgccgggaggtgactgtaactcccaacgcagcctggggtggagagggcagtctgggatgtggcattggctatgggtatctacaccggatcccaactcagccccccagctaccacaagaagccacctggcaccccaccaccttctgctctaccacttggtgccccaccacctgatgctctaccacctggacccacccccgaggactctccttccctggagacaggttccaggcagagtgactacatggaggccctgctgcaggcacctggctcctccatggaggatccccttcctgggcctgggagtcccagccacagtgctccagaccctgatggacttccccatttcatggagactcctcttcagcccccacctccagtgcagcgagttatggacccaggcttcctggacgtgtcgggaatttctctcttggacaacagcaatgccagtgtgtggcccagcctgccctcttccacagaactgaccaccacagctgtctcaacctcagggccagaggacatctgctccagcagcagttctcatgagcggggtggtgaggctacatggtctgggtcagagtttgaggtctccttcctggacagcccaggtgcccaagcccaggcggaccacctgcctcagctgactcttcctgacagtctcacctctgcagcctcaccagaagatgggctgtccgccgagctgcttgaagctcaggctgaggaggaaccagcaagcacagagggcctagatactgggacggaggctgaggggctggacagccaggcccagatctctaccacagaataacaccctgggctgtgacaaggcccatgatgacatttcatgaggcccagatgtgggcaggcagcccgggctgcactatgcggtcaggattccttgctgctttggtgggacatgaggcctcagtgggtggtgagagggggccatgggccttgtgggaggatatcttttggccgtgtaccctcaggtccagtgcttggtcctgctctggtcactggggcttcccaggaggcagcagggtctggtcataatccagtgtgaagatgaggtgaggaaggaaggggttgctgtccagtgttggcctggtcgctttgattcttcctgcacagctcagcccaccccatctgtactggaagggaccctggagccctgggaccaccccctttcaagtcccaaacactgagtcctctgtcatgtgtccttgtccctaggctacaatgctacacttggctcaggctgatcaccatgctagtcacaggagggagagagaggcagtgtacttgcccccatctcctggagggaggtgcgttggaaattctaggcccttcagcagagacccatttgtgcccagaccacaatatttcttcttcctcagggactacatgccacagacctgtatccccagtggcaactcctgttagctcccaaacttaaacagtgatctcttctaaatatacaaggcatctacccagccccaatagtgaataaaagtcacaaatttaagttcaacaccctaagcaatttctcaaagccagtctacctgactaggtctatccacgcacggttcccaaccccaagggggaattaggggattagattaagagtaggtaaagacccttttgttctttcctgttgtaggggaggaagctgttctccccaccccaggtgcctttggaggttaaggctaggttaggccctgcactccacctggggacggcccctcatcacctgaagtcctctgctgtgttgactggaccctcagttcccacactgctaattactatgaaagctgctctggcctcgtcttctagcttgtgcctagttgaaagtctcacctttacaggatcatttgtaatgctggtgtacatgcagggaactcacaagctgtgtcaggtatgcaggacaaggaatgtctgctctggggggcacaggccaactatatggagggagggtcccaaattagcaaacccttcatttaaagcaaacccttgtcaagcctaccagagcagctgatacgtgtgcataacagtgaggcattgtgtcctggatcgtctgggagcccagtgtcaagtctgctggaatgcaggaagtagaacagaatcgccacaggactgttctggggccagcttcccttaactctgtagcctggcagtctgacccaaagttgccctcacccaaaggttctggctcttccctccctcacttttactttcccttcccccataagttggaggataaaatgggtatcaatgctaatatttccagggagaacatgaaaccagaggtttctttctttctctgtaatctgctatgaaagaaaataacaaatgaaaataaatgtgtactacactttgaaatattttaactaaagcctttattctat

SEQ ID NO: 287277 - DNA, 3129 bp, Homo sapiens
tcatctcgggccgctcgcgcgctccgagtccgggtctggtggggcggtgcagagcgggattcccgaggcagggtcgtgggcactctatcgcggcgggcggttgaaggcgttacagtccttggaaaccgagctgctagccggttgctaggagcgtccagtgtctggagtgggaggaacaaaacgcctcacgtcacaaggcgaggaatcgagcgccgagagagcgagtcggtgctactggcgccgggtcggtccgggtaggcgcagcgggactggacctgggtgccgagcggagccgctgccatgggcctgggcgtcagcgctgagcagcccgcaggcggcgccgagggcttccacctccacggggtgcaggagaactccccagcccagcaggcgggcctggagccctactttgacttcatcatcaccattgggcactcgaggctgaacaaggagaatgacaccctgaaggcactactgaaagccaatgtggagaagcccgtgaagctggaggtgttcaatatgaagaccatgagggtgcgcgaggtggaggtggtgcccagcaacatgtggggcggccagggcctactgggtgccagtgtgcgcttctgcagcttccgcagggccagtgagcaggtgtggcatgtgctggatgtggaaccatcttcacctgctgcccttgccggcctgcgcccctacacagactatgtggttggttcggaccagattctccaggagtccgaggacttctttacgctcatcgagtctcatgaggggaagcccttgaagctgatggtgtataactccaagtcagactcctgccgggagcccccagctaccacaagaagccacctggcaccccaccaccttctgctctaccacttggtgccccaccacctgatgctctaccacctggacccacccccgaggactctccttccctggagacaggttccaggcagagtgactacatggaggccctgctgcaggcacctggctcctccatggaggatccccttcctgggcctgggagtcccagccacagtgctccagaccctgatggacttccccatttcatggagactcctcttcagcccccacctccagtgcagcgagttatggacccaggcttcctggacgtgtcgggaatttctctcttggacaacagcaatgccagtgtgtggcccagcctgccctcttccacagaactgaccaccacagctgtctcaacctcagggccagaggacatctgctccagcagcagttctcatgagcggggtggtgaggctacatggtctgggtcagagtttgaggtctccttcctggacagcccaggtgcccaagcccaggcggaccacctgcctcagctgactcttcctgacagtctcacctctgcagcctcaccagaagatgggctgtccgccgagctgcttgaagctcaggctgaggaggaaccagcaagcacagagggcctagatactgggacggaggctgaggggctggacagccaggcccagatctctaccacagaataacaccctgggctgtgacaaggcccatgatgacatttcatgaggcccagatgtgggcaggcagcccgggctgcactatgcggtcaggattccttgctgctttggtgggacatgaggcctcagtgggtggtgagagggggccatgggccttgtgggaggatatcttttggccgtgtaccctcaggtccagtgcttggtcctgctctggtcactggggcttcccaggaggcagcagggtctggtcataatccagtgtgaagatgaggtgaggaaggaaggggttgctgtccagtgttggcctggtcgctttgattcttcctgcacagctcagcccaccccatctgtactggaagggaccctggagccctgggaccaccccctttcaagtcccaaacactgagtcctctgtcatgtgtccttgtccctaggctacaatgctacacttggctcaggctgatcaccatgctagtcacaggagggagagagaggcagtgtacttgcccccatctcctggagggaggtgcgttggaaattctaggcccttcagcagagacccatttgtgcccagaccacaatatttcttcttcctcagggactacatgccacagacctgtatccccagtggcaactcctgttagctcccaaacttaaacagtgatctcttctaaatatacaaggcatctacccagccccaatagtgaataaaagtcacaaatttaagttcaacaccctaagcaatttctcaaagccagtctacctgactaggtctatccacgcacggttcccaaccccaagggggaattaggggattagattaagagtaggtaaagacccttttgttctttcctgttgtaggggaggaagctgttctccccaccccaggtgcctttggaggttaaggctaggttaggccctgcactccacctggggacggcccctcatcacctgaagtcctctgctgtgttgactggaccctcagttcccacactgctaattactatgaaagctgctctggcctcgtcttctagcttgtgcctagttgaaagtctcacctttacaggatcatttgtaatgctggtgtacatgcagggaactcacaagctgtgtcaggtatgcaggacaaggaatgtctgctctggggggcacaggccaactatatggagggagggtcccaaattagcaaacccttcatttaaagcaaacccttgtcaagcctaccagagcagctgatacgtgtgcataacagtgaggcattgtgtcctggatcgtctgggagcccagtgtcaagtctgctggaatgcaggaagtagaacagaatcgccacaggactgttctggggccagcttcccttaactctgtagcctggcagtctgacccaaagttgccctcacccaaaggttctggctcttccctccctcacttttactttcccttcccccataagttggaggataaaatgggtatcaatgctaatatttccagggagaacatgaaaccagaggtttctttctttctctgtaatctgctatgaaagaaaataacaaatgaaaataaatgtgtactacactttgaaatattttaactaaagcctttattctat

SEQ ID NO: 287278 - DNA, 3092 bp, Homo sapiens
tcatctcgggccgctcgcgcgctccgagtccgggtctggtggggcggtgcagagcgggattcccgaggcagggtcgtgggcactctatcgcggcgggcggttgaaggcgttacagtccttggaaaccgagctgctagccggttgctaggagcgtccagtgtctggagtgggaggaacaaaacgcctcacgtcacaaggcgaggaatcgagcgccgagagagcgagtcggtgctactggcgccgggtcggtccgggtaggcgcagcgggactggacctgggtgccgagcggagccgctgccatgggcctgggcgtcagcgctgagcagcccgcaggcggcgccgagggcttccacctccacggggtgcaggagaactccccagcccagcaggcgggcctggagccctactttgacttcatcatcaccattgggcactcgaggctgaacaaggagaatgacaccctgaaggcactactgaaagccaatgtggagaagcccgtgaagctggaggtgttcaatatgaagaccatgagggtgcgcgaggtggaggtggtgcccagcaacatgtggggcggccagggcctactgggtgccagtgtgcgcttctgcagcttccgcagggccagtgagcaggtgtggcatgtgctggatgtggaaccatcttcacctgctgcccttgccggcctgcgcccctacacagactatgtggttggttcggaccagattctccaggagtccgaggacttctttacgctcatcgagtctcatgaggggaagcccttgaagctgatggtgtataactccaagtcagactcctgccgggaggtgactgtaactcccaacgcagcctggggtggagagggcagtctgggatgtggcattggctatgggtatctacaccggatcccaactcagccccccagctaccacaagaagccacctggcaccccaccaccttctgctctaccacttggtgccccaccacctgatgctctaccacctggacccacccccgaggactctccttccctggagacaggttccaggcagagtgactacatggaggccctgctgcaggcacctggctcctccatggaggatccccttcctgggcctgggagtcccagccacagtgctccagaccctgatggacttccccatttcatggagactcctcttcagcccccacctccagtgcagcgagttatggacccaggcttcctggacgtgtcgggaatttctctcttggacaacagcaatgccagtgtgtggcccagcctgccctcttccacagaactgaccaccacagctgtctcaacctcagggccagaggacatctgctccagcagcagttctcatgagcggggtggtgaggctacatggtctgggtcagagtttgaggtctccttcctggacagcccaggtgcccaagcccaggcggaccacctgcctcagctgactcttcctgacagtctcacctctgcagcctcaccagaagatgggctgtccgccgagctgcttgaagctcaggctgaggaggaaccagcaagcacagagggcctagatactgggacggaggctgaggggctggacagccaggcccagatctctaccacagaataacaccctgggctgtgacaaggcccatgatgacatttcatgaggcccagatgtgggcaggcagcccgggctgcactatgcggtcaggattccttgctgctttggtgggacatgaggcctcagtgggtggtgagagggggccatgggccttgtgggaggatatcttttggccgtgtaccctcaggtccagtgcttggtcctgctctggtcactggggcttcccaggaggcagcagggtctggtcataatccagtgtgaagatgaggtgaggaaggaaggggttgctgtccagtgttggcctggtcgctttgattcttcctgcacagctcagcccaccccatctgtactggaagggaccctggagccctgggaccaccccctttcaagtcccaaacactgagtcctctgtcatgtgtccttgtccctaggctacaatgctacacttggctcaggctgatcaccatgctagtcacaggagggagagagaggcagtgtacttgcccccatctcctggagggaggtgcgttggaaattctaggcccttcagcagttctcatgagcggggtggtgaggctacatggtctgggtcagagtttgaggtctccttcctggacagcccaggtgcccaagcccaggcggaccacctgcctcagctgactcttcctgacagtctcacctctgcagcctcaccagaagatgggctgtccgccgagctgcttgaagctcaggctgaggaggaaccagcaagcacagagggcctagatactgggatggaggctgaggggctggacagccaggcccagatctctaccacagaataacatcctctgctgtgttgactggaccctcagttcccacactgctaattactatgaaagctgctctggcctcgtcttctagcttgtgcctagttgaaagtctcacctttacaggatcatttgtaatgctggtgtacatgcagggaactcacaagctgtgtcaggtatgcaggacaaggaatgtctgctctggggggcacaggccaactatatggagggagggtcccaaattagcaaacccttcatttaaagcaaacccttgtcaagcctaccagagcagctgatacgtgtgcataacagtgaggcattgtgtcctggatcgtctgggagcccagtgtcaagtctgctggaatgcaggaagtagaacagaatcgccacaggactgttctggggccagcttcccttaactctgtagcctggcagtctgacccaaagttgccctcacccaaaggttctggctcttccctccctcacttttactttcccttcccccataagttggaggataaaatgggtatcaatgctaatatttccagggagaacatgaaaccagaggtttctttctttctctgtaatctgctatgaaagaaaataacaaatgaaaataaatgtgtactacactttgaaatattttaactaaagcctttattctat

SEQ ID NO: 287279 - DNA, 4808 bp, Homo sapiens
tcatctcgggccgctcgcgcgctccgagtccgggtctggtggggcggtgcagagcgggattcccgaggcagggtcgtgggcactctatcgcggcgggcggttgaaggcgttacagtccttggaaaccgagctgctagccggttgctaggagcgtccagtgtctggagtgggaggaacaaaacgcctcacgtcacaaggcgaggaatcgagcgccgagagagcgagtcggtgctactggcgccgggtcggtccgggtaggcgcagcgggactggacctgggtgccgagcggagccgctgccatgggcctgggcgtcagcgctgagcagcccgcaggcggcgccgagggcttccacctccacggggtgcaggagaactccccagcccagcaggcgggcctggagccctactttgacttcatcatcaccattgggcactcgaggctgaacaaggagaatgacaccctgaaggcactactgaaagccaatgtggagaagcccgtgaagctggaggtgttcaatatgaagaccatgagggtgcgcgaggtggaggtggtgcccagcaacatgtggggcggccagggcctactgggtgccagtgtgcgcttctgcagcttccgcagggccagtgagcaggtgtggcatgtgctggatgtggaaccatcttcacctgctgcccttgccggcctgcgcccctacacagactatgtggttggttcggaccagattctccaggagtccgaggacttctttacgctcatcgagtctcatgaggggaagcccttgaagctgatggtgtataactccaagtcagactcctgccgggaggtgactgtaactcccaacgcagcctggggtggagagggcagtctgggatgtggcattggctatgggtatctacaccggatcccaactcagccccccagctaccacaagaagccacctggcaccccaccaccttctgctctaccacttggtgccccaccacctgatgctctaccacctggacccacccccgaggactctccttccctggagacaggttccaggcagagtgactacatggaggccctgctgcaggcacctggctcctccatggaggatccccttcctgggcctgggagtcccagccacagtgctccagaccctgatggacttccccatttcatggagactcctcttcagcccccacctccagtgcagcgagttatggacccaggcttcctggacgtgtcgggaatttctctcttggacaacagcaatgccagtgtgtggcccagcctgccctcttccacagaactgaccaccacagctgtctcaacctcagggccagaggacatctgctccagcagcagttctcatgagcggggtggtgaggctacatggtctgggtcagagtttgaggtctccttcctggacagcccaggtgcccaagcccaggcggaccacctgcctcagctgactcttcctgacagtctcacctctgcagcctcaccagaagatgggctgtccgccgagctgcttgaagctcaggctgaggaggaaccagcaagcacagagggcctagatactgggacggaggctgaggggctggacagccaggcccagatctctaccacagaataacaccctgggctgtgacaaggcccatgatgacatttcatgaggcccagatgtgggcaggcagcccgggctgcactatgcggtcaggattccttgctgctttggtgggacatgaggcctcagtgggtggtgagagggggccatgggccttgtgggaggatatcttttggccgtgtaccctcaggtccagtgcttggtcctgctctggtcactggggcttcccaggaggcagcagggtctggtcataatccagtgtgaagatgaggtgaggaaggaaggggttgctgtccagtgttggcctggtcgctttgattcttcctgcacagctcagcccaccccatctgtactggaagggaccctggagccctgggaccaccccctttcaagtcccaaacactgagtcctctgtcatgtgtccttgtccctaggctacaatgctacacttggctcaggctgatcaccatgctagtcacaggagggagagagaggcagtgtacttgcccccatctcctggagggaggtgcgttggaaattctaggcccttcagcagagacccatttgtgcccagaccacaatatttcttcttcctcagggactacatgccacagacctgtatccccagtggcaactcctgttagctcccaaacttaaacagtgatctcttctaaatatacaaggcatctacccagccccaatagtgaataaaagtcacaaatttaagttcaacaccctaagcaatttctcaaagccagtctacctgactaggtctatccacgcacggttcccaaccccaagggggaattaggggattagattaagagtaggtaaagacccttttgttctttcctgttgtaggggaggaagctgttctccccaccccaggtgcctttggaggttaaggctaggttaggccctgcactccacctggggacggcccctcatcacctgaagtcctctgctgtgttgactggaccctcagttcccacactgctaattactatgaaagctgctctggcctcgtcttctagcttgtgcctagttgaaagtctcacctttacaggatcatttgtaatgctggtgtacatgcagggaactcacaagctgtgtcaggtatgcaggacaaggaatgtctgctctggggggcacaggccaactatatggagggagggtcccaaattagcaaacccttcatttaaagcaaacccttgtcaagcctaccagagcagctgatacgtgtgcataacagtgaggcattgtgtcctggatcgtctgggagcccagtgtcaagtctgctggaatgcaggaagtagaacagaatcgccacaggactgttctggggccagcttcccttaactctgtagcctggcagtctgacccaaagttgccctcacccaaaggttctggctcttccctccctcacttttactttcccttcccccataagttggaggataaaatgggtatcaatgctaatatttccagggagaacatgaaaccagaggtttctttctttctctgtaatctgctatgaaagaaaataacaaatgaaaataaatgtgtactacactttgaaatattttaactaaagcctttattctatacaactgtgaaatacagatttttacccttttggcattgcagactgtcgaattttctggaaactgtattacggtttgactggaggggaaagaaatacaatcatgctgggggtcagatctatgacaggaggggaatgcagccacccaaggcttagcacacagggcaaaatgacccagcaaaacccatttctttgctcaaaggcccctcgggcaaacacaactgagggctggtaaataattttttttttctttgccattaattcacaactattgctaaaaaatgtgcaccaaaagcacactgttgtatccaacagatagaaaggacttttaaaaaaaaaagaagctggttgctctctgaggaagggagaaagaccatttcaacttattagaaatgtggccacgtctttgctcacttcttcaaagtgcaggtggcaatggcctgtccagtttccaaaagaagctgactagcagtgagggaaccctgtctctgcagttgtgcgatcagagtatcttaaatagtaaggtatggccttaggcctatcagctgcccccagccgaacctgtgaagatgtagaaaagaaaaaacgttccctgcctccctccctagtccctgctatggtggaggcaggccacacacaagctagggaggcaactggactggaatcaactgccctctgaaggcacttgtgcttctggcttcatacaggaggcttgtcttacagttttatgggggtggaccactgatttactctgaatacaaatgaccttggggagaatccaaagtattttctgccaaaagttgaagtgtttatccccaataagttacactctatacaagatccaaatgattctatgaaagtgttagattgttagaacagtgaaaagaagatctggatacaggtacaacaaaaacctgcatataaaactttggaaaaacaaatatgtatacttccaggatatgaatatcaaattaactcactatgatctccctttattctgacaccataaattttaggtaacatttgaatgaaactgaaatttcatcatggtcttaaattttgatggtgtcatgctgctcatccagagcaagaacctgtggtctcagctcgctttgtgtaaataaaactggacacagtggaggaaggagtgaaactgctgcacctccctggggttgccacaaagccaggacatcatgggaggtgcagcatcgctaggcatgggctgcacaaactccggcccaacagtccaagtgctatgatccagcacctggaatttcaacagatcttcctacaagaacacatctgagatgcaatattaacaacaagcccaacattaatcttttattatgaaatgggctggttctcaaattgtgcaacagcaaattcccattaaaaataactgtcttaaacggtgaaaacaatttgattactttatatgacaaacttggaaaaagccttcatatctactgcatgaatggaatgtactgttttagaaaagctacagagtgtgtgggcttaaagttgaaacagagacagttgtggcccgactgaggtgtctctaacaagtgttaatgggtagataaggtccttt

SEQ ID NO: 287280 - DNA, 3356 bp, Homo sapiens
tcatctcgggccgctcgcgcgctccgagtccgggtctggtggggcggtgcagagcgggattcccgaggcagggtcgtgggcactctatcgcggcgggcggttgaaggcgttacagtccttggaaaccgagctgctagccggttgctaggagcgtccagtgtctggagtgggaggaacaaaacgcctcacgtcacaaggcgaggaatcgagcgccgagagagcgagtcggtgctactggcgccgggtcggtccgggtaggcgcagcgggactggacctgggtgccgagcggagccgctgccatgggcctgggcgtcagcgctgagcagcccgcaggcggcgccgagggcttccacctccacggggtgcaggagaactccccagcccagcaggcgggcctggagccctactttgacttcatcatcaccattgggcactcgaggctgaacaaggagaatgacaccctgaaggcactactgaaagccaatgtggagaagcccgtgaagctggaggtgttcaatatgaagaccatgagggtgcgcgaggtggaggtggtgcccagcaacatgtggggcggccagggcctactgggtgccagtgtgcgcttctgcagcttccgcagggccagtgagcaggtgtggcatgtgctggatgtggaaccatcttcacctgctgcccttgccggcctgcgcccctacacagactatgtggttggttcggaccagattctccaggagtccgaggacttctttacgctcatcgagtctcatgaggggaagcccttgaagctgatggtgtataactccaagtcagactcctgccgggaggtgactgtaactcccaacgcagcctggggtggagagggcagtctgggatgtggcattggctatgggtatctacaccggatcccaactcagccccccagctaccacaagaagccacctggcaccccaccaccttctgctctaccacttggtgccccaccacctgatgctctaccacctggacccacccccgaggactctccttccctggagacaggttccaggcagagtgactacatggaggccctgctgcaggcacctggctcctccatggaggatccccttcctgggcctgggagtcccagccacagtgctccagaccctgatggacttccccatttcatggagactcctcttcagcccccacctccagtgcagcgagttatggacccaggcttcctggacgtgtcgggaatttctctcttggacaacagcaatgccagtgtgtggcccagcctgccctcttccacagaactgaccaccacagctgtctcaacctcagggccagaggacatctgctccagcagcagttctcatgagcggggtggtgaggctacatggtctgggtcagagtttgaggtctccttcctggacagcccaggtgcccaagcccaggcggaccacctgcctcagctgactcttcctgacagtctcacctctgcagcctcaccagaagatgggctgtccgccgagctgcttgaagctcaggctgaggaggaaccagcaagcacagagggcctagatactgggacggaggctgaggggctggacagccaggcccagatctctaccacagaataacaccctgggctgtgacaaggcccatgatgacatttcatgaggcccagatgtgggcaggcagcccgggctgcactatgcggtcaggattccttgctgctttggtgggacatgaggcctcagtgggtggtgagagggggccatgggccttgtgggaggatatcttttggccgtgtaccctcaggtccagtgcttggtcctgctctggtcactggggcttcccaggaggcagcagggtctggtcataatccagtgtgaagatgaggtgaggaaggaaggggttgctgtccagtgttggcctggtcgctttgattcttcctgcacagctcagcccaccccatctgtactggaagggaccctggagccctgggaccaccccctttcaagtcccaaacactgagtcctctgtcatgtgtccttgtccctaggctacaatgctacacttggctcaggctgatcaccatgctagtcacaggagggagagagaggcagtgtacttgcccccatctcctggagggaggtgcgttggaaattctaggcccttcagcagagacccatttgtgcccagaccacaatatttcttcttcctcagggactacatgccacagacctgtatccccagtggcaactcctgttagctcccaaacttaaacagtgatctcttctaaatatacaaggcatctacccagccccaatagtgaataaaagtcacaaatttaagttcaacaccctaagcaatttctcaaagccagtctacctgactaggtctatccacgcacggttcccaaccccaagggggaattaggggattagattaagagtaggtaaagacccttttgttctttcctgttgtaggggaggaagctgttctccccaccccaggtgcctttggaggttaaggctaggttaggccctgcactccacctggggacggcccctcatcacctgaagtcctctgctgtgttgactggaccctcagttcccacactgctaattactatgaaagctgctctggcctcgtcttctagcttgtgcctagttgaaagtctcacctttacaggatcatttgtaatgctggtgtacatgcagggaactcacaagctgtgtcaggtatgcaggacaaggaatgtctgctctggggggcacaggccaactatatggagggagggtcccaaattagcaaacccttcatttaaagcaaacccttgtcaagcctaccagagcagctgatacgtgtgcataacagtgaggcattgtgtcctggatcgtctgggagcccagtgtcaagtctgctggaatgcaggaagtagaacagaatcgccacaggactgttctggggccagcttcccttaactctgtagcctggcagtctgacccaaagttgccctcacccaaaggttctggctcttccctccctcacttttactttcccttcccccataagttggaggataaaatgggtatcaatgctaatatttccagggagaacatgaaaccagaggtttctttctttctctgtaatctgctatgaaagaaaataacaaatgaaaataaatgtgtactacactttgaaatattttaactaaagcctttattctatacaactgtgaaatacagatttttacccttttggcattgcaaaaataaaaaataaaaacaaaaacttcgaggggtggccccagtttccaatttggcctatagtgaagtcgcatccaaatcactggcctataaattac

SEQ ID NO: 287281 - DNA, 3132 bp, Homo sapiens
tcatctcgggccgctcgcgcgctccgagtccgggtctggtggggcggtgcagagcgggattcccgaggcagggtcgtgggcactctatcgcggcgggcggttgaaggcgttacagtccttggaaaccgagctgctagccggttgctaggagcgtccagtgtctggagtgggaggaacaaaacgcctcacgtcacaaggcgaggaatcgagcgccgagagagcgagtcggtgctactggcgccgggtcggtccgggtaggcgcagcgggactggacctgggtgccgagcggagccgctgccatgggcctgggcgtcagcgctgagcagcccgcaggcggcgccgagggcttccacctccacggggtgcaggagaactccccagcccagcaggcgggcctggagccctactttgacttcatcatcaccattgggcactcgaggctgaacaaggagaatgacaccctgaaggcactactgaaagccaatgtggagaagcccgtgaagctggaggtgttcaatatgaagaccatgagggtgcgcgaggtggaggtggtgcccagcaacatgtggggcggccagggcctactgggtgccagtgtgcgcttctgcagcttccgcagggccagtgagcaggtgtggcatgtgctggatgtggaaccatcttcacctgctgcccttgccggcctgcgcccctacacagactatgtggttggttcggaccagattctccaggagtccgaggacttctttacgctcatcgagtctcatgaggggaagcccttgaagctgatggtgtataactccaagtcagactcctgccgggaggtgactgtaactcccaacgcagcctggggtggagagggcagtctgggatgtggcattggctatgggtatctacaccggatcccaactcagccccccagctaccacaagaagccacctggcaccccaccaccttctgctctaccacttggtgccccaccacctgatgctctaccacctggacccacccccgaggactctccttccctggagacaggttccaggcagagtgactacatggaggccctgctgcaggcacctggctcctccatggaggatccccttcctgggcctgggagtcccagccacagtgctccagaccctgatggacttccccatttcatggagactcctcttcagcccccacctccagtgcagcgagttatggacccaggcttcctggacgtgtcgggaatttctctcttggacaacagcaatgccagtgtgtggcccagcctgccctcttccacagaactgaccaccacagctgtctcaacctcagggccagaggacatctgctccagcagcagttctcatgagcggggtggtgaggctacatggtctgggtcagagtttgaggtctccttcctggacagcccaggtgcccaagcccaggcggaccacctgcctcagctgactcttcctgacagtctcacctctgcagcctcaccagaagatgggctgtccgccgagctgcttgaagctcaggctgaggaggaaccagcaagcacagagggcctagatactgggacggaggctgaggggctggacagccaggcccagatctctaccacagaataacaccctgggctgtgacaaggcccatgatgacatttcatgaggcccagatgtgggcaggcagcccgggctgcactatgcggtcaggattccttgctgctttggtgggacatgaggcctcagtgggtggtgagagggggccatgggccttgtgggaggatatcttttggccgtgtaccctcaggtccagtgcttggtcctgctctggtcactggggcttcccaggaggcagcagggtctggtcataatccagtgtgaagatgaggtgaggaaggaaggggttgctgtccagtgttggcctggtcgctttgattcttcctgcacagctcagcccaccccatctgtactggaagggaccctggagccctgggaccaccccctttcaagtcccaaacactgagtcctctgtcatgtgtccttgtccctaggctacaatgctacacttggctcaggctgatcaccatgctagtcacaggagggagagagaggcagtgtacttgcccccatctcctggagggaggtgcgttggaaattctaggcccttcagcagagacccatttgtgcccagaccacaatatttcttcttcctcagggactacatgccacagacctgtatccccagtggcaactcctgttagctcccaaacttaaacagtgatctcttctaaatatacaaggcatctacccagccccaatagtgaataaaagtcacaaatttaagttcaacaccctaagcaatttctcaaagccagtctacctgactaggtctatccacgcacggttcccaaccccaagggggaattaggggattagattaagagtaggtaaagacccttttgttctttcctgttgtaggggaggaagctgttctccccaccccaggtgcctttggaggttaaggctaggttaggccctgcactccacctggggacggcccctcatcacctgaagtcctctgctgtgttgactggaccctcagttcccacactgctaattactatgaaagctgctctggcctcgtcttctagcttgtgcctagttgaaagtctcacctttacaggatcatttgtaatgctggtgtacatgcagggaactcacaagctgtgtcagcaaacccttgtcaagcctaccagagcagctgatacgtgtgcataacagtgaggcattgtgtcctggatcgtctgggagcccagtgtcaagtctgctggaatgcaggaagtagaacagaatcgccacaggactgttctggggccagcttcccttaactctgtagcctggcagtctgacccaaagttgccctcacccaaaggttctggctcttccctccctcacttttactttcccttcccccataagttggaggataaaatgggtatcaatgctaatatttccagggagaacatgaaaccagaggtttctttctttctctgtaatctgctatgaaagaaaataacaaatgaaaataaatgtgtactacactttgaaatattttaactaaagcctttattctat

SEQ ID NO: 287282 - DNA, 3236 bp, Homo sapiens
tcatctcgggccgctcgcgcgctccgagtccgggtctggtggggcggtgcagagcgggattcccgaggcagggtcgtgggcactctatcgcggcgggcggttgaaggcgttacagtccttggaaaccgagctgctagccggttgctaggagcgtccagtgtctggagtgggaggaacaaaacgcctcacgtcacaaggcgaggaatcgagcgccgagagagcgagtcggtgctactggcgccgggtcggtccgggtaggcgcagcgggactggacctgggtgccgagcggagccgctgccatgggcctgggcgtcagcgctgagcagcccgcaggcggcgccgagggcttccacctccacggggtgcaggagaactccccagcccagcaggcgggcctggagccctactttgacttcatcatcaccattgggcactcgaggctgaacaaggagaatgacaccctgaaggcactactgaaagccaatgtggagaagcccgtgaagctggaggtgttcaatatgaagaccatgagggtgcgcgaggtggaggtggtgcccagcaacatgtggggcggccagggcctactgggtgccagtgtgcgcttctgcagcttccgcagggccagtgagcaggtgtggcatgtgctggatgtggaaccatcttcacctgctgcccttgccggcctgcgcccctacacagactatgtggttggttcggaccagattctccaggagtccgaggacttctttacgctcatcgagtctcatgaggggaagcccttgaagctgatggtgtataactccaagtcagactcctgccgggaggtgactgtaactcccaacgcagcctggggtggagagggcagtctgggatgtggcattggctatgggtatctacaccggatcccaactcagccccccagctaccacaagaagccacctggcaccccaccaccttctgctctaccacttggtgccccaccacctgatgctctaccacctggacccacccccgaggactctccttccctggagacaggttccaggcagagtgactacatggaggccctgctgcaggcacctggctcctccatggaggatccccttcctgggcctgggagtcccagccacagtgctccagaccctgatggacttccccatttcatggagactcctcttcagcccccacctccagtgcagcgagttatggacccaggcttcctggacgtgtcgggaatttctctcttggacaacagcaatgccagtgtgtggcccagcctgccctcttccacagaactgaccaccacagctgtctcaacctcagggccagaggacatctgctccagcagcagttctcatgagcggggtggtgaggctacatggtctgggtcagagtttgaggtctccttcctggacagcccaggtgcccaagcccaggcggaccacctgcctcagctgactcttcctgacagtctcacctctgcagcctcaccagaagatgggctgtccgccgagctgcttgaagctcaggctgaggaggaaccagcaagcacagagggcctagatactgggacggaggctgaggggctggacagccaggcccagatctctaccacagaataacaccctgggctgtgacaaggcccatgatgacatttcatgaggcccagatgtgggcaggcagcccgggctgcactatgcggtcaggattccttgctgctttggtgggacatgaggcctcagtgggtggtgagagggggccatgggccttgtgggaggatatcttttggccgtgtaccctcaggtccagtgcttggtcctgctctggtcactggggcttcccaggaggcagcagggtctggtcataatccagtgtgaagatgaggtgaggaaggaaggggttgctgtccagtgttggcctggtcgctttgattcttcctgcacagctcagcccaccccatctgtactggaagggaccctggagccctgggaccaccccctttcaagtcccaaacactgagtcctctgtcatgtgtccttgtccctaggctacaatgctacacttggctcaggctgatcaccatgctagtcacaggagggagagagaggcagtgtacttgcccccatctcctggagggaggtgcgttggaaattctaggcccttcagcagagacccatttgtgcccagaccacaatatttcttcttcctcagggactacatgccacagacctgtatccccagtggcaactcctgttagctcccaaacttaaacagtgatctcttctaaatatacaaggcatctacccagccccaatagtgaataaaagtcacaaatttaagttcaacaccctaagcaatttctcaaagccagtctacctgactaggtctatccacgcacggttcccaaccccaagggggaattaggggattagattaagagtaggtaaagacccttttgttctttcctgttgtaggggaggaagctgttctccccaccccaggtgcctttggaggttaaggctaggttaggccctgcactccacctggggacggcccctcatcacctgaagtcctctgctgtgttgactggaccctcagttcccacactgctaattactatgaaagctgctctggcctcgtcttctagcttgtgcctagttgaaagtctcacctttacaggatcatttgtaatgctggtgtacatgcagggaactcacaagctgtgtcaggtatgcaggacaaggaatgtctgctctggggggcacaggccaactatatggagggagggtcccaaattagcaaacccttcatttaaagcaaacccttgtcaagcctaccagagcagctgatacgtgtgcataacagtgaggcattgtgtcctggatcgtctgggagcccagtgtcaagtctgctggaatgcaggaagtagaacagaatcgccacaggactgttctggggccagcttcccttaactctgtagcctggcagtctgacccaaagttgccctcacccaaaggttctggctcttccctccctcacttttactttcccttcccccataagttggaggataaaatgggtatcaatgctaatatttccagggagaacatgaaaccagaggtttctttctttctctgtaatctgctatgaaagaacagcactgatgtcaatgaatgtcagaatcaattctactctgggttgtaccagcatcacatccgggtgtacgttctcgtga

SEQ ID NO: 287283 - DNA, 3155 bp, Homo sapiens
tcatctcgggccgctcgcgcgctccgagtccgggtctggtggggcggtgcagagcgggattcccgaggcagggtcgtgggcactctatcgcggcgggcggttgaaggcgttacagtccttggaaaccgagctgctagccggttgctaggagcgtccagtgtctggagtgggaggaacaaaacgcctcacgtcacaaggcgaggaatcgagcgccgagagagcgagtcggtgctactggcgccgggtcggtccgggtaggcgcagcgggactggacctgggtgccgagcggagccgctgccatgggcctgggcgtcagcgctgagcagcccgcaggcggcgccgagggcttccacctccacggggtgcaggagaactccccagcccagcaggcgggcctggagccctactttgacttcatcatcaccattgggcactcgaggctgaacaaggagaatgacaccctgaaggcactactgaaagccaatgtggagaagcccgtgaagctggaggtgttcaatatgaagaccatgagggtgcgcgaggtggaggtggtgcccagcaacatgtggggcggccagggcctactgggtgccagtgtgcgcttctgcagcttccgcagggccagtgagcaggtgtggcatgtgctggatgtggaaccatcttcacctgctgcccttgccggcctgcgcccctacacagactatgtggttggttcggaccagattctccaggagtccgaggacttctttacgctcatcgagtctcatgaggggaagcccttgaagctgatggtgtataactccaagtcagactcctgccgggaggtgactgtaactcccaacgcagcctggggtggagagggcagtctgggatgtggcattggctatgggtatctacaccggatcccaactcagccccccagctaccacaagaagccacctggcaccccaccaccttctgctctaccacttggtgccccaccacctgatgctctaccacctggacccacccccgaggactctccttccctggagacaggttccaggcagagtgactacatggaggccctgctgcaggcacctggctcctccatggaggatccccttcctgggcctgggagtcccagccacagtgctccagaccctgatggacttccccatttcatggagactcctcttcagcccccacctccagtgcagcgagttatggacccaggcttcctggacgtgtcgggaatttctctcttggacaacagcaatgccagtgtgtggcccagcctgccctcttccacagaactgaccaccacagctgtctcaacctcagggccagaggacatctgctccagcagcagttctcatgagcggggtggtgaggctacatggtctgggtcagagtttgaggtctccttcctggacagcccaggtgcccaagcccaggcggaccacctgcctcagctgactcttcctgacagtctcacctctgcagcctcaccagaagatgggctgtccgccgagctgcttgaagctcaggctgaggaggaaccagcaagcacagagggcctagatactgggacggaggctgaggggctggacagccaggcccagatctctaccacagaataacaccctgggctgtgacaaggcccatgatgacatttcatgaggcccagatgtgggcaggcagcccgggctgcactatgcggtcaggattccttgctgctttggtgggacatgaggcctcagtgggtggtgagagggggccatgggccttgtgggaggatatcttttggccgtgtaccctcaggtccagtgcttggtcctgctctggtcactggggcttcccaggaggcagcagggtctggtcataatccagtgtgaagatgaggtgaggaaggaaggggttgctgtccagtgttggcctggtcgctttgattcttcctgcacagctcagcccaccccatctgtactggaagggaccctggagccctgggaccaccccctttcaagtcccaaacactgagtcctctgtcatgtgtccttgtccctaggctacaatgctacacttggctcaggctgatcaccatgctagtcacaggagggagagagaggcagtgtacttgcccccatctcctggagggaggtgcgttggaaattctaggcccttcagcagagacccatttgtgcccagaccacaatatttcttcttcctcagggactacatgccacagacctgtatccccagtggcaactcctgttagctcccaaacttaaacagtgatctcttctaaatatacaaggcatctacccagccccaatagtgaataaaagtcacaaatttaagttcaacaccctaagcaatttctcaaagccagtctacctgactaggtctatccacgcacggttcccaaccccaagggggaattaggggattagattaagagtaggtaaagacccttttgttctttcctgttgtaggggaggaagctgttctccccaccccaggtgcctttggaggttaaggctaggttaggccctgcactccacctggggacggcccctcatcacctgaagtcctctgctgtgttgactggaccctcagttcccacactgctaattactatgaaagctgctctggcctcgtcttctagcttgtgcctagttgaaagtctcacctttacaggatcatttgtaatgctggtgtacatgcagggaactcacaagctgtgtcaggtatgcaggacaaggaatgtctgctctggggggcacaggccaactatatggagggagggtcccaaattagcaaacccttcatttaaagcaaacccttgtcaagcctaccagagcagctgatacgtgtgcataacagtgaggcattgtgtcctggatcgtctgggagcccagtgtcaagtctgctggaatgcaggaagtagaacagaatcgccacaggactgttctggggccagcttcccttaactttttactttcccttcccccataagttggaggataaaatgggtatcaatgctaatatttccagggagaacatgaaaccagaggtttctttctttctctgtaatctgctatgaaagaaaataacaaatgaaaataaatgtgtactacactttgaaatattttaactaaagcctttattctat

SEQ ID NO: 287284 - DNA, 3083 bp, Homo sapiens
tcatctcgggccgctcgcgcgctccgagtccgggtctggtggggcggtgcagagcgggattcccgaggcagggtcgtgggcactctatcgcggcgggcggttgaaggcgttacagtccttggaaaccgagctgctagccggttgctaggagcgtccagtgtctggagtgggaggaacaaaacgcctcacgtcacaaggcgaggaatcgagcgccgagagagcgagtcggtgctactggcgccgggtcggtccgggtaggcgcagcgggactggacctgggtgccgagcggagccgctgccatgggcctgggcgtcagcgctgagcagcccgcaggcggcgccgagggcttccacctccacggggtgcaggagaactccccagcccagcaggcgggcctggagccctactttgacttcatcatcaccattgggcactcgaggctgaacaaggagaatgacaccctgaaggcactactgaaagccaatgtggagaagcccgtgaagctggaggtgttcaatatgaagaccatgagggtgcgcgaggtggaggtggtgcccagcaacatgtggggcggccagggcctactgggtgccagtgtgcgcttctgcagcttccgcagggccagtgagcaggtgtggcatgtgctggatgtggaaccatcttcacctgctgcccttgccggcctgcgcccctacacagactatgtggttggttcggaccagattctccaggagtccgaggacttctttacgctcatcgagtctcatgaggggaagcccttgaagctgatggtgtataactccaagtcagactcctgccgggaggtgactgtaactcccaacgcagcctggggtggagagggcagtctgggatgtggcattggctatgggtatctacaccggatcccaactcagccccccagctaccacaagaagccacctggcaccccaccaccttctgctctaccacttggtgccccaccacctgatgctctaccacctggacccacccccgaggactctccttccctggagacaggttccaggcagagtgactacatggaggccctgctgcaggcacctggctcctccatggaggatccccttcctgggcctgggagtcccagccacagtgctccagaccctgatggacttccccatttcatggagactcctcttcagcccccacctccagtgcagcgagttatggacccaggcttcctggacgtgtcgggaatttctctcttggacaacagcaatgccagtgtgtggcccagcctgccctcttccacagaactgaccaccacagctgtctcaacctcagggccagaggacatctgctccagcagcagttctcatgagcggggtggtgaggctacatggtctgggtcagagtttgaggtctccttcctggacagcccaggtgcccaagcccaggcggaccacctgcctcagctgactcttcctgacagtctcacctctgcagcctcaccagaagatgggctgtccgccgagctgcttgaagctcaggctgaggaggaaccagcaagcacagagggcctagatactgggacggaggctgaggggctggacagccaggcccagatctctaccacagaataacaccctgggctgtgacaaggcccatgatgacatttcatgaggcccagatgtgggcaggcagcccgggctgcactatgcggtcaggattccttgctgctttggtgggacatgaggcctcagtgggtggtgagagggggccatgggccttgtgggaggatatcttttggccgtgtaccctcaggtccagtgcttggtcctgctctggtcactggggcttcccaggaggcagcagggtctggtcataatccagtgtgaagatgaggtgaggaaggaaggggttgctgtccagtgttggcctggtcgctttgattcttcctgcacagctcagcccaccccatctgtactggaagggaccctggagccctgggaccaccccctttcaagtcccaaacactgagtcctctgtcatgtgtccttgtccctaggctacaatgctacacttggctcaggctgatcaccatgctagtcacaggagggagagagaggcagtgtacttgcccccatctcctggagggaggtgcgttggaaattctaggcccttcagcagagacccatttgtgcccagaccacaatatttcttcttcctcagggactacatgccacagacctgtatccccagtggcaactcctgttagctcccaaacttaaacagtgatctcttctaaatatacaaggcatctacccagccccaatagtgaataaaagtcacaaatttaagttcaacaccctaagcaatttctcaaagccagtctacctgactaggtctatccacgcacggttcccaaccccaagggggaattaggggattagattaagagtaggtaaagacccttttgttctttcctgttgtaggggaggaagctgttctccccaccccaggtgcctttggaggttaaggctaggttaggccctgcactccacctggggacggcccctcatcacctgaagtcctctgctgtgttgactggaccctcagttcccacactgctaattactatgaaagctgctctggcctcgtcttctagcttgtgcctagttgaaagtctcacctttacaggatcatttgtaatgctggtgtacatgcagggaactcacaagctgtgtcaggtatgcaggacaaggaatgtctgctggagcccagtgtcaagtctgctggaatgcaggaagtagaacagaatcgccacaggactgttctggggccagcttcccttaactctgtagcctggcagtctgacccaaagttgccctcacccaaaggttctggctcttccctccctcacttttactttcccttcccccataagttggaggataaaatgggtatcaatgctaatatttccagggagaacatgaaaccagaggtttctttctttctctgtaatctgctatgaaagaaaataacaaatgaaaataaatgtgtactacactttgaaatattttaactaaagcctttattctat

SEQ ID NO: 287285 - DNA, 1886 bp, Homo sapiens
tcatctcgggccgctcgcgcgctccgagtccgggtctggtggggcggtgcagagcgggattcccgaggcagggtcgtgggcactctatcgcggcgggcggttgaaggcgttacagtccttggaaaccgagctgctagccggttgctaggagcgtccagtgtctggagtgggaggaacaaaacgcctcacgtcacaaggcgaggaatcgagcgccgagagagcgagtcggtgctactggcgccgggtcggtccgggtaggcgcagcgggactggacctgggtgccgagcggagccgctgccatgggcctgggcgtcagcgctgagcagcccgcaggcggcgccgagggcttccacctccacggggtgcaggagaactccccagcccagcaggcgggcctggagccctactttgacttcatcatcaccattgggcactcgaggctgaacaaggagaatgacaccctgaaggcactactgaaagccaatgtggagaagcccgtgaagctggaggtgttcaatatgaagaccatgagggtgcgcgaggtggaggtggtgcccagcaacatgtggggcggccagggcctactgggtgccagtgtgcgcttctgcagcttccgcagggccagtgagcaggtgtggcatgtgctggatgtggaaccatcttcacctgctgcccttgccggcctgcgcccctacacagactatgtggttggttcggaccagattctccaggagtccgaggacttctttacgctcatcgagtctcatgaggggaagcccttgaagctgatggtgtataactccaagtcagactcctgccgggaggtgactgtaactcccaacgcagcctggggtggagagggcagtctgggatgtggcattggctatgggtatctacaccggatcccaactcagccccccagctaccacaagaagccacctggcaccccaccaccttctgctctaccacttggtgccccaccacctgatgctctaccacctggacccacccccgaggactctccttccctggagacaggttccaggcagagtgactacatggaggccctgctgcaggcacctggctcctccatggaggatccccttcctgggcctgggagtcccagccacagtgctccagaccctgatggacttccccatttcatggagactcctcttcagcccccacctccagtgcagcgagttatggacccaggcttcctggacgtgtcgggaatttctctcttggacaacagcaatgccagtgtgtggcccagcctgccctcttccacagaactgaccaccacagctgtctcaacctcagggccagaggacatctgctccagcagcagttctcatgagcggggtggtgaggctacatggtctgggtcagagtttgaggtctccttcctggacagcccaggtgcccaagcccaggcggaccacctgcctcagctgactcttcctgacagtctcacctctgcagcctcaccagaagatgggctgtccgccgagctgcttgaagctcaggctgaggaggaaccagcaagcacagaggggagcccagtgtcaagtctgctggaatgcaggaagtagaacagaatcgccacaggactgttctggggccagcttcccttaactctgtagcctggcagtctgacccaaagttgccctcacccaaaggttctggctcttccctccctcacttttactttcccttcccccataagttggaggataaaatgggtatcaatgctaatatttccagggagaacatgaaaccagaggtttctttctttctctgtaatctgctatgaaagaaaataacaaatgaaaataaatgtgtactacactttgaaatattttaactaaagcctttattctat

SEQ ID NO: 287286 - DNA, 535 bp, Homo sapiens
gttttttctggtatattcttatatgattaatcgatatcttaacctcagtgaccaagctgtcatagatgttagtctgtccacagacacacatgcacacccaacacctgtgcccattgatggtatctaagttcttgaatgctcagtcctgtagcctggtggaaggagggtgctctgaactagaagttggctgatttgttttctagccacttatttttctcactgacttcttgggagagcctggccaagtttctcaactttcacagcctgccttaatctgcccatgagggaaaggggactgatgatgcaaattgctttgcatttcccagggagactgggagattgggagtggtggaactttccaagggagaagggaatccttatttgtacccagttttgctcattgccctcacctccaacccctaggagtctttagccacatgcctgcagcagaagcagcaatgtagtgggtgctcctgtagccaaggtgtgcttttcttcttttcatatatttatttatttttctcagcaaccctat

SEQ ID NO: 287287 - DNA, 1766 bp, Homo sapiens
ggccgtaggcggggcgggcggcggcggcggcggcggagccaggacccagacatctgggactgttgttctctcgcggcgcgaccgcctcagtcacttcgcccagagacccggacctggtccgctggggagcaggcggccataaaccccctctctcccggttccctgacgccgcggcaggagctgttacaaacaccctgcggttggtctccgatgcccttcagtgaggtggggacgcctggaccctggtgagcgaaccccaagccaccccccaccccaactcagtgtcttcgccggcccccggcccgtacgcctgtctggtcgccatggctgaaaacacagagggggatctgaactccaacctgctccacgccccctaccacaccggggaccctcagctggacacggccatcgggcagtggctccgctgggataagaatcccaaaacaaaagagcagattgaaaacctgttacggaatgggatgaacaaggagctgcgagatcgtctttgttgccgaatgacttttgggactgcaggacttcgttctgccatgggggcagggttttgctatattaatgaccttacagtaatacagtcaacacaggggatgtacaaataccttgagagatgtttctcagacttcaagcagagaggctttgtggttgggtatgacactcggggtcaagtaactagcagctgcagcagccagaggcttgctaaactcactgctgcagtcttgctggccaaagatgttcctgtgtaccttttttcaagatatgttcctacaccttttgtaccatatgcagttcagaagctcaaagcagttgcaggtgtgatgattactgcctctcacaaccgcaaggaagacaatggatacaaggtttactgggaaactggtgctcagatcacatctcctcatgataaagaaattctaaaatgtatagaagaatgtgtggaaccctggaatggttcctggaatgataatttagtggataccagcccgctgaagagagaccctctgcaggacatttgcaggagatacatggaagatctgaaaaagatctgtttttacagagggagttaaactcgaagaccaccttgaaatttgtgcacacatcttttcatggggtcggacatgactatgtgcagttggcttttaaagtgtttggttttaagcctccaattccagtaccagaacaaaaagatcctgatccagacttttctaccgttaaatgtccaaatcctgaagaaggagaatctgtgctggaactttccttgagactggcagagaaagaaaatgcccgggtagtgctagccacagatcctgatgcagacagactggcagcagcagaacttcaggagaatggttgttggaaagttttcacagggaatgagttggcagctttgtttggatggtggatgtttgattgctggaagaaaaataaatcaagaaatgctgatgtgaagaacgtttatatgttagccaccacagtctcttctaaaattctgaaggcaattgcacttaaagaaggatttcattttgaagaaacattaccaggttttaaatggattggaagtaggataatagacctcctggaaaatgggaaagaagtcctttttgcatttgaagagtctattggttttctctgtggaacttcagttttggataaagatgggggtgagtgcagctgttgtggttgctgagatggcatcttacctggaaaccatgaatataacattgaaacagcaactggttaaggtttatgaa

SEQ ID NO: 287288 - DNA, 644 bp, Homo sapiens
cgcgaccgcctcagtcacttcgcccagagacccggacctggtccgctggggagcaggcggccataaaccccctctctcccggttccctgacgccgcggcaggagctgttacaaacaccctgcggttggtctccgatgcccttcagtgaggtggggacgcctggaccctggtgagcgaaccccaagccaccccccaccccaactcagtgtcttcgccggcccccggcccgtacgcctgtctggtcgccatggctgaaaacacagagggggatctgaactccaacctgctccacgccccctaccacaccggggaccctcagctggacacggccatcgggcagtggctccgctgggataaggtgggtacctggtcagcccggcaaacgccgtcgcctcccccacacagtctgctctttcctgtgcccacccagcgccccgcgggctgcagaggagatggctcgggacaccgagcggggggcagcggagcagggcgttgccacccacctatgcgtggggttgctccttcggactgccagagccgggcggcaacatctgcatcgcttccttctgcagtgctctcaattgtaacctcccttcctcttctttaccctctttcctttcaagtgctgtcttccctctttcttc

SEQ ID NO: 287289 - DNA, 951 bp, Homo sapiens
tcgccctccgctgcgccctccccgagcgcggctccaggaccccgtcgacccggagcgctgtcctcgtggaccgagtcgcgggcctgggcacggaactcacgctcactcccagctcccgacgtgcacacggctcccatccgttgtcttccgagcgtcaggccgcccctacccgtgctttctgctctgcagaccctcttcctagacctccgtcctttgtcccatcgctgccttcccctcaagctcagggccaagctgtccgccaacctcggctcctccgggcagccctcgcccggggtgcgccccggggcaggacccccagcccacgcccagggcccgcccctgccctccagccctacgccttgacccgctttcctgcgtctctcagcctacctgaccttgtctttacctctgtgggcagctcccttgtgatctgcttagttcccacccccctttaagaattcaatagagaagccagacgcaaaactacagatatcgtatgagtccagttttgtgaagtgcctagaatagtcaaaattcacagagacagaagcagtggtcgccaggaatggggaagcaaggcggagttgggcagctcgtgttcaatggttttgtccgccttccctgcctcctcttctgggggagttagatcgagttgtaacaagaacatgccactgtctcgctggctgcagcgtgtggtccccttaccagagtgaggatgcgaagagaaggtggctgtctgcaaaccaggaagagagccctcaccaggaacccgtccagctgccaccttgaacttggacttccaagcctccagaactgtgagggatcaactgaattcctatcggggtgatcactaagaagaaaaggtgaataccggatgttggaagctattgaatctgccaccagtgaaattctttcacaccattctgctgtcctgggtccttgaacccaaat

SEQ ID NO: 287290 - DNA, 267 bp, Homo sapiens
taacactctctccctctcccagttttgtccgccttccctgcctcctcttctgggggagttagatcgagttgtaacaagaacatgccactgtctcgctggctgcagcgtgtggtccccttaccagagtgaggatgcgaagagaaggtggctgtctgcaaaccaggaagagagccctcaccaggaacccgtccagctgccaccttgaacttggacttccaagcctccagaactgtgagggataaatgtatgattttaaagtcgcccagt

SEQ ID NO: 287291 - DNA, 267 bp, Homo sapiens
gggcctttggtaggtaattacggttagatgaggtcatggggtggggccctcattatagatctggtaagaaaagagagcattgtctctgtgtctccctctctctctctctctctctctctctcatttctctctatctcatttctctctctctctctatctcatttttctctctctctctttctctcctctgtcttttcccaccaagtgaggatgcgaagagaaggtggctgtctgcaaaccaggaagagagccctcaccaggaacccg

SEQ ID NO: 287292 - DNA, 865 bp, Homo sapiens
tcgccctccgctgcgccctccccgagcgcggctccaggaccccgtcgacccggagcgctgtcctcgtggaccgagtcgcgggcctgggcacggaactcacgctcactcccagctcccgacgtgcacacggctcccatccgttgtcttccgagcgtcaggccgcccctacccgtgctttctgctctgcagaccctcttcctagacctccgtcctttgtcccatcgctgccttcccctcaagctcagggccaagctgtccgccaacctcggctcctccgggcagccctcgcccggggtgcgccccggggcaggacccccagcccacgcccagggcccgcccctgccctccagccctacgccttgacccgctttcctgcgtctctcagcctacctgaccttgtctttacctctgtgggcagctcccttgtgatctgcttagttcccacccccctttaagaattcaatagagaagccagacgcaaaactacagatatcgtatgagtccagttttgtgaagtgcctagaatagtcaaaattcacagagacagaagcagtggtcgccaggaatggggaagcaaggcggagttgggcagctcgtgttcaatgggtagagtttcaggctggggtgatggaagggtgctggaaatgagtggtagtgatggcggcacaacagtgtgaatctacttaatcccactgaactgtatgctgaaaaatggtttagacggtgaattttaggttatgtatgttttaccacaatttttaaaaagctagtgaaaagctggtaaaaagaaagaaaagaggcttttttaaaaagttaaatatataaaaagagcatcatcagtccaaagtccagcagttgtccctcc

SEQ ID NO: 287293 - DNA, 4287 bp, Homo sapiens
aagaaaaaattaattaagatgtatttaacctttaagtatagaatgattgtataaattagatttcaactgaaaggacaattagcgattcagagaaagctcctagaaatagactgaaaacaaagccatacatagagtaagaaatagaacctatggaacttccatttttctaactatagttttttgtttttgttttttcccagttgttaaaaaaaaaacaactcacagtttcaatattttctgaaccaaaaatcagaacacatggtttgtgtcaaagggtttttctgtgctacgtctgggagtgctgacctaagtgacatttttttttaatgccaaatacagtaatctccaagcttttaatggcttatgccaagatgacagaatatgtgaaatctgattgtcccagagttacactctgcactccaaagctacaacagtgccacagctgagaggtttccctatacttcctactactgtgacaatttagcaatccttcaaatggaaaattcctaattacacgagacaatggtcctacagtaggcccgtgcggaataagttccctcgttggaaaaatgctagcatgaatagtttgataaatgcaatccatcagcaaaggagagcaagcaggcagagactgtgccaagcagaaactcattcgcatcaagttttccaataagtttccttcccccagtcccttttcttcaatcctgcttttaagccaggccccagggtaagtctggtagaacactgagcaggaaagcttggaagggttctacaccacttcaaaaatacctttgcttaaaaacacttatatagccagtgattagcaattaaaatgtgaaaataatcaactactcagtagttaaattctgctaattatcaaaagtcatagtctactgggatcagcagcattacaaaaggaagtcatatcgcatttcttaagctttttctgaatggtttaacaggtctctttcagtgttaattgcacttaaaacatctgctttttttcatttaatctctgaaatctgttcattttttccctccatttataaaaaggggtcaatttatcatttgctctatagctatttgaattcgaaaaagattccacaaaatttgagttgcacacaggcgctttctgaagcagattaaacttgtccttgtgacacttcagagcttggactgcagtgacttcaggtgcttgtaagattcgtggacctctgctttgttcagtggggagttcttagcccactcaaacaagttttcatacacattcccatcatagcggccaagcacagagccaagtgtcacatcctgaaaatcaaatgcatcaaccaaagcaacagcatctgagcgaatcagagtgagtaactcctttacacgctggtttacttgtgtaatctgaggctctgtcatgatgctcccctgaaggaaatcccccgcgttctgactgattccatacagagaatacagcagacataaactccttaagacagcttgaatggctttatcttgaattttgaggagtttttctgaaaagagcttaactaccacatagtggcaatgtgcctcacttgctcgaacaaggtcaacagaagttaggttccaagctacctccttgctttttctgtgaatcacttctttttgaaggttttttgcagcaatttctactaatctggctgcacggagtttatatgcttcggttaggctttcggggctgttgatatccaccatggttggccagactgctacctgctgtggctggatgcgctgactgggcaggtcgttcaaataggacaccatgccacacaccaactttcctgagtgcacctgatcataacttttcatcaggaacctagccgtctggagcatcatgacagtgttttctccctcaaaggtacagcttggggtgaaattgacataaatatttggaagaccactgcaatgagaatagccatgcccaccacaagccatccgacatgcttcaatgccagtgtttgcagtccaggaggtgaaagccttcagtccagcggtgagggcatgaagctcaggcagttcactcaggtccccttgaccaatgccttcgttaatccggtgataggtctccttcatgtatgcgcccacaaactggaaggcataggcagtggccaggagtggaaagagtttatactgctgggtttgaaaatccaaaatctgtggttctggttcacctggcttcatttcagactggtgcctcacagcgctgtatcggatggcaatggtgcacgccttagacagagcccgagcagcttctcccacaaggaaggacctgacaaacaccatggtcccgtaagtcagcttgttactcagcggtttcacgtatgtgccatcaggcttcacctgggcatacttcatcagcatgttttctctgggaatacgatggttgtccattttgaggtagccattgtctatctcatcataaccaaatttggggccgatgtcaccaacggtaattcctggcaaaggcttatgggtcccgatttcacgaataggtacgataaaggcatgtaatccatagcatttccccttagtgatgagctgggcaagaactattgcatgatttgaagtctttccaagcccaccaggccaccatttaatggaggtcacagtaggactgttgagaatgaactcctgggtttcagggtcatacgtggctgtggtttccaagcctcgaaggtgagttccatgacccatctctgtctgggcataagtgccaatgatctccaagttccaggcgggcatgaagaagcgctcctgctgctccgcagttgcctggtgaagcaaggtgggcaggaacatgcccaagtgaagatccagaggctcaggccgccctcggtgcacaaaatttttaaaccacataatttcatcagggtcagcgatgccaaactccctcatcttcttcaccatgatggcacttttcctgacagccacctcataacgctggctgcgagtgaggaagttcaagtcctcatgctggaagtctgggtcgttcaggatcatgttctcgatctctcggcggcgccgggttttctcggggctgccgtccaggatgtgtgtaagcagctccgggttgaagctggcggaatcccgctccctgcgcaggtccgggttcatggcgacgaccagctggcagcgaagtaagcaccgaccgaggtggcagtgacaatctaaatccgcagctccagcgccggccggaccctaggaggcagcctcaggacggcgcaagtccccgcctccgctcgcccggcccgccccggcccgccccttctttctccgtggccctttggcgcgtgagtgacagcggcccagacagagggggcgatgtccgcgtcgtggctggggccggtcgcggggcagactaatcccctgctcctggccaggggaggctcccgagcggatcctcgggaaaggggctccgaaggtcaagaaactgccctgctgggcgtccggggagtgggaaaataaagcactttttgtatcccgcccctcccccgtcacgtgaccacgcgaggcggaaagaagaaatccgaggaccggcgacgcctagaacaggagcccatgatgctgcccaaacctgggacctattacctcccctgggaggttagtgcaggccaagttcctgatgggagcacgctgagaacatttggcaggttgtgcctctatgacatgattcagtccagagtaacactgatggctcagcacggatccgatcagcaccaggttcttgtctgtaccaagttggtggagcccttccacgcccaggtgggctccctgtacatcgtcctcggggagctccagcatcagcaggacagaggctccgtggtgaaggcgcgcgtgctgacctgtgtggaggggatgaacctgcccttgttggaacaagccatccgggagcagagactgtacaagcaggagcggggcggcagccagtaggaaacagcagcctagcaacaccctcacctgcttcagagcccgaaccctctggagctgcaggagcccgggagagcacagacgcctccccagcgacggccttgtctggagctcgaaagccgaggggcgggtgatgaatccagccccttcccctactttgggattggctcagcaatgagaacccagaaagcatgccataaatccgacagccccaccccaggagactgcaggtggccgagcttgggcgccggggccgtgcttggtgtggggccatggagggttccagaaggtcctggtgaataaaggcccagggggcgtgctcttgaa

SEQ ID NO: 287294 - DNA, 5904 bp, Homo sapiens
aagaaaaaattaattaagatgtatttaacctttaagtatagaatgattgtataaattagatttcaactgaaaggacaattagcgattcagagaaagctcctagaaatagactgaaaacaaagccatacatagagtaagaaatagaacctatggaacttccatttttctaactatagttttttgtttttgttttttcccagttgttaaaaaaaaaacaactcacagtttcaatattttctgaaccaaaaatcagaacacatggtttgtgtcaaagggtttttctgtgctacgtctgggagtgctgacctaagtgacatttttttttaatgccaaatacagtaatctccaagcttttaatggcttatgccaagatgacagaatatgtgaaatctgattgtcccagagttacactctgcactccaaagctacaacagtgccacagctgagaggtttccctatacttcctactactgtgacaatttagcaatccttcaaatggaaaattcctaattacacgagacaatggtcctacagtaggcccgtgcggaataagttccctcgttggaaaaatgctagcatgaatagtttgataaatgcaatccatcagcaaaggagagcaagcaggcagagactgtgccaagcagaaactcattcgcatcaagttttccaataagtttccttcccccagtcccttttcttcaatcctgcttttaagccaggccccagggtaagtctggtagaacactgagcaggaaagcttggaagggttctacaccacttcaaaaatacctttgcttaaaaacacttatatagccagtgattagcaattaaaatgtgaaaataatcaactactcagtagttaaattctgctaattatcaaaagtcatagtctactgggatcagcagcattacaaaaggaagtcatatcgcatttcttaagctttttctgaatggtttaacaggtctctttcagtgttaattgcacttaaaacatctgctttttttcatttaatctctgaaatctgttcattttttccctccatttataaaaaggggtcaatttatcatttgctctatagctatttgaattcgaaaaagattccacaaaatttgagttgcacacaggcgctttctgaagcagattaaacttgtccttgtgacacttcagagcttggactgcagtgacttcaggtgcttgtaagattcgtggacctctgctttgttcagtggggagttcttagcccactcaaacaagttttcatacacattcccatcatagcggccaagcacagagccaagtgtcacatcctgaaaatcaaatgcatcaaccaaagcaacagcatctgagcgaatcagagtgagtaactcctttacacgctggtttacttgtgtaatctgaggctctgtcatgatgctcccctgaaggaaatcccccgcgttctgactgattccatacagagaatacagcagacataaactccttaagacagcttgaatggctttatcttgaattttgaggagtttttctgaaaagagcttaactaccacatagtggcaatgtgcctcacttgctcgaacaaggtcaacagaagttaggttccaagctacctccttgctttttctgtgaatcacttctttttgaaggttttttgcagcaatttctactaatctggctgcacggagtttatatgcttcggttaggctttcggggctgttgatatccaccatggttggccagactgctacctgctgtggctggatgcgctgactgggcaggtcgttcaaataggacaccatgccacacaccaactttcctgagtgcacctgatcataacttttcatcaggaacctagccgtctggagcatcatgacagtgttttctccctcaaaggtacagcttggggtgaaattgacataaatatttggaagaccactgcaatgagaatagccatgcccaccacaagccatccgacatgcttcaatgccagtgtttgcagtccaggaggtgaaagccttcagtccagcggtgagggcatgaagctcaggcagttcactcaggtccccttgaccaatgccttcgttaatccggtgataggtctccttcatgtatgcgcccacaaactggaaggcataggcagtggccaggagtggaaagagtttatactgctgggtttgaaaatccaaaatctgtggttctggttcacctggcttcatttcagactggtgcctcacagcgctgtatcggatggcaatggtgcacgccttagacagagcccgagcagcttctcccacaaggaaggacctgacaaacaccatggtcccgtaagtcagcttgttactcagcggtttcacgtatgtgccatcaggcttcacctgggcatacttcatcagcatgttttctctgggaatacgatggttgtccattttgaggtagccattgtctatctcatcataaccaaatttggggccgatgtcaccaacggtaattcctggcaaaggcttatgggtcccgatttcacgaataggtacgataaaggcatgtaatccatagcatttccccttagtgatgagctgggcaagaactattgcatgatttgaagtctttccaagcccaccaggccaccatttaatggaggtcacagtaggactgttgagaatgaactcctgggtttcagggtcatacgtggctgtggtttccaagcctcgaaggtgagttccatgacccatctctgtctgggcataagtgccaatgatctccaagttccaggcgggcatgaagaagcgctcctgctgctccgcagttgcctggtgaagcaaggtgggcaggaacatgcccaagtgaagatccagaggctcaggccgccctcggtgcacaaaatttttaaaccacataatttcatcagggtcagcgatgccaaactccctcatcttcttcaccatgatggcacttttcctgacagccacctcataacgctggctgcgagtgaggaagttcaagtcctcatgctggaagtctgggtcgttcaggatcatgttctcgatctctcggcggcgccgggttttctcggggctgccgtccaggatgtgtgtaagcagctccgggttgaagctggcggaatcccgctccctgcgcaggtccgggttcatggcgacgaccagctggcagcgaagtaagcaccgaccgaggtggcagtgacaatctaaatccgcagctccagcgccggccggaccctaggaggcagcctcaggacggcgcaagtccccgcctccgctcgcccggcccgccccggcccgccccttctttctccgtggccctttggcgcgtgagtgacagcggcccagacagagggggcgatgtccgcgtcgtggctggggccggtcgcggggcagactaatcccctgctcctggccaggggaggctcccgagcggatcctcgggaaaggggctccgaaggtcaagaaactgccctgctgggcgtccggggagtgggaaaataaagcactttttgtatcccgcccctcccccgtcacgtgaccacgcgaggcggaaagaagaaatccgaggaccggcgacgcctagaacaggagcccatgatgctgcccaaacctgggacctattacctcccctgggaggttagtgcaggccaagttcctgatgggagcacgctgagaacatttggcaggttgtgcctctatgacatgattcagtccagagtaacactgatggctcagcacggatccgatcagcaccaggttcttgtctgtaccaagttggtggagcccttccacgcccaggtgggctccctgtacatcgtcctcggggagctccagcatcagcaggacagaggctccgtggtgaaggcgcgcgtgctgacctgtgtggaggggatgaacctgcccttgttggaacaagccatccgggagcagagactgtacaagcaggagcggggcggcagccagtaggaaacagcagcctagcaacaccctcacctgcttcagagcccgaaccctctggagctgcaggagcccgggagagcacagacgcctccccagcgacggccttgtctggagctcgaaagccgaggggcgggtgatgaatccagccccttcccctactttgggattggctcagcaatgagaacccagaaagcatgccataaatccgacagccccaccccaggagactgcaggtggccgagcagctctgtggccatggatatgttccagaaggtagagaagatcggagagggcacctatggggtggtgtacaaggccaagaacagggagacagggcagctggtggccctgaagaagatcagactggatttggagatggagggggtcccaagcactgccatcagggagatctcgctgctcaaggaactgaagcaccccaacatcgtccgactgctggacgtggtgcacaacgagaggaagctctatctggtgtttgagttcctcagccaggacctgaagaagtacatggactccaccccaggctcagagctccccctgcacctcatcaagagctacctcttccagctgctgcagggggtgagtttctgccactcacatcgggtcatccaccgagacctgaagccccagaacctgctcatcaatgagttgggtgccatcaagctggctgacttcggcctggctcgcgccttcggggtgcccctgcgcacctacacccatgaggtggtgacactgtggtatcgcgcccccgagattctcttgggcagcaagttctataccacagctgtggatatctggagcattggttgcatctttgcagagatggtgactcgaaaagccctgtttcctggtgactctgagattgaccagctctttcgtatctttcgtatgctggggacacccagcgaagacacatggcccggggtcacccagctgcctgactataagggcagcttccctaagtggaccaggaagggactggaagagattgtgcccaatctggagccagagggcagggacctgctcatgcaactcctgcagtatgaccccagccagcggatcacagccaagactgccctggcccacccgtacttctcatcccctgagccctccccagctgcccgccagtatgtgctgcagcgattccgccattgagaatgtcaaggccacactcagatcctttctcgagcagctgctgccccagctgcctcctacccattgccaagagaggatgcatctggggagagcaaagcactaaggaattcagcatcagcctgcagagggctgagtctgggttagtcctgcccgcaggttagcgagatcctgtgttgttttttgggttggacggtgccgtttcaaaatagaggcacagatgctccatgcacgaggggtccccgggcactggaacaagtgccaagttgaaggcagggggcctgccagagctgggtgtgggtattcaggccctcacctgccctgcctgcagggccagaccctgaggaaagggcgccccctgctggtctttttggatttaaaatgtttgggggaagagttgagttccagttcagtcccaagttaaacaggagggagtgagggagaggagagagggcgttccccggatcccaggagagctgggctatgactgcaataaggagttgttccttcacctgagatgtgcttcttttggttcatttctggcttgacaacaagaaataaacgtggtatgttcctgaaaaaaaaaaaatggcctcttggcttaacggggaccttttggccgttccctttttgaggttaataatgaacccgccactgacccctggcctggccgtcggcgccgaagcgcatactcaccaaggcgggataccgtttcccaaactaggataccccagaaaacattggaccaaggcccaaagggcataccacaagcgccgg

SEQ ID NO: 287295 - DNA, 4335 bp, Homo sapiens
  misc_feature (4219)..(4219): n is a, c, g, or t
  misc_feature (4225)..(4225): n is a, c, g, or t
  misc_feature (4227)..(4227): n is a, c, g, or t
  misc_feature (4232)..(4232): n is a, c, g, or t
  misc_feature (4234)..(4234): n is a, c, g, or t
  misc_feature (4238)..(4238): n is a, c, g, or t
  misc_feature (4247)..(4248): n is a, c, g, or t
  misc_feature (4254)..(4254): n is a, c, g, or t
  misc_feature (4257)..(4258): n is a, c, g, or t
  misc_feature (4268)..(4268): n is a, c, g, or t
  misc_feature (4277)..(4277): n is a, c, g, or t
  misc_feature (4279)..(4279): n is a, c, g, or t
aagaaaaaattaattaagatgtatttaacctttaagtatagaatgattgtataaattagatttcaactgaaaggacaattagcgattcagagaaagctcctagaaatagactgaaaacaaagccatacatagagtaagaaatagaacctatggaacttccatttttctaactatagttttttgtttttgttttttcccagttgttaaaaaaaaaacaactcacagtttcaatattttctgaaccaaaaatcagaacacatggtttgtgtcaaagggtttttctgtgctacgtctgggagtgctgacctaagtgacatttttttttaatgccaaatacagtaatctccaagcttttaatggcttatgccaagatgacagaatatgtgaaatctgattgtcccagagttacactctgcactccaaagctacaacagtgccacagctgagaggtttccctatacttcctactactgtgacaatttagcaatccttcaaatggaaaattcctaattacacgagacaatggtcctacagtaggcccgtgcggaataagttccctcgttggaaaaatgctagcatgaatagtttgataaatgcaatccatcagcaaaggagagcaagcaggcagagactgtgccaagcagaaactcattcgcatcaagttttccaataagtttccttcccccagtcccttttcttcaatcctgcttttaagccaggccccagggtaagtctggtagaacactgagcaggaaagcttggaagggttctacaccacttcaaaaatacctttgcttaaaaacacttatatagccagtgattagcaattaaaatgtgaaaataatcaactactcagtagttaaattctgctaattatcaaaagtcatagtctactgggatcagcagcattacaaaaggaagtcatatcgcatttcttaagctttttctgaatggtttaacaggtctctttcagtgttaattgcacttaaaacatctgctttttttcatttaatctctgaaatctgttcattttttccctccatttataaaaaggggtcaatttatcatttgctctatagctatttgaattcgaaaaagattccacaaaatttgagttgcacacaggcgctttctgaagcagattaaacttgtccttgtgacacttcagagcttggactgcagtgacttcaggtgcttgtaagattcgtggacctctgctttgttcagtggggagttcttagcccactcaaacaagttttcatacacattcccatcatagcggccaagcacagagccaagtgtcacatcctgaaaatcaaatgcatcaaccaaagcaacagcatctgagcgaatcagagtgagtaactcctttacacgctggtttacttgtgtaatctgaggctctgtcatgatgctcccctgaaggaaatcccccgcgttctgactgattccatacagagaatacagcagacataaactccttaagacagcttgaatggctttatcttgaattttgaggagtttttctgaaaagagcttaactaccacatagtggcaatgtgcctcacttgctcgaacaaggtcaacagaagttaggttccaagctacctccttgctttttctgtgaatcacttctttttgaaggttttttgcagcaatttctactaatctggctgcacggagtttatatgcttcggttaggctttcggggctgttgatatccaccatggttggccagactgctacctgctgtggctggatgcgctgactgggcaggtcgttcaaataggacaccatgccacacaccaactttcctgagtgcacctgatcataacttttcatcaggaacctagccgtctggagcatcatgacagtgttttctccctcaaaggtacagcttggggtgaaattgacataaatatttggaagaccactgcaatgagaatagccatgcccaccacaagccatccgacatgcttcaatgccagtgtttgcagtccaggaggtgaaagccttcagtccagcggtgagggcatgaagctcaggcagttcactcaggtccccttgaccaatgccttcgttaatccggtgataggtctccttcatgtatgcgcccacaaactggaaggcataggcagtggccaggagtggaaagagtttatactgctgggtttgaaaatccaaaatctgtggttctggttcacctggcttcatttcagactggtgcctcacagcgctgtatcggatggcaatggtgcacgccttagacagagcccgagcagcttctcccacaaggaaggacctgacaaacaccatggtcccgtaagtcagcttgttactcagcggtttcacgtatgtgccatcaggcttcacctgggcatacttcatcagcatgttttctctgggaatacgatggttgtccattttgaggtagccattgtctatctcatcataaccaaatttggggccgatgtcaccaacggtaattcctggcaaaggcttatgggtcccgatttcacgaataggtacgataaaggcatgtaatccatagcatttccccttagtgatgagctgggcaagaactattgcatgatttgaagtctttccaagcccaccaggccaccatttaatggaggtcacagtaggactgttgagaatgaactcctgggtttcagggtcatacgtggctgtggtttccaagcctcgaaggtgagttccatgacccatctctgtctgggcataagtgccaatgatctccaagttccaggcgggcatgaagaagcgctcctgctgctccgcagttgcctggtgaagcaaggtgggcaggaacatgcccaagtgaagatccagaggctcaggccgccctcggtgcacaaaatttttaaaccacataatttcatcagggtcagcgatgccaaactccctcatcttcttcaccatgatggcacttttcctgacagccacctcataacgctggctgcgagtgaggaagttcaagtcctcatgctggaagtctgggtcgttcaggatcatgttctcgatctctcggcggcgccgggttttctcggggctgccgtccaggatgtgtgtaagcagctccgggttgaagctggcggaatcccgctccctgcgcaggtccgggttcatggcgacgaccagctggcagcgaagtaagcaccgaccgaggtggcagtgacaatctaaatccgcagctccagcgccggccggaccctaggaggcagcctcaggacggcgcaagtccccgcctccgctcgcccggcccgccccggcccgccccttctttctccgtggccctttggcgcgtgagtgacagcggcccagacagagggggcgatgtccgcgtcgtggctggggccggtcgcggggcagactaatcccctgctcctggccaggggaggctcccgagcggatcctcgggaaaggggctccgaaggtcaagaaactgccctgctgggcgtccggggagtgggaaaataaagcactttttgtatcccgcccctcccccgtcacgtgaccacgcgaggcggaaagaagaaatccgaggaccggcgacgcctagaacaggagcccatgatgctgcccaaacctgggacctattacctcccctgggaggttagtgcaggccaagttcctgatgggagcacgctgagaacatttggcaggttgtgcctctatgacatgattcagtccagagtaacactgatggctcagcacggatccgatcagcaccaggttcttgtctgtaccaagttggtggagcccttccacgcccaggtgggctccctgtacatcgtcctcggggagctccagcatcagcaggacagaggctccgtggtgaaggcgcgcgtgctgacctgtgtggaggggatgaacctgcccttgttggaacaagccatccgggagcagagactgtacaagcaggagcggggcggcagccagtaggaaacagcagcctagcaacaccctcacctgcttcagagcccgaaccctctggagctgcaggagcccgggagagcacagacgcctccccagcgacggccttgtctggagctcgaaagccgaggggcgggtgatgaatccagccccttcccctactttgggattggctcagcaatgagaacccagaaagcatgccataaatccgacagccccaccccaggagactgcaggtggccgaggcggctgggggggcaggggntccaangncgggnanaagncggggggcnngaaaanaannaacacaaacnaaaaaaaanancgggctcgggggaaaaagaagggtgccacgaaggaggccaggataagcgaacacac

SEQ ID NO: 287296 - DNA, 1780 bp, Homo sapiens
ccacatggaagctggaggagcaaccgggagcgctgggctggggtgcaaattgcccagtgccttctgtttcccaggcagctctgtggccatggatatgttccagaaggtagagaagatcggagagggcacctatggggtggtgtacaaggccaagaacagggagacagggcagctggtggccctgaagaagatcagactggatttggagatggagggggtcccaagcactgccatcagggagatctcgctgctcaaggaactgaagcaccccaacatcgtccgactgctggacgtggtgcacaacgagaggaagctctatctggtgtttgagttcctcagccaggacctgaagaagtacatggactccaccccaggctcagagctccccctgcacctcatcaagagctacctcttccagctgctgcagggggtgagtttctgccactcacatcgggtcatccaccgagacctgaagccccagaacctgctcatcaatgagttgggtgccatcaagctggctgacttcggcctggctcgcgccttcggggtgcccctgcgcacctacacccatgaggtggtgacactgtggtatcgcgcccccgagattctcttgggcagcaagttctataccacagctgtggatatctggagcattggttgcatctttgcagagatggtgactcgaaaagccctgtttcctggtgactctgagattgaccagctctttcgtatctttcgtatgctggggacacccagcgaagacacatggcccggggtcacccagctgcctgactataagggcagcttccctaagtggaccaggaagggactggaagagattgtgcccaatctggagccagagggcagggacctgctcatgcaactcctgcagtatgaccccagccagcggatcacagccaagactgccctggcccacccgtacttctcatcccctgagccctccccagctgcccgccagtatgtgctgcagcgattccgccattgagaatgtcaaggccacactcagatcctttctcgagcagctgctgccccagctgcctcctacccattgccaagagaggatgcatctggggagagcaaagcactaaggaattcagcatcagcctgcagagggctgagtctgggttagtcctgcccgcaggttagcgagatcctgtgttgttttttgggttggacggtgccgtttcaaaatagaggcacagatgctccatgcacgaggggtccccgggcactggaacaagtgccaagttgaaggcagggggcctgccagagctgggtgtgggtattcaggccctcacctgccctgcctgcagggccagaccctgaggaaagggcgccccctgctggtctttttggatttaaaatgtttgggggaagagttgagttccagttcagtcccaagttaaacaggagggagtgagggagaggagagagggcgttccccggatcccaggagagctgggctatgactgcaataaggagttgttccttcacctgagatgtgcttcttttggttcatttctggcttgacaacaagaaataaacgtggtatgttcctgaaaaaaaaaaaatggcctcttggcttaacggggaccttttggccgttccctttttgaggttaataatgaacccgccactgacccctggcctggccgtcggcgccgaagcgcatactcaccaaggcgggataccgtttcccaaactaggataccccagaaaacattggaccaaggcccaaagggcataccacaagcgccgg

SEQ ID NO: 287297 - DNA, 752 bp, Homo sapiens
atccggtttatcaggaatcttcaaaatccctctcaactatttggttacaggagcccatgatgctgcccaaacctgggacctattacctcccctgggaggttagtgcaggccaagttcctgatgggagcacgctgagaacatttggcaggttgtgcctctatgacatgattcagtccagagtaacactgatggctcagcacggatccgatcagcaccaggttcttgtctgtaccaagttggtggagcccttccacgcccaggtgggctccctgtacatcgtcctcggggagctccagcatcagcaggacagaggctccgtggtgaaggcgcgcgtgctgacctgtgtggaggggatgaacctgcccttgttggaacaagccatccgggagcagagactgtacaagcaggagcggggcggcagccagtaggaaacagcagcctagcaacaccctcacctgcttcagagcccgaaccctctggagctgcaggagcccgggagagcacagacgcctccccagcgacggccttgtctggagctcgaaagccgaggggcgggtgatgaatccagccccttcccctactttgggattggctcagcaatgagaacccagaaagcatgccataaatccgacagccccaccccaggagactgcaggtggccgagcttgggcgccggggccgtgcttggtgtggggccatggagggttccagaaggtcctggtgaataaaggcccagggggcgtgctcttgaa

SEQ ID NO: 287298 - DNA, 766 bp, Homo sapiens
gcgtgagccaccgcgcccggccacacatataactttataaagttgcatgaaaatatgccagtttgcatcttcaaacaccaagcacggtgatgaaaggccaccatagaccgcagctgtaaagtttaggcttaacaacacttgctctgttctaaggcatacctactttttaaaccacataatttcatcagggtcagcgatgccaaactccctcatcttcttcaccatgatggcacttttcctgacagccacctcataacgctggctgcgagtgaggaagttcaagtcctcatgctggaagtctgggtcgttcaggatcatgttctctgaaagggggttaaagggcattaaaaggcagacagacactcgggcctccgttccaccctccctgaatcacaataggcttcagagtcgcggacacacctggggaatggcgatatccccccaccagggacacaggctgttcctcgaagtgggggtcccggctcccctaacgctgggccagagggcctaggccccacagcgcccctgactccgcatcgagggagtctccagcttttctcgggaaaggagggaggtctcgcccgccgccctcaccgatctctcggcggcgccgggttttctcggggctgccgtccaggatgtgtgtaagcagctccgggttgaagctggcggaatcccgctccctgcgcaggtccgggttcatggcgacgaccagctggcagcgaagtaagcaccgaccgaggtggcagtgacaatctaaatccgc

SEQ ID NO: 287299 - DNA, 1002 bp, Homo sapiens
  misc_feature (886)..(886): n is a, c, g, or t
  misc_feature (892)..(892): n is a, c, g, or t
  misc_feature (894)..(894): n is a, c, g, or t
  misc_feature (899)..(899): n is a, c, g, or t
  misc_feature (901)..(901): n is a, c, g, or t
  misc_feature (905)..(905): n is a, c, g, or t
  misc_feature (914)..(915): n is a, c, g, or t
  misc_feature (921)..(921): n is a, c, g, or t
  misc_feature (924)..(925): n is a, c, g, or t
  misc_feature (935)..(935): n is a, c, g, or t
  misc_feature (944)..(944): n is a, c, g, or t
  misc_feature (946)..(946): n is a, c, g, or t
gctagtgaggctggttggaatcggacgaggtcgtggctggggccggtcgcggggcagactaatcccctgctcctggccaggggaggctcccgagcggatcctcgggaaaggggctccgaaggtcaagaaactgccctgctgggcgtccggggagtgggaaaataaagcactttttgtatcccgcccctcccccgtcacgtgaccacgcgaggcggaaagaagaaatccgaggaccggcgacgcctagaacaggagcccatgatgctgcccaaacctgggacctattacctcccctgggaggttagtgcaggccaagttcctgatgggagcacgctgagaacatttggcaggttgtgcctctatgacatgattcagtccagagtaacactgatggctcagcacggatccgatcagcaccaggttcttgtctgtaccaagttggtggagcccttccacgcccaggtgggctccctgtacatcgtcctcggggagctccagcatcagcaggacagaggctccgtggtgaaggcgcgcgtgctgacctgtgtggaggggatgaacctgcccttgttggaacaagccatccgggagcagagactgtacaagcaggagcggggcggcagccagtaggaaacagcagcctagcaacaccctcacctgcttcagagcccgaaccctctggagctgcaggagcccgggagagcacagacgcctccccagcgacggccttgtctggagctcgaaagccgaggggcgggtgatgaatccagccccttcccctactttgggattggctcagcaatgagaacccagaaagcatgccataaatccgacagccccaccccaggagactgcaggtggccgaggcggctgggggggcaggggntccaangncgggnanaagncggggggcnngaaaanaannaacacaaacnaaaaaaaanancgggctcgggggaaaaagaagggtgccacgaaggaggccaggataagcgaacacac

SEQ ID NO: 287300 - DNA, 5858 bp, Homo sapiens
aagaaaaaattaattaagatgtatttaacctttaagtatagaatgattgtataaattagatttcaactgaaaggacaattagcgattcagagaaagctcctagaaatagactgaaaacaaagccatacatagagtaagaaatagaacctatggaacttccatttttctaactatagttttttgtttttgttttttcccagttgttaaaaaaaaaacaactcacagtttcaatattttctgaaccaaaaatcagaacacatggtttgtgtcaaagggtttttctgtgctacgtctgggagtgctgacctaagtgacatttttttttaatgccaaatacagtaatctccaagcttttaatggcttatgccaagatgacagaatatgtgaaatctgattgtcccagagttacactctgcactccaaagctacaacagtgccacagctgagaggtttccctatacttcctactactgtgacaatttagcaatccttcaaatggaaaattcctaattacacgagacaatggtcctacagtaggcccgtgcggaataagttccctcgttggaaaaatgctagcatgaatagtttgataaatgcaatccatcagcaaaggagagcaagcaggcagagactgtgccaagcagaaactcattcgcatcaagttttccaataagtttccttcccccagtcccttttcttcaatcctgcttttaagccaggccccagggtaagtctggtagaacactgagcaggaaagcttggaagggttctacaccacttcaaaaatacctttgcttaaaaacacttatatagccagtgattagcaattaaaatgtgaaaataatcaactactcagtagttaaattctgctaattatcaaaagtcatagtctactgggatcagcagcattacaaaaggaagtcatatcgcatttcttaagctttttctgaatggtttaacaggtctctttcagtgttaattgcacttaaaacatctgctttttttcatttaatctctgaaatctgttcattttttccctccatttataaaaaggggtcaatttatcatttgctctatagctatttgaattcgaaaaagattccacaaaatttgagttgcacacaggcgctttctgaagcagattaaacttgtccttgtgacacttcagagcttggactgcagtgacttcaggtgcttgtaagattcgtggacctctgctttgttcagtggggagttcttagcccactcaaacaagttttcatacacattcccatcatagcggccaagcacagagccaagtgtcacatcctgaaaatcaaatgcatcaaccaaagcaacagcatctgagcgaatcagagtgagtaactcctttacacgctggtttacttgtgtaatctgaggctctgtcatgatgctcccctgaaggaaatcccccgcgttctgactgattccatacagagaatacagcagacataaactccttaagacagcttgaatggctttatcttgaattttgaggagtttttctgaaaagagcttaactaccacatagtggcaatgtgcctcacttgctcgaacaaggtcaacagaagttaggttccaagctacctccttgctttttctgtgaatcacttctttttgaaggttttttgcagcaatttctactaatctggctgcacggagtttatatgcttcggttaggctttcggggctgttgatatccaccatggttggccagactgctacctgctgtggctggatgcgctgactgggcaggtcgttcaaataggacaccatgccacacaccaactttcctgagtgcacctgatcataacttttcatcaggaacctagccgtctggagcatcatgacagtgttttctccctcaaaggtacagcttggggtgaaattgacataaatatttggaagaccactgcaatgagaatagccatgcccaccacaagccatccgacatgcttcaatgccagtgtttgcagtccaggaggtgaaagccttcagtccagcggtgagggcatgaagctcaggcagttcactcaggtccccttgaccaatgccttcgttaatccggtgataggtctccttcatgtatgcgcccacaaactggaaggcataggcagtggccaggagtggaaagagtttatactgctgggtttgaaaatccaaaatctgtggttctggttcacctggcttcatttcagactggtgcctcacagcgctgtatcggatggcaatggtgcacgccttagacagagcccgagcagcttctcccacaaggaaggacctgacaaacaccatggtcccgtaagtcagcttgttactcagcggtttcacgtatgtgccatcaggcttcacctgggcatacttcatcagcatgttttctctgggaatacgatggttgtccattttgaggtagccattgtctatctcatcataaccaaatttggggccgatgtcaccaacggtaattcctggcaaaggcttatgggtcccgatttcacgaataggtacgataaaggcatgtaatccatagcatttccccttagtgatgagctgggcaagaactattgcatgatttgaagtctttccaagcccaccaggccaccatttaatggaggtcacagtaggactgttgagaatgaactcctgggtttcagggtcatacgtggctgtggtttccaagcctcgaaggtgagttccatgacccatctctgtctgggcataagtgccaatgatctccaagttccaggcgggcatgaagaagcgctcctgctgctccgcagttgcctggtgaagcaaggtgggcaggaacatgcccaagtgaagatccagaggctcaggccgccctcggtgcacaaaatttttaaaccacataatttcatcagggtcagcgatgccaaactccctcatcttcttcaccatgatggcacttttcctgacagccacctcataacgctggctgcgagtgaggaagttcaagtcctcatgctggaagtctgggtcgttcaggatcatgttctcgatctctcggcggcgccgggttttctcggggctgccgtccaggatgtgtgtaagcagctccgggttgaagctggcggaatcccgctccctgcgcaggtccgggttcatggcgacgaccagctggcagcgaagtaagcaccgaccgaggtggcagtgacaatctaaatccgcagctccagcgccggccggaccctaggaggcagcctcaggacggcgcaagtccccgcctccgctcgcccggcccgccccggcccgccccttctttctccgtggccctttggcgcgtgagtgacagcggcccagacagagggggcgatgtccgcgtcgtggctggggccggtcgcggggcagactaatcccctgctcctggccaggggaggctcccgagcggatcctcgggaaaggggctccgaaggtcaagaaactgccctgctgggcgtccggggagtgggaaaataaagcactttttgtatcccgcccctcccccgtcacgtgaccacgcgaggcggaaagaagaaatccgaggaccggcgacgcctagaacaggagcccatgatgctgcccaaacctgggacctattacctcccctgggaggttagtgcaggccaagttcctgatgggagcacgctgagaacatttggcaggttgtgcctctatgacatgattcagtccagagtaacactgatggctcagcacggatccgatcagcaccaggttcttgtctgtaccaagttggtggagcccttccacgcccagacagaggctccgtggtgaaggcgcgcgtgctgacctgtgtggaggggatgaacctgcccttgttggaacaagccatccgggagcagagactgtacaagcaggagcggggcggcagccagtaggaaacagcagcctagcaacaccctcacctgcttcagagcccgaaccctctggagctgcaggagcccgggagagcacagacgcctccccagcgacggccttgtctggagctcgaaagccgaggggcgggtgatgaatccagccccttcccctactttgggattggctcagcaatgagaacccagaaagcatgccataaatccgacagccccaccccaggagactgcaggtggccgagcagctctgtggccatggatatgttccagaaggtagagaagatcggagagggcacctatggggtggtgtacaaggccaagaacagggagacagggcagctggtggccctgaagaagatcagactggatttggagatggagggggtcccaagcactgccatcagggagatctcgctgctcaaggaactgaagcaccccaacatcgtccgactgctggacgtggtgcacaacgagaggaagctctatctggtgtttgagttcctcagccaggacctgaagaagtacatggactccaccccaggctcagagctccccctgcacctcatcaagagctacctcttccagctgctgcagggggtgagtttctgccactcacatcgggtcatccaccgagacctgaagccccagaacctgctcatcaatgagttgggtgccatcaagctggctgacttcggcctggctcgcgccttcggggtgcccctgcgcacctacacccatgaggtggtgacactgtggtatcgcgcccccgagattctcttgggcagcaagttctataccacagctgtggatatctggagcattggttgcatctttgcagagatggtgactcgaaaagccctgtttcctggtgactctgagattgaccagctctttcgtatctttcgtatgctggggacacccagcgaagacacatggcccggggtcacccagctgcctgactataagggcagcttccctaagtggaccaggaagggactggaagagattgtgcccaatctggagccagagggcagggacctgctcatgcaactcctgcagtatgaccccagccagcggatcacagccaagactgccctggcccacccgtacttctcatcccctgagccctccccagctgcccgccagtatgtgctgcagcgattccgccattgagaatgtcaaggccacactcagatcctttctcgagcagctgctgccccagctgcctcctacccattgccaagagaggatgcatctggggagagcaaagcactaaggaattcagcatcagcctgcagagggctgagtctgggttagtcctgcccgcaggttagcgagatcctgtgttgttttttgggttggacggtgccgtttcaaaatagaggcacagatgctccatgcacgaggggtccccgggcactggaacaagtgccaagttgaaggcagggggcctgccagagctgggtgtgggtattcaggccctcacctgccctgcctgcagggccagaccctgaggaaagggcgccccctgctggtctttttggatttaaaatgtttgggggaagagttgagttccagttcagtcccaagttaaacaggagggagtgagggagaggagagagggcgttccccggatcccaggagagctgggctatgactgcaataaggagttgttccttcacctgagatgtgcttcttttggttcatttctggcttgacaacaagaaataaacgtggtatgttcctgaaaaaaaaaaaatggcctcttggcttaacggggaccttttggccgttccctttttgaggttaataatgaacccgccactgacccctggcctggccgtcggcgccgaagcgcatactcaccaaggcgggataccgtttcccaaactaggataccccagaaaacattggaccaaggcccaaagggcataccacaagcgccgg

SEQ ID NO: 287301 - DNA, 1869 bp, Homo sapiens
ctaaggctaggtaggaggcccggtgttactcggccgatccagacgccttggaggacttggaacacctgtaacaggacaaggagtcctgctccggcacgtggccacagaaaactacttaggaagcctgtggtgagaacaacaacagtgcctggagaatcccacggctctggggaagtgagccccgaggatgaggctgctcgcctggctgattttcctggctaactggggaggtgccagggctgaaccagggaagttctggcacatcgctgacctgcaccttgaccctgactacaaggtatccaaagaccccttccaggtgtgcccatcagctggatcccagccagtgcccgacgcaggcccctggggtgactacctctgtgattctccctgggccctcatcaactcctccatctatgccatgaaggagattgagccagagccagacttcattctctggactggtgatgacacgcctcatgtgcccgatgagaaactgggagaggcagctgtactggaaattgtggaacgcctgaccaagctcatcagagaggtctttccagatactaaagtctatgctgctttgggaaatcatgattttcaccccaaaaaccagttcccagctggaagtaacaacatctacaatcagatagcagaactatggaaaccctggcttagtaatgagtccatcgctctcttcaaaaaaggtgccttctactgtgagaagctgccgggtcccagcggggctgggcgaattgtggtcctcaacaccaatctgtactataccagcaatgcgctgacagcagacatggcggaccctggccagcagttccagtggctggaagatgtgctgaccgatgcatccaaagctggggacatggtgtacattgtcggccacgtgcccccggggttctttgagaagacgcaaaacaaggcatggttccgggagggcttcaatgaaaaatacctgaaggtggtccggaagcatcatcgcgtcatagcagggcagttcttcgggcaccaccacaccgacagctttcggatgctctatgatgatgcaggtgtccccataagcgccatgttcatcacacctggagtcaccccatggaaaaccacattacctggagtggtcaatggggccaacaatccagccatccgggtgttcgaatatgaccgagccacactgagcctgaaggacatggtgacctacttcatgaacctgagccaggcgaatgctcaggggacgccgcgctgggagctcgagtaccagctgaccgaggcctatggggtgccggacgccagcgcccactccatgcacacagtgctggaccgcatcgctggcgaccagagcacactgcagcgctactacgtctataactcagtcagctactctgctggggtctgcgacgaggcctgcagcatgcagcacgtgtgtgccatgcgccaggtggacattgacgcttacaccacctgtctgtatgcctctggcaccacgcccgtgccccagctcccgctgctgctgatggccctgctgggcctgtgcacgctcgtgctgtgacctgccaggctcaccttcttcctggtaacgggtaacgggggcagcgcccaggatcacccagagctgggccttccaccatttcctccgcgcctgaggagtgaactgaaataggacaaccgaatcaggaagcgaagccccaggagctgcagccatccgtgatcgcgccactgcactccagcctgggcgacaaagccagactctctccaaaaacaaaccagaaacagaaaagaaatgacgacccaagacccccctacaagcatacttcttttgcgtattatgttttactcacaaaacaaagctcatcatgcgtttga

SEQ ID NO: 287302 - DNA, 1870 bp, Homo sapiens
atcataccctgctgggcaaaggaggaagagccagaggatccagacgccttggaggacttggaacacctgtaacaggacaaggagtcctgctccggcacgtggccacagaaaactacttaggaagcctgtggtgagaacaacaacagtgcctggagaatcccacggctctggggaagtgagccccgaggatgaggctgctcgcctggctgattttcctggctaactggggaggtgccagggctgaaccagggaagttctggcacatcgctgacctgcaccttgaccctgactacaaggtatccaaagaccccttccaggtgtgcccatcagctggatcccagccagtgcccgacgcaggcccctggggtgactacctctgtgattctccctgggccctcatcaactcctccatctatgccatgaaggagattgagccagagccagacttcattctctggactggtgatgacacgcctcatgtgcccgatgagaaactgggagaggcagctgtactggaaattgtggaacgcctgaccaagctcatcagagaggtctttccagatactaaagtctatgctgctttgggaaatcatgattttcaccccaaaaaccagttcccagctggaagtaacaacatctacaatcagatagcagaactatggaaaccctggcttagtaatgagtccatcgctctcttcaaaaaaggtgccttctactgtgagaagctgccgggtcccagcggggctgggcgaattgtggtcctcaacaccaatctgtactataccagcaatgcgctgacagcagacatggcggaccctggccagcagttccagtggctggaagatgtgctgaccgatgcatccaaagctggggacatggtgtacattgtcggccacgtgcccccggggttctttgagaagacgcaaaacaaggcatggttccgggagggcttcaatgaaaaatacctgaaggtggtccggaagcatcatcgcgtcatagcagggcagttcttcgggcaccaccacaccgacagctttcggatgctctatgatgatgcaggtgtccccataagcgccatgttcatcacacctggagtcaccccatggaaaaccacattacctggagtggtcaatggggccaacaatccagccatccgggtgttcgaatatgaccgagccacactgagcctgaaggacatggtgacctacttcatgaacctgagccaggcgaatgctcaggggacgccgcgctgggagctcgagtaccagctgaccgaggcctatggggtgccggacgccagcgcccactccatgcacacagtgctggaccgcatcgctggcgaccagagcacactgcagcgctactacgtctataactcagtcagctactctgctggggtctgcgacgaggcctgcagcatgcagcacgtgtgtgccatgcgccaggtggacattgacgcttacaccacctgtctgtatgcctctggcaccacgcccgtgccccagctcccgctgctgctgatggccctgctgggcctgtgcacgctcgtgctgtgacctgccaggctcaccttcttcctggtaacgggtaacgggggcagcgcccaggatcacccagagctgggccttccaccatttcctccgcgcctgaggagtgaactgaaataggacaaccgaatcaggaagcgaagccccaggagctgcagccatccgtgatcgcgccactgcactccagcctgggcgacaaagccagactctctccaaaaacaaaccagaaacagaaaagaaatgacgacccaagacccccctacaagcatacttcttttgcgtattatgttttactcacaaaacaaagctcatcatgcgtttga

SEQ ID NO: 287303 - DNA, 1597 bp, Homo sapiens
ctaaggctaggtaggaggcccggtgttactcggccgatccagacgccttggaggacttggaacacctgtaacaggacaaggagtcctgctccggcacgtggccacagaaaactacttaggaagcctgtggtgagaacaacaacagtgcctggagaatcccacggctctggggaagtgagccccgaggatgaggctgctcgcctggctgattttcctggctaactggggaggtgccagggctgaaccagggaagttctggcacatcgctgacctgcaccttgaccctgactacaaggtatccaaagaccccttccaggtgtgcccatcagctggatcccagccagtgcccgacgcaggcccctggggtgactacctctgtgattctccctgggccctcatcaactcctccatctatgccatgaaggagattgagccagagccagacttcattctctggactggtgatgacacgcctcatgtgcccgatgagaaactgggagaggcagctgtactggaaattgtggaacgcctgaccaagctcatcagagaggtctttccagatactaaagtctatgctgctttgggaaatcatgattttcaccccaaaaaccagttcccagctggaagtaacaacatctacaatcagatagcagaactatggaaaccctggcttagtaatgagtccatcgctctcttcaaaaaaggtgccttctactgtgagaagctgccgggtcccagcggggctgggcgaattgtggtcctcaacaccaatctgtactataccagcaatgcgctgacagcagacatggcggaccctggccagcagttccagtggctggaagatgtgctgaccgatgcatccaaagctggggacatggtgtacattgtcggccacgtgcccccggggttctttgagaagacgcaaaacaaggcatggttccgggagggcttcaatgaaaaatacctgaaggtggtccggaagcatcatcgcgtcatagcagggcagttcttcgggcaccaccacaccgacagctttcggatgctctatgatgatgcaggtgtccccataagcgccatgttcatcacacctggagtcaccccatggaaaaccacattacctggagtggtcaatggggccaacaatccagccatccgggtgttcgaatatgaccgagccacactgagcctgaaggtcaggagtcctgcggaggccagaggaggagggtgggaggggcttaaatgcatcaccaccttccctcactctcagcttatccaccttcccctgaccactgagcctcaggaaggttgagctccttccacccttctccagctcaggatcagaaccctggaggcacctgccaccgagtcagggcagtgcctcaccaagtcaccttttcccctggatgactgtcacagcctcatacctggtctccctgcctctggccctgccctgctatggcccatccgctacacaagagagaagaaactaatctcctatagcaccactttcatcttgtctccgtcctgctcaaaaaccttcagtggctccccagtgccttcaagataaagttgtgtctccttgacctagtactcaagg

SEQ ID NO: 287304 - DNA, 1960 bp, Homo sapiens
atcataccctgctgggcaaaggaggaagagccagaggatccagacgccttggaggacttggaacacctgtaacaggacaaggagtcctgctccggcacgtggccacagaaaactacttaggaagcctgtggtgagaacaacaacagtgcctggagaatcccacggctctggggaagtgagccccgaggatgaggctgctcgcctggctgattttcctggctaactggggaggtgccagggctgaaccagaggaagcgcaaggaccatgtgcccaagagaaaggcaaagggcctcccccaacatccatcctggccagcctggctccgggcttggaagcagggaagttctggcacatcgctgacctgcaccttgaccctgactacaaggtatccaaagaccccttccaggtgtgcccatcagctggatcccagccagtgcccgacgcaggcccctggggtgactacctctgtgattctccctgggccctcatcaactcctccatctatgccatgaaggagattgagccagagccagacttcattctctggactggtgatgacacgcctcatgtgcccgatgagaaactgggagaggcagctgtactggaaattgtggaacgcctgaccaagctcatcagagaggtctttccagatactaaagtctatgctgctttgggaaatcatgattttcaccccaaaaaccagttcccagctggaagtaacaacatctacaatcagatagcagaactatggaaaccctggcttagtaatgagtccatcgctctcttcaaaaaaggtgccttctactgtgagaagctgccgggtcccagcggggctgggcgaattgtggtcctcaacaccaatctgtactataccagcaatgcgctgacagcagacatggcggaccctggccagcagttccagtggctggaagatgtgctgaccgatgcatccaaagctggggacatggtgtacattgtcggccacgtgcccccggggttctttgagaagacgcaaaacaaggcatggttccgggagggcttcaatgaaaaatacctgaaggtggtccggaagcatcatcgcgtcatagcagggcagttcttcgggcaccaccacaccgacagctttcggatgctctatgatgatgcaggtgtccccataagcgccatgttcatcacacctggagtcaccccatggaaaaccacattacctggagtggtcaatggggccaacaatccagccatccgggtgttcgaatatgaccgagccacactgagcctgaaggacatggtgacctacttcatgaacctgagccaggcgaatgctcaggggacgccgcgctgggagctcgagtaccagctgaccgaggcctatggggtgccggacgccagcgcccactccatgcacacagtgctggaccgcatcgctggcgaccagagcacactgcagcgctactacgtctataactcagtcagctactctgctggggtctgcgacgaggcctgcagcatgcagcacgtgtgtgccatgcgccaggtggacattgacgcttacaccacctgtctgtatgcctctggcaccacgcccgtgccccagctcccgctgctgctgatggccctgctgggcctgtgcacgctcgtgctgtgacctgccaggctcaccttcttcctggtaacgggtaacgggggcagcgcccaggatcacccagagctgggccttccaccatttcctccgcgcctgaggagtgaactgaaataggacaaccgaatcaggaagcgaagccccaggagctgcagccatccgtgatcgcgccactgcactccagcctgggcgacaaagccagactctctccaaaaacaaaccagaaacagaaaagaaatgacgacccaagacccccctacaagcatacttcttttgcgtattatgttttactcacaaaacaaagctcatcatgcgtttga

SEQ ID NO: 287305 - DNA, 2193 bp, Homo sapiens
atcataccctgctgggcaaaggaggaagagccagaggatccagacgccttggaggacttggaacacctgtaacaggacaaggagtcctgctccggcacgtggccacagaaaactacttaggaagcctgtggtgagaacaacaacagtgcctggagaatcccacggctctggggaagtgagccccgaggatgaggctgctcgcctggctgattttcctggctaactggggaggtgccagggctgaaccagatgaggcaaatgagtctcagaggggacattgcacttgctgaagatctcccagctgggaaatggcaggacaaagcctgtgcctggctgtactatgcttcatgtcctcttgggatggtggggtttagaggcacccttctaggcactgaggacatagaggtaaacaagacgggcttggtgctctcatggaactgacattgtaaacagggaagatggacaataagcaagccaacaagaggaagcgcaaggaccatgtgcccaagagaaaggcaaagggcctcccccaacatccatcctggccagcctggctccgggcttggaagcagggaagttctggcacatcgctgacctgcaccttgaccctgactacaaggtatccaaagaccccttccaggtgtgcccatcagctggatcccagccagtgcccgacgcaggcccctggggtgactacctctgtgattctccctgggccctcatcaactcctccatctatgccatgaaggagattgagccagagccagacttcattctctggactggtgatgacacgcctcatgtgcccgatgagaaactgggagaggcagctgtactggaaattgtggaacgcctgaccaagctcatcagagaggtctttccagatactaaagtctatgctgctttgggaaatcatgattttcaccccaaaaaccagttcccagctggaagtaacaacatctacaatcagatagcagaactatggaaaccctggcttagtaatgagtccatcgctctcttcaaaaaaggtgccttctactgtgagaagctgccgggtcccagcggggctgggcgaattgtggtcctcaacaccaatctgtactataccagcaatgcgctgacagcagacatggcggaccctggccagcagttccagtggctggaagatgtgctgaccgatgcatccaaagctggggacatggtgtacattgtcggccacgtgcccccggggttctttgagaagacgcaaaacaaggcatggttccgggagggcttcaatgaaaaatacctgaaggtggtccggaagcatcatcgcgtcatagcagggcagttcttcgggcaccaccacaccgacagctttcggatgctctatgatgatgcaggtgtccccataagcgccatgttcatcacacctggagtcaccccatggaaaaccacattacctggagtggtcaatggggccaacaatccagccatccgggtgttcgaatatgaccgagccacactgagcctgaaggacatggtgacctacttcatgaacctgagccaggcgaatgctcaggggacgccgcgctgggagctcgagtaccagctgaccgaggcctatggggtgccggacgccagcgcccactccatgcacacagtgctggaccgcatcgctggcgaccagagcacactgcagcgctactacgtctataactcagtcagctactctgctggggtctgcgacgaggcctgcagcatgcagcacgtgtgtgccatgcgccaggtggacattgacgcttacaccacctgtctgtatgcctctggcaccacgcccgtgccccagctcccgctgctgctgatggccctgctgggcctgtgcacgctcgtgctgtgacctgccaggctcaccttcttcctggtaacgggtaacgggggcagcgcccaggatcacccagagctgggccttccaccatttcctccgcgcctgaggagtgaactgaaataggacaaccgaatcaggaagcgaagccccaggagctgcagccatccgtgatcgcgccactgcactccagcctgggcgacaaagccagactctctccaaaaacaaaccagaaacagaaaagaaatgacgacccaagacccccctacaagcatacttcttttgcgtattatgttttactcacaaaacaaagctcatcatgcgtttga

SEQ ID NO: 287306 - DNA, 586 bp, Homo sapiens
ttgcctcaatcaccttggagcctttcggatgctctatgatgatgcaggtgtccccataagcgccatgttcatcacacctggagtcaccccatggaaaaccacattacctggagtggtcaatggggccaacaatccagccatccgggtgttcgaatatgaccgagccacactgagcctgaaggtcaggagtcctgcggaggccagaggaggagggtgggaggggcttaaatgcatcaccaccttccctcactctcagcttatccaccttcccctgaccactgagcctcaggaaggttgagctccttccacccttctccagctcaggatcagaaccctggaggcacctgccaccgagtcagggcagtgcctcaccaagtcaccttttcccctggatgactgtcacagcctcatacctggtctccctgcctctggccctgccctgctatggcccatccgctacacaagagagaagaaactaatctcctatagcaccactttcatcttgtctccgtcctgctcaaaaaccttcagtggctccccagtgccttcaagataaagttgtgtctccttgacctagtactcaagg

SEQ ID NO: 287307 - DNA, 444 bp, Homo sapiens
taaataatttgcaccctacaacccatgtgtgaatttaattctggaaaaccaatctgagacagggacatccatcaccatgtgaaaaagcctgggatagtctgctggaagaaaatgtaacttgcagagaatagaacagataaaccttgcagtgtacccagttggatttcagaacattgaagagcagcagcttttatgggaataagagtgtcccttacagatgagaatcatcacggagcagagatgaggctaaacagctgaggcttctctaaaaaacaaaacaaacaaacaaacaaacaaaagcagtgcactcctcaggtgattggcatcggatagcagaagcatcggtgagtcagctgaggtacatagaagaaatgcctacctgagccaacccaaattgccaacccacaaaaatctgaaaccaaataaattgtttaaaactaaaag

SEQ ID NO: 287308 - DNA, 397 bp, Homo sapiens
gtcatgacttctcctagtgactttaagattatcgatgtgatttgctttgcctatgaggcaataagcaaatgtgacacaagcagaggcttaaaaatgcgtatgctttaggagaggttagctgttgctcttgggaaacacagaaccatataaagctgctaaccttctggcagatgagaatcatcacggagcagagatgaggctaaacagctgaggcttctctaaaaaacaaaacaaacaaacaaacaaacaaaagcagtgcactcctcaggtgattggcatcggatagcagaagcatcggtgagtcagctgaggtacatagaagaaatgcctacctgagccaacccaaattgccaacccacaaaaatctgaaaccaaataaattgtttaaaactaaaag

SEQ ID NO: 287309 - DNA, 496 bp, Homo sapiens
tgtaggccatggctttgaatgtggcgtgtgggatctctggcgggtcatcgtcacagagctctgcaaagcaaaagaagcctattaggaactcaagaggccccaggagttctgtatgcagctgaagggtaacatcccttgggagcttttgccttgtctggctgacgccttggcaatcgcaagtgacagtgacggagagccacctcctctggaatgcatcatggaacaggtctgggagaacagagggtgcagaaagggaaaagccaggcatttgtagtcctcctgccacagatgaccagaatgacctcacccaggacaaacggcgacagatttaggaattcaagccagcttttctgactcccaggcacctgctctctcctttcgagtgttcgactccactctcagtcactcgtcactcttcccagaaggacaaatgtgcagcttctatgtcttggatttcaaataaaagacgaggaacttggtgaaatgaggtggtctt

SEQ ID NO: 287310 - DNA, 420 bp, Homo sapiens
aaacagtgataattctgaaactagctaggtttggtggcattcatactccagaatgagcaggtaggagtaggacttgttatctgtcaaattgagattgacatactgtgactgtgattcagtaaggaaaggagcaaaaggatatgaaaacaagaagattttttgcttttcgctcttaatagtattatctactagggttgctagtagacactgctctgtattttgttgaatatgctgaatgagcctttgacattgagaaggagcagaaagcacggttgatgctattttcttcacttcaaactggagaaaacttagttgtttggacttaaaattgtttgaatataaaatcttgaaagattcttgtttctttcaggagacaatatatttcatatagataaaatgttattaaagaatttaaagttt

SEQ ID NO: 287311 - DNA, 691 bp, Homo sapiens
tgtatatcccctaaactcctcacctatatcacaaaaacctgccaaggcagaatacattcccaagggaaaggagctttggccgcaagcaggcatcgggtcccatctgacaccagcgtgatcgccacaggagccatctaggaaaggggaatggaaactgagatgctggcactttggccctgccaatgagctaaagcagtgtataattaaggaattgcacaggcttccttccccaggacaaagcagcgcacagtcttcttggattactgtcctcttacagcaataattacctgtggataatagattatattattggaagggcacacacgcttgctgccagccacgttcttcttggtgggctgcccacttctgctgcagaactgatgagcatcatgccagcggagaagagcttgagcctaggaacacaatgatgggcctggtgtcatttggagagaatgcggggctcatctttaacagaactgggcctagtgtctggaacaactcacagaaaaatgccaatctctttacagctcacgtaatttaaatggttactgtttaaatttcaggacaagtaaactaactgaacatattcctctgagcatcagaaatctgaataaaagaaagcatatttttaaatgtattattatttaaaacatatgaagtatatgaggtaataaaatgaacacccatgtat

SEQ ID NO: 287312 - DNA, 6208 bp, Homo sapiens
  misc_feature (130)..(130): n is a, c, g, or t
  misc_feature (2470)..(2470): n is a, c, g, or t
  misc_feature (3054)..(3054): n is a, c, g, or t
  misc_feature (3070)..(3070): n is a, c, g, or t
  misc_feature (3455)..(3455): n is a, c, g, or t
  misc_feature (4143)..(4143): n is a, c, g, or t
  misc_feature (6127)..(6127): n is a, c, g, or t
ctaaggaagttgggctcggtcccagtgtcaagtgtccatattttctttattttcttttagaaactaaagggaagggaatgaaccatttcagagcatcaaccgaaacaagttaaaagaattgatctttgcntagaagaataactagttgtttcaagtctcatatgctacatactgtgtctttttgaataccaggttatacctcagctcattgcaagaattgatacgcccagacccttggtgggacgtctcattcaccagcttctcacagacattggtcggtaccacccccaggtatgtggagactctgggcagtttctcatctaaccactggtttggtggtcagcctttccaaaagctgccctggcgacacaagcgcaggaactgggagccatgtgttccatcctggcccaggagggtctgtccagccagccgtcccagagggcccgggagccttgctaaaaagaaagcgttccctcgaagactgagccccttcctggtagtctcaagcagatgttaatgtcacactcaccacttgttttgttattctccttaaaattcataccagctcttccccaacccacatttcctttatagatgtttcttctgtttttccctcaggccctcatctacccactgacagtggcttctaagtctaccacgacagcccggcacaatgcagccaacaagattctgaagaacatgtgtgagcacagcaacaccctggtccagcaggccatgatggtgggtcggagccactgtggggcttcatagaccctggtcccttagctggtgggcgcaagtgggattgtttttcttcctcgcattggtgctgtgcacttcctctgactgctggaaatagtacctcctgtgtctccaaaacagacctttctgaggttagctgattcttggtgcttctctccttcttctcttggcttcaggtgagcgaggagctgatccgagtggccatcctctggcatgagatgtggcatgaaggcctggaagaggcatctcgtttgtactttggggaaaggaacgtgaaaggcatgtttgaggtgctggagcccttgcatgctatgatggaacggggcccccagactctgaaggaaacatcctttaatcaggtatggggtaaaaaacacgaaaggacataaccctgtagaaatattctgccactaaaaaaaaatgaaatgagaaaagtttttatagaatgaaaggacgtgacccaaggcctttgtcagatttcttttcctctggcctttccactgactttaataaaacgagctctgatggaggtcacagagcataaaacatcagaaattagttacagggacccttctgaattttaactggaaaagcccaagatttctcaagaggtcatctcgtctctcctctcacccttccttccctataagccatgctgctggtttggaagctccagggttggaggcctgcacctatgctcttgctttctccagccccctgccagtgttttcaggccacagcgggctcctgaggaatatctgcagtcagcctggggattttgcctcctgggttggttgagactttgataacttgaaaacgtgcctgctttctctctcaggcctatggtcgagatttaatggaggcccaagagtggtgcaggaagtacatgaaatcagggaatgtcaaggacctcacccaagcctgggacctctattatcatgtgttccgacgaatctcaaagcagctgcctcaggtaggatcttcaggctcctggcagggttaactgtcattatagtcctttctgttttactgtctatgaatgttctaacactcattccaaagcatctggttttacttctgctttgggacaagtaattgttattagcaatccactgaaaaatacttaaattgcgtttaaattcttccctggaggcagaacactaaatcctttggtaattatttacagctcacatccttagagctgcaatatgtttccccaaaacttctgatgtgccgggaccttgaattggctgtgccaggaacatatgaccccaaccagccaatcattcgcattcagtccatagcaccgtctttgcaagtcatcacatccaagcagaggccccggaaattgacacttatgggtaaggaccattgtgcacttctgtcacccacttctccctcctacactggctgagaccccttccctcttctgaaattactgcttgccattcccactactcacctatcatagctacatctctcccatgctcattgagaggaaaatagagggcaagcaaatttctcattatgtcctcaggacttagttcattcatgtagttgggcttatgtgaagcatgatcacacataaagggaatgacaaaggcatgcaaggcagagaagtaacagtggaaggcaggtgttggagactgatgaggccagggaggaggcagctgggtgcaagcagggaaggtgctagctcctctgaaangggggcttctggctcttgaaatttttttctttttttttttaccatcatagtctctgtggtaaatgattgtgtaaaatgaacaagtggattctcacagtgagatttgttaagcaagtgggctctggaatttcccttggggtagagtgttacttatgggggatgttttagtgaggcctgagtgctgtggtggcactttgaggcctctcgctttttttttttttttttgagccagagttttgctcttgttgcccaggctggagtataatggcgcaatcttggctcactgcaacctccacctcccaggttcaagcaattctcctgtctcagcctcccgcgtagctgggattacaggcacgcaccaccacacctagctaatttttgtatttttaatagagttggggtttcaccatgttggccaggctggtctcgaactctgacctcaagtgatcagcctgtctcagccttccaaagtgctgggattacaggtgtgaaccactgcgcccagccacctcttgctctttttttttttttttccccaagacagagtctcactctgttgcccaggctggagtgaggtggtgtgntctcggctcactgcanccccacctcctgagttcaagcgattctcgtgcctcagcctccctaatagctgagattacaggcgcatgccacacaatcagctaatttttatatttttagtagagatgggatttcaccacgttggccaggctggtctcaaactcccgacctgaggtgatccgcccagcttggcctcccacaatgttaggattacaggtgtgagccaccgcgcccagcctcacctctcgctcttaataatgctcaatgtttcttaaatgcagtgattattcaccaacaccaattaatcatggtccacaggtgattatctctgcatgagctgttgtcttctgatacaaaatgtgggtcaggctggttcttggggtgtttaattaaagagagtttaagnaaggaattgtttccagaggtgtaagcaaagctaagagaatcaacaaggagcgctcatgaacaagcacaagtgagaaattgttactcagccctcacccacccccacactccagaactgaaagagcaaggagcccagctagaaccgtcaccatgccagagaggccatctagcagagtctacagtccagagagagtggtagcttctagaactggggccaggctggtgatgggggacacataccctgacctctccctctacccatcctctgacctcctgccagtacccttccaccattggccacgcccaagtgggatcccaggtgatgcggcttgtaggagtcaggcttctcagaacagaggaggacagagtgggtcggaaaacaggaatgatcatttccatgcctaaccgttcctggtcctcaaaaacagattttgttttgttttaatttgaacaacactggtcattgagaaccataaaaggcaaagccactcttttcattaattctaaagattgttttttctttttgtgaggaacgtgtgattaggtaaggcatatgtagtctgtgggatctcttgaatgcagtggtgctctcagctgaagagctgaggacctctgatgtacactcaccgctcccactgttccttacaggcagcaacggacatgagtttgttttccttctaaaaggccangaagatctgcgccaggatgagcgtgtgatgcagctcttcggcctggttaacacccttctggccaatgacccaacatctcttcggaaaaacctcaggtattcagaaaccctgaaatggcaacaatttgagaagtcttctggttttttcctacatttgtctcgtgtagtcatgtattatatcttaacaaaaaactataaaattagggagccaggcatggtaactcatgcctgtagtcccagaaactccagaggttgaggcagggggatggcttgagcccaggagttcaaggctgcagtgagctgtgattgtgccactgccctccagcctgggtaatagagcaagactgtctctttagaagaaaaaggctgggcatggtggctcgcacctataatcctaatattttgtaatgccaaggtaggaggatcacttgagcccaggaattcaagaccagcctaaacaacatagagagaccccatcactatttatttaaaaaaattaaaaaggtgaccgggcacggtggcccatgcctataatcccagcactttgggaggcccaggcaggtggatcacttgaggtcaggagttcgagaccagcctggccaacatggtgaaaccctgtgtctactaaaaatacaaaaattagctgggcgtggtggcggccacctgtaatcccggctactcaggaggctgaggcacgagaattgcttgaacctgggaggcggaggttgcagtgagccaagattgcaccattgtactccaggctgggcaacaagagtgaaactccatctcaaaaataaataactaaagtaaggaaaaaaaaattaagtggccaggcatggtggctcacatgtaatcccgacactttggaaggctacagcaggaggattgcttgagaccaggagttcaagaccatcctggacaaaaaagtgagaccctgtctctacaaaaaataaaaaaatcagctgggcatggtggctcatgcctgttgtcccagctccttgggagatggaggcagaagaatcatcttagcccagttggttgaggctgcagtgagacaaggttgtgcctctacactctagcctgggcagcagagcaagaccctttctctcaaaaaataaagataggctgggcacagtgactcacgcctgtaatccctgtctctacaaaaaaaaaaaaaaaaaaagctgggcacagtgtagtcccagctactcagggggctgaggcaggagaatcacttgagcccaggaggtcgaggctacagtgagctgtgatggggcaactgtgctcgagcctaggtaacagcgagaccctatctcaaaaagtaaataatattttttaaatgttttaaaaatgaaaaattaagttataaaattttataatttataaccaagttcttccagagtttttagggtattttcattgggaaatgcctttaacaacctccaaagaatccagcagggagcaatttgtggcgggtagactggagagtctacagatgggatgggtctgaccccttgtgggatgaaagccaaacctttcccatcgtccgtattctggcactcctcttcctgttaaaaccatgagaattcacttgagaggtattttagtcacttgattgttcccccaaagccatgagtttcttgggcaggttgaggagacctgtgttgctttcactgcaccatcagtgcactgtctttctgtgatgccttattcttcacaaagcatccctcaacacacacttcacaccagcctgctgcggcgggggctcattaaaaatagtcagggccgccgggcgcggtggctcacgcctgtaatcccagcactttgggaggccaaggagggtggatcacgaggtcaggagttcgagaccagtctggccaacatagtgaaaccccgtctctactaaaaatacaaaaaattagccgggtgtggtgttgtgcatctgtaatcccagctactcgggaggctgacgcaggagaatcgcntgaacccaggaggcagaggttgcagtgaaccaaaatagtgacactgcattccagcctgggcaacagaacaagactccatct

SEQ ID NO: 287313 - DNA, 507 bp, Homo sapiens
atagttttccttaaagaggtagttttgaaattataactctctaagtgtcaagcactaatgagtatctaccattcatctccttccatatccccttacaaggtgctatggtctgaatgtctgtgttcccttaaattcatacactgacgcctaatgcccattgtgacagtattagaaagtagggcctttgggaggcaattgggaggacctcctttgggaggtcatgaaggccctaccctcataactggtattacgaagagacatctgaagagctagttagctccttccaccatgtaagaacacagcaagaaggcaccatgtatgaaccagagagcaaaagctctcaccacacaccgaaactgccggtgacttgatcgtgaacttcccagcctccagaactgtgagcaatacattcctgttgtttataagccacccactgtaaggtatttttgttacagcagcccaaacaaaccaagacactagataagacttctggcatacttttagccc

SEQ ID NO: 287314 - DNA, 797 bp, Homo sapiens
atagttttccttaaagaggtagttttgaaattataactctctaagtgtcaagcactaatgagtatctaccattcatctccttccatatccccttacaaggtgctatggtctgaatgtctgtgttcccttaaattcatacactgacgcctaatgcccattgtgacagtattagaaagtagggcctttgggaggcaattgggaggacctcctttgggaggtcatgaaggccctaccctcataactggtattacgaagagacatctgaagagctagttagctccttccaccatgtaagaacacagcaagaaggcaccatgtatgaaccagagagcaaaagctctcaccacacaccgaaactgccggtgacttgatcgtgaacttcccagcctccagaactctacagagcagcatctgaagagccacggggcccccaccttcatccctgagaattttaggagccagcctgcctttccaggtgacactggacactttcatctgagaaccctgtcacatgacagttgtttcctttcttcctcctctcctgggaatgctgctgcttcgatgacccaagagcctaagaagggtagctgtttctcaatacactgagagagagttctttctccgtcctgaccatcttgggacccgatggcaagactggaaggatttatatctccttttgtacagaaaactgcctccccatgttggtttgtgaagtgaaatgcatataaaacagaggattccagactctcagaagtcaatacataaataaataaaaataaaactgagaagatacctca

SEQ ID NO: 287315 - DNA, 878 bp, Homo sapiens
  misc_feature (1)..(1): n is a, c, g, or t
  misc_feature (3)..(3): n is a, c, g, or t
ngncagggacagacgtaggccaagagaggggaaccagagaggaaccagaggggagagacagagcagcaagcagtggattgctccttgacgacgccagcatgagctccttctccaccaccaccgtgagcttcctccttttactggcattccagctcctaggtcagaccagagctaatcccatgtacaatgccgtgtccaacgcagacctgatggatttcaagaatttgctggaccatttggaagaaaagatgcctttagaagatgaggtcgtgcccccacaagtgctcagtgagccgaatgaagaagcgggggctgctctcagccccctccctgaggtgcctccctggaccggggaagtcagcccagcccagagagatggaggtgccctcgggcggggcccctgggactcctctgatcgatctgccctcctaaaaagcaagctgagggcgctgctcactgcccctcggagcctgcggagatccagctgcttcgggggcaggatggacaggattggagcccagagcggactgggctgtaacagcttccggtactgaagataacagccagggaggacaagcagggctgggcctagggacagactgcaagaggctcctgtcccctggggtctctgctgcatttgtgtcatcttgttgccatggagttgtgatcatcccatctaagctgcagcttcctgtcaacacttctcacatcttatgctaactgtagataaagtggtttgatggtgacttcctcgcctctcccaccccatgcattaaattttaaggtagaacctcacctgttactgaaagtggtttgaaagtgaataaacttcagcaccatggacagaagacaaaaaaagcctgcgttggtgtgctttc

SEQ ID NO: 287316 - DNA, 906 bp, Homo sapiens
aggcagccctgtctgaggccagaggtctgcccacgtggcggatgaggcaggtgtgaggccagcttgagcatctggatccatttgtctcgggctgctggctgcctgccatttcctcctctccacccttatttggaggccctgacagctgagccacaaacaaaccaggggagctgggcaccagccaagcgtcaccctctgtttccccgcacgggtaccagcgtcgaggagaaagaatcctgaggcacggcgaatttgctggaccatttggaagaaaagatgcctttagaagatgaggtcgtgcccccacaagtgctcagtgagccgaatgaagaagcgggggctgctctcagccccctccctgaggtgcctccctggaccggggaagtcagcccagcccagagagatggaggtgccctcgggcggggcccctgggactcctctgatcgatctgccctcctaaaaagcaagctgagggcgctgctcactgcccctcggagcctgcggagatccagctgcttcgggggcaggatggacaggattggagcccagagcggactgggctgtaacagcttccggtactgaagataacagccagggaggacaagcagggctgggcctagggacagactgcaagaggctcctgtcccctggggtctctgctgcatttgtgtcatcttgttgccatggagttgtgatcatcccatctaagctgcagcttcctgtcaacacttctcacatcttatgctaactgtagataaagtggtttgatggtgacttcctcgcctctcccaccccatgcattaaattttaaggtagaacctcacctgttactgaaagtggtttgaaagtgaataaacttcagcaccatggacagaagacaaaaaaagcctgcgttggtgtgctttc

SEQ ID NO: 287317 - DNA, 325 bp, Homo sapiens
aagttatctttgcatggctgattagcagttcatattcctccccagaattgcaagatcctgaagggcttaagtgaaatttactctgatgagtaacttgcttatcaattcatgaagctcagagggtcatcaggctggggtgggggccggtgggaagcaggtggtcagtaatcaagttcagaggatgggcacactcatacatgaagctgacttttccaggacagccaggtcaccaagccagatatgtctgtgttctctttgcagtactgaagataacagccagggaggacaagcagggctgggcctagggacagactgcaagaggctc

SEQ ID NO: 287318 - DNA, 1376 bp, Homo sapiens
tgcttctgtctctgtgaattttgactattctaggcacttcacaaaactggactcatacgatatctgtagttttgcgtctggcttctctattgaattcttaaaggggggtgggaactaagcagatcacaagggagctgcccacagaggtaaagacaaggtcaggtaggctgagagacgcaggaaagcgggtcaaggcgtagggctggagggcaggggcgggccctgggcgtgggctgggggtcctgccccggggcgcaccccgggcgagggctgcccggaggagccgaggttggcggacagcttggccctgagcttgaggggaaggcagcgatgggacaaaggacggaggtctaggaagagggtctgcagagcagaaagcacgggtaggggcggcctgacgctcggaagacaacggatgggagccgtgtgcacgtcgggagctcggagtgagcgtgagttccgtgcccaggcccgcgactcggcccgacaggacagcgctccgggtcgacggggtcctggagccgcgctcggggagggcgcagcggagggcgagcggcggcgttaggacccggaggcgcgggcggactgggggcggcggggctaggacccagcggctccggcagagcggaagcggcggcgggagcttccgggagggcggctcgcaggcaccatgactcctgtgaggatgcagcactccctggcaggtcagacctatgccgtgcccctcatccagccagacctgcggcgagaggaggccgtccagcagatggcggatgccctgcagtacctgcagaaggtctctggagacatcttcagcagggggtagagcagagccggagccaggtgcaggccattggagagaaggtctccttggcccaggccaagattgagaagatcaagggcagcaagaaggccatcaaggtgttctccagtgccaagtaccctgctccagagcgcctgcaggaatatggctccatcttcacgggcgcccaggaccctggcctgcagagacgcccccggcacaggatccagagcaagcaccggcccctggacgagcgggccctgcaggagaagctgactttcctgtgtgcgtgagcaccaagccggagcccgaggacgatgcagaagagggacttgggggtcttcccagcaacatcagctctgtcagctccttgctgctcttcaacaccaccgagaacctgtagaagaagtatgtcttcctgggaccccctggctggtgctgtaacaaagacccatgtgatgctggggggcagagacagaggagaagctggtttgatgcccccttgtccatcaggcagagagaggcgcctggaacagcaggtcccagagaactacttctatgttgccggacctgg

SEQ ID NO: 287319 - DNA, 1099 bp, Homo sapiens
accccacttagcctcctggtttcctgtggtggctctgctctcacaactcatgcttttcctcccattggagggcctattccttcacgttttcctgcagccaacaaatatttacccagcagtgctcgtgtgcaaggcagtgtgggaatctctatatatccagccacggataaggcaacatacctctccacctggagcgcacattctggcaggagagaaagacctaaataagcaatagatgattagttcttcaataacagttgtgacaaggtctattgataatattttgtaatcactaatattcatataaaccgtgcacaaccattgatttgagtgcattaactcacacttcatgagcaggcactgccgtcatctcattttatagatgaggaaactgaggcacagaagggctgagagacctggcctagtgacagagccaggattcaaagccatagatcatggccccgggttatgtaggttattactgcatctgttcaggggagatggggtactgtgaggctcgtcatgggaagcctggcttggtctcaggtcagggaaggcagacgtgaggaaatgacatttatggtaaagtctgagggttgagtgggtaggttgggaagaacattccagaaagaagcacatgaactacagcctggaggtggaggacctaaaaggaagccagcatggctggagcacggagtggccattgagggaggcgagctggagggctgcagcttcttgtattggcagtgctgacctcgcacagtccttgggctccagtgacttcactcagtgtttatctaacatgagtgagtgaatggtgtttgctctttttttggtaaaggtcccaggggttgtcgggtacacaggtcctgtctttggccataagcaaactgaaatgaggcttggtctccttcccaggatcccacaccatgcctcacatggtagaccccagtgggaagtatgtgactgcctgactcaggtgcctctcgtggtccaagccatccctgccctgtcccttccctggttgtcgccagacctggagcccctgctccttcactttgcagcctcctcttctgtcaccaactgggaacccacctct

SEQ ID NO: 287320 - DNA, 532 bp, Homo sapiens
cactcagcaggcatcagcagagtcccatctatgcgctcctggcctctcagcaaatgctctgtcccctactcccctatctgtgcaggctgaagctatgtgcatagttgggatgagggctgtgttgtctcaacaccacgctgccctgtggtgggggcgtgccggtggtcgtgggtggctctgacgctccggctccgacccacaggcaccatgactcctgtgaggatgcagcactccctggcaggtcagacctatgccgtgcccctcatccagccagacctgcggcgagaggaggccgtccagcagatggcggatgccctgcagtacctgcagaaggtctctggagacatcttcagcaggtgggtgctgccactcacccccacctgatgagagggccatccctgtcctgggcaatcccagcaacacaccctctgggagcagcccccttggggaatcccggtcctggggaacccatctggcttccctgtgtgggaggggctgaagtgagagcccaacttggaagcttttactcctg

SEQ ID NO: 287321 - DNA, 995 bp, Homo sapiens
tgcttctgtctctgtgaattttgactattctaggcacttcacaaaactggactcatacgatatctgtagttttgcgtctggcttctctattgaattcttaaaggggggtgggaactaagcagatcacaagggagctgcccacagaggtaaagacaaggtcaggtaggctgagagacgcaggaaagcgggtcaaggcgtagggctggagggcaggggcgggccctgggcgtgggctgggggtcctgccccggggcgcaccccgggcgagggctgcccggaggagccgaggttggcggacagcttggccctgagcttgaggggaaggcagcgatgggacaaaggacggaggtctaggaagagggtctgcagagcagaaagcacgggtaggggcggcctgacgctcggaagacaacggatgggagccgtgtgcacgtcgggagctcggagtgagcgtgagttccgtgcccaggcccgcgactcggcccgacaggacagcgctccgggtcgacggggtcctggagccgcgctcggggagggcgcagcggagggcgagcggcggcgttaggacccggaggcgcgggcggactgggggcggcggggctaggacccagcggctccggcagagcggaagcggcggcgggagcttccgggagggcggctcgcaggcaccatgactcctgtgaggatgcagcactccctggcaggtcagacctatgccgtgcccctcatccagccagacctgcggcgagaggaggccgtccagcagatggcggatgccctgcagtacctgcagaaggtctctggagacatcttcagcaggtgggtgctgccactcacccccacctgatgagagggccatccctgtcctgggcaatcccagcaacacaccctctgggagcagcccccttggggaatcccggtcctggggaacccatctggcttccctgtgtgggaggggctgaagtgagagcccaacttggaagcttttactcctg

SEQ ID NO: 287322 - DNA, 1821 bp, Homo sapiens
tgcttctgtctctgtgaattttgactattctaggcacttcacaaaactggactcatacgatatctgtagttttgcgtctggcttctctattgaattcttaaaggggggtgggaactaagcagatcacaagggagctgcccacagaggtaaagacaaggtcaggtaggctgagagacgcaggaaagcgggtcaaggcgtagggctggagggcaggggcgggccctgggcgtgggctgggggtcctgccccggggcgcaccccgggcgagggctgcccggaggagccgaggttggcggacagcttggccctgagcttgaggggaaggcagcgatgggacaaaggacggaggtctaggaagagggtctgcagagcagaaagcacgggtaggggcggcctgacgctcggaagacaacggatgggagccgtgtgcacgtcgggagctcggagtgagcgtgagttccgtgcccaggcccgcgactcggcccgacaggacagcgctccgggtcgacggggtcctggagccgcgctcggggagggcgcagcggagggcgagcggcggcgttaggacccggaggcgcgggcggactgggggcggcggggctaggacccagcggctccggcagagcggaagcggcggcgggagcttccgggagggcggctcgcaggcaccatgactcctgtgaggatgcagcactccctggcaggtcagacctatgccgtgcccctcatccagccagacctgcggcgagaggaggccgtccagcagatggcggatgccctgcagtacctgcagaaggtctctggagacatcttcagcagccaacaaatatttacccagcagtgctcgtgtgcaaggcagtgtgggaatctctatatatccagccacggataaggcaacatacctctccacctggagcgcacattctggcaggagagaaagacctaaataagcaatagatgattagttcttcaataacagttgtgacaaggtctattgataatattttgtaatcactaatattcatataaaccgtgcacaaccattgatttgagtgcattaactcacacttcatgagcaggcactgccgtcatctcattttatagatgaggaaactgaggcacagaagggctgagagacctggcctagtgacagagccaggattcaaagccatagatcatggccccgggttatgtaggttattactgcatctgttcaggggagatggggtactgtgaggctcgtcatgggaagcctggcttggtctcaggtcagggaaggcagacgtgaggaaatgacatttatggtaaagtctgagggttgagtgggtaggttgggaagaacattccagaaagaagcacatgaactacagcctggaggtggaggacctaaaaggaagccagcatggctggagcacggagtggccattgagggaggcgagctggagggctgcagcttcttgtattggcagtgctgacctcgcacagtccttgggctccagtgacttcactcagtgtttatctaacatgagtgagtgaatggtgtttgctctttttttggtaaaggtcccaggggttgtcgggtacacaggtcctgtctttggccataagcaaactgaaatgaggcttggtctccttcccaggatcccacaccatgcctcacatggtagaccccagtgggaagtatgtgactgcctgactcaggtgcctctcgtggtccaagccatccctgccctgtcccttccctggttgtcgccagacctggagcccctgctccttcactttgcagcctcctcttctgtcaccaactgggaacccacctct

SEQ ID NO: 287323 - DNA, 1382 bp, Homo sapiens
tgcttctgtctctgtgaattttgactattctaggcacttcacaaaactggactcatacgatatctgtagttttgcgtctggcttctctattgaattcttaaaggggggtgggaactaagcagatcacaagggagctgcccacagaggtaaagacaaggtcaggtaggctgagagacgcaggaaagcgggtcaaggcgtagggctggagggcaggggcgggccctgggcgtgggctgggggtcctgccccggggcgcaccccgggcgagggctgcccggaggagccgaggttggcggacagcttggccctgagcttgaggggaaggcagcgatgggacaaaggacggaggtctaggaagagggtctgcagagcagaaagcacgggtaggggcggcctgacgctcggaagacaacggatgggagccgtgtgcacgtcgggagctcggagtgagcgtgagttccgtgcccaggcccgcgactcggcccgacaggacagcgctccgggtcgacggggtcctggagccgcgctcggggagggcgcagcggagggcgagcggcggcgttaggacccggaggcgcgggcggactgggggcggcggggctaggacccagcggctccggcagagcggaagcggcggcgggagcttccgggagggcggctcgcaggcaccatgactcctgtgaggatgcagcactccctggcaggtcagacctatgccgtgcccctcatccagccagacctgcggcgagaggaggccgtccagcagatggcggatgccctgcagtacctgcagaaggtctctggagacatcttcagcaggagccctgagtccctttgaatgtggatgtgtgtcgtctgattcgtctttgactcccacggccccagcatgtgctctacaaatgggatgcactctggttattgaacagtgaggggtggaggggggagaaggaaagcaagggatgcttggagatggtcctctccggggcagatagaggaagatggacccttagtgagaccacgcgcagaacaggctgggtgagccacttccgtccctgatgtccacagaggcagcttcctctctagtgctgggtgagcgtgccatagggtatggcttcagcactgagcttgtaaactgacctaccttgaagtaggccaccaagccaagggcgtctggaccaggaatgacaaacaaatggcaccattcccccaccctcagggtgggacattgttcatcaacggcctggccccagtgaggcctaagggccttcccgacacagcttccagaccatcctgctagtccatggagatacaggatagctgaagtttctgatcctgagtctgacttttcttcggacatagctgtacgtaaaaataatgtccgg

SEQ ID NO: 287324 - DNA, 289 bp, Homo sapiens
aagggaggcatgagggatgtcaaggcccaagccactgaagcctggtgggtgctggccagacattctcagtgccattcaagtcccttcacgtggtaactttcccacagctgagggtcaaccatgagtggccagcgctcacagttgatgagaatggtggcattctccacggacatgcggtcggctgggaggccctcgttctgccaggcagccacgtcagcatcatccatcagcatcctcaggggatccagggctggggtgactggaatgggagtctggtgaagaagaaaca

SEQ ID NO: 287325 - DNA, 561 bp, Homo sapiens
gtgtgttgctgcagggaaggcttcccagtggaggtggctcctgagctctaggaaaagggaagtgagtgtccttccaggcagagggaacagcaggtgcaaaggcctgggggctcgtctataaggcccgctggagtcacaagccccatcccagactctccaacgctggacctgcagcgcccagccctgccctggtgctaccacctgccagctctgtgcctgcccctccactagatcatgacttcggctccagctccctcactctccatgcctctcacttgcgggttgtgccctgctcagctggccagactttggccccctccctacctggatttgtgaagccccaaatttcatctcccccaccacacttattcacagcctccgcctgctgacatacccaggcaagactcccttcccctccaggcagccaaacttcagttcgaatcttctggctcttaccagacccctgatgaatcccaggatcttcgcaggtggtcccagggcctctttgaaccacagttttacttatctgaaaaataaaaaggcatgatttagatgacttct

SEQ ID NO: 287326 - DNA, 488 bp, Homo sapiens
tcgaaggtaccccccgtaggatccggtggacaggactcaaacagatcctgtgaagcgaagacaatgaaccccggggagctctgcccaagtaccagatccggaagcaacccgaagcggcggcgcagcttgccgacgtctgcacgccgcacgctgtcgtgacatcagcgcgtcttggcgccgggtagtggagtggtcactttgggaaagtcaggcaggaatgacttgtttctgtgatgtctgtggcctcaactgggatgactcgaccagctggggacttgaaaatcgggcatctctttctctctcatcttgtagtcacagtctctccatgtggtctccccatacagcctcttcagcatcacaatctcaggatgtcaaacttggcacaatttgactctgatttttaccaatctaattttactattgataaccaggagcagagtggtaatgactctaatgcctatggaaatctttatggatctagaaagtaa

SEQ ID NO: 287327 - DNA, 504 bp, Homo sapiens
tatcatagacacagaagttacatatgcttttattaagagttaatgatttaaaaaataacctaatgatatgagtgctaaatttgtaaataattgaaatgagtcactttcttctggtaacaccttcctggggtttttagcttcaagagccaccatgctgacaagtaagcactttcattaccaatacttctttcaggctattccattccaagatgaccaaataggaacagctctggtctggagctcccagcgtgcccgacacagaagacgggtgatttctgcattttcacagagttattcctttgtagttgtgatccagcatggatgtggtgtggttgtatcagtgactgcaggtagtctgtggagcattacacagttctttacggaaatagcagctgcaagtgaccaggaccactgacagcagaaggcacctcacttaccatggtaaaaagcagtttagaaaaatctcaaaaacaaaataaatgtttattggagactcaaaatcat

SEQ ID NO: 287328 - DNA, 440 bp, Homo sapiens
tatcatagacacagaagttacatatgcttttattaagagttaatgatttaaaaaataacctaatgatatgagtgctaaatttgtaaataattgaaatgagtcactttcttctggtaacaccttcctggggctattccattccaagatgaccaaataggaacagctctggtctggagctcccagcgtgcccgacacagaagacgggtgatttctgcattttcacagagttattcctttgtagttgtgatccagcatggatgtggtgtggttgtatcagtgactgcaggtagtctgtggagcattacacagttctttacggaaatagcagctgcaagtgaccaggaccactgacagcagaaggcacctcacttaccatggtaaaaagcagtttagaaaaatctcaaaaacaaaataaatgtttattggagactcaaaatcat

SEQ ID NO: 287329 - DNA, 1406 bp, Homo sapiens
tatcatagacacagaagttacatatgcttttattaagagttaatgatttaaaaaataacctaatgatatgagtgctaaatttgtaaataattgaaatgagtcactttcttctggtaacaccttcctggggtatgttcttcactaaatgtttttgttatcttgcttaactttttctattcattcgttaaaatattatgtgaactatgaaaggtttttagcttcaagagccaccatgctgacaagtaagcactttcattaccaatacttctttcaggtgagcatctgcctgctgcaggtgtaccctcttggcactgagttctgagtttgcctttaattcaaaaaacaaagatacttgttcctcacaactgccaaaattttaaaaagcactgcctttatgaaagcatttctcactgcttctactcataataatgctccctatgaatgttcagtaatacaatctatttttctgaaaagcataactttctattctctaataaagtttatggagtacatttcctaactataataagcaagttgaatgtctcaatcctgcttcaggtatctttacaatttctgaggctttagcagaaccttgtatgtactaggtgcttgaaaaaaagtttgttaaactgagtcaagtgacagcatatttatctttctgggattgtgtggtaaagtggggaaaaagacatcaaacaatttcttaaaaacgaaatatagcagcaatccgcttttgtagatattaatcacacctgagcatatttagtctgtaaatacttattcatcttgcgtagatgatcatcttgaaaccgggtgaaaaaaaaatggcctggttttttaacgggataactttaacggggttttccgttttcataggccagtttatttttactttcagtgattttttccaccttctgttgggcaagctgataaggcaaacaaaggcatcagaacctctaggcatagaaaggaataaccattttcatttttaaacaagtatttacatccttaccatttctatcatcataagatcaagattcctatttatttgctactgctgcttttagtcttttcctacatagttgatcacagggctaatatgcaacatgtacagagactgctaataaaagcatgaagctttaagagtaccagagtttgttggttttgtatattaactttttttgttatgtcagttattcctttgtagttgtgatccagcatggatgtggtgtggttgtatcagtgactgcaggtagtctgtggagcattacacagttctttacggaaatagcagctgcaagtgaccaggaccactgacagcagaaggcacctcacttaccatggtaaaaagcagtttagaaaaatctcaaaaacaaaataaatgtttattggagactcaaaatcat

SEQ ID NO: 287330 - DNA, 2575 bp, Homo sapiens
agcggacttccgcgtccgccccgcggcgtccggcggccgcgccgagggtctggcgggccgcagagggagaccaagacatcattgttttgaagtttctgaaagtgttgggaggcaaaaattcaggtgcctgggggagaaatggaaggccacaaggcagaagaagaggtgctagatgttctccgactgaacgtgggtggctgtatttacacagcccggcgggagtccttgtgccgcttcaaggactccatgttggcatctatgttcagtggtcgctttcctctaaaaacagatgagtcaggggcttgtgttattgaccgtgatggacgtctatttaaataccttttggattaccttcatggagaagttcagattcccacagatgagcaaacccgcatcgccctacaggaagaggctgattactttggcatcccttatccatacagcctgtctgaccatttggccaatgaaatggagacatattctttaaggtcaaatatagaacttaaaaaggctttaacagacttctgtgattcatatggcttagtctgcaataaaccaacagtttgggttctccactatcttaacacatctggtgcaagctgtgagagtagaattattggtgtatatgccacaaaaactgatggaacagacgctattgaaaagcagctgggaggaagaattcacagcaaaggcatttttaaaagagaggcgggaaataatgttcagtacatttggagctattattcagtagcagagttgaagaaaatgatggatgcctttgatgcttgggaaggaaaaggtgttagctactggcgggtgcctcatgagctgatagagtgttggactctagaagaacggcctttacttggaagcctgcgtcacatggctccaattcgaaagaggcgactgataacgttcaatgaagcggacgaaagtgtgaactataagactggtcctaagccagttagatttttgggcccttccacaagtacccaaattaaagtcaagaactcggcctcagtcacggtgtctccagccagtgccatccagacgtcggctggggcgacagcaaaccggtttcaaagtggtagccgcagaaaggcagctcagcgctctgcaccttccagagccacggccctggtgggcacgggggcacctgggcatcctcaggcttcccctggggctgcgagcgctgaaaatggaggcacgcacttacctccagctaaggtgctactctccgacaagaagcctacaccccagcgggtgataaagctgaagaggactccgctgtgcgccaccgcgccttgcctgccctcccccacggccacgaggcaggccaactccctcaagccgcttcccggcgaagctgcccgtgccttgggagtgcggactgagaacgggaagaacaagggaaattgatgaaagtggtggacttgaaatttcccgttcatctcccaaagctttcaacccattcgacgcaaagaagtgacactttcttaatgcagcagaggggaagcttaggtttatgttgaggattctgttcctggaattgtgtgagctaggaatggaggaggggagactttcaatggttaaggctccatttctcattttcccaacttttatatgattgtctatgggcagtttgaatttctggttttcaatttattttttaatgattaattcgtattaaggcaacaagacagtacaacaaataatctctagagaggtccactttgttgctgaagtaaacgttacttgttgcaacccgaggatgggcatgaggtttggccttaggtattcctgtctgggaaaatggagggggtgatattagtggttccctgtactatatcacagccaagagagattagagagagaaaatgtagatcaaggcgagctgcctacaaattactctgtctccaaaggcaacgtgaaaagaaatgatggggaggaaaaaaccccatagattgaattagcactttgactctcacttaattcaacgattttctttcctagattggcttttcttactcttttctgttagtagatttatttataaacaccacaagaagatctcttgggatcagaattatataatatctttgaagtaaattattaaaatatcctatttaatttgaatagtgaagttttgaaaatactttgaaaaagagaagtaaaagtttaactttttaactaaagttagtatttgtttttcagaaatgaccactgaagattcattctgattatacaatatgatttttatgcataaaatttccatgtaacttgaatttaatatttttaaacagaatattttgactaatcctctattttttcatgactattcagttgtgtgtgtttattcgtaaatgttatgttttgtaattggatcacatatttctactttcagtgagagtatgccttcactatgttaaaaaataagctcataaaacagggtactttttattcaaatgcttatcattgtactttcattgctttgaaagagtaaagtaagtatactcaaaacattacgttttacaaaatcaaataaaacttttccataaaaagtggtaaaaaaaaa

SEQ ID NO: 287331 - DNA, 2959 bp, Homo sapiens
agcggacttccgcgtccgccccgcggcgtccggcggccgcgccgagggtctggcgggccgcaggtcagtctgggaagctgccgacccgccccacccccccggtgcggaagagccgggcgcgggatgggccgcgggcccggaaggcggcggggcgccctgaggaagggcacgggccgcgctggtaacgcgcgcgccccgggctgcaggctcgggcttcgggccgatttggggtctccaggccgcggaagaccgtggcggggctttctggctccccagctcctcccggctcttcccgcttcggaagaggagtgtgagccccttgagcgatgtttttcaaagtggggttcgcgggcagatcccgacccctcctcagactttctgaggaactgtgtgctgtggccggagtgtcttcgttttcccaagcgtccctgatggttttggatgcagagggagaccaagacatcattgttttgaagtttctgaaagtgttgggaggcaaaaattcaggtgcctgggggagaaatggaaggccacaaggcagaagaagaggtgctagatgttctccgactgaacgtgggtggctgtatttacacagcccggcgggagtccttgtgccgcttcaaggactccatgttggcatctatgttcagtggtcgctttcctctaaaaacagatgagtcaggggcttgtgttattgaccgtgatggacgtctatttaaataccttttggattaccttcatggagaagttcagattcccacagatgagcaaacccgcatcgccctacaggaagaggctgattactttggcatcccttatccatacagcctgtctgaccatttggccaatgaaatggagacatattctttaaggtcaaatatagaacttaaaaaggctttaacagacttctgtgattcatatggcttagtctgcaataaaccaacagtttgggttctccactatcttaacacatctggtgcaagctgtgagagtagaattattggtgtatatgccacaaaaactgatggaacagacgctattgaaaagcagctgggaggaagaattcacagcaaaggcatttttaaaagagaggcgggaaataatgttcagtacatttggagctattattcagtagcagagttgaagaaaatgatggatgcctttgatgcttgggaaggaaaaggtgttagctactggcgggtgcctcatgagctgatagagtgttggactctagaagaacggcctttacttggaagcctgcgtcacatggctccaattcgaaagaggcgactgataacgttcaatgaagcggacgaaagtgtgaactataagactggtcctaagccagttagatttttgggcccttccacaagtacccaaattaaagtcaagaactcggcctcagtcacggtgtctccagccagtgccatccagacgtcggctggggcgacagcaaaccggtttcaaagtggtagccgcagaaaggcagctcagcgctctgcaccttccagagccacggccctggtgggcacgggggcacctgggcatcctcaggcttcccctggggctgcgagcgctgaaaatggaggcacgcacttacctccagctaaggtgctactctccgacaagaagcctacaccccagcgggtgataaagctgaagaggactccgctgtgcgccaccgcgccttgcctgccctcccccacggccacgaggcaggccaactccctcaagccgcttcccggcgaagctgcccgtgccttgggagtgcggactgagaacgggaagaacaagggaaattgatgaaagtggtggacttgaaatttcccgttcatctcccaaagctttcaacccattcgacgcaaagaagtgacactttcttaatgcagcagaggggaagcttaggtttatgttgaggattctgttcctggaattgtgtgagctaggaatggaggaggggagactttcaatggttaaggctccatttctcattttcccaacttttatatgattgtctatgggcagtttgaatttctggttttcaatttattttttaatgattaattcgtattaaggcaacaagacagtacaacaaataatctctagagaggtccactttgttgctgaagtaaacgttacttgttgcaacccgaggatgggcatgaggtttggccttaggtattcctgtctgggaaaatggagggggtgatattagtggttccctgtactatatcacagccaagagagattagagagagaaaatgtagatcaaggcgagctgcctacaaattactctgtctccaaaggcaacgtgaaaagaaatgatggggaggaaaaaaccccatagattgaattagcactttgactctcacttaattcaacgattttctttcctagattggcttttcttactcttttctgttagtagatttatttataaacaccacaagaagatctcttgggatcagaattatataatatctttgaagtaaattattaaaatatcctatttaatttgaatagtgaagttttgaaaatactttgaaaaagagaagtaaaagtttaactttttaactaaagttagtatttgtttttcagaaatgaccactgaagattcattctgattatacaatatgatttttatgcataaaatttccatgtaacttgaatttaatatttttaaacagaatattttgactaatcctctattttttcatgactattcagttgtgtgtgtttattcgtaaatgttatgttttgtaattggatcacatatttctactttcagtgagagtatgccttcactatgttaaaaaataagctcataaaacagggtactttttattcaaatgcttatcattgtactttcattgctttgaaagagtaaagtaagtatactcaaaacattacgttttacaaaatcaaataaaacttttccataaaaagtggtaaaaaaaaa

SEQ ID NO: 287332 - DNA, 2937 bp, Homo sapiens
agcggacttccgcgtccgccccgcggcgtccggcggccgcgccgagggtctggcgggccgcaggtcagtctgggaagctgccgacccgccccacccccccggtgcggaagagccgggcgcgggatgggccgcgggcccggaaggcggcggggcgccctgaggaagggcacgggccgcgctggtaacgcgcgcgccccgggctgcaggctcgggcttcgggccgatttggggtctccaggccgcggaagaccgtggcggggctttctggctccccagctcctcccggctcttcccgcttcggaagaggagtgtgagccccttgagcgatgtttttcaaagtggggttcgcgggcagatcccgacccctcctcagactttctgaggaactgtgtgctgtggccggagtgtcttcgttttcccaagcgtccctgatggttttggatgcagagggagaccaagacatcattgttttgaagtttctgaaagtgttgggaggcaaaaattcaggtgcctgggggagaaatggaaggccacaaggcagaagaagaggtgctagatgttctccgactgaacgtgggtggctgtatttacacagcccggcgggagtccttgtgccgcttcaaggactccatgttggcatctatgttcagtggtcgctttcctctaaaaacagatgagtcaggggcttgtgttattgaccgtgatggacgtctatttaaataccttttggattaccttcatggagaagttcagattcccacagatgagcaaacccgcatcgccctacaggaagaggctgattactttggcatcccttatccatacagcctgtctgaccatttggccaatgaaatggagacatattctttaaggctttaacagacttctgtgattcatatggcttagtctgcaataaaccaacagtttgggttctccactatcttaacacatctggtgcaagctgtgagagtagaattattggtgtatatgccacaaaaactgatggaacagacgctattgaaaagcagctgggaggaagaattcacagcaaaggcatttttaaaagagaggcgggaaataatgttcagtacatttggagctattattcagtagcagagttgaagaaaatgatggatgcctttgatgcttgggaaggaaaaggtgttagctactggcgggtgcctcatgagctgatagagtgttggactctagaagaacggcctttacttggaagcctgcgtcacatggctccaattcgaaagaggcgactgataacgttcaatgaagcggacgaaagtgtgaactataagactggtcctaagccagttagatttttgggcccttccacaagtacccaaattaaagtcaagaactcggcctcagtcacggtgtctccagccagtgccatccagacgtcggctggggcgacagcaaaccggtttcaaagtggtagccgcagaaaggcagctcagcgctctgcaccttccagagccacggccctggtgggcacgggggcacctgggcatcctcaggcttcccctggggctgcgagcgctgaaaatggaggcacgcacttacctccagctaaggtgctactctccgacaagaagcctacaccccagcgggtgataaagctgaagaggactccgctgtgcgccaccgcgccttgcctgccctcccccacggccacgaggcaggccaactccctcaagccgcttcccggcgaagctgcccgtgccttgggagtgcggactgagaacgggaagaacaagggaaattgatgaaagtggtggacttgaaatttcccgttcatctcccaaagctttcaacccattcgacgcaaagaagtgacactttcttaatgcagcagaggggaagcttaggtttatgttgaggattctgttcctggaattgtgtgagctaggaatggaggaggggagactttcaatggttaaggctccatttctcattttcccaacttttatatgattgtctatgggcagtttgaatttctggttttcaatttattttttaatgattaattcgtattaaggcaacaagacagtacaacaaataatctctagagaggtccactttgttgctgaagtaaacgttacttgttgcaacccgaggatgggcatgaggtttggccttaggtattcctgtctgggaaaatggagggggtgatattagtggttccctgtactatatcacagccaagagagattagagagagaaaatgtagatcaaggcgagctgcctacaaattactctgtctccaaaggcaacgtgaaaagaaatgatggggaggaaaaaaccccatagattgaattagcactttgactctcacttaattcaacgattttctttcctagattggcttttcttactcttttctgttagtagatttatttataaacaccacaagaagatctcttgggatcagaattatataatatctttgaagtaaattattaaaatatcctatttaatttgaatagtgaagttttgaaaatactttgaaaaagagaagtaaaagtttaactttttaactaaagttagtatttgtttttcagaaatgaccactgaagattcattctgattatacaatatgatttttatgcataaaatttccatgtaacttgaatttaatatttttaaacagaatattttgactaatcctctattttttcatgactattcagttgtgtgtgtttattcgtaaatgttatgttttgtaattggatcacatatttctactttcagtgagagtatgccttcactatgttaaaaaataagctcataaaacagggtactttttattcaaatgcttatcattgtactttcattgctttgaaagagtaaagtaagtatactcaaaacattacgttttacaaaatcaaataaaacttttccataaaaagtggtaaaaaaaaa

SEQ ID NO: 287333 - DNA, 2577 bp, Homo sapiens
cagtaatgtcctgggccttcacattcattcaccactcactcactgactcacccagagcaacttccagtcctccaagccccattcatgagggagaccaagacatcattgttttgaagtttctgaaagtgttgggaggcaaaaattcaggtgcctgggggagaaatggaaggccacaaggcagaagaagaggtgctagatgttctccgactgaacgtgggtggctgtatttacacagcccggcgggagtccttgtgccgcttcaaggactccatgttggcatctatgttcagtggtcgctttcctctaaaaacagatgagtcaggggcttgtgttattgaccgtgatggacgtctatttaaataccttttggattaccttcatggagaagttcagattcccacagatgagcaaacccgcatcgccctacaggaagaggctgattactttggcatcccttatccatacagcctgtctgaccatttggccaatgaaatggagacatattctttaaggctttaacagacttctgtgattcatatggcttagtctgcaataaaccaacagtttgggttctccactatcttaacacatctggtgcaagctgtgagagtagaattattggtgtatatgccacaaaaactgatggaacagacgctattgaaaagcagctgggaggaagaattcacagcaaaggcatttttaaaagagaggcgggaaataatgttcagtacatttggagctattattcagtagcagagttgaagaaaatgatggatgcctttgatgcttgggaaggaaaaggtgttagctactggcgggtgcctcatgagctgatagagtgttggactctagaagaacggcctttacttggaagcctgcgtcacatggctccaattcgaaagaggcgactgataacgttcaatgaagcggacgaaagtgtgaactataagactggtcctaagccagttagatttttgggcccttccacaagtacccaaattaaagtcaagaactcggcctcagtcacggtgtctccagccagtgccatccagacgtcggctggggcgacagcaaaccggtttcaaagtggtagccgcagaaaggcagctcagcgctctgcaccttccagagccacggccctggtgggcacgggggcacctgggcatcctcaggcttcccctggggctgcgagcgctgaaaatggaggcacgcacttacctccagctaaggtgctactctccgacaagaagcctacaccccagcgggtgataaagctgaagaggactccgctgtgcgccaccgcgccttgcctgccctcccccacggccacgaggcaggccaactccctcaagccgcttcccggcgaagctgcccgtgccttgggagtgcggactgagaacgggaagaacaagggaaattgatgaaagtggtggacttgaaatttcccgttcatctcccaaagctttcaacccattcgacgcaaagaagtgacactttcttaatgcagcagaggggaagcttaggtttatgttgaggattctgttcctggaattgtgtgagctaggaatggaggaggggagactttcaatggttaaggctccatttctcattttcccaacttttatatgattgtctatgggcagtttgaatttctggttttcaatttattttttaatgattaattcgtattaaggcaacaagacagtacaacaaataatctctagagaggtccactttgttgctgaagtaaacgttacttgttgcaacccgaggatgggcatgaggtttggccttaggtattcctgtctgggaaaatggagggggtgatattagtggttccctgtactatatcacagccaagagagattagagagagaaaatgtagatcaaggcgagctgcctacaaattactctgtctccaaaggcaacgtgaaaagaaatgatggggaggaaaaaaccccatagattgaattagcactttgactctcacttaattcaacgattttctttcctagattggcttttcttactcttttctgttagtagatttatttataaacaccacaagaagatctcttgggatcagaattatataatatctttgaagtaaattattaaaatatcctatttaatttgaatagtgaagttttgaaaatactttgaaaaagagaagtaaaagtttaactttttaactaaagttagtatttgtttttcagaaatgaccactgaagattcattctgattatacaatatgatttttatgcataaaatttccatgtaacttgaatttaatatttttaaacagaatattttgactaatcctctattttttcatgactattcagttgtgtgtgtttattcgtaaatgttatgttttgtaattggatcacatatttctactttcagtgagagtatgccttcactatgttaaaaaataagctcataaaacagggtactttttattcaaatgcttatcattgtactttcattgctttgaaagagtaaagtaagtatactcaaaacattacgttttacaaaatcaaataaaacttttccataaaaagtggtaaaaaaaaa

SEQ ID NO: 287334 - DNA, 967 bp, Homo sapiens
tttttttggcggtataaaagtgcttctttatttggtcatacagctttcaaatgttgcttaacgaacagatagcatttttataatcagaggaaagactcagtattaaagtgcgcgtcccatcattgcaaccgggccctcgggcagccagctctctcttgcttcgcgtccggctctcaggccctggagctcggcctccctaccttctccaggcgcgggtcctgctccttttccggccgccctcgctccgccccttgagaccaagagaagggggaaatggggctgggggccgtccccgggagacaggcggccttccgagagggactggagcaggccgtgcggtatgccaaagccctgggctgtcccaggatccacctgatggctggccgagtaccccagggagctgatcgaatagcagtcaaggctgagatggaggccgtttttctggagaacctgaggcatgcagctggggttttggctcaggaggacctcgtgggactgctggagcccatcaacacccgcatcactgacccccagtacttcctggacacgccccagcaggcggcagccatcttacagaaggtaggaagacccaacctccaattacaaatggacatattccactggcagatcatggatgggaacctgacaggaaacatccgggagttcctgcccattgttgggcatgtgcaggtggcacaggtcccaggccgaggggagcccagcagccccggagagctgaatttcccctatctgtttcaactgctggaagatgaaggctacaaaggcttcgtgggctgtgagtatcagcctcgaggagacacagtagagggcttgagttggctacgttcatactgggataggcggggccacccagaggctggccagtgagggcccgcacaccacccacgtgcctccagacagcgagtgacatcccatctcctcctctgcattaaagatgacctgctga

SEQ ID NO: 287335 - DNA, 726 bp, Homo sapiens
  misc_feature (185)..(185): n is a, c, g, or t
atccaaccgtcaaattaagtgttacccccaatattcatgacaagttaatattgccaaaatatccttccaattcggggttaacagacgtgaatttaggttgtttaagacaacccagtttatagcaaatcttattttattcagatagcagtctgatcacacatggtccaacaacactcaaataatanatcaaatataatcagatgttaaagattggggcatgcagctggggttttggctcagaggacctcgtgggactgctggagcccatcaacacccgcatcactgacccccagtacttcctggacacgccccagcaggcggcagccatcttacagaaggtaggaagacccaacctccaattacaaatggacatattccactggcagatcatggatgggaacctgacaggaaacatccgggagttcctgcccattgttgggcatgtgcaggtggcacaggtcccaggccgaggggagcccagcagccccggagagctgaatttcccctatctgtttcaactgctggaagatgaaggctacaaaggcttcgtgggctgtgagtatcagcctcgaggagacacagtagagggcttgagttggctacgttcatactgggataggcggggccacccagaggctggccagtgagggcccgcacaccacccacgtgcctccagacagcgagtgacatcccatctcctcctctgcattaaagatgacctgctga

SEQ ID NO: 287336 - DNA, 2797 bp, Homo sapiens
tttttttggcggtataaaagtgcttctttatttggtcatacagctttcaaatgttgcttaacgaacagatagcatttttataatcagaggaaagactcagtattaaagtgcgcgtcccatcattgcaaccgggccctcgggcagccagctctctcttgcttcgcgtccggctctcaggccctggagctcggcctccctaccttctccaggcgcgggtcctgctccttttccggccgccctcgctccgccccttcgcctctccccgtgatccctctctcgctaaccgtaggcgcttttcgtgaaggcccgggtttttacagcacttcgcttttctaaccacgaacagtgctcgttcgttcgcagggccagcaaggagagccccgcccccgcccgccgcccgccgcccgccgcccgccgcctttggatcccgcggactccgcccggcccggcctccccaggcatggcgccgctgcgcttctccgccaatctgtcctggctattccccgagctccccggcctccccgcgcgggtgcgggccgcgggcagctcgggcttcgaggccgtcgaggtggcctggccgtacgcggagacgcctgaggcgctggcgcgcgccgcgcgagaagcggggctgcggcttgtactgatcaacacgcccccgggagaccaagagaagggggaaatggggctgggggccgtccccgggagacaggcggccttccgagagggactggagcaggccgtgcggtatgccaaagccctgggctgtcccaggtaccccgctccaccccacccccacccctgtgacccatgaccctgatgcaggttcagggagtcgaggacgccagatctgagacgctcagaagtctgagcccactggtttatctctgcctctgcggtcctggtcctttgtaaattgccttttgtattttatctgtcttatgccactctgtttgccactctttcatgctcaccccatgctgggatcccatgctgggagctcagtctgcctaggcagataggagagtaaatatatacagtgatgcatttgaggacaggcctattccaggaagctgtgggagcagggtaggcacctaaccctgtctggatcagagaaagctgcttacaggtagtgatgcttggactgtcttcaaggagtgggcattgcttgatgggcaggaagttgagtgttccttgcaagggtgctgtggcaagaggaggcctggtgtatttggcagcgttcctgaggctggacatgtatgtagcctgttgggatggggaggcctggaatgtctgcttggagctggatgtggctaagatcaggggatgatgggaggaggtggacggctcaaagtggggctgattcaaatgtcaaatcctgcagaggccaaacaggctcagaaggaactggcaagaggggatcactactggtcaatggtgggggcagaaaacagatgggaaaaggctaagtagatgcgaggagaggaagtagagacagcagcatggaatacctgagaagggcaagcaaaggtcaggacaatttttaaaggtgagaatttagcaggttacaggttgcggagaaggaccgagggaaggaaaggttttggaaagtactggaggcaggaggcggtgggtggacactgagatgtctgggaaagggcttgcccctcagccatcactgaagtgtctctgaaagtgctgggatacctgggcatcgtgacccaggtgccatggactggagacctggggagacggacgagggctggcacagtcagggaatcctggaagaggtgcagagagagccaagggaggcaaggcctccagtccatcttccccacaggatccacctgatggctggccgagtaccccagggagctgatcgaatagcagtcaaggctgagatggaggccgtttttctggagaacctgaggcatgcagctggggttttggctcaggtgagaaaggtggaaacacacacgtacttacatgtctctgtgggtgtgcggagaagggggtgcacagtggggacagcacgtgaggctgccagcctaggtcagaggaacaggtgagggccttgaccagtgactgactgatgggggacaaacttgggaaggagctctattcacagcacccgacatgctgctaggaggacctcgtgggactgctggagcccatcaacacccgcatcactgacccccagtacttcctggacacgccccagcagggtacgaccccagccctgtctctccttctgtcccttttgattcctgtgctcttgaggctcacggtcccctccctggcttctcttacagcggcagccatcttacagaaggtaggaagacccaacctccaattacaaatggtaagtggaagggggtacttcgcagatcggaaggaggcggggcctgcggggtctcggagcggcagctatccttacagaaggacatattccactggcagatcatggatgggaacctgacaggaaacatccgggagttcctgcccattgttgggcatgtgcaggtggcacaggtcccaggccgaggggagcccagcagccccggagagctgaatttcccctatctgtttcaactgctggaagatgaaggctacaaaggcttcgtgggctgtgagtatcagcctcgaggagacacagtagagggcttgagttggctacgttcatactgggataggcggggccacccagaggctggccagtgagggcccgcacaccacccacgtgcctccagacagcgagtgacatcccatctcctcctctgcattaaagatgacctgctga

SEQ ID NO: 287337 - DNA, 2779 bp, Homo sapiens
tttttttggcggtataaaagtgcttctttatttggtcatacagctttcaaatgttgcttaacgaacagatagcatttttataatcagaggaaagactcagtattaaagtgcgcgtcccatcattgcaaccgggccctcgggcagccagctctctcttgcttcgcgtccggctctcaggccctggagctcggcctccctaccttctccaggcgcgggtcctgctccttttccggccgccctcgctccgccccttcgcctctccccgtgatccctctctcgctaaccgtaggcgcttttcgtgaaggcccgggtttttacagcacttcgcttttctaaccacgaacagtgctcgttcgttcgcagggccagcaaggagagccccgcccccgcccgccgcccgccgcccgccgcccgccgcctttggatcccgcggactccgcccggcccggcctccccaggcatggcgccgctgcgcttctccgccaatctgtcctggctattccccgagctccccggcctccccgcgcgggtgcgggccgcgggcagctcgggcttcgaggccgtcgaggtggcctggccgtacgcggagacgcctgaggcgctggcgcgcgccgcgcgagaagcggggctgcggcttgtactgatcaacacgcccccgggagaccaagagaagggggaaatggggctgggggccgtccccgggagacaggcggccttccgagagggactggagcaggccgtgcggtatgccaaagccctgggctgtcccaggtaccccgctccaccccacccccacccctgtgacccatgaccctgatgcaggttcagggagtcgaggacgccagatctgagacgctcagaagtctgagcccactggtttatctctgcctctgcggtcctggtcctttgtaaattgccttttgtattttatctgtcttatgccactctgtttgccactctttcatgctcaccccatgctgggatcccatgctgggagctcagtctgcctaggcagataggagagtaaatatatacagtgatgcatttgaggacaggcctattccaggaagctgtgggagcagggtaggcacctaaccctgtctggatcagagaaagctgcttacaggtagtgatgcttggactgtcttcaaggagtgggcattgcttgatgggcaggaagttgagtgttccttgcaagggtgctgtggcaagaggaggcctggtgtatttggcagcgttcctgaggctggacatgtatgtagcctgttgggatggggaggcctggaatgtctgcttggagctggatgtggctaagatcaggggatgatgggaggaggtggacggctcaaagtggggctgattcaaatgtcaaatcctgcagaggccaaacaggctcagaaggaactggcaagaggggatcactactggtcaatggtgggggcagaaaacagatgggaaaaggctaagtagatgcgaggagaggaagtagagacagcagcatggaatacctgagaagggcaagcaaaggtcaggacaatttttaaaggtgagaatttagcaggttacaggttgcggagaaggaccgagggaaggaaaggttttggaaagtactggaggcaggaggcggtgggtggacactgagatgtctgggaaagggcttgcccctcagccatcactgaagtgtctctgaaagtgctgggatacctgggcatcgtgacccaggtgccatggactggagacctggggagacggacgagggctggcacagtcagggaatcctggaagaggtgcagagagagccaagggaggcaaggcctccagtccatcttccccacaggatccacctgatggctggccgagtaccccagggagctgatcgaatagcagtcaaggctgagatggaggccgtttttctggagaacctgaggcatgcagctggggttttggctcaggtgagaaaggtggaaacacacacgtacttacatgtctctgtgggtgtgcggagaagggggtgcacagtggggacagcacgtgaggctgccagcctaggtcagaggaacaggtgagggccttgaccagtgactgactgatgggggacaaacttgggaaggagctctattcacagcacccgacatgctgctaggaggacctcgtgggactgctggagcccatcaacacccgcatcactgacccccagtacttcctggacacgccccagcagggtacgaccccagccctgtctctccttctgtcccttttgattcctgtgctcttgaggctcacggtcccctccctggcttctcttacagcggcagccatcttacagaaggtaggaagacccaacctccaattacaaatggtaagtggaagggggtacttcgcagatcggaaggaggcggggcctgcggggtctcggagcggcagctatccttacagaaggacatattccactggcagatcatggatgggaacctgacaggaaacatccgggagttcctgcccattgttgggcatgtgcaggtggcacaggtcccaggccgaggggagcccagcagccccggagagctgaatttcccctatctgtttcaactgctggaagatgaaggctacaaaggcttcgtgggctgagacacagtagagggcttgagttggctacgttcatactgggataggcggggccacccagaggctggccagtgagggcccgcacaccacccacgtgcctccagacagcgagtgacatcccatctcctcctctgcattaaagatgacctgctga

SEQ ID NO: 287338 - DNA, 2939 bp, Homo sapiens
tttttttggcggtataaaagtgcttctttatttggtcatacagctttcaaatgttgcttaacgaacagatagcatttttataatcagaggaaagactcagtattaaagtgcgcgtcccatcattgcaaccgggccctcgggcagccagctctctcttgcttcgcgtccggctctcaggccctggagctcggcctccctaccttctccaggcgcgggtcctgctccttttccggccgccctcgctccgccccttcgcctctccccgtgatccctctctcgctaaccgtaggcgcttttcgtgaaggcccgggtttttacagcacttcgcttttctaaccacgaacagtgctcgttcgttcgcagggccagcaaggagagccccgcccccgcccgccgcccgccgcccgccgcccgccgcctttggatcccgcggactccgcccggcccggcctccccaggcatggcgccgctgcgcttctccgccaatctgtcctggctattccccgagctccccggcctccccgcgcgggtgcgggccgcgggcagctcgggcttcgaggccgtcgaggtggcctggccgtacgcggagacgcctgaggcgctggcgcgcgccgcgcgagaagcggggctgcggcttgtactgatcaacacgcccccgggagaccaagagaagggggaaatggggctgggggccgtccccgggagacaggcggccttccgagagggactggagcaggccgtgcggtatgccaaagccctgggctgtcccaggtaccccgctccaccccacccccacccctgtgacccatgaccctgatgcaggttcagggagtcgaggacgccagatctgagacgctcagaagtctgagcccactggtttatctctgcctctgcggtcctggtcctttgtaaattgccttttgtattttatctgtcttatgccactctgtttgccactctttcatgctcaccccatgctgggatcccatgctgggagctcagtctgcctaggcagataggagagtaaatatatacagtgatgcatttgaggacaggcctattccaggaagctgtgggagcagggtaggcacctaaccctgtctggatcagagaaagctgcttacaggtagtgatgcttggactgtcttcaaggagtgggcattgcttgatgggcaggaagttgagtgttccttgcaagggtgctgtggcaagaggaggcctggtgtatttggcagcgttcctgaggctggacatgtatgtagcctgttgggatggggaggcctggaatgtctgcttggagctggatgtggctaagatcaggggatgatgggaggaggtggacggctcaaagtggggctgattcaaatgtcaaatcctgcagaggccaaacaggctcagaaggaactggcaagaggggatcactactggtcaatggtgggggcagaaaacagatgggaaaaggctaagtagatgcgaggagaggaagtagagacagcagcatggaatacctgagaagggcaagcaaaggtcaggacaatttttaaaggtgagaatttagcaggttacaggttgcggagaaggaccgagggaaggaaaggttttggaaagtactggaggcaggaggcggtgggtggacactgagatgtctgggaaagggcttgcccctcagccatcactgaagtgtctctgaaagtgctgggatacctgggcatcgtgacccaggtgccatggactggagacctggggagacggacgagggctggcacagtcagggaatcctggaagaggtgcagagagagccaagggaggcaaggcctccagtccatcttccccacaggatccacctgatggctggccgagtaccccagggagctgatcgaatagcagtcaaggctgagatggaggccgtttttctggagaacctgaggcatgcagctggggttttggctcaggtgagaaaggtggaaacacacacgtacttacatgtctctgtgggtgtgcggagaagggggtgcacagtggggacagcacgtgaggctgccagcctaggtcagaggaacaggtgagggccttgaccagtgactgactgatgggggacaaacttgggaaggagctctattcacagcacccgacatgctgctaggaggacctcgtgggactgctggagcccatcaacacccgcatcactgacccccagtacttcctggacacgccccagcagggtacgaccccagccctgtctctccttctgtcccttttgattcctgtgctcttgaggctcacggtcccctccctggcttctcttacagcggcagccatcttacagaaggtaggaagacccaacctccaattacaaatggtaagtggaagggggtacttcgcagatcggaaggaggcggggcctgcggggtctcggagcggcagctatccttacagaaggacatattccactggcagatcatggatgggaacctgacaggaaacatccgggagttcctgcccattgttgggcatgtgcaggtggcacaggtcccaggccgaggggagcccagcagccccggagagctgaatttcccctatctgtttcaactgctggaagatgaaggctacaaaggcttcgtgggctgagacacagtagagggcttgagttggctacgttcatactgggataggcggggccacccagaggctggccagtgagggcccgcacaccacccacgtgcctccagacagcgagtgacatcccatctcctcctctgcattaaagatgacctgctgaacattgtcatatgtctctgtaatggggtggtgggacacatagtgtctaacacttcagtttctctgctgcttccctcccattgagaagccagtgccagggttgctgtgaagatgggagagcttctgaacccacctcattaaaggatgagaaacccagggtc

SEQ ID NO: 287339 - DNA, 2612 bp, Homo sapiens
tttttttggcggtataaaagtgcttctttatttggtcatacagctttcaaatgttgcttaacgaacagatagcatttttataatcagaggaaagactcagtattaaagtgcgcgtcccatcattgcaaccgggccctcgggcagccagctctctcttgcttcgcgtccggctctcaggccctggagctcggcctccctaccttctccaggcgcgggtcctgctccttttccggccgccctcgctccgccccttcgcctctccccgtgatccctctctcgctaaccgtaggcgcttttcgtgaaggcccgggtttttacagcacttcgcttttctaaccacgaacagtgctcgttcgttcgcagggccagcaaggagagccccgcccccgcccgccgcccgccgcccgccgcccgccgcctttggatcccgcggactccgcccggcccggcctccccaggcatggcgccgctgcgcttctccgccaatctgtcctggctattccccgagctccccggcctccccgcgcgggtgcgggccgcgggcagctcgggcttcgaggccgtcgaggtggcctggccgtacgcggagacgcctgaggcgctggcgcgcgccgcgcgagaagcggggctgcggcttgtactgatcaacacgcccccgggagaccaagagaagggggaaatggggctgggggccgtccccgggagacaggcggccttccgagagggactggagcaggccgtgcggtatgccaaagccctgggctgtcccaggtaccccgctccaccccacccccacccctgtgacccatgaccctgatgcaggttcagggagtcgaggacgccagatctgagacgctcagaagtctgagcccactggtttatctctgcctctgcggtcctggtcctttgtaaattgccttttgtattttatctgtcttatgccactctgtttgccactctttcatgctcaccccatgctgggatcccatgctgggagctcagtctgcctaggcagataggagagtaaatatatacagtgatgcatttgaggacaggcctattccaggaagctgtgggagcagggtaggcacctaaccctgtctggatcagagaaagctgcttacaggtagtgatgcttggactgtcttcaaggagtgggcattgcttgatgggcaggaagttgagtgttccttgcaagggtgctgtggcaagaggaggcctggtgtatttggcagcgttcctgaggctggacatgtatgtagcctgttgggatggggaggcctggaatgtctgcttggagctggatgtggctaagatcaggggatgatgggaggaggtggacggctcaaagtggggctgattcaaatgtcaaatcctgcagaggccaaacaggctcagaaggaactggcaagaggggatcactactggtcaatggtgggggcagaaaacagatgggaaaaggctaagtagatgcgaggagaggaagtagagacagcagcatggaatacctgagaagggcaagcaaaggtcaggacaatttttaaaggtgagaatttagcaggttacaggttgcggagaaggaccgagggaaggaaaggttttggaaagtactggaggcaggaggcggtgggtggacactgagatgtctgggaaagggcttgcccctcagccatcactgaagtgtctctgaaagtgctgggatacctgggcatcgtgacccaggtgccatggactggagacctggggagacggacgagggctggcacagtcagggaatcctggaagaggtgcagagagagccaagggaggcaaggcctccagtccatcttccccacaggatccacctgatggctggccgagtaccccagggagctgatcgaatagcagtcaaggctgagatggaggccgtttttctggagaacctgaggcatgcagctggggttttggctcaggtgagaaaggtggaaacacacacgtacttacatgtctctgtgggtgtgcggagaagggggtgcacagtggggacagcacgtgaggctgccagcctaggtcagaggaacaggtgagggccttgaccagtgactgactgatgggggacaaacttgggaaggagctctattcacagcacccgacatgctgctaggaggacctcgtgggactgctggagcccatcaacacccgcatcactgacccccagtacttcctggacacgccccagcaggcggcagccatcttacagaaggtaggaagacccaacctccaattacaaatggacatattccactggcagatcatggatgggaacctgacaggaaacatccgggagttcctgcccattgttgggcatgtgcaggtggcacaggtcccaggccgaggggagcccagcagccccggagagctgaatttcccctatctgtttcaactgctggaagatgaaggctacaaaggcttcgtgggctgagacacagtagagggcttgagttggctacgttcatactgggataggcggggccacccagaggctggccagtgagggcccgcacaccacccacgtgcctccagacagcgagtgacatcccatctcctcctctgcattaaagatgacctgctga

SEQ ID NO: 287340 - DNA, 2601 bp, Homo sapiens
tttttttggcggtataaaagtgcttctttatttggtcatacagctttcaaatgttgcttaacgaacagatagcatttttataatcagaggaaagactcagtattaaagtgcgcgtcccatcattgcaaccgggccctcgggcagccagctctctcttgcttcgcgtccggctctcaggccctggagctcggcctccctaccttctccaggcgcgggtcctgctccttttccggccgccctcgctccgccccttcgcctctccccgtgatccctctctcgctaaccgtaggcgcttttcgtgaaggcccgggtttttacagcacttcgcttttctaaccacgaacagtgctcgttcgttcgcagggccagcaaggagagccccgcccccgcccgccgcccgccgcccgccgcccgccgcctttggatcccgcggactccgcccggcccggcctccccaggcatggcgccgctgcgcttctccgccaatctgtcctggctattccccgagctccccggcctccccgcgcgggtgcgggccgcgggcagctcgggcttcgaggccgtcgaggtggcctggccgtacgcggagacgcctgaggcgctggcgcgcgccgcgcgagaagcggggctgcggcttgtactgatcaacacgcccccgggagaccaagagaagggggaaatggggctgggggccgtccccgggagacaggcggccttccgagagggactggagcaggccgtgcggtatgccaaagccctgggctgtcccaggtaccccgctccaccccacccccacccctgtgacccatgaccctgatgcaggttcagggagtcgaggacgccagatctgagacgctcagaagtctgagcccactggtttatctctgcctctgcggtcctggtcctttgtaaattgccttttgtattttatctgtcttatgccactctgtttgccactctttcatgctcaccccatgctgggatcccatgctgggagctcagtctgcctaggcagataggagagtaaatatatacagtgatgcatttgaggacaggcctattccaggaagctgtgggagcagggtaggcacctaaccctgtctggatcagagaaagctgcttacaggtagtgatgcttggactgtcttcaaggagtgggcattgcttgatgggcaggaagttgagtgttccttgcaagggtgctgtggcaagaggaggcctggtgtatttggcagcgttcctgaggctggacatgtatgtagcctgttgggatggggaggcctggaatgtctgcttggagctggatgtggctaagatcaggggatgatgggaggaggtggacggctcaaagtggggctgattcaaatgtcaaatcctgcagaggccaaacaggctcagaaggaactggcaagaggggatcactactggtcaatggtgggggcagaaaacagatgggaaaaggctaagtagatgcgaggagaggaagtagagacagcagcatggaatacctgagaagggcaagcaaaggtcaggacaatttttaaaggtgagaatttagcaggttacaggttgcggagaaggaccgagggaaggaaaggttttggaaagtactggaggcaggaggcggtgggtggacactgagatgtctgggaaagggcttgcccctcagccatcactgaagtgtctctgaaagtgctgggatacctgggcatcgtgacccaggtgccatggactggagacctggggagacggacgagggctggcacagtcagggaatcctggaagaggtgcagagagagccaagggaggcaaggcctccagtccatcttccccacaggatccacctgatggctggccgagtaccccagggagctgatcgaatagcagtcaaggctgagatggaggccgtttttctggagaacctgaggcatgcagctggggttttggctcaggtgagaaaggtggaaacacacacgtacttacatgtctctgtgggtgtgcggagaagggggtgcacagtggggacagcacgtgaggctgccagcctaggtcagaggaacaggtgagggccttgaccagtgactgactgatgggggacaaacttgggaaggagctctattcacagcacccgacatgctgctaggaggacctcgtgggactgctggagcccatcaacacccgcatcactgacccccagtacttcctggacacgccccagcaggcggcagctatccttacagaaggacatattccactggcagatcatggatgggaacctgacaggaaacatccgggagttcctgcccattgttgggcatgtgcaggtggcacaggtcccaggccgaggggagcccagcagccccggagagctgaatttcccctatctgtttcaactgctggaagatgaaggctacaaaggcttcgtgggctgtgagtatcagcctcgaggagacacagtagagggcttgagttggctacgttcatactgggataggcggggccacccagaggctggccagtgagggcccgcacaccacccacgtgcctccagacagcgagtgacatcccatctcctcctctgcattaaagatgacctgctga

SEQ ID NO: 287341 - DNA, 3025 bp, Homo sapiens
tacaggttttaaaaatgtgtttttattaaatataagacagataaaaaatgatatttataaaatatatgttagctctaaagaagagtagtaaaattaacatacatgaatgtgctatccaacgtaagagaaggctccaatgctaccctcttctgtcctcctctagaggtggtcaccattatgctgaattttgtgataattattcacttgttcttcattgttttatcagagatgtccatattcctacacaagatactgttggttttccctgcctttgactttatatcaatggaatcacactgtaggtatttctctgtgatttgcttgttcctctagagattatgtttctgagatttatccacttgatgctttcatactgatgtttttcagttccaatcaaacttcactaagctcttcatatattgtcctaccttctccaggcgcgggtcctgctccttttccggccgccctcgctccgccccttcgcctctccccgtgatccctctctcgctaaccgtaggcgcttttcgtgaaggcccgggtttttacagcacttcgcttttctaaccacgaacagtgctcgttcgttcgcagggccagcaaggagagccccgcccccgcccgccgcccgccgcccgccgcccgccgcctttggatcccgcggactccgcccggcccggcctccccaggcatggcgccgctgcgcttctccgccaatctgtcctggctattccccgagctccccggcctccccgcgcgggtgcgggccgcgggcagctcgggcttcgaggccgtcgaggtggcctggccgtacgcggagacgcctgaggcgctggcgcgcgccgcgcgagaagcggggctgcggcttgtactgatcaacacgcccccgggagaccaagagaagggggaaatggggctgggggccgtccccgggagacaggcggccttccgagagggactggagcaggccgtgcggtatgccaaagccctgggctgtcccaggtaccccgctccaccccacccccacccctgtgacccatgaccctgatgcaggttcagggagtcgaggacgccagatctgagacgctcagaagtctgagcccactggtttatctctgcctctgcggtcctggtcctttgtaaattgccttttgtattttatctgtcttatgccactctgtttgccactctttcatgctcaccccatgctgggatcccatgctgggagctcagtctgcctaggcagataggagagtaaatatatacagtgatgcatttgaggacaggcctattccaggaagctgtgggagcagggtaggcacctaaccctgtctggatcagagaaagctgcttacaggtagtgatgcttggactgtcttcaaggagtgggcattgcttgatgggcaggaagttgagtgttccttgcaagggtgctgtggcaagaggaggcctggtgtatttggcagcgttcctgaggctggacatgtatgtagcctgttgggatggggaggcctggaatgtctgcttggagctggatgtggctaagatcaggggatgatgggaggaggtggacggctcaaagtggggctgattcaaatgtcaaatcctgcagaggccaaacaggctcagaaggaactggcaagaggggatcactactggtcaatggtgggggcagaaaacagatgggaaaaggctaagtagatgcgaggagaggaagtagagacagcagcatggaatacctgagaagggcaagcaaaggtcaggacaatttttaaaggtgagaatttagcaggttacaggttgcggagaaggaccgagggaaggaaaggttttggaaagtactggaggcaggaggcggtgggtggacactgagatgtctgggaaagggcttgcccctcagccatcactgaagtgtctctgaaagtgctgggatacctgggcatcgtgacccaggtgccatggactggagacctggggagacggacgagggctggcacagtcagggaatcctggaagaggtgcagagagagccaagggaggcaaggcctccagtccatcttccccacaggatccacctgatggctggccgagtaccccagggagctgatcgaatagcagtcaaggctgagatggaggccgtttttctggagaacctgaggcatgcagctggggttttggctcaggtgagaaaggtggaaacacacacgtacttacatgtctctgtgggtgtgcggagaagggggtgcacagtggggacagcacgtgaggctgccagcctaggtcagaggaacaggtgagggccttgaccagtgactgactgatgggggacaaacttgggaaggagctctattcacagcacccgacatgctgctaggaggacctcgtgggactgctggagcccatcaacacccgcatcactgacccccagtacttcctggacacgccccagcagggtacgaccccagccctgtctctccttctgtcccttttgattcctgtgctcttgaggctcacggtcccctccctggcttctcttacagcggcagccatcttacagaaggtaggaagacccaacctccaattacaaatggtaagtggaagggggtacttcgcagatcggaaggaggcggggcctgcggggtctcggagcggcagctatccttacagaaggacatattccactggcagatcatggatgggaacctgacaggaaacatccgggagttcctgcccattgttgggcatgtgcaggtggcacaggtcccaggccgaggggagcccagcagccccggagagctgaatttcccctatctgtttcaactgctggaagatgaaggctacaaaggcttcgtgggctgtgagtatcagcctcgaggagacacagtagagggcttgagttggctacgttcatactgggataggcggggccacccagaggctggccagtgagggcccgcacaccacccacgtgcctccagacagcgagtgacatcccatctcctcctctgcattaaagatgacctgctga

SEQ ID NO: 287342 - DNA, 2421 bp, Homo sapiens
tttttttggcggtataaaagtgcttctttatttggtcatacagctttcaaatgttgcttaacgaacagatagcatttttataatcagaggaaagactcagtattaaagtgcgcgtcccatcattgcaaccgggccctcgggcagccagctctctcttgcttcgcgtccggctctcaggccctggagctcggcctccctaccttctccaggcgcgggtcctgctccttttccggccgccctcgctccgccccttcgcctctccccgtgatccctctctcgctaaccgtaggcgcttttcgtgaaggcccgggtttttacagcacttcgcttttctaaccacgaacagtgctcgttcgttcgcagggccagcaaggagagccccgcccccgcccgccgcccgccgcccgccgcccgccgcctttggatcccgcggactccgcccggcccggcctccccaggcatggcgccgctgcgcttctccgccaatctgtcctggctattccccgagctccccggcctccccgcgcgggtgcgggccgcgggcagctcgggcttcgaggccgtcgaggtggcctggccgtacgcggagacgcctgaggcgctggcgcgcgccgcgcgagaagcggggctgcggcttgtactgatcaacacgcccccgggagaccaagagaagggggaaatggggctgggggccgtccccgggagacaggcggccttccgagagggactggagcaggccgtgcggtatgccaaagccctgggctgtcccaggtaccccgctccaccccacccccacccctgtgacccatgaccctgatgcaggttcagggagtcgaggacgccagatctgagacgctcagaagtctgagcccactggtttatctctgcctctgcggtcctggtcctttgtaaattgccttttgtattttatctgtcttatgccactctgtttgccactctttcatgctcaccccatgctgggatcccatgctgggagctcagtctgcctaggcagataggagagtaaatatatacagtgatgcatttgaggacaggcctattccaggaagctgtgggagcagggtaggcacctaaccctgtctggatcagagaaagctgcttacaggtagtgatgcttggactgtcttcaaggagtgggcattgcttgatgggcaggaagttgagtgttccttgcaagggtgctgtggcaagaggaggcctggtgtatttggcagcgttcctgaggctggacatgtatgtagcctgttgggatggggaggcctggaatgtctgcttggagctggatgtggctaagatcaggggatgatgggaggaggtggacggctcaaagtggggctgattcaaatgtcaaatcctgcagaggccaaacaggctcagaaggaactggcaagaggggatcactactggtcaatggtgggggcagaaaacagatgggaaaaggctaagtagatgcgaggagaggaagtagagacagcagcatggaatacctgagaagggcaagcaaaggtcaggacaatttttaaaggtgagaatttagcaggttacaggttgcggagaaggaccgagggaaggaaaggttttggaaagtactggaggcaggaggcggtgggtggacactgagatgtctgggaaagggcttgcccctcagccatcactgaagtgtctctgaaagtgctgggatacctgggcatcgtgacccaggtgccatggactggagacctggggagacggacgagggctggcacagtcagggaatcctggaagaggtgcagagagagccaagggaggcaaggcctccagtccatcttccccacaggatccacctgatggctggccgagtaccccagggagctgatcgaatagcagtcaaggctgagatggaggccgtttttctggagaacctgaggcatgcagctggggttttggctcaggaggacctcgtgggactgctggagcccatcaacacccgcatcactgacccccagtacttcctggacacgccccagcaggcggcagccatcttacagaaggtaggaagacccaacctccaattacaaatggacatattccactggcagatcatggatgggaacctgacaggaaacatccgggagttcctgcccattgttgggcatgtgcaggtggcacaggtcccaggccgaggggagcccagcagccccggagagctgaatttcccctatctgtttcaactgctggaagatgaaggctacaaaggcttcgtgggctgagacacagtagagggcttgagttggctacgttcatactgggataggcggggccacccagaggctggccagtgagggcccgcacaccacccacgtgcctccagacagcgagtgacatcccatctcctcctctgcattaaagatgacctgctga

SEQ ID NO: 287343 - DNA, 2391 bp, Homo sapiens
tttttttggcggtataaaagtgcttctttatttggtcatacagctttcaaatgttgcttaacgaacagatagcatttttataatcagaggaaagactcagtattaaagtgcgcgtcccatcattgcaaccgggccctcgggcagccagctctctcttgcttcgcgtccggctctcaggccctggagctcggcctccctaccttctccaggcgcgggtcctgctccttttccggccgccctcgctccgccccttgagaccaagagaagggggaaatggggctgggggccgtccccgggagacaggcggccttccgagagggactggagcaggccgtgcggtatgccaaagccctgggctgtcccaggtaccccgctccaccccacccccacccctgtgacccatgaccctgatgcaggttcagggagtcgaggacgccagatctgagacgctcagaagtctgagcccactggtttatctctgcctctgcggtcctggtcctttgtaaattgccttttgtattttatctgtcttatgccactctgtttgccactctttcatgctcaccccatgctgggatcccatgctgggagctcagtctgcctaggcagataggagagtaaatatatacagtgatgcatttgaggacaggcctattccaggaagctgtgggagcagggtaggcacctaaccctgtctggatcagagaaagctgcttacaggtagtgatgcttggactgtcttcaaggagtgggcattgcttgatgggcaggaagttgagtgttccttgcaagggtgctgtggcaagaggaggcctggtgtatttggcagcgttcctgaggctggacatgtatgtagcctgttgggatggggaggcctggaatgtctgcttggagctggatgtggctaagatcaggggatgatgggaggaggtggacggctcaaagtggggctgattcaaatgtcaaatcctgcagaggccaaacaggctcagaaggaactggcaagaggggatcactactggtcaatggtgggggcagaaaacagatgggaaaaggctaagtagatgcgaggagaggaagtagagacagcagcatggaatacctgagaagggcaagcaaaggtcaggacaatttttaaaggtgagaatttagcaggttacaggttgcggagaaggaccgagggaaggaaaggttttggaaagtactggaggcaggaggcggtgggtggacactgagatgtctgggaaagggcttgcccctcagccatcactgaagtgtctctgaaagtgctgggatacctgggcatcgtgacccaggtgccatggactggagacctggggagacggacgagggctggcacagtcagggaatcctggaagaggtgcagagagagccaagggaggcaaggcctccagtccatcttccccacaggatccacctgatggctggccgagtaccccagggagctgatcgaatagcagtcaaggctgagatggaggccgtttttctggagaacctgaggcatgcagctggggttttggctcaggtgagaaaggtggaaacacacacgtacttacatgtctctgtgggtgtgcggagaagggggtgcacagtggggacagcacgtgaggctgccagcctaggtcagaggaacaggtgagggccttgaccagtgactgactgatgggggacaaacttgggaaggagctctattcacagcacccgacatgctgctaggaggacctcgtgggactgctggagcccatcaacacccgcatcactgacccccagtacttcctggacacgccccagcagggtacgaccccagccctgtctctccttctgtcccttttgattcctgtgctcttgaggctcacggtcccctccctggcttctcttacagcggcagccatcttacagaaggtaggaagacccaacctccaattacaaatggtaagtggaagggggtacttcgcagatcggaaggaggcggggcctgcggggtctcggagcggcagctatccttacagaaggacatattccactggcagatcatggatgggaacctgacaggaaacatccgggagttcctgcccattgttgggcatgtgcaggtggcacaggtcccaggccgaggggagcccagcagccccggagagctgaatttcccctatctgtttcaactgctggaagatgaaggctacaaaggcttcgtgggctgtgagtatcagcctcgaggagacacagtagagggcttgagttggctacgttcatactgggataggcggggccacccagaggctggccagtgagggcccgcacaccacccacgtgcctccagacagcgagtgacatcccatctcctcctctgcattaaagatgacctgctga

SEQ ID NO: 287344 - DNA, 2364 bp, Homo sapiens
aatgccaggctggtccggtcggaggtgttatgatcgctgcgcttctccgccaatctgtcctggctattccccgagctccccggcctccccgcgcgggtgcgggccgcgggcagctcgggcttcgaggccgtcgaggtggcctggccgtacgcggagacgcctgaggcgctggcgcgcgccgcgcgagaagcggggctgcggcttgtactgatcaacacgcccccgggagaccaagagaagggggaaatggggctgggggccgtccccgggagacaggcggccttccgagagggactggagcaggccgtgcggtatgccaaagccctgggctgtcccaggtaccccgctccaccccacccccacccctgtgacccatgaccctgatgcaggttcagggagtcgaggacgccagatctgagacgctcagaagtctgagcccactggtttatctctgcctctgcggtcctggtcctttgtaaattgccttttgtattttatctgtcttatgccactctgtttgccactctttcatgctcaccccatgctgggatcccatgctgggagctcagtctgcctaggcagataggagagtaaatatatacagtgatgcatttgaggacaggcctattccaggaagctgtgggagcagggtaggcacctaaccctgtctggatcagagaaagctgcttacaggtagtgatgcttggactgtcttcaaggagtgggcattgcttgatgggcaggaagttgagtgttccttgcaagggtgctgtggcaagaggaggcctggtgtatttggcagcgttcctgaggctggacatgtatgtagcctgttgggatggggaggcctggaatgtctgcttggagctggatgtggctaagatcaggggatgatgggaggaggtggacggctcaaagtggggctgattcaaatgtcaaatcctgcagaggccaaacaggctcagaaggaactggcaagaggggatcactactggtcaatggtgggggcagaaaacagatgggaaaaggctaagtagatgcgaggagaggaagtagagacagcagcatggaatacctgagaagggcaagcaaaggtcaggacaatttttaaaggtgagaatttagcaggttacaggttgcggagaaggaccgagggaaggaaaggttttggaaagtactggaggcaggaggcggtgggtggacactgagatgtctgggaaagggcttgcccctcagccatcactgaagtgtctctgaaagtgctgggatacctgggcatcgtgacccaggtgccatggactggagacctggggagacggacgagggctggcacagtcagggaatcctggaagaggtgcagagagagccaagggaggcaaggcctccagtccatcttccccacaggatccacctgatggctggccgagtaccccagggagctgatcgaatagcagtcaaggctgagatggaggccgtttttctggagaacctgaggcatgcagctggggttttggctcaggtgagaaaggtggaaacacacacgtacttacatgtctctgtgggtgtgcggagaagggggtgcacagtggggacagcacgtgaggctgccagcctaggtcagaggaacaggtgagggccttgaccagtgactgactgatgggggacaaacttgggaaggagctctattcacagcacccgacatgctgctaggaggacctcgtgggactgctggagcccatcaacacccgcatcactgacccccagtacttcctggacacgccccagcagggtacgaccccagccctgtctctccttctgtcccttttgattcctgtgctcttgaggctcacggtcccctccctggcttctcttacagcggcagccatcttacagaaggtaggaagacccaacctccaattacaaatggtaagtggaagggggtacttcgcagatcggaaggaggcggggcctgcggggtctcggagcggcagctatccttacagaaggacatattccactggcagatcatggatgggaacctgacaggaaacatccgggagttcctgcccattgttgggcatgtgcaggtggcacaggtcccaggccgaggggagcccagcagccccggagagctgaatttcccctatctgtttcaactgctggaagatgaaggctacaaaggcttcgtgggctgtgagtatcagcctcgaggagacacagtagagggcttgagttggctacgttcatactgggataggcggggccacccagaggctggccagtgagggcccgcacaccacccacgtgcctccagacagcgagtgacatcccatctcctcctctgcattaaagatgacctgctga

SEQ ID NO: 287345 - DNA, 1639 bp, Homo sapiens
gcggccgcctactactactaaattcgcggccgcgtcgacgggtgctgtggcaagaggaggcctggtgtatttggcagcgttcctgaggctggacatgtatgtagcctgttgggatggggaggcctggaatgtctgcttggagctggatgtggctaagatcaggggatgatgggaggaggtggacggctcaaagtggggctgattcaaatgtcaaatcctgcagaggccaaacaggctcagaaggaactggcaagaggggatcactactggtcaatggtgggggcagaaaacagatgggaaaaggctaagtagatgcgaggagaggaagtagagacagcagcatggaatacctgagaagggcaagcaaaggtcaggacaatttttaaaggtgagaatttagcaggttacaggttgcggagaaggaccgagggaaggaaaggttttggaaagtactggaggcaggaggcggtgggtggacactgagatgtctgggaaagggcttgcccctcagccatcactgaagtgtctctgaaagtgctgggatacctgggcatcgtgacccaggtgccatggactggagacctggggagacggacgagggctggcacagtcagggaatcctggaagaggtgcagagagagccaagggaggcaaggcctccagtccatcttccccacaggatccacctgatggctggccgagtaccccagggagctgatcgaatagcagtcaaggctgagatggaggccgtttttctggagaacctgaggcatgcagctggggttttggctcaggtgagaaaggtggaaacacacacgtacttacatgtctctgtgggtgtgcggagaagggggtgcacagtggggacagcacgtgaggctgccagcctaggtcagaggaacaggtgagggccttgaccagtgactgactgatgggggacaaacttgggaaggagctctattcacagcacccgacatgctgctaggaggacctcgtgggactgctggagcccatcaacacccgcatcactgacccccagtacttcctggacacgccccagcagggtacgaccccagccctgtctctccttctgtcccttttgattcctgtgctcttgaggctcacggtcccctccctggcttctcttacagcggcagccatcttacagaaggtaggaagacccaacctccaattacaaatggtaagtggaagggggtacttcgcagatcggaaggaggcggggcctgcggggtctcggagcggcagctatccttacagaaggacatattccactggcagatcatggatgggaacctgacaggaaacatccgggagttcctgcccattgttgggcatgtgcaggtggcacaggtcccaggccgaggggagcccagcagccccggagagctgaatttcccctatctgtttcaactgctggaagatgaaggctacaaaggcttcgtgggctgtgagtatcagcctcgaggagacacagtagagggcttgagttggctacgttcatactgggataggcggggccacccagaggctggccagtgagggcccgcacaccacccacgtgcctccagacagcgagtgacatcccatctcctcctctgcattaaagatgacctgctga

SEQ ID NO: 287346 - DNA, 1325 bp, Homo sapiens
tttttttggcggtataaaagtgcttctttatttggtcatacagctttcaaatgttgcttaacgaacagatagcatttttataatcagaggaaagactcagtattaaagtgcgcgtcccatcattgcaaccgggccctcgggcagccagctctctcttgcttcgcgtccggctctcaggccctggagctcggcctccctaccttctccaggcgcgggtcctgctccttttccggccgccctcgctccgccccttcgcctctccccgtgatccctctctcgctaaccgtaggcgcttttcgtgaaggcccgggtttttacagcacttcgcttttctaaccacgaacagtgctcgttcgttcgcagggccagcaaggagagccccgcccccgcccgccgcccgccgcccgccgcccgccgcctttggatcccgcggactccgcccggcccggcctccccaggcatggcgccgctgcgcttctccgccaatctgtcctggctattccccgagctccccggcctccccgcgcgggtgcgggccgcgggcagctcgggcttcgaggccgtcgaggtggcctggccgtacgcggagacgcctgaggcgctggcgcgcgccgcgcgagaagcggggctgcggcttgtactgatcaacacgcccccgggagaccaagagaagggggaaatggggctgggggccgtccccgggagacaggcggccttccgagagggactggagcaggccgtgcggtatgccaaagccctgggctgtcccaggatccacctgatggctggccgagtaccccagggagctgatcgaatagcagtcaaggctgagatggaggccgtttttctggagaacctgaggcatgcagctggggttttggctcaggaggacctcgtgggactgctggagcccatcaacacccgcatcactgacccccagtacttcctggacacgccccagcaggcggcagccatcttacagaaggacatattccactggcagatcatggatgggaacctgacaggaaacatccgggagttcctgcccattgttgggcatgtgcaggtggcacaggtcccaggccgaggggagcccagcagccccggagagctgaatttcccctatctgtttcaactgctggaagatgaaggctacaaaggcttcgtgggctgagacacagtagagggcttgagttggctacgttcatactgggataggcggggccacccagaggctggccagtgagggcccgcacaccacccacgtgcctccagacagcgagtgacatcccatctcctcctctgcattaaagatgacctgctga

SEQ ID NO: 287347 - DNA, 864 bp, Homo sapiens
tttttttggcggtataaaagtgcttctttatttggtcatacagctttcaaatgttgcttaacgaacagatagcatttttataatcagaggaaagactcagtattaaagtgcgcgtcccatcattgcaaccgggccctcgggcagccagctctctcttgcttcgcgtccggctctcaggccctggagctcggcctccctaccttctccaggcgcgggtcctgctccttttccggccgccctcgctccgccccttcgcctctccccgtgatccctctctcgctaaccgtaggcgcttttcgtgaaggcccgggtttttacagcacttcgcttttctaaccacgaacagtgctcgttcgttcgcagggccagcaaggagagccccgcccccgcccgccgcccgccgcccgccgcccgccgcctttggatcccgcggactccgcccggcccggcctccccaggcatggcgccgctgcgcttctccgccaatctgtcctggctattccccgagctccccggcctccccgcgcgggtgcgggccgcgggcagctcgggcttcgaggccgtcgaggtggcctggccgtacgcggagacgcctgaggcgctggcgcgcgccgcgcgagaagcggggctgcggcttgtactgatcaacacgcccccgggagaccaagagaagggggaaatggggctgggggccgtccccgggagacaggcggccttccgagagggactggagcaggccgtgttcatactgggataggcggggccacccagaggctggccagtgagggcccgcacaccacccacgtgcctccagacagcgagtgacatcccatctcctcctctgcattaaagatgacctgctga

SEQ ID NO: 287348 - DNA, 814 bp, Homo sapiens
atctgaggaccccccgagtagtcccatcattgcaaccgggccctcgggcagccagctctctcttgcttcgcgtccggctctcaggccctggagctcggcctccaacctgaggcatgcagctggggttttggctcaggtgagaaaggtggaaacacacacgtacttacatgtctctgtgggtgtgcggagaagggggtgcacagtggggacagcacgtgaggctgccagcctaggtcagaggaacaggtgagggccttgaccagtgactgactgatgggggacaaacttgggaaggagctctattcacagcacccgacatgctgctaggaggacctcgtgggactgctggagcccatcaacacccgcatcactgacccccagtacttcctggacacgccccagcaggcggcagccatcttacagaaggtaggaagacccaacctccaattacaaatggacatattccactggcagatcatggatgggaacctgacaggaaacatccgggagttcctgcccattgttgggcatgtgcaggtggcacaggtcccaggccgaggggagcccagcagccccggagagctgaatttcccctatctgtttcaactgctggaagatgaaggctacaaaggcttcgtgggctgtgagtatcagcctcgaggagacacagtagagggcttgagttggctacgttcatactgggataggcggggccacccagaggctggccagtgagggcccgcacaccacccacgtgcctccagacagcgagtgacatcccatctcctcctctgcattaaagatgacctgctga

SEQ ID NO: 287349 - DNA, 949 bp, Homo sapiens
tttttttggcggtataaaagtgcttctttatttggtcatacagctttcaaatgttgcttaacgaacagatagcatttttataatcagaggaaagactcagtattaaagtgcgcgtcccatcattgcaaccgggccctcgggcagccagctctctcttgcttcgcgtccggctctcaggccctggagctcggcctccctaccttctccaggcgcgggtcctgctccttttccggccgccctcgctccgccccttgagaccaagagaagggggaaatggggctgggggccgtccccgggagacaggcggccttccgagagggactggagcaggccgtgcggtatgccaaagccctgggctgtcccaggatccacctgatggctggccgagtaccccagggagctgatcgaatagcagtcaaggctgagatggaggccgtttttctggagaacctgaggcatgcagctggggttttggctcaggaggacctcgtgggactgctggagcccatcaacacccgcatcactgacccccagtacttcctggacacgccccagcaggcggcagccatcttacagaaggtaggaagacccaacctccaattacaaatggacatattccactggcagatcatggatgggaacctgacaggaaacatccgggagttcctgcccattgttgggcatgtgcaggtggcacaggtcccaggccgaggggagcccagcagccccggagagctgaatttcccctatctgtttcaactgctggaagatgaaggctacaaaggcttcgtgggctgagacacagtagagggcttgagttggctacgttcatactgggataggcggggccacccagaggctggccagtgagggcccgcacaccacccacgtgcctccagacagcgagtgacatcccatctcctcctctgcattaaagatgacctgctga

SEQ ID NO: 287350 - DNA, 329 bp, Homo sapiens
tttttttggcggtataaaagtgcttctttatttggtcatacagctttcaaatgttgcttaacgaacagatagcatttttataatcagaggaaagactcagtattaaagtgcgcgtcccatcattgcaaccgggccctcgggcagccagctctctcttgcttcgcgtccggctggaagaatttgttgagagtgatgggcagctgcacagacacgttctggaaggtgcccccatacctgaactgaatgttgaggactggcgcctccgtgaagtcggacacgcactctatgttgaccacctgctgcacctgcgcgccccttcgcctctcccc

SEQ ID NO: 287351 - DNA, 1373 bp, Homo sapiens
tttttttggcggtataaaagtgcttctttatttggtcatacagctttcaaatgttgcttaacgaacagatagcatttttataatcagaggaaagactcagtattaaagtgcgcgtcccatcattgcaaccgggccctcgggcagccagctctctcttgcttcgcgtccggctctcaggccctggagctcggcctccctaccttctccaggcgcgggtcctgctccttttccggccgccctcgctccgccccttcgcctctccccgtgatccctctctcgctaaccgtaggcgcttttcgtgaaggcccgggtttttacagcacttcgcttttctaaccacgaacagtgctcgttcgttcgcagggccagcaaggagagccccgcccccgcccgccgcccgccgcccgccgcccgccgcctttggatcccgcggactccgcccggcccggcctccccaggcatggcgccgctgcgcttctccgccaatctgtcctggctattccccgagctccccggcctccccgcgcgggtgcgggccgcgggcagctcgggcttcgaggccgtcgaggtggcctggccgtacgcggagacgcctgaggcgctggcgcgcgccgcgcgagaagcggggctgcggcttgtactgatcaacacgcccccgggagaccaagagaagggggaaatggggctgggggccgtccccgggagacaggcggccttccgagagggactggagcaggccgtgcggtatgccaaagccctgggctgtcccaggatccacctgatggctggccgagtaccccagggagctgatcgaatagcagtcaaggctgagatggaggccgtttttctggagaacctgaggcatgcagctggggttttggctcaggaggacctcgtgggactgctggagcccatcaacacccgcatcactgacccccagtacttcctggacacgccccagcaggcggcagccatcttacagaaggtaggaagacccaacctccaattacaaatggacatattccactggcagatcatggatgggaacctgacaggaaacatccgggagttcctgcccattgttgggcatgtgcaggtggcacaggtcccaggccgaggggagcccagcagccccggagagctgaatttcccctatctgtttcaactgctggaagatgaaggctacaaaggcttcgtgggctgtgagtatcagcctcgaggagacacagtagagggcttgagttggctacgttcatactgggataggcggggccacccagaggctggccagtgagggcccgcacaccacccacgtgcctccagacagcgagtgacatcccatctcctcctctgcattaaagatgacctgctga

SEQ ID NO: 287352 - DNA, 2699 bp, Homo sapiens
tttttttggcggtataaaagtgcttctttatttggtcatacagctttcaaatgttgcttaacgaacagatagcatttttataatcagaggaaagactcagtattaaagtgcgcgtcccatcattgcaaccgggccctcgggcagccagctctctcttgcttcgcgtccggctctcaggccctggagctcggcctccctaccttctccaggcgcgggtcctgctccttttccggccgccctcgctccgccccttcgcctctccccgtgatccctctctcgctaaccgtaggcgcttttcgtgaaggcccgggtttttacagcacttcgcttttctaaccacgaacagtgctcgttcgttcgcagggccagcaaggagagccccgcccccgcccgccgcccgccgcccgccgcccgccgcctttggatcccgcggactccgcccggcccggcctccccaggcatggcgccgctgcgcttctccgccaatctgtcctggctattccccgagctccccggcctccccgcgcgggtgcgggccgcgggcagctcgggcttcgaggccgtcgaggtggcctggccgtacgcggagacgcctgaggcgctggcgcgcgccgcgcgagaagcggggctgcggcttgtactgatcaacacgcccccgggagaccaagagaagggggaaatggggctgggggccgtccccgggagacaggcggccttccgagagggactggagcaggccgtgcggtatgccaaagccctgggctgtcccaggtaccccgctccaccccacccccacccctgtgacccatgaccctgatgcaggttcagggagtcgaggacgccagatctgagacgctcagaagtctgagcccactggtttatctctgcctctgcggtcctggtcctttgtaaattgccttttgtattttatctgtcttatgccactctgtttgccactctttcatgctcaccccatgctgggatcccatgctgggagctcagtctgcctaggcagataggagagtaaatatatacagtgatgcatttgaggacaggcctattccaggaagctgtgggagcagggtaggcacctaaccctgtctggatcagagaaagctgcttacaggtagtgatgcttggactgtcttcaaggagtgggcattgcttgatgggcaggaagttgagtgttccttgcaagggtgctgtggcaagaggaggcctggtgtatttggcagcgttcctgaggctggacatgtatgtagcctgttgggatggggaggcctggaatgtctgcttggagctggatgtggctaagatcaggggatgatgggaggaggtggacggctcaaagtggggctgattcaaatgtcaaatcctgcagaggccaaacaggctcagaaggaactggcaagaggggatcactactggtcaatggtgggggcagaaaacagatgggaaaaggctaagtagatgcgaggagaggaagtagagacagcagcatggaatacctgagaagggcaagcaaaggtcaggacaatttttaaaggtgagaatttagcaggttacaggttgcggagaaggaccgagggaaggaaaggttttggaaagtactggaggcaggaggcggtgggtggacactgagatgtctgggaaagggcttgcccctcagccatcactgaagtgtctctgaaagtgctgggatacctgggcatcgtgacccaggtgccatggactggagacctggggagacggacgagggctggcacagtcagggaatcctggaagaggtgcagagagagccaagggaggcaaggcctccagtccatcttccccacaggatccacctgatggctggccgagtaccccagggagctgatcgaatagcagtcaaggctgagatggaggccgtttttctggagaacctgaggcatgcagctggggttttggctcaggtgagaaaggtggaaacacacacgtacttacatgtctctgtgggtgtgcggagaagggggtgcacagtggggacagcacgtgaggctgccagcctaggtcagaggaacaggtgagggccttgaccagtgactgactgatgggggacaaacttgggaaggagctctattcacagcacccgacatgctgctaggaggacctcgtgggactgctggagcccatcaacacccgcatcactgacccccagtacttcctggacacgccccagcagggtacgaccccagccctgtctctccttctgtcccttttgattcctgtgctcttgaggctcacggtcccctccctggcttctcttacagcggcagccatcttacagaaggtaggaagacccaacctccaattacaaatggacatattccactggcagatcatggatgggaacctgacaggaaacatccgggagttcctgcccattgttgggcatgtgcaggtggcacaggtcccaggccgaggggagcccagcagccccggagagctgaatttcccctatctgtttcaactgctggaagatgaaggctacaaaggcttcgtgggctgagacacagtagagggcttgagttggctacgttcatactgggataggcggggccacccagaggctggccagtgagggcccgcacaccacccacgtgcctccagacagcgagtgacatcccatctcctcctctgcattaaagatgacctgctga

SEQ ID NO: 287353 - DNA, 2859 bp, Homo sapiens
tttttttggcggtataaaagtgcttctttatttggtcatacagctttcaaatgttgcttaacgaacagatagcatttttataatcagaggaaagactcagtattaaagtgcgcgtcccatcattgcaaccgggccctcgggcagccagctctctcttgcttcgcgtccggctctcaggccctggagctcggcctccctaccttctccaggcgcgggtcctgctccttttccggccgccctcgctccgccccttcgcctctccccgtgatccctctctcgctaaccgtaggcgcttttcgtgaaggcccgggtttttacagcacttcgcttttctaaccacgaacagtgctcgttcgttcgcagggccagcaaggagagccccgcccccgcccgccgcccgccgcccgccgcccgccgcctttggatcccgcggactccgcccggcccggcctccccaggcatggcgccgctgcgcttctccgccaatctgtcctggctattccccgagctccccggcctccccgcgcgggtgcgggccgcgggcagctcgggcttcgaggccgtcgaggtggcctggccgtacgcggagacgcctgaggcgctggcgcgcgccgcgcgagaagcggggctgcggcttgtactgatcaacacgcccccgggagaccaagagaagggggaaatggggctgggggccgtccccgggagacaggcggccttccgagagggactggagcaggccgtgcggtatgccaaagccctgggctgtcccaggtaccccgctccaccccacccccacccctgtgacccatgaccctgatgcaggttcagggagtcgaggacgccagatctgagacgctcagaagtctgagcccactggtttatctctgcctctgcggtcctggtcctttgtaaattgccttttgtattttatctgtcttatgccactctgtttgccactctttcatgctcaccccatgctgggatcccatgctgggagctcagtctgcctaggcagataggagagtaaatatatacagtgatgcatttgaggacaggcctattccaggaagctgtgggagcagggtaggcacctaaccctgtctggatcagagaaagctgcttacaggtagtgatgcttggactgtcttcaaggagtgggcattgcttgatgggcaggaagttgagtgttccttgcaagggtgctgtggcaagaggaggcctggtgtatttggcagcgttcctgaggctggacatgtatgtagcctgttgggatggggaggcctggaatgtctgcttggagctggatgtggctaagatcaggggatgatgggaggaggtggacggctcaaagtggggctgattcaaatgtcaaatcctgcagaggccaaacaggctcagaaggaactggcaagaggggatcactactggtcaatggtgggggcagaaaacagatgggaaaaggctaagtagatgcgaggagaggaagtagagacagcagcatggaatacctgagaagggcaagcaaaggtcaggacaatttttaaaggtgagaatttagcaggttacaggttgcggagaaggaccgagggaaggaaaggttttggaaagtactggaggcaggaggcggtgggtggacactgagatgtctgggaaagggcttgcccctcagccatcactgaagtgtctctgaaagtgctgggatacctgggcatcgtgacccaggtgccatggactggagacctggggagacggacgagggctggcacagtcagggaatcctggaagaggtgcagagagagccaagggaggcaaggcctccagtccatcttccccacaggatccacctgatggctggccgagtaccccagggagctgatcgaatagcagtcaaggctgagatggaggccgtttttctggagaacctgaggcatgcagctggggttttggctcaggtgagaaaggtggaaacacacacgtacttacatgtctctgtgggtgtgcggagaagggggtgcacagtggggacagcacgtgaggctgccagcctaggtcagaggaacaggtgagggccttgaccagtgactgactgatgggggacaaacttgggaaggagctctattcacagcacccgacatgctgctaggaggacctcgtgggactgctggagcccatcaacacccgcatcactgacccccagtacttcctggacacgccccagcagggtacgaccccagccctgtctctccttctgtcccttttgattcctgtgctcttgaggctcacggtcccctccctggcttctcttacagcggcagccatcttacagaaggtaggaagacccaacctccaattacaaatggacatattccactggcagatcatggatgggaacctgacaggaaacatccgggagttcctgcccattgttgggcatgtgcaggtggcacaggtcccaggccgaggggagcccagcagccccggagagctgaatttcccctatctgtttcaactgctggaagatgaaggctacaaaggcttcgtgggctgagacacagtagagggcttgagttggctacgttcatactgggataggcggggccacccagaggctggccagtgagggcccgcacaccacccacgtgcctccagacagcgagtgacatcccatctcctcctctgcattaaagatgacctgctgaacattgtcatatgtctctgtaatggggtggtgggacacatagtgtctaacacttcagtttctctgctgcttccctcccattgagaagccagtgccagggttgctgtgaagatgggagagcttctgaacccacctcattaaaggatgagaaacccagggtc

SEQ ID NO: 287354 - DNA, 2772 bp, Homo sapiens
tttttttggcggtataaaagtgcttctttatttggtcatacagctttcaaatgttgcttaacgaacagatagcatttttataatcagaggaaagactcagtattaaagtgcgcgtcccatcattgcaaccgggccctcgggcagccagctctctcttgcttcgcgtccggctctcaggccctggagctcggcctccctaccttctccaggcgcgggtcctgctccttttccggccgccctcgctccgccccttcgcctctccccgtgatccctctctcgctaaccgtaggcgcttttcgtgaaggcccgggtttttacagcacttcgcttttctaaccacgaacagtgctcgttcgttcgcagggccagcaaggagagccccgcccccgcccgccgcccgccgcccgccgcccgccgcctttggatcccgcggactccgcccggcccggcctccccaggcatggcgccgctgcgcttctccgccaatctgtcctggctattccccgagctccccggcctccccgcgcgggtgcgggccgcgggcagctcgggcttcgaggccgtcgaggtggcctggccgtacgcggagacgcctgaggcgctggcgcgcgccgcgcgagaagcggggctgcggcttgtactgatcaacacgcccccgggagaccaagagaagggggaaatggggctgggggccgtccccgggagacaggcggccttccgagagggactggagcaggccgtgcggtatgccaaagccctgggctgtcccaggtaccccgctccaccccacccccacccctgtgacccatgaccctgatgcaggttcagggagtcgaggacgccagatctgagacgctcagaagtctgagcccactggtttatctctgcctctgcggtcctggtcctttgtaaattgccttttgtattttatctgtcttatgccactctgtttgccactctttcatgctcaccccatgctgggatcccatgctgggagctcagtctgcctaggcagataggagagtaaatatatacagtgatgcatttgaggacaggcctattccaggaagctgtgggagcagggtaggcacctaaccctgtctggatcagagaaagctgcttacaggtagtgatgcttggactgtcttcaaggagtgggcattgcttgatgggcaggaagttgagtgttccttgcaagggtgctgtggcaagaggaggcctggtgtatttggcagcgttcctgaggctggacatgtatgtagcctgttgggatggggaggcctggaatgtctgcttggagctggatgtggctaagatcaggggatgatgggaggaggtggacggctcaaagtggggctgattcaaatgtcaaatcctgcagaggccaaacaggctcagaaggaactggcaagaggggatcactactggtcaatggtgggggcagaaaacagatgggaaaaggctaagtagatgcgaggagaggaagtagagacagcagcatggaatacctgagaagggcaagcaaaggtcaggacaatttttaaaggtgagaatttagcaggttacaggttgcggagaaggaccgagggaaggaaaggttttggaaagtactggaggcaggaggcggtgggtggacactgagatgtctgggaaagggcttgcccctcagccatcactgaagtgtctctgaaagtgctgggatacctgggcatcgtgacccaggtgccatggactggagacctggggagacggacgagggctggcacagtcagggaatcctggaagaggtgcagagagagccaagggaggcaaggcctccagtccatcttccccacaggatccacctgatggctggccgagtaccccagggagctgatcgaatagcagtcaaggctgagatggaggccgtttttctggagaacctgaggcatgcagctggggttttggctcaggtgagaaaggtggaaacacacacgtacttacatgtctctgtgggtgtgcggagaagggggtgcacagtggggacagcacgtgaggctgccagcctaggtcagaggaacaggtgagggccttgaccagtgactgactgatgggggacaaacttgggaaggagctctattcacagcacccgacatgctgctaggaggacctcgtgggactgctggagcccatcaacacccgcatcactgacccccagtacttcctggacacgccccagcaggcggcagccatcttacagaaggtaggaagacccaacctccaattacaaatggacatattccactggcagatcatggatgggaacctgacaggaaacatccgggagttcctgcccattgttgggcatgtgcaggtggcacaggtcccaggccgaggggagcccagcagccccggagagctgaatttcccctatctgtttcaactgctggaagatgaaggctacaaaggcttcgtgggctgagacacagtagagggcttgagttggctacgttcatactgggataggcggggccacccagaggctggccagtgagggcccgcacaccacccacgtgcctccagacagcgagtgacatcccatctcctcctctgcattaaagatgacctgctgaacattgtcatatgtctctgtaatggggtggtgggacacatagtgtctaacacttcagtttctctgctgcttccctcccattgagaagccagtgccagggttgctgtgaagatgggagagcttctgaacccacctcattaaaggatgagaaacccagggtc

SEQ ID NO: 287355 - DNA, 2581 bp, Homo sapiens
tttttttggcggtataaaagtgcttctttatttggtcatacagctttcaaatgttgcttaacgaacagatagcatttttataatcagaggaaagactcagtattaaagtgcgcgtcccatcattgcaaccgggccctcgggcagccagctctctcttgcttcgcgtccggctctcaggccctggagctcggcctccctaccttctccaggcgcgggtcctgctccttttccggccgccctcgctccgccccttcgcctctccccgtgatccctctctcgctaaccgtaggcgcttttcgtgaaggcccgggtttttacagcacttcgcttttctaaccacgaacagtgctcgttcgttcgcagggccagcaaggagagccccgcccccgcccgccgcccgccgcccgccgcccgccgcctttggatcccgcggactccgcccggcccggcctccccaggcatggcgccgctgcgcttctccgccaatctgtcctggctattccccgagctccccggcctccccgcgcgggtgcgggccgcgggcagctcgggcttcgaggccgtcgaggtggcctggccgtacgcggagacgcctgaggcgctggcgcgcgccgcgcgagaagcggggctgcggcttgtactgatcaacacgcccccgggagaccaagagaagggggaaatggggctgggggccgtccccgggagacaggcggccttccgagagggactggagcaggccgtgcggtatgccaaagccctgggctgtcccaggtaccccgctccaccccacccccacccctgtgacccatgaccctgatgcaggttcagggagtcgaggacgccagatctgagacgctcagaagtctgagcccactggtttatctctgcctctgcggtcctggtcctttgtaaattgccttttgtattttatctgtcttatgccactctgtttgccactctttcatgctcaccccatgctgggatcccatgctgggagctcagtctgcctaggcagataggagagtaaatatatacagtgatgcatttgaggacaggcctattccaggaagctgtgggagcagggtaggcacctaaccctgtctggatcagagaaagctgcttacaggtagtgatgcttggactgtcttcaaggagtgggcattgcttgatgggcaggaagttgagtgttccttgcaagggtgctgtggcaagaggaggcctggtgtatttggcagcgttcctgaggctggacatgtatgtagcctgttgggatggggaggcctggaatgtctgcttggagctggatgtggctaagatcaggggatgatgggaggaggtggacggctcaaagtggggctgattcaaatgtcaaatcctgcagaggccaaacaggctcagaaggaactggcaagaggggatcactactggtcaatggtgggggcagaaaacagatgggaaaaggctaagtagatgcgaggagaggaagtagagacagcagcatggaatacctgagaagggcaagcaaaggtcaggacaatttttaaaggtgagaatttagcaggttacaggttgcggagaaggaccgagggaaggaaaggttttggaaagtactggaggcaggaggcggtgggtggacactgagatgtctgggaaagggcttgcccctcagccatcactgaagtgtctctgaaagtgctgggatacctgggcatcgtgacccaggtgccatggactggagacctggggagacggacgagggctggcacagtcagggaatcctggaagaggtgcagagagagccaagggaggcaaggcctccagtccatcttccccacaggatccacctgatggctggccgagtaccccagggagctgatcgaatagcagtcaaggctgagatggaggccgtttttctggagaacctgaggcatgcagctggggttttggctcaggaggacctcgtgggactgctggagcccatcaacacccgcatcactgacccccagtacttcctggacacgccccagcaggcggcagccatcttacagaaggtaggaagacccaacctccaattacaaatggacatattccactggcagatcatggatgggaacctgacaggaaacatccgggagttcctgcccattgttgggcatgtgcaggtggcacaggtcccaggccgaggggagcccagcagccccggagagctgaatttcccctatctgtttcaactgctggaagatgaaggctacaaaggcttcgtgggctgagacacagtagagggcttgagttggctacgttcatactgggataggcggggccacccagaggctggccagtgagggcccgcacaccacccacgtgcctccagacagcgagtgacatcccatctcctcctctgcattaaagatgacctgctgaacattgtcatatgtctctgtaatggggtggtgggacacatagtgtctaacacttcagtttctctgctgcttccctcccattgagaagccagtgccagggttgctgtgaagatgggagagcttctgaacccacctcattaaaggatgagaaacccagggtc

SEQ ID NO: 287356 - DNA, 1355 bp, Homo sapiens
tttttttggcggtataaaagtgcttctttatttggtcatacagctttcaaatgttgcttaacgaacagatagcatttttataatcagaggaaagactcagtattaaagtgcgcgtcccatcattgcaaccgggccctcgggcagccagctctctcttgcttcgcgtccggctctcaggccctggagctcggcctccctaccttctccaggcgcgggtcctgctccttttccggccgccctcgctccgccccttcgcctctccccgtgatccctctctcgctaaccgtaggcgcttttcgtgaaggcccgggtttttacagcacttcgcttttctaaccacgaacagtgctcgttcgttcgcagggccagcaaggagagccccgcccccgcccgccgcccgccgcccgccgcccgccgcctttggatcccgcggactccgcccggcccggcctccccaggcatggcgccgctgcgcttctccgccaatctgtcctggctattccccgagctccccggcctccccgcgcgggtgcgggccgcgggcagctcgggcttcgaggccgtcgaggtggcctggccgtacgcggagacgcctgaggcgctggcgcgcgccgcgcgagaagcggggctgcggcttgtactgatcaacacgcccccgggagaccaagagaagggggaaatggggctgggggccgtccccgggagacaggcggccttccgagagggactggagcaggccgtgcggtatgccaaagccctgggctgtcccaggatccacctgatggctggccgagtaccccagggagctgatcgaatagcagtcaaggctgagatggaggccgtttttctggagaacctgaggcatgcagctggggttttggctcaggaggacctcgtgggactgctggagcccatcaacacccgcatcactgacccccagtacttcctggacacgccccagcaggcggcagccatcttacagaaggtaggaagacccaacctccaattacaaatggacatattccactggcagatcatggatgggaacctgacaggaaacatccgggagttcctgcccattgttgggcatgtgcaggtggcacaggtcccaggccgaggggagcccagcagccccggagagctgaatttcccctatctgtttcaactgctggaagatgaaggctacaaaggcttcgtgggctgagacacagtagagggcttgagttggctacgttcatactgggataggcggggccacccagaggctggccagtgagggcccgcacaccacccacgtgcctccagacagcgagtgacatcccatctcctcctctgcattaaagatgacctgctga

SEQ ID NO: 287357 - DNA, 1478 bp, Homo sapiens
gatcagctcctgagacatggagagaccagatcttcacacctgtaccagaccctacctcctcagacatggacaggctcagaaggaactggcaagaggggatcactactggtcaatggtgggggcagaaaacagatgggaaaaggctaagtagatgcgaggagaggaagtagagacagcagcatggaatacctgagaagggcaagcaaaggtcaggacaatttttaaaggtgagaatttagcaggttacaggttgcggagaaggaccgagggaaggaaaggttttggaaagtactggaggcaggaggcggtgggtggacactgagatgtctgggaaagggcttgcccctcagccatcactgaagtgtctctgaaagtgctgggatacctgggcatcgtgacccaggtgccatggactggagacctggggagacggacgagggctggcacagtcagggaatcctggaagaggtgcagagagagccaagggaggcaaggcctccagtccatcttccccacaggatccacctgatggctggccgagtaccccagggagctgatcgaatagcagtcaaggctgagatggaggccgtttttctggagaacctgaggcatgcagctggggttttggctcaggtgagaaaggtggaaacacacacgtacttacatgtctctgtgggtgtgcggagaagggggtgcacagtggggacagcacgtgaggctgccagcctaggtcagaggaacaggtgagggccttgaccagtgactgactgatgggggacaaacttgggaaggagctctattcacagcacccgacatgctgctaggaggacctcgtgggactgctggagcccatcaacacccgcatcactgacccccagtacttcctggacacgccccagcagggtacgaccccagccctgtctctccttctgtcccttttgattcctgtgctcttgaggctcacggtcccctccctggcttctcttacagcggcagccatcttacagaaggtaggaagacccaacctccaattacaaatggtaagtggaagggggtacttcgcagatcggaaggaggcggggcctgcggggtctcggagcggcagctatccttacagaaggacatattccactggcagatcatggatgggaacctgacaggaaacatccgggagttcctgcccattgttgggcatgtgcaggtggcacaggtcccaggccgaggggagcccagcagccccggagagctgaatttcccctatctgtttcaactgctggaagatgaaggctacaaaggcttcgtgggctgtgagtatcagcctcgaggagacacagtagagggcttgagttggctacgttcatactgggataggcggggccacccagaggctggccagtgagggcccgcacaccacccacgtgcctccagacagcgagtgacatcccatctcctcctctgcattaaagatgacctgctga

SEQ ID NO: 287358 - DNA, 1131 bp, Homo sapiens
tttttttggcggtataaaagtgcttctttatttggtcatacagctttcaaatgttgcttaacgaacagatagcatttttataatcagaggaaagactcagtattaaagtgcgcgtcccatcattgcaaccgggccctcgggcagccagctctctcttgcttcgcgtccggctctcaggccctggagctcggcctccctaccttctccaggcgcgggtcctgctccttttccggccgccctcgctccgccccttcgcctctccccgtgatccctctctcgctaaccgtaggcgcttttcgtgaaggcccgggtttttacagcacttcgcttttctaaccacgaacagtgctcgttcgttcgcagggccagcaaggagagccccgcccccgcccgccgcccgccgcccgccgcccgccgcctttggatcccgcggactccgcccggcccggcctccccaggcatggcgccgctgcgcttctccgccaatctgtcctggctattccccgagctccccggcctccccgcgcgggtgcgggccgcgggcagctcgggcttcgaggccgtcgaggtggcctggccgtacgcggagacgcctgaggcgctggcgcgcgccgcgcgagaagcggggctgcggcttgtactgatcaacacgcccccgggagaccaagagaagggggaaatggggctgggggccgtccccgggagacaggcggccttccgagagggactggagcaggccgtcggcagccatcttacagaaggtaggaagacccaacctccaattacaaatggacatattccactggcagatcatggatgggaacctgacaggaaacatccgggagttcctgcccattgttgggcatgtgcaggtggcacaggtcccaggccgaggggagcccagcagccccggagagctgaatttcccctatctgtttcaactgctggaagatgaaggctacaaaggcttcgtgggctgagacacagtagagggcttgagttggctacgttcatactgggataggcggggccacccagaggctggccagtgagggcccgcacaccacccacgtgcctccagacagcgagtgacatcccatctcctcctctgcattaaagatgacctgctga

SEQ ID NO: 287359 - DNA, 994 bp, Homo sapiens
gcgcggactcacccggccggctcccaggcatgcgcgctgcgcttctccgccaatctgtcctggctattccccgagctccccggcctccccgcgcgggtgcgggccgcgggcagctcgggcttcgaggccgtcgaggtggcctggccgtacgcggagacgcctgaggcgctggcgcgcgccgcgcgagaagcggggctgcggcttgtactgatcaacacgcccccgggagaccaagagaagggggaaatggggctgggggccgtccccgggagacaggcggccttccgagagggactggagcaggccgtgagtgggcattgcttgatgggcaggaagttgagtgttccttgcaagggtgctgtggcaagaggaggcctggtgtatttggcagcgttcctgaggctggacatgatccacctgatggctggccgagtaccccagggagctgatcgaatagcagtcaaggctgagatggaggccgtttttctggagaacctgaggcatgcagctggggttttggctcaggaggacctcgtgggactgctggagcccatcaacacccgcatcactgacccccagtacttcctggacacgccccagcaggcggcagccatcttacagaaggtaggaagacccaacctccaattacaaatggacatattccactggcagatcatggatgggaacctgacaggaaacatccgggagttcctgcccattgttgggcatgtgcaggtggcacaggtcccaggccgaggggagcccagcagccccggagagctgaatttcccctatctgtttcaactgctggaagatgaaggctacaaaggcttcgtgggctgagacacagtagagggcttgagttggctacgttcatactgggataggcggggccacccagaggctggccagtgagggcccgcacaccacccacgtgcctccagacagcgagtgacatcccatctcctcctctgcattaaagatgacctgctga

SEQ ID NO: 287360 - DNA, 2396 bp, Homo sapiens
atcactcaagatggctgcccccatcaagatgaccggggtgtgccggggggaaaggggcagcatgatggtctgagatggtgtagcgtcggaccatgtggaagtttctgaggctggggagccggataatggggggtggggcccgttggggggtaaaggggcaatagcgtcctttcacaggctaacctcggctcttcccagtcctctggactaaaatggggaacacattgggcctggcaccaatggggactttgccccgccggagcccccgccgagaggaacccctgcccaaccctgggagcttcgatgagctgcaccgtctatgcaaagacgcagcaggccaagttcctgacatggcagtttgatggcgagtatcggggagatgactacacagccactctgaccctaggaaatcctgacctgattggggagtcggtgatcatggttgctcacttcctgcagagcctcactcatcggctggtgctgggaggagagctagtttatcaccggcggccaggcgaagagggggccatcttgacactggctgggaagtactcggctgtacactgggtagctacattgaatgtgggatcaggcggggcccatgcaagttactaccacagggcaaatgaacaggttcaggttggagtggagtttgaggcaaacacaaggctacaagacacaacattctcctttggttaccacctgactctgccccaggccaacatggtatttagaggcttggtggatagtaactggtgtgtaggtgctgtgctggagaagaagatgccccctctgcctgtcaccctagcccttggagccttcctcaatcactggcgcaacagattccattgtggcttcagcatcactgtgggctgaggttgtccagagccagcccccacagcagctggaacctctgagtcaggtgccctagggccaaagactaggcccctcttcagagcccaccttgctgggtgatctctaggacccaggagcagagtggtggacaggaccatgccctcctcagaactggagctgccacaggggcagttgatgaggcagaggtttgaggatcccccctctgctaccagccccagtatcaccttccccatgctcttgtggctgtggactaagggagaaggattaaggggtatggctgaattcccccggcaccccttgccctcaggcttccttcttcctttccctttggttaatcctgcatgggattagctgaccatcctgttttccatcccagagcctcccaaggctgggaaagtagggctgaagggctagatgtttggtctcaggaagtggggcccacccattcccagaaggagcttctttacctcttagccctgaggtttcctccttcccatcttctgtgcttccagagaacaactttgttcctatggtcacccccactatccccatgaccgcatgaagaggcagttattgctttagtctttcattgcaaccactgggctccctttgaacccggcccaatctttggtcccagcattttcccactccagtgtatccagggtgttccaggtgagctggggaaggaagtgagcatggcctcagctgcagatctcctggagcagcggcatcatggcagacaggccctggatgtgctggatttggtacccgtaggcctcattaatgctccggagctcagccagcaggcctagcaacttcgcatacagaaacctttggaggaagtagtggggttgccaggaaaacaggagggaaataaggcagttgggagtcttgtctctaggccctgatcccctgaactattcctcagtgaagccaggtctgaacattagagaaaatcatgctctggtatgacagactatcagaggttccaaaggtcctccagggggcctcggtctgacactgtcttctctcaccatgctcagttttttctgaacccagagctctgagagccgagtgtgaagaaagctccagacttggccagaactccaaccatgtggaatctgagggcctggccttctagagcaggttctagaaggtggatgtgttctatggtataaagcatcccctttctggccaaactagctcttggaggaacgagcaaaacagaagcggtgcatacctcagagcctggataaatcacagactattgaacctggaactggctttgaccatgaaactgtgaatggccctaacttcaagggaaatgagaaatcgaaggaattggcccaatggcgaggagaggaaaggccaagggaagagaaaagtctgcgttagtctggagaagttggactagtgaggtaatggatgtcatcaatctcaggaatgctattacccagagcctctgagctactactttgcatctgtactgaataaaaaaaaaatctggaaaaagtgagatg

SEQ ID NO: 287361 - DNA, 2635 bp, Homo sapiens
gcctagggttgtctctccatgagtgctctccttccctactcttcctgttccaggtgtagcgtcggaccatgtggaagtttctgaggctggggagccggataatggggggtggggcccgttggggggtaaaggggcaatagcgtcctttcacaggctaacctcggctcttcccagtcctctggactaaaatggggaacacattgggcctggcaccaatggggactttgccccgccggagcccccgccgagaggaacccctgcccaaccctgggagcttcgatgagctgcaccgtctatgcaaagatgtattcccagcacagatggagggagtgaagctcgttgtcaacaaggttctgagcagccatttccaggtggcgcacactatacacatgagtgccctgggcttgccgggatatcacctccatgcggcctatgcaggggattggcagctcagtcccactgaggtgttccccactgtggtaggggatatggacagcagtggcagcctgaacgcccaggtcttgctcctcttggcagagcggctccgagctaaggctgtcttccagacgcagcaggccaagttcctgacatggcagtttgatggcgagtatcggggagatgactacacagccactctgaccctaggaaatcctgacctgattggggagtcggtgatcatggttgctcacttcctgcagagcctcactcatcggctggtgctgggaggagagctagtttatcaccggcggccaggcgaagagggggccatcttgacactggctgggaagtactcggctgtacactgggtagctacattgaatgtgggatcaggcggggcccatgcaagttactaccacagggcaaatgaacaggttcaggttggagtggagtttgaggcaaacacaaggctacaagacacaacattctcctttggttaccacctgactctgccccaggccaacatggtatttagaggcttggtggatagtaactggtgtgtaggtgctgtgctggagaagaagatgccccctctgcctgtcaccctagcccttggagccttcctcaatcactggcgcaacagattccattgtggcttcagcatcactgtgggctgaggttgtccagagccagcccccacagcagctggaacctctgagtcaggtgccctagggccaaagactaggcccctcttcagagcccaccttgctgggtgatctctaggacccaggagcagagtggtggacaggaccatgccctcctcagaactggagctgccacaggggcagttgatgaggcagaggtttgaggatcccccctctgctaccagccccagtatcaccttccccatgctcttgtggctgtggactaagggagaaggattaaggggtatggctgaattcccccggcaccccttgccctcaggcttccttcttcctttccctttggttaatcctgcatgggattagctgaccatcctgttttccatcccagagcctcccaaggctgggaaagtagggctgaagggctagatgtttggtctcaggaagtggggcccacccattcccagaaggagcttctttacctcttagccctgaggtttcctccttcccatcttctgtgcttccagagaacaactttgttcctatggtcacccccactatccccatgaccgcatgaagaggcagttattgctttagtctttcattgcaaccactgggctccctttgaacccggcccaatctttggtcccagcattttcccactccagtgtatccagggtgttccaggtgagctggggaaggaagtgagcatggcctcagctgcagatctcctggagcagcggcatcatggcagacaggccctggatgtgctggatttggtacccgtaggcctcattaatgctccggagctcagccagcaggcctagcaacttcgcatacagaaacctttggaggaagtagtggggttgccaggaaaacaggagggaaataaggcagttgggagtcttgtctctaggccctgatcccctgaactattcctcagtgaagccaggtctgaacattagagaaaatcatgctctggtatgacagactatcagaggttccaaaggtcctccagggggcctcggtctgacactgtcttctctcaccatgctcagttttttctgaacccagagctctgagagccgagtgtgaagaaagctccagacttggccagaactccaaccatgtggaatctgagggcctggccttctagagcaggttctagaaggtggatgtgttctatggtataaagcatcccctttctggccaaactagctcttggaggaacgagcaaaacagaagcggtgcatacctcagagcctggataaatcacagactattgaacctggaactggctttgaccatgaaactgtgaatggccctaacttcaagggaaatgagaaatcgaaggaattggcccaatggcgaggagaggaaaggccaagggaagagaaaagtctgcgttagtctggagaagttggactagtgaggtaatggatgtcatcaatctcaggaatgctattacccagagcctctgagctactactttgcatctgtactgaataaaaaaaaaatctggaaaaagtgagatg

SEQ ID NO: 287362 - DNA, 2557 bp, Homo sapiens
atcactcaagatggctgcccccatcaagatgaccggggtgtgccggggggaaaggggcagcatgatggtctgagatggtgtagcgtcggaccatgtggaagtttctgaggctggggagccggataatggggggtggggcccgttggggggtaaaggggcaatagcgtcctttcacaggctaacctcggctcttcccagtcctctggactaaaatggggaacacattgggcctggcaccaatggggactttgccccgccggagcccccgccgagaggaacccctgcccaaccctgggagcttcgatgagctgcaccgtctatgcaaagatgtattcccagcacagatggagggagtgaagctcgttgtcaacaaggttctgagcagccatttccaggtggcgcacactatacacatgagtgccctgggcttgccgggatatcacctccatgcggcctatgcaggggattggcagctcagtcccactgagacgcagcaggccaagttcctgacatggcagtttgatggcgagtatcggggagatgactacacagccactctgaccctaggaaatcctgacctgattggggagtcggtgatcatggttgctcacttcctgcagagcctcactcatcggctggtgctgggaggagagctagtttatcaccggcggccaggcgaagagggggccatcttgacactggctgggaagtactcggctgtacactgggtagctacattgaatgtgggatcaggcggggcccatgcaagttactaccacagggcaaatgaacaggttcaggttggagtggagtttgaggcaaacacaaggctacaagacacaacattctcctttggttaccacctgactctgccccaggccaacatggtatttagaggcttggtggatagtaactggtgtgtaggtgctgtgctggagaagaagatgccccctctgcctgtcaccctagcccttggagccttcctcaatcactggcgcaacagattccattgtggcttcagcatcactgtgggctgaggttgtccagagccagcccccacagcagctggaacctctgagtcaggtgccctagggccaaagactaggcccctcttcagagcccaccttgctgggtgatctctaggacccaggagcagagtggtggacaggaccatgccctcctcagaactggagctgccacaggggcagttgatgaggcagaggtttgaggatcccccctctgctaccagccccagtatcaccttccccatgctcttgtggctgtggactaagggagaaggattaaggggtatggctgaattcccccggcaccccttgccctcaggcttccttcttcctttccctttggttaatcctgcatgggattagctgaccatcctgttttccatcccagagcctcccaaggctgggaaagtagggctgaagggctagatgtttggtctcaggaagtggggcccacccattcccagaaggagcttctttacctcttagccctgaggtttcctccttcccatcttctgtgcttccagagaacaactttgttcctatggtcacccccactatccccatgaccgcatgaagaggcagttattgctttagtctttcattgcaaccactgggctccctttgaacccggcccaatctttggtcccagcattttcccactccagtgtatccagggtgttccaggtgagctggggaaggaagtgagcatggcctcagctgcagatctcctggagcagcggcatcatggcagacaggccctggatgtgctggatttggtacccgtaggcctcattaatgctccggagctcagccagcaggcctagcaacttcgcatacagaaacctttggaggaagtagtggggttgccaggaaaacaggagggaaataaggcagttgggagtcttgtctctaggccctgatcccctgaactattcctcagtgaagccaggtctgaacattagagaaaatcatgctctggtatgacagactatcagaggttccaaaggtcctccagggggcctcggtctgacactgtcttctctcaccatgctcagttttttctgaacccagagctctgagagccgagtgtgaagaaagctccagacttggccagaactccaaccatgtggaatctgagggcctggccttctagagcaggttctagaaggtggatgtgttctatggtataaagcatcccctttctggccaaactagctcttggaggaacgagcaaaacagaagcggtgcatacctcagagcctggataaatcacagactattgaacctggaactggctttgaccatgaaactgtgaatggccctaacttcaagggaaatgagaaatcgaaggaattggcccaatggcgaggagaggaaaggccaagggaagagaaaagtctgcgttagtctggagaagttggactagtgaggtaatggatgtcatcaatctcaggaatgctattacccagagcctctgagctactactttgcatctgtactgaataaaaaaaaaatctggaaaaagtgagatg

SEQ ID NO: 287363 - DNA, 2753 bp, Homo sapiens
atcactcaagatggctgcccccatcaagatgaccggggtgtgccggggggaaaggggcagcatgatggtctgagatggtgtagcgtcggaccatgtggaagtttctgaggctggggagccggataatggggggtggggcccgttggggggtaaaggggcaatagcgtcctttcacaggctaacctcggctcttcccagtcctctggactaaaatggggaacacattgggcctggcaccaatggggactttgccccgccggagcccccgccgagaggaacccctgcccaaccctgggagcttcgatgagctgcaccgtctatgcaaagatgtattcccagcacagatggagggagtgaagctcgttgtcaacaaggttctgagcagccatttccaggtggcgcacactatacacatgagtgccctgggcttgccgggatatcacctccatgcggcctatgcaggggattggcagctcagtcccactgaggtgttccccactgtggtaggggatatggacagcagtggcagcctgaacgcccaggtcttgctcctcttggcagagcggctccgagctaaggctgtcttccagacgcagcaggccaagttcctgacatggcagtttgatggcgagtatcggggagatgactacacagccactctgaccctaggaaatcctgacctgattggggagtcggtgatcatggttgctcacttcctgcagagcctcactcatcggctggtgctgggaggagagctagtttatcaccggcggccaggcgaagagggggccatcttgacactggctgggaagtactcggctgtacactgggtagctacattgaatgtgggatcaggcggggcccatgcaagttactaccacagggcaaatgaacaggttcaggttggagtggagtttgaggcaaacacaaggctacaagacacaacattctcctttggttaccacctgactctgccccaggccaacatggtatttagaggcttggtggatagtaactggtgtgtaggtgctgtgctggagaagaagatgccccctctgcctgtcaccctagcccttggagccttcctcaatcactggcgcaacagattccattgtggcttcagcatcactgtgggctgaggttgtccagagccagcccccacagcagctggaacctctgagtcaggtgccctagggccaaagactaggcccctcttcagagcccaccttgctgggtgatctctaggacccaggagcagagtggtggacaggaccatgccctcctcagaactggagctgccacaggggcagttgatgaggcagaggtttgaggatcccccctctgctaccagccccagtatcaccttccccatgctcttgtggctgtggactaagggagaaggattaaggggtatggctgaattcccccggcaccccttgccctcaggcttccttcttcctttccctttggttaatcctgcatgggattagctgaccatcctgttttccatcccagagcctcccaaggctgggaaagtagggctgaagggctagatgtttggtctcaggaagtggggcccacccattcccagaaggagcttctttacctcttagccctgaggtttcctccttcccatcttctgtgcttccagagaacaactttgttcctatggtcacccccactatccccatgaccgcatgaagaggcagttattgctttagtctttcattgcaaccactgggctccctttgaacccggcccaatctttggtcccagcattttcccactccagtgtatccagggtgttccaggtgagctggggaaggaagtgagcatggcctcagctgcagatctcctggagcagcggcatcatggcagacaggccctggatgtgctggatttggtacccgtaggcctcattaatgctccggagctcagccagcaggcctagcaacttcgcatacagaaacctttggaggaagtagtggggttgccaggaaaacaggagggaaataaggcagttgggagtcttgtctctaggccctgatcccctgaactattcctcagtgaagccaggtctgaacattagagaaaatcatgctctggtatgacagactatcagaggttccaaaggtcctccagggggcctcggtctgacactgtcttctctcaccatgctcagttttttctgaacccagagctctgagagccgagtgtgaagaaagctccagacttggccagaactccaaccatgtggaatctgagggcctggccttctagagcaggttctagaaggtggatgtgttctatggtataaagcatcccctttctggccaaactagctcttggaggaacgagcaaaacagaagcggtgcatacctcagagcctggataaatcacagactattgaacctggaactggctttgaccatgaaactgtgaatggccctaacttcaagggaaatgagaaatcgaaggaattggcccaatggcgaggagaggaaaggccaagggaagagaaaagtctgcgttagtctggagaagttggactagtgaggtaatggatgtcatcaatctcaggaatgctattacccagagcctctgagctactactttgcatctgtactgaataaaaaaaaaatctggaaaaagtgagatgaaacagcagtatccaaatacagcaatttggatgctgaaacgatgtgagacagggatggccagggggaaggactagaccccaagatacctgaatt

SEQ ID NO: 287364 - DNA, 2614 bp, Homo sapiens
atcactcaagatggctgcccccatcaagatgaccggggtgtgccggggggaaaggggcagcatgatggtctgagatggtgtagcgtcggaccatgtggaagtttctgaggctggggagccggataatggggggtggggcccgttggggggtaaaggggcaatagcgtcctttcacaggctaacctcggctcttcccagtcctctggactaaaatggggaacacattgggcctggcaccaatggggactttgccccgccggagcccccgccgagaggaacccctgcccaaccctgggagcttcgatgagctgcaccgtctatgcaaagatgtattcccagcacagatggagggagtgaagctcgttgtcaacaaggttctgagcagccatttccaggtggcgcacactatacacatgagtgccctgggcttgccgggatatcacctccatgcggcctatgcaggggattggcagctcagtcccactgaggtgttccccactgtggtaggggatatggacagcagtggcagcctgaacgcccaggtcttgctcctcttggcagagcggctccgagctaaggctgtcttccagacgcagcaggccaagttcctgacatggcagtttgatggcgagtatcggggagatgactacacagccactctgaccctaggaaatcctgacctgattggggagtcggtgatcatggttgctcacttcctgcagagcctcactcatcggctggtgctgggaggagagctagtttatcaccggcggccaggcgaagagggggccatcttgacactggctgggaagtactcggctgtacactgggtagctacattgaatgtgggatcaggcggggcccatgcaagttactaccacagggcaaatgaacaggttcaggttggagtggagtttgaggcaaacacaaggctacaagacacaacattctcctttggttaccacctgactctgccccaggccaacatggtatttagaggcttggtggatagtaactggtgtgtaggtgctgtgctggagaagaagatgccccctctgcctgtcaccctagcccttggagccttcctcaatcactggcgcaacagattccattgtggcttcagcatcactgtgggctgaggttgtccagagccagcccccacagcagctggaacctctgagtcaggtgccctagggccaaagactaggcccctcttcagagcccaccttgctgggtgatctctaggacccaggagcagagtggtggacaggaccatgccctcctcagaactggagctgccacaggggcagttgatgaggcagaggtttgaggatcccccctctgctaccagccccagtatcaccttccccatgctcttgtggctgtggactaagggagaaggattaaggggtatggctgaattcccccggcaccccttgccctcaggcttccttcttcctttccctttggttaatcctgcatgggattagctgaccatcctgttttccatcccagagcctcccaaggctgggaaagtagggctgaagggctagatgtttggtctcaggaagtggggcccacccattcccagaaggagcttctttacctcttagccctgaggtttcctccttcccatcttctgtgcttccagagaacaactttgttcctatggtcacccccactatccccatgaccgcatgaagaggcagttattgctttagtctttcattgcaaccactgggctccctttgaacccggcccaatctttggtcccagcattttcccactccagtgtatccagggtgttccaggtgagctggggaaggaagtgagcatggcctcagctgcagatctcctggagcagcggcatcatggcagacaggccctggatgtgctggatttggtacccgtaggcctcattaatgctccggagctcagccagcaggcctagcaacttcgcatacagaaacctttggaggaagtagtggggttgccaggaaaacaggagggaaataaggcagttgggagtcttgtctctaggccctgatcccctgaactattcctcagtgaagccaggtctgaacattagagaaaatcatgctctggtatgacagactatcagaggttccaaagtcagttttttctgaacccagagctctgagagccgagtgtgaagaaagctccagacttggccagaactccaaccatgtggaatctgagggcctggccttctagagcaggttctagaaggtggatgtgttctatggtataaagcatcccctttctggccaaactagctcttggaggaacgagcaaaacagaagcggtgcatacctcagagcctggataaatcacagactattgaacctggaactggctttgaccatgaaactgtgaatggccctaacttcaagggaaatgagaaatcgaaggaattggcccaatggcgaggagaggaaaggccaagggaagagaaaagtctgcgttagtctggagaagttggactagtgaggtaatggatgtcatcaatctcaggaatgctattacccagagcctctgagctactactttgcatctgtactgaataaaaaaaaaatctggaaaaagtgagatg

SEQ ID NO: 287365 - DNA, 2473 bp, Homo sapiens
atcactcaagatggctgcccccatcaagatgaccggggtgtgccggggggaaaggggcagcatgatggtctgagatggtgtagcgtcggaccatgtggaagtttctgaggctggggagccggataatggggggtggggcccgttggggggtaaaggggcaatagcgtcctttcacaggctaacctcggctcttcccagtcctctggactaaaatggggaacacattgggcctggcaccaatggggactttgccccgccggagcccccgccgagaggaacccctgcccaaccctgggagcttcgatgagctgcaccgtctatgcaaagatgtattcccagcacagatggagggagtgaagctcgttgtcaacaaggttctgagcagccatttccaggtggcgcacactatacacatgagtgccctgggcttgccgggatatcacctccatgcggcctatgcaggggattggcagctcagtcccactgaggtgttccccactgtggtaggggatatggacagcagtggcagcctgaacgcccaggtcttgctcctcttggcagagcggctccgagctaaggctgtcttccagacgcagcaggccaagttcctgacatggcagtttgatggcgagtatcggggagatgactacacagccactctgaccctaggaaatcctgacctgattggggagtcggtgatcatggttgctcacttcctgcagagcctcactcatcggctggtgctgggaggagagctagtttatcaccggcggccaggcgaagagggggccatcttgacactggctgggaagtactcggctgtacactgggtagctacattgaatgtgggatcaggcggggcccatgcaagttactaccacagggcaaatgaacaggttcaggttggagtggagtttgaggcaaacacaaggctacaagacacaacattctcctttggttaccacctgactctgccccaggccaacatggtatttagaggcttggtggatagtaactggtgtgtaggtgctgtgctggagaagaagatgccccctctgcctgtcaccctagcccttggagccttcctcaatcactggcgcaacagattccattgtggcttcagcatcactgtgggctgaggttgtccagagccagcccccacagcagctggaacctctgagtcaggtgccctagggccaaagactaggcccctcttcagagcccaccttgctgggtgatctctaggacccaggagcagagtggtggacaggaccatgccctcctcagaactggagctgccacaggggcagttgatgaggcagaggtttgaggatcccccctctgctaccagccccagtatcaccttccccatgctcttgtggctgtggactaagggagaaggattaaggggtatggctgaattcccccggcaccccttgccctcaggcttccttcttcctttccctttggttaatcctgcatgggattagctgaccatcctgttttccatcccagagcctcccaaggctgggaaagtagggctgaagggctagatgtttggtctcaggaagtggggcccacccattcccagaaggagcttctttacctcttagccctgaggtttcctccttcccatcttctgtgcttccagagaacaactttgttcctatggtcacccccactatccccatgaccgcatgaagaggcagttattgctttagtctttcattgcaaccactgggctccctttgaacccggcccaatctttggtcccagcattttcccactccagtgtatccagggtgttccaggtgagctggggaaggaagtgagcatggcctcagctgcagatctcctggagcagcggcatcatggcagacaggccctggatgtgctggatttggtacccgtaggcctcattaatgctccggagctcagccagcaggcctagcaacttcgcatacagaaacctttggaggaagtagtggggttgccaggaaaacaggagggaaataaggcagttgggagtcttgtctctaggccctgatcccctgaactattcctcagtgaagccaggtctgaacattagagaaaatcatgctctggtatgacagactatcagaggttccaaaggtcctccagggggcctcggtctgacactgtcttctctcaccatgcagaagcggtgcatacctcagagcctggataaatcacagactattgaacctggaactggctttgaccatgaaactgtgaatggccctaacttcaagggaaatgagaaatcgaaggaattggcccaatggcgaggagaggaaaggccaagggaagagaaaagtctgcgttagtctggagaagttggactagtgaggtaatggatgtcatcaatctcaggaatgctattacccagagcctctgagctactactttgcatctgtactgaataaaaaaaaaatctggaaaaagtgagatg

SEQ ID NO: 287366 - DNA, 904 bp, Homo sapiens
atcactcaagatggctgcccccatcaagatgaccggggtgtgccggggggaaaggggcagcatgatggtctgagatggtgtagcgtcggaccatgtggaagtttctgaggctggggagccggataatggggggtggggcccgttggggggtaaaggggcaatagcgtcctttcacaggctaacctcggctcttcccagtcctctggactaaaatggggaacacattgggcctggcaccaatggggactttgccccgccggagcccccgccgagaggaacccctgcccaaccctgggagcttcgatgagctgcaccgtctatgcaaagatgtattcccagcacagatggagggagtgaagctcgttgtcaacaaggttctgagcagccatttccaggtggcgcacactatacacatgagtgccctgggcttgccgggatatcacctccatgcggcctatgcaggggattggcagctcagtcccactgaggtgttccccactgtggtaggggatatggacagcagtggcagcctgaacgcccaggtcttgctcctcttggcagagcggctccgagctaaggctgtcttccagacgcagcaggccaagttcctgacatggcagtttgatggcgagtatcggggagatgactacacagccactctgaccctaggaaatcctgacctgattggggagtcggtgatcatggttgctcacttcctgcagagcctcactcatcggctggtgctgggaggagagctagtttatcaccggcggccaggcgaagagggggccatcttgacactggctgggaagtactcgggtatggggcgaagtgaagtagtggtggtggtggggggcaatacgaagacatgtcctattggacacggtctgagaacttgcaccgg

SEQ ID NO: 287367 - DNA, 2659 bp, Homo sapiens
atcactcaagatggctgcccccatcaagatgaccggggtgtgccggggggaaaggggcagcatgatggtctgagatggtgtagcgtcggaccatgtggaagtttctgaggctggggagccggataatggggggtggggcccgttggggggtaaaggggcaatagcgtcctttcacaggctaacctcggctcttcccagtcctctggactaaaatggggaacacattgggcctggcaccaatggggactttgccccgccggagcccccgccgagaggaacccctgcccaaccctgggagcttcgatgagctgcaccgtctatgcaaagatgtattcccagcacagatggagggagtgaagctcgttgtcaacaaggttctgagcagccatttccaggtggcgcacactatacacatgagtgccctgggcttgccgggatatcacctccatgcggcctatgcaggggattggcagctcagtcccactgaggtgttccccactgtggtaggggatatggacagcagtggcagcctgaacgcccaggtcttgctcctcttggcagagcggctccgagctaaggctgtcttccagacgcagcaggccaagttcctgacatggcagtttgatggcgagtatcggggagatgactacacagccactctgaccctaggaaatcctgacctgattggggagtcggtgatcatggttgctcacttcctgcagagcctcactcatcggctggtgctgggaggagagctagtttatcaccggcggccaggcgaagagggggccatcttgacactggctgggaagtactcggctgtacactgggtagctacattgaatgtgggatcaggcggggcccatgcaagttactaccacagggcaaatgaacaggttcaggttggagtggagtttgaggcaaacacaaggctacaagacacaacattctcctttggttaccacctgactctgccccaggccaacatggtatttagaggcttggtggatagtaactggtgtgtaggtgctgtgctggagaagaagatgccccctctgcctgtcaccctagcccttggagccttcctcaatcactggcgcaacagattccattgtggcttcagcatcactgtgggctgaggttgtccagagccagcccccacagcagctggaacctctgagtcaggtgccctagggccaaagactaggcccctcttcagagcccaccttgctgggtgatctctaggacccaggagcagagtggtggacaggaccatgccctcctcagaactggagctgccacaggggcagttgatgaggcagaggtttgaggatcccccctctgctaccagccccagtatcaccttccccatgctcttgtggctgtggactaagggagaaggattaaggggtatggctgaattcccccggcaccccttgccctcaggcttccttcttcctttccctttggttaatcctgcatgggattagctgaccatcctgttttccatcccagagcctcccaaggctgggaaagtagggctgaagggctagatgtttggtctcaggaagtggggcccacccattcccagaaggagcttctttacctcttagccctgaggtttcctccttcccatcttctgtgcttccagagaacaactttgttcctatggtcacccccactatccccatgaccgcatgaagaggcagttattgctttagtctttcattgcaaccactgggctccctttgaacccggcccaatctttggtcccagcattttcccactccagtgtatccagggtgttccaggtgagctggggaaggaagtgagcatggcctcagctgcagatctcctggagcagcggcatcatggcagacaggccctggatgtgctggatttggtacccgtaggcctcattaatgctccggagctcagccagcaggcctagcaacttcgcatacagaaacctttggaggaagtagtggggttgccaggaaaacaggagggaaataaggcagttgggagtcttgtctctaggccctgatcccctgaactattcctcagtgaagccaggtctgaacattagagaaaatcatgctctggtatgacagactatcagaggttccaaaggtcctccagggggcctcggtctgacactgtcttctctcaccatgctcagttttttctgaacccagagctctgagagccgagtgtgaagaaagctccagacttggccagaactccaaccatgtggaatctgagggcctggccttctagagcaggttctagaaggtggatgtgttctatggtataaagcatcccctttctggccaaactagctcttggaggaacgagcaaaacagaagcggtgcatacctcagagcctggataaatcacagactattgaacctggaactggctttgaccatgaaactgtgaatggccctaacttcaagggaaatgagaaatcgaaggaattggcccaatggcgaggagaggaaaggccaagggaagagaaaagtctgcgttagtctggagaagttggactagtgaggtaatggatgtcatcaatctcaggaatgctattacccagagcctctgagctactactttgcatctgtactgaataaaaaaaaaatctggaaaaagtgagatg

SEQ ID NO: 287368 - DNA, 2869 bp, Homo sapiens
atcactcaagatggctgcccccatcaagatgaccggggtgtgccggggggaaaggggcagcatgatggtctgagatggtgtagcgtcggaccatgtggaagtttctgaggctggggagccggataatggggggtggggcccgttggggggtaaaggggcaatagcgtcctttcacaggctaacctcggctcttcccagtcctctggactaaaatggggaacacattgggcctggcaccaatggggactttgccccgccggagcccccgccgagaggaacccctgcccaaccctgggagcttcgatgagctgcaccgtctatgcaaagatgtattcccagcacagatggagggagtgaagctcgttgtcaacaaggttctgagcagccatttccaggtggcgcacactatacacatgagtgccctgggcttgccgggatatcacctccatgcggcctatgcaggggattggcagctcagtcccactgaggtgttccccactgtggtaggggatatggacagcagtggcagcctgaacgcccaggtcttgctcctcttggcagagcggctccgagctaaggctgtcttccagacgcagcaggccaagttcctgacatggcagtttgatggcgagtatcggggagatgactacacagccactctgaccctaggaaatcctgacctgattggggagtcggtgatcatggttgctcacttcctgcagagcctcactcatcggctggtgctgggaggagagctagtttatcaccggcggccaggcgaagagggggccatcttgacactggctgggaagtactcggctgtacactgggtagctacattgaatgtgggatcaggcggggcccatgcaagttactaccacagggcaaatgaacaggtgagacctctgatctcattccctccttgtcagcaagtcagtcatgaacttctgttcatctggacctctatcgccctgctgacctatttttcttcctaccacgctgtgtatatatttacatgcatgcctccattctgctgattccccatcaggacccttctggtcttcactgatactgatctctctttcatccttgcccatggttctcaggttcaggttggagtggagtttgaggcaaacacaaggctacaagacacaacattctcctttggttaccacctgactctgccccaggccaacatggtatttagaggcttggtggatagtaactggtgtgtaggtgctgtgctggagaagaagatgccccctctgcctgtcaccctagcccttggagccttcctcaatcactggcgcaacagattccattgtggcttcagcatcactgtgggctgaggttgtccagagccagcccccacagcagctggaacctctgagtcaggtgccctagggccaaagactaggcccctcttcagagcccaccttgctgggtgatctctaggacccaggagcagagtggtggacaggaccatgccctcctcagaactggagctgccacaggggcagttgatgaggcagaggtttgaggatcccccctctgctaccagccccagtatcaccttccccatgctcttgtggctgtggactaagggagaaggattaaggggtatggctgaattcccccggcaccccttgccctcaggcttccttcttcctttccctttggttaatcctgcatgggattagctgaccatcctgttttccatcccagagcctcccaaggctgggaaagtagggctgaagggctagatgtttggtctcaggaagtggggcccacccattcccagaaggagcttctttacctcttagccctgaggtttcctccttcccatcttctgtgcttccagagaacaactttgttcctatggtcacccccactatccccatgaccgcatgaagaggcagttattgctttagtctttcattgcaaccactgggctccctttgaacccggcccaatctttggtcccagcattttcccactccagtgtatccagggtgttccaggtgagctggggaaggaagtgagcatggcctcagctgcagatctcctggagcagcggcatcatggcagacaggccctggatgtgctggatttggtacccgtaggcctcattaatgctccggagctcagccagcaggcctagcaacttcgcatacagaaacctttggaggaagtagtggggttgccaggaaaacaggagggaaataaggcagttgggagtcttgtctctaggccctgatcccctgaactattcctcagtgaagccaggtctgaacattagagaaaatcatgctctggtatgacagactatcagaggttccaaaggtcctccagggggcctcggtctgacactgtcttctctcaccatgctcagttttttctgaacccagagctctgagagccgagtgtgaagaaagctccagacttggccagaactccaaccatgtggaatctgagggcctggccttctagagcaggttctagaaggtggatgtgttctatggtataaagcatcccctttctggccaaactagctcttggaggaacgagcaaaacagaagcggtgcatacctcagagcctggataaatcacagactattgaacctggaactggctttgaccatgaaactgtgaatggccctaacttcaagggaaatgagaaatcgaaggaattggcccaatggcgaggagaggaaaggccaagggaagagaaaagtctgcgttagtctggagaagttggactagtgaggtaatggatgtcatcaatctcaggaatgctattacccagagcctctgagctactactttgcatctgtactgaataaaaaaaaaatctggaaaaagtgagatg

SEQ ID NO: 287369 - DNA, 2464 bp, Homo sapiens
atcactcaagatggctgcccccatcaagatgaccggggtgtgccggggggaaaggggcagcatgatggtctgagatggtgtagcgtcggaccatgtggaagtttctgaggctggggagccggataatggggggtggggcccgttggggggtaaaggggcaatagcgtcctttcacaggctaacctcggctcttcccagtcctctggactaaaatggggaacacattgggcctggcaccaatggggactttgccccgccggagcccccgccgagaggaacccctgcccaaccctgggagcttcgatgagctgcaccgtctatgcaaagatgtattcccagcacagatggagggagtgaagctcgttgtcaacaaggttctgagcagccatttccagacgcagcaggccaagttcctgacatggcagtttgatggcgagtatcggggagatgactacacagccactctgaccctaggaaatcctgacctgattggggagtcggtgatcatggttgctcacttcctgcagagcctcactcatcggctggtgctgggaggagagctagtttatcaccggcggccaggcgaagagggggccatcttgacactggctgggaagtactcggctgtacactgggtagctacattgaatgtgggatcaggcggggcccatgcaagttactaccacagggcaaatgaacaggttcaggttggagtggagtttgaggcaaacacaaggctacaagacacaacattctcctttggttaccacctgactctgccccaggccaacatggtatttagaggcttggtggatagtaactggtgtgtaggtgctgtgctggagaagaagatgccccctctgcctgtcaccctagcccttggagccttcctcaatcactggcgcaacagattccattgtggcttcagcatcactgtgggctgaggttgtccagagccagcccccacagcagctggaacctctgagtcaggtgccctagggccaaagactaggcccctcttcagagcccaccttgctgggtgatctctaggacccaggagcagagtggtggacaggaccatgccctcctcagaactggagctgccacaggggcagttgatgaggcagaggtttgaggatcccccctctgctaccagccccagtatcaccttccccatgctcttgtggctgtggactaagggagaaggattaaggggtatggctgaattcccccggcaccccttgccctcaggcttccttcttcctttccctttggttaatcctgcatgggattagctgaccatcctgttttccatcccagagcctcccaaggctgggaaagtagggctgaagggctagatgtttggtctcaggaagtggggcccacccattcccagaaggagcttctttacctcttagccctgaggtttcctccttcccatcttctgtgcttccagagaacaactttgttcctatggtcacccccactatccccatgaccgcatgaagaggcagttattgctttagtctttcattgcaaccactgggctccctttgaacccggcccaatctttggtcccagcattttcccactccagtgtatccagggtgttccaggtgagctggggaaggaagtgagcatggcctcagctgcagatctcctggagcagcggcatcatggcagacaggccctggatgtgctggatttggtacccgtaggcctcattaatgctccggagctcagccagcaggcctagcaacttcgcatacagaaacctttggaggaagtagtggggttgccaggaaaacaggagggaaataaggcagttgggagtcttgtctctaggccctgatcccctgaactattcctcagtgaagccaggtctgaacattagagaaaatcatgctctggtatgacagactatcagaggttccaaaggtcctccagggggcctcggtctgacactgtcttctctcaccatgctcagttttttctgaacccagagctctgagagccgagtgtgaagaaagctccagacttggccagaactccaaccatgtggaatctgagggcctggccttctagagcaggttctagaaggtggatgtgttctatggtataaagcatcccctttctggccaaactagctcttggaggaacgagcaaaacagaagcggtgcatacctcagagcctggataaatcacagactattgaacctggaactggctttgaccatgaaactgtgaatggccctaacttcaagggaaatgagaaatcgaaggaattggcccaatggcgaggagaggaaaggccaagggaagagaaaagtctgcgttagtctggagaagttggactagtgaggtaatggatgtcatcaatctcaggaatgctattacccagagcctctgagctactactttgcatctgtactgaataaaaaaaaaatctggaaaaagtgagatg

SEQ ID NO: 287370 - DNA, 2007 bp, Homo sapiens
atcactcaagatggctgcccccatcaagatgaccggggtgtgccggggggaaaggggcagcatgatggtctgagatggtgtagcgtcggaccatgtggaagtttctgaggctggggagccggataatggggggtggggcccgttggggggtaaaggggcaatagcgtcctttcacaggctaacctcggctcttcccagtcctctggactaaaatggggaacacattgggcctggcaccaatggggactttgccccgccggagcccccgccgagaggaacccctgcccaaccctgggagcttcgatgagctgcaccgtctatgcaaagatgtattcccagcacagatggagggagtgaagctcgttgtcaacaaggttctgagcagccatttccaggtggcgcacactatacacatgagtgccctgggcttgccgggatatcacctccatgcggcctatgcaggggattggcagctcagtcccactgaggtgttccccactgtggtaggggatatggacagcagtggcagcctgaacgcccaggtcttgctcctcttggcagagcggctccgagctaaggctgtcttccagacgcagcaggccaagttcctgacatggcagtttgatggcgagtatcggggagatgactacacagccactctgaccctaggaaatcctgacctgattggggagtcggtgatcatggttgctcacttcctgcagagcctcactcatcggctggtgctgggaggagagctagtttatcaccggcggccaggcgaagagggggccatcttgacactggctgggaagtactcggctgtacactgggtagctacattgaatgtgggatcaggcggggcccatgcaagttactaccacagggcaaatgaacaggttcaggttggagtggagtttgaggcaaacacaaggctacaagacacaacattctcctttggttaccacctgactctgccccaggccaacatggtatttagaggcttggtggatagtaactggtgtgtaggtgctgtgctggagaagaagatgccccctctgcctgtcaccctagcccttggagccttcctcaatcactggcgcaacagattccattgtggcttcagcatcactgtgggctgaggttgtccagagccagcccccacagcagctggaacctctgagtcaggtgccctagggccaaagactaggcccctcttcagagcccaccttgctgggtgatctctaggacccaggagcagagtggtggacaggaccatgccctcctcagaactggagctgccacaggggcagttgatgaggcagaggtttgaggatcccccctctgctaccagccccagtatcaccttccccatgctcttgtggctgtggactaagggagaaggattaaggggtatggctgaattcccccggcaccccttgccctcaggcttccttcttcctttccctttggttaatcctgcatgggattagctgaccatcctgttttccatcccagagcctcccaaggctgggaaagtagggctgaagggctagatgtttggtctcaggaagtggggcccacccattcccagaaggagcttctttacctcttagccctgaggtttcctccttcccatcttctgtgcttccagagaacaactttgttcctatggtcacccccactatccccatgaccgcatgaagaggcagttattgctttagtctttcattgcaaccactgggctccctttgaacccggcccaatctttggtcccagcattttcccactccagtgtatccagggtgttccaggtgagcgatcccggggccttcgctgctggcccttgatgtagctttgcagagtcagtgccatctcctcttgcagctgatcaatctcatctctctgggtaactccaggtcggtcacgggctccatcttcaattgtgtagcgaagaggcccgcagaggaagttttgtgtttggagacagaaagtggtattgagtacgat

SEQ ID NO: 287371 - DNA, 517 bp, Homo sapiens
ctggagaacacagcagcatgcctgggaactgaactacaattcccagagtgcatctctaggaggattctgggaagtgtggcagaagcagcaatggtccctccagggaacggaagccgttgaacgtgaacatttggagtttcctcttttgtgctgattcctgaggactaggaaggtgccccgaaaagaattcagagacctgacaatgtccctgtattgtggaatagcttgcaggagaaaatttttttggtgctataggctgctgtcaacctatgttactaagacacgatttctacatggttgtcaatcatgcctatgtaatgaagccaccataaaaacccaaaaggacagggttcagagagcctctggatagctgaacacatggaagttcctggagggtggtgcacccagggagtcatggaagctctgcaccctccccccacatacctgacctaaatgcatctcttcatttgtatccttcgtaatatcctatataataaaccagtaaacatcaaaaaat

SEQ ID NO: 287372 - DNA, 837 bp, Homo sapiens
tgaaggagggaaaattattttttagaaagcaaactataaagcaggtcagtgagaccttcaaagctgtattcccgtggttcctcagttttccatatttccctgtcccatggaggtccacagtcgtggagaaacggactctaaacacaggcgaagtatcactcggtcgcccaggctggagtttcctcttttgtgctgattcctgaggactaggaaggtgccccgaaaagaattcagagtgagtacagtgaaacagaaacctgctcagcttctaagtgcaggaaggacttcacagggaggcatgatcagaacttgaaaaaaggtcgtggtcacagcattttaacattttagcttaatctcttcctttttgcagaaaccagggatataaccatagttttgcctcataactgtggagctacatcagtaaccacagctcatcattttctgatacttttttggagagtcatttaaaaatggaacttgccaacctctcacattgtgccttaatttttatttttttttaaaggagggaaaattattttttagaaagcaaactataaagcaggtcagtgagaccttcaaagctgtattcccgtggttcctcagttttccatatttccctgtcccatggaggtccacagtcgtggagaaacggactctaaacacaggcgaagtatcacttggtcgcccaggctggagtgcagtgacacgatctccactcactgcaagctccgcctcctgggttcatgccattctcctgcctcatactccctagtagctgggactacaggcgcccgccaccacgcccagccacttttttttgtatttttaacagagacg

SEQ ID NO: 287373 - DNA, 402 bp, Homo sapiens
gatgcagcgacagcattctcaaagatgaatgctatacaggtaactaagggtggttttgtaatggtttgattatttcccaaatacaggtatttatttgaactgaaggaagatgatgatgcatgtaaaaaagcccagcaaacaggagcgttttacctctttcatagtctggctcctctgcttcagacttcagcacatcaatacctggccccccggcacagcctgttaggtaagtccagagtggaccagtggcgttgaccagcctgtggccactacgcagaattcagcccataatgaattctaagaaagatccttgaactttggagtctagatttttcagaaagcttttgagtctctggcgtgaatcgccgcccagtgaatccgttatcatggtgaaccttttcc

SEQ ID NO: 287374 - DNA, 2188 bp, Homo sapiens
ctggagaacacagcagcatgcctgggaactgaactacaattcccagagtgcatctctaggaggattctgggaagtgtggcagaagcagcaatggtccctccagggaacggaagccgttgaacgtgaacatttggagtttcctcttttgtgctgattcctgaggactaggaaggtgccccgaaaagaattcagagacctgacaatgtccctgtattgtggaatagcttgcaggagaaaatttttttggtgctataggctgctgtcaacctatgttactaagacacggtatttatttgaactgaaggaagatgatgatgcatgtaaaaaagcccagcaaacaggagcgttttacctctttcatagtctggctcctctgcttcagacttcagcacatcaatacctggccccccggcacagcctgttagagttggaaaggctcctgggtaaatttggacaggatgcacaaagaatagaagattctgtgctgattggatgctctgagcagcaggaagcatggtttgctctggatctaggtctggatagctccttttccataagtgcctccttacacaaacctgaaatggagacagagctcaaggggtctttcattgagctgagaaaggcactctttcaactcaatgcaagggatgcctccttgctgtccacggctcaagctcttctccgctggcatgatgctcatcagttctgcagcagaagtgggcagcccaccaagaagaacgtggctggcagcaagcgtgtgtgcccttccaataatataatctattatccacagatggctcctgtggcgatcacgctggtgtcagatgggacccgatgcctgcttgcccgccaaagctcctttcccaagggaatgtattctgccttggcaggtttttgtgatataggtgaaagtgtggaagagaccatccgccgagaagttgcagaagaggtgggattggaggtggaaagcctgcagtactatgcatcccagcattggcccttccctagtggctcactcatgattgcttgccatgcaactgtgaaaccagggcagacagaaatccaggtgaacttgagagaattagagacagctgcctggttcagtcatgatgaggtagccacagccctgaagagaaagggcccctatactcagcaacagaatgggactttcccattctggctgccccctaagttagccatctcccaccaactgattaaggagtgggtggaaaaacagacctgttcttccctgcctgcttagcccggatcaagtcacttagatcgctccttggtattcctgagggacaaactagagatcagttgacaaaggagaagtgacaaaagataagctgcagaaggacctcagaagggcagagcaaagggtgagcctacagttaagacacttctatcagcagtgttaatggaagaaattcctaccaatgggcaatcaaaaaagccagtgtgagaagaaaactgatgagctgtcaactgtcaaaaatcagggggaagggggaagcattagtttggatgtaggcccttgttcagtcattttctctaaggccttggaagcaaacatcttctggcatatggcttgttaatgttgtgtttacactaactgccaaaatgtgcctgttgtaagtttggttaaaacttttatcttagtattgaaaatatatagcaagttttaagtcattactgagttacttgttacccttacagaattaagaaaaatagcacagtatgacattttaaaattcatgtacaggtgcattctagttacatgaacatgctagttaaataaaagtcacaattaagtcattatgactcagagtactttataataaatcagatgccctgaggctctgttgaggaagtagaatcccaatgggactccagacagtaaatctttttcgctgttttcagctctgtcacatgctcagtttgtgacccagggaaaagactattgctttgccatgcctgttttcctaaataaaacagttgctggcatttgcacatccacaacgtgttgattaacaaagggattggtggagataaacagatgccaaacctgacctatttcttaaactttatggaataaactaaatttaggatttctcatcattcatatatgatgccataagggagaagagtttatttggggaaaataaaagaaatttccacacctttg

SEQ ID NO: 287375 - DNA, 2081 bp, Homo sapiens
tcaatgacttaataagttaactatcatgcatcttactaactaggggatattttcctttcatgatacagtcatagagtaatacaatgttatacaagaattccttctttggtctaaagtcctcagactgctaatgagaaaacaggcctggagaggttaaatggttagaccaaggttacatagctaattagctgcagttggaagccaagtatacccactttaagctgaagtagatgattttctgtgagtctaatatggctgtagtgatttaatagaaacccttgtgttttgcttttctcccttcccctttctgtttcttagagttggaaaggctcctgggtaaatttggacaggatgcacaaagaatagaagattctgtgctgattggatgctctgagcagcaggaagcatggtttgctctggatctaggtctggatagctccttttccataagtgcctccttacacaaacctgaaatggagacagagctcaaggggtctttcattgagctgagaaaggcactctttcaactcaatgcaagggatgcctccttgctgtccacggctcaagctcttctccgctggcatgatgctcatcagttctgcagcagaagtgggcagcccaccaagaagaacgtggctggcagcaagcgtgtgtgcccttccaataatataatctattatccacagatggctcctgtggcgatcacgctggtgtcagatgggacccgatgcctgcttgcccgccaaagctcctttcccaagggaatgtattctgccttggcaggtttttgtgatataggtgaaagtgtggaagagaccatccgccgagaagttgcagaagaggtgggattggaggtggaaagcctgcagtactatgcatcccagcattggcccttccctagtggctcactcatgattgcttgccatgcaactgtgaaaccagggcagacagaaatccaggtgaacttgagagaattagagacagctgcctggttcagtcatgatgaggtagccacagccctgaagagaaagggcccctatactcagcaacagaatgggactttcccattctggctgccccctaagttagccatctcccaccaactgattaaggagtgggtggaaaaacagacctgttcttccctgcctgcttagcccggatcaagtcacttagatcgctccttggtattcctgagggacaaactagagatcagttgacaaaggagaagtgacaaaagataagctgcagaaggacctcagaagggcagagcaaagggtgagcctacagttaagacacttctatcagcagtgttaatggaagaaattcctaccaatgggcaatcaaaaaagccagtgtgagaagaaaactgatgagctgtcaactgtcaaaaatcagggggaagggggaagcattagtttggatgtaggcccttgttcagtcattttctctaaggccttggaagcaaacatcttctggcatatggcttgttaatgttgtgtttacactaactgccaaaatgtgcctgttgtaagtttggttaaaacttttatcttagtattgaaaatatatagcaagttttaagtcattactgagttacttgttacccttacagaattaagaaaaatagcacagtatgacattttaaaattcatgtacaggtgcattctagttacatgaacatgctagttaaataaaagtcacaattaagtcattatgactcagagtactttataataaatcagatgccctgaggctctgttgaggaagtagaatcccaatgggactccagacagtaaatctttttcgctgttttcagctctgtcacatgctcagtttgtgacccagggaaaagactattgctttgccatgcctgttttcctaaataaaacagttgctggcatttgcacatccacaacgtgttgattaacaaagggattggtggagataaacagatgccaaacctgacctatttcttaaactttatggaataaactaaatttaggatttctcatcattcatatatgatgccataagggagaagagtttatttggggaaaataaaagaaatttccacacctttg

SEQ ID NO: 287376 - DNA, 2076 bp, Homo sapiens
ctggagaacacagcagcatgcctgggaactgaactacaattcccagagtgcatctctaggaggattctgggaagtgtggcagaagcagcaatggtccctccagggaacggaagccgttgaacgtgaacatttggagtttcctcttttgtgctgattcctgaggactaggaaggtgccccgaaaagaattcagagacctgacaatgtccctgtattgtggaatagcttgcaggagaaaatttttttggtgctataggctgctgtcaacctatgttactaagacacggtatttatttgaactgaaggaagatgatgatgcatgtaaaaaagcccagcaaacaggagcgttttacctctttcatagtctggctcctctgcttcagacttcagcacatcaatacctggccccccggcacagcctgttagagttggaaaggctcctgggtaaatttggacaggatgcacaaagaatagaagattctgtgctgattggatgctctgagcagcaggaagcatggtttgctctggatctaggtctggatagctccttttccataagtgcctccttacacaaacctgaaatggagacagagctcaaggggtctttcattgagctgagaaaggcactctttcaactcaatgcaagggatgcctccttgctgtccacggctcaagctcttctccgctggcatgatgctcatcagttctgcagcagaagtgggcagcccaccaagaagaacgtggctggcagcaagcgtgtgtgcccttccaataatataatctattatccacaggtgaaagtgtggaagagaccatccgccgagaagttgcagaagaggtgggattggaggtggaaagcctgcagtactatgcatcccagcattggcccttccctagtggctcactcatgattgcttgccatgcaactgtgaaaccagggcagacagaaatccaggtgaacttgagagaattagagacagctgcctggttcagtcatgatgaggtagccacagccctgaagagaaagggcccctatactcagcaacagaatgggactttcccattctggctgccccctaagttagccatctcccaccaactgattaaggagtgggtggaaaaacagacctgttcttccctgcctgcttagcccggatcaagtcacttagatcgctccttggtattcctgagggacaaactagagatcagttgacaaaggagaagtgacaaaagataagctgcagaaggacctcagaagggcagagcaaagggtgagcctacagttaagacacttctatcagcagtgttaatggaagaaattcctaccaatgggcaatcaaaaaagccagtgtgagaagaaaactgatgagctgtcaactgtcaaaaatcagggggaagggggaagcattagtttggatgtaggcccttgttcagtcattttctctaaggccttggaagcaaacatcttctggcatatggcttgttaatgttgtgtttacactaactgccaaaatgtgcctgttgtaagtttggttaaaacttttatcttagtattgaaaatatatagcaagttttaagtcattactgagttacttgttacccttacagaattaagaaaaatagcacagtatgacattttaaaattcatgtacaggtgcattctagttacatgaacatgctagttaaataaaagtcacaattaagtcattatgactcagagtactttataataaatcagatgccctgaggctctgttgaggaagtagaatcccaatgggactccagacagtaaatctttttcgctgttttcagctctgtcacatgctcagtttgtgacccagggaaaagactattgctttgccatgcctgttttcctaaataaaacagttgctggcatttgcacatccacaacgtgttgattaacaaagggattggtggagataaacagatgccaaacctgacctatttcttaaactttatggaataaactaaatttaggatttctcatcattcatatatgatgccataagggagaagagtttatttggggaaaataaaagaaatttccacacctttg

SEQ ID NO: 287377 - DNA, 1404 bp, Homo sapiens
ctggagaacacagcagcatgcctgggaactgaactacaattcccagagtgcatctctaggaggattctgggaagtgtggcagaagcagcaatggtccctccagggaacggaagccgttgaacgtgaacatttggagtttcctcttttgtgctgattcctgaggactaggaaggtgccccgaaaagaattcagagacctgacaatgtccctgtattgtggaatagcttgcaggagaaaatttttttggtgctataggctgctgtcaacctatgttactaagacacggtatttatttgaactgaaggaagatgatgatgcatgtaaaaaagcccagcaaacaggagcgttttacctctttcatagtctggctcctctgcttcagacttcagcacatcaatacctggccccccggcacagcctgttagagttggaaaggctcctgggtaaatttggacaggatgcacaaagaatagaagattctgtgctgattggatgctctgagcagcaggaagcatggtttgctctggatctaggtctggatagctccttttccataagtgcctccttacacaaacctgaaatggagacagagctcaaggggtctttcattgagctgagaaaggcactctttcaactcaatgcaagggatgcctccttgctgtccacggctcaagctcttctccgctggcatgatgctcatcagttctgcagcagaagtgggcagcccaccaagaagaacgtggctggcagcaagcgtgtgtgcccttccaataatataatctattatccacagatggctcctgtggcgatcacgctggtgtcagatgggacccgatgcctgcttgcccgccaaagctcctttcccaagggaatgtattctgccttggcaggtttttgtgatataggtgaaagtgtggaagagaccatccgccgagaagttgcagaagaggtgggattggaggtggaaagcctgcagtactatgcatcccagcattggcccttccctagtggctcactcatgattgcttgccatgcaactgtgaaaccagggcagacagaagtaagttctcatcttcccttatactgtgatatttcttttgcttcatccaacctgctcatcagcaagtacttattaagcacttgtctagtccagcatcatctagattacataaacatgtgtaaaatatgatttagggctgagcacggtggctcatgcctgtaatcccaacactttgggaggctgatgtgggcggatcacttgaggtcaggagttcaagaccagcctggccaacatggcaaaactccatctctactaaaaatacaaaaattaaggccgggtgcgatggctcatgcctgtaatcccagctttttttttttttttttttttttaaaaggggggttggg

SEQ ID NO: 287378 - DNA, 233 bp, Homo sapiens
gacctgacaatgtccctgtattgtggaatagcttgcaggagaaaatttttttggtgctataggctgctgtcaacctatgttactaagacacggtgagttttagccaacctgagctttgattattctgtttggcccattaaactattgtgatattatgattttatatatatatttaggtttatgattattatatatacattatatattactatatttgtgtgtgtgtatatgtg

SEQ ID NO: 287379 - DNA, 1793 bp, Homo sapiens
ccgtccgcctccggccaacacgaaccgctcggaggactaggaaggtgccccgaaaagaattcagagacctgacaatgtccctgtattgtggaatagcttgcaggagaaaatttttttggtgctataggctgctgtcaacctatgttactaagacacggtatttatttgaactgaaggaagatgatgatgcatgtaaaaaagcccagcaaacaggagcgttttacctctttcatagtctggctcctctgcttcagacttcagcacatcaatacctggccccccggcacagcctgttagagttggaaaggctcctgggtaaatttggacaggatgcacaaagaatagaagattctgtgctgattggatgctctgagcagcaggaagcatggtttgctctggatctaggtctggatagctccttttccataagtgcctccttacacaaacctgaaatggagacagagctcaaggggtctttcattgagctgagaaaggcactctttcaactcaatgcaagggatgcctccttgctgtccacggctcaagctcttctccgctggcatgatgctcatcagttctgcagcagaagtgggcagcccaccaagaagaacgtggctggcagcaagcgtgtgtgcccttccaataatataatctattatccacagatccaggtgaacttgagagaattagagacagctgcctggttcagtcatgatgaggtagccacagccctgaagagaaagggcccctatactcagcaacagaatgggactttcccattctggctgccccctaagttagccatctcccaccaactgattaaggagtgggtggaaaaacagacctgttcttccctgcctgcttagcccggatcaagtcacttagatcgctccttggtattcctgagggacaaactagagatcagttgacaaaggagaagtgacaaaagataagctgcagaaggacctcagaagggcagagcaaagggtgagcctacagttaagacacttctatcagcagtgttaatggaagaaattcctaccaatgggcaatcaaaaaagccagtgtgagaagaaaactgatgagctgtcaactgtcaaaaatcagggggaagggggaagcattagtttggatgtaggcccttgttcagtcattttctctaaggccttggaagcaaacatcttctggcatatggcttgttaatgttgtgtttacactaactgccaaaatgtgcctgttgtaagtttggttaaaacttttatcttagtattgaaaatatatagcaagttttaagtcattactgagttacttgttacccttacagaattaagaaaaatagcacagtatgacattttaaaattcatgtacaggtgcattctagttacatgaacatgctagttaaataaaagtcacaattaagtcattatgactcagagtactttataataaatcagatgccctgaggctctgttgaggaagtagaatcccaatgggactccagacagtaaatctttttcgctgttttcagctctgtcacatgctcagtttgtgacccagggaaaagactattgctttgccatgcctgttttcctaaataaaacagttgctggcatttgcacatccacaacgtgttgattaacaaagggattggtggagataaacagatgccaaacctgacctatttcttaaactttatggaataaactaaatttaggatttctcatcattcatatatgatgccataagggagaagagtttatttggggaaaataaaagaaatttccacacctttg

SEQ ID NO: 287380 - DNA, 1368 bp, Homo sapiens
ccgggaaggagagctctctgggggggtctttaggcccaggggtggctcactgcgttccctccccaagcctgccgcaccaacccgtgcctccatgggggtcgctgcctagaggtggagggccaccgcctgtgccactgcccggtgggctacaccggacccttctgcgacgtgggaacccggacaacgacatccgcccgtggtgcttcgtgctgaaccgcgaccggctgagctgggagtactgcgacctggcacagtgccagaccccaacccaggcggcgcctccgaccccggtgtcccctaggcttcatgtcccactcatgcccgcgcagccggcaccgccgaagcctcagcccacgacccggaccccgcctcagtcccagaccccgggagccttgccggcgaagcgggagcagccgccttccctgaccaggaacggcccactgagctgcgggcagcggctccgcaagagtctgtcttcgatgacccgcgtcgttggcgggctggtggcgctacgcggggcgcacccctacatcgccgcgctgtactggggccacagtttctgcgccggcagcctcatcgccccctgctgggtgctgacggccgctcactgcctgcaggaccggcccgcacccgaggatctgacggtggtgctcggccaggaacgccgtaaccacagctgtgagccgtgccagacgttggccgtgcgctcctaccgcttgcacgaggccttctcgcccgtcagctaccagcacgacctggctctgttgcgccttcaggaggatgcggacggcagctgcgcgctcctgtcgccttacgttcagccggtgtgcctgccaagcggcgccgcgcgaccctccgagaccacgctctgccaggtggccggctggggccaccagttcgagggggcggaggaatatgccagcttcctgcaggaggcgcaggtaccgttcctctccctggagcgctgctcagccccggacgtgcacggatcctccatcctccccggcatgctctgcgcagggttcctcgagggcggcaccgatgcgtgccagggtgattccggaggcccgctggtgtgtgaggaccaagctgcagagcgccggctcaccctgcaaggcatcatcagctggggatcgggctgtggtgaccgcaacaagccaggcgtctacaccgatgtggcctactacctggcctggatccgggagcacaccgtttcctgattgctcagggactcatctttccctccttggtgattccgcagtgagagagtggctggggcatggaaggcaagattgtgtcccattcccccagtgcggccagctccgcgccaggatggcgcaggaactcaataaagtgctttgaaaatgc

SEQ ID NO: 287381 - DNA, 1263 bp, Homo sapiens
ggtgacccctccgccccagggctccgggctcccggcgctctaacggcgccccgtcgtgtggctacaggaacccggacaacgacatccgcccgtggtgcttcgtgctgaaccgcgaccggctgagctgggagtactgcgacctggcacagtgccagaccccaacccaggcggcgcctccgaccccggtgtcccctaggcttcatgtcccactcatgcccgcgcagccggcaccgccgaagcctcagcccacgacccggaccccgcctcagtcccagaccccgggagccttgccggcgaagcgggagcagccgccttccctgaccaggaacggcccactgagctgcgggcagcggctccgcaagagtctgtcttcgatgacccgcgtcgttggcgggctggtggcgctacgcggggcgcacccctacatcgccgcgctgtactggggccacagtttctgcgccggcagcctcatcgccccctgctgggtgctgacggccgctcactgcctgcaggaccggcccgcacccgaggatctgacggtggtgctcggccaggaacgccgtaaccacagctgtgagccgtgccagacgttggccgtgcgctcctaccgcttgcacgaggccttctcgcccgtcagctaccagcacgacctggctctgttgcgccttcaggaggatgcggacggcagctgcgcgctcctgtcgccttacgttcagccggtgtgcctgccaagcggcgccgcgcgaccctccgagaccacgctctgccaggtggccggctggggccaccagttcgagggggcggaggaatatgccagcttcctgcaggaggcgcaggtaccgttcctctccctggagcgctgctcagccccggacgtgcacggatcctccatcctccccggcatgctctgcgcagggttcctcgagggcggcaccgatgcgtgccagggtgattccggaggcccgctggtgtgtgaggaccaagctgcagagcgccggctcaccctgcaaggcatcatcagctggggatcgggctgtggtgaccgcaacaagccaggcgtctacaccgatgtggcctactacctggcctggatccgggagcacaccgtttcctgattgctcagggactcatctttccctccttggtgattccgcagtgagagagtggctggggcatggaaggcaagattgtgtcccattcccccagtgcggccagctccgcgccaggatggcgcaggaactcaataaagtgctttgaaaatgc

SEQ ID NO: 287382 - DNA, 2391 bp, Homo sapiens
ctattgatctggactcctggataggcagctggaccaacggacggacgccatgagggctctgctgctcctggggttcctgctggtgagcttggagtcaacactttcgattccaccttgggaagcccccaaggagcataagtacaaagctgaagagcacacagtcgttctcactgtcaccggggagccctgccacttccccttccagtaccaccggcagctgtaccacaaatgtacccacaagggccggccaggccctcagccctggtgtgctaccacccccaactttgatcaggaccagcgatggggatactgtttggagcccaagaaagtgaaagaccactgcagcaaacacagcccctgccagaaaggagggacctgtgtgaacatgccaagcggcccccactgtctctgtccacaacacctcactggaaaccactgccagaaagagaagtgctttgagcctcagcttctccggtttttccacaagaatgagatatggtatagaactgagcaagcagctgtggccagatgccagtgcaagggtcctgatgcccactgccagcggctggccagccaggcctgccgcaccaacccgtgcctccatgggggtcgctgcctagaggtggagggccaccgcctgtgccactgcccggtgggctacaccggacccttctgcgacgtggacaccaaggcaagctgctatgatggccgcgggctcagctaccgcggcctggccaggaccacgctctcgggtgcgccctgtcagccgtgggcctcggaggccacctaccggaacgtgactgccgagcaagcgcggaactggggactgggcggccacgccttctgccggaacccggacaacgacatccgcccgtggtgcttcgtgctgaaccgcgaccggctgagctgggagtactgcgacctggcacagtgccagaccccaacccaggcggcgcctccgaccccggtgtcccctaggcttcatgtcccactcatgcccgcgcagccggcaccgccgaagcctcagcccacgacccggaccccgcctcagtcccagaccccgggaggttaggaagtgggggggggaaggaggagccgagagggcgccgggcgagctagattccggccagccggccgcgggctctccgtcctcagcccctgctcctccacagccttgccggcgaagcgggagcagccgccttccctgaccaggaacggcccactgagctgcgggcagcggctccgcaagagtctgtcttcgatgacccgcgtcgttggcgggctggtggcgctacgcggggcgcacccctacatcgccgcgctgtactggggccacagtttctgcgccggcagcctcatcgccccctgctgggtgctgacggccgctcactgcctgcaggaccggcgagtacccgcccgcccagagccgccccaggggccgcggctcctccgtctcccagcgcagcttccacgctgcacccgaacccgtgccctaccttctcccgccccacccttctttccacgcccctccggagctcccggggaggaagctggaacacgggattggggttcgggagcagggggcttccccagaacgcttgtggccaggtctgagagcgctgcctctcccctaccctccccgcaggcccgcacccgaggatctgacggtggtgctcggccaggaacgccgtaaccacagctgtgagccgtgccagacgttggccgtgcgctcctaccgcttgcacgaggccttctcgcccgtcagctaccagcacgacctggctctgttgcgccttcaggaggatgcggacggcagctgcgcgctcctgtcgccttacgttcagccggtgtgcctgccaagcggcgccgcgcgaccctccgagaccacgctctgccaggtggccggctggggccaccagttcgagggggcggaggaatatgccagcttcctgcaggaggcgcaggtaccgttcctctccctggagcgctgctcagccccggacgtgcacggatcctccatcctccccggcatgctctgcgcagggttcctcgagggcggcaccgatgcgtgccagggtgattccggaggcccgctggtgtgtgaggaccaagctgcagagcgccggctcaccctgcaaggcatcatcagctggggatcgggctgtggtgaccgcaacaagccaggcgtctacaccgatgtggcctactacctggcctggatccgggagcacaccgtttcctgattgctcagggactcatctttccctccttggtgattccgcagtgagagagtggctggggcatggaaggcaagattgtgtcccattcccccagtgcggccagctccgcgccaggatggcgcaggaactcaataaagtgctttgaaaatgc

SEQ ID NO: 287383 - DNA, 3029 bp, Homo sapiens
ctattgatctggactcctggataggcagctggaccaacggacggacgccatgagggctctgctgctcctggggttcctgctggtgagcttggagtcaacactttcgattccaccttgggaagcccccaaggagcataagtacaaagctgaagagcacacagtcgttctcactgtcaccggggagccctgccacttccccttccagtaccaccggcagctgtaccacaaatgtacccacaagggccggccaggccctcagccctggtgtgctaccacccccaactttgatcaggaccagcgatggggatactgtttggagcccaagaaagtgaaagaccactgcagcaaacacagcccctgccagaaaggagggacctgtgtgaacatgccaagcggcccccactgtctctgtccacaacacctcactggaaaccactgccagaaagagaagtgctttgagcctcagcttctccggtttttccacaagaatgagatatggtatagaactgagcaagcagctgtggccagatgccagtgcaagggtcctgatgcccactgccagcggctggccagccaggcctgccgcaccaacccgtgcctccatgggggtcgctgcctagaggtggagggccaccgcctgtgccactgcccggtgggctacaccggacccttctgcgacgtggacaccaaggcaagctgctatgatggccgcgggctcagctaccgcggcctggccaggaccacgctctcgggtgcgccctgtcagccgtgggcctcggaggccacctaccggaacgtgactgccgagcaagcgcggaactggggactgggcggccacgccttctgccggaacccggacaacgacatccgcccgtggtgcttcgtgctgaaccgcgaccggctgagctgggagtactgcgacctggcacagtgccagaccccaacccaggcggcgcctccgaccccggtgtcccctaggcttcatgtcccactcatgcccgcgcagccggcaccgccgaagcctcagcccacgacccggaccccgcctcagtcccagaccccgggaggttaggaagtgggggggggaaggaggagccgagagggcgccgggcgagctagattccggccagccggccgcgggctctccgtcctcagcccctgctcctccacagccttgccggcgaagcgggagcagccgccttccctgaccaggaacggcccactgagctgcgggcagcggctccgcaagagtctgtcttcgatgacccgcgtcgttggcgggctggtggcgctacgcggggcgcacccctacatcgccgcgctgtactggggccacagtttctgcgccggcagcctcatcgccccctgctgggtgctgacggccgctcactgcctgcaggaccggcgagtacccgcccgcccagagccgccccaggggccgcggctcctccgtctcccagcgcagcttccacgctgcacccgaacccgtgccctaccttctcccgccccacccttctttccacgcccctccggagctcccggggaggaagctggaacacgggattggggttcgggagcagggggcttccccagaacgcttgtggccaggtctgagagcgctgcctctcccctaccctccccgcaggcccgcacccgaggatctgacggtggtgctcggccaggaacgccgtaaccacagctgtgagccgtgccagacgttggccgtgcgctcctaccgcttgcacgaggccttctcgcccgtcagctaccagcacgacctgggtgcgtgggggcgccccgcggggacgggaagagagcttggggccccggcgtccccgcctcacgctcctctccgcccgggttagctctgttgcgccttcaggaggatgcggacggcagctgcgcgctcctgtcgccttacgttcagccggtgtgcctgccaagcggcgccgcgcgaccctccgagaccacgctctgccaggtggccggctggggccaccagttcgagggtaggcacaactgctaggggcaggggtaggggaggagacctttgatcactgggttaggcggaagaagcccgcgactttggtatcgttccgggtgcctacagaatgggtggcgctgacctgatgggttgtgagaatgtgtaggtgaatcccaggtagaatcccagggcctgggattcactgctgggatccccaaatctcctggggatacagggagaatcgaacttgctcttggttccctctgggcgccgggctgcaaaggccaactaggacgctggccccgcgctccgggctagtgtgggagccaggttctgcgactctggatgggtggtgggggaggggtttctgtttccgctccgcccattcaaatcctggcttttctctggacctcagcctccttgcctatgaaattgaattaatggcacctcctccccttcgggcttgctgcgagagaggaagggcatgagtgggtttacaagcgcctggagcagctttgtccatcgtccgggcggcaagcgttgtcagatggggtgtgaagaaggcgctctgtgttcgcaggggcggaggaatatgccagcttcctgcaggaggcgcaggtaccgttcctctccctggagcgctgctcagccccggacgtgcacggatcctccatcctccccggcatgctctgcgcagggttcctcgagggcggcaccgatgcgtgccagggtgattccggaggcccgctggtgtgtgaggaccaagctgcagagcgccggctcaccctgcaaggcatcatcagctggggatcgggctgtggtgaccgcaacaagccaggcgtctacaccgatgtggcctactacctggcctggatccgggagcacaccgtttcctgattgctcagggactcatctttccctccttggtgattccgcagtgagagagtggctggggcatggaaggcaagattgtgtcccattcccccagtgcggccagctccgcgccaggatggcgcaggaactcaataaagtgctttgaaaatgc

SEQ ID NO: 287384 - DNA, 1504 bp, Homo sapiens
ggtgacccctccgccccagggctccgggctcccggcgctctaacggcgccccgtcgtgtggctacaggaacccggacaacgacatccgcccgtggtgcttcgtgctgaaccgcgaccggctgagctgggagtactgcgacctggcacagtgccagaccccaacccaggcggcgcctccgaccccggtgtcccctaggcttcatgtcccactcatgcccgcgcagccggcaccgccgaagcctcagcccacgacccggaccccgcctcagtcccagaccccgggagccttgccggcgaagcgggagcagccgccttccctgaccaggaacggcccactgagctgcgggcagcggctccgcaagagtctgtcttcgatgacccgcgtcgttggcgggctggtggcgctacgcggggcgcacccctacatcgccgcgctgtactggggccacagtttctgcgccggcagcctcatcgccccctgctgggtgctgacggccgctcactgcctgcaggaccggcgagtacccgcccgcccagagccgccccaggggccgcggctcctccgtctcccagcgcagcttccacgctgcacccgaacccgtgccctaccttctcccgccccacccttctttccacgcccctccggagctcccggggaggaagctggaacacgggattggggttcgggagcagggggcttccccagaacgcttgtggccaggtctgagagcgctgcctctcccctaccctccccgcaggcccgcacccgaggatctgacggtggtgctcggccaggaacgccgtaaccacagctgtgagccgtgccagacgttggccgtgcgctcctaccgcttgcacgaggccttctcgcccgtcagctaccagcacgacctggctctgttgcgccttcaggaggatgcggacggcagctgcgcgctcctgtcgccttacgttcagccggtgtgcctgccaagcggcgccgcgcgaccctccgagaccacgctctgccaggtggccggctggggccaccagttcgagggggcggaggaatatgccagcttcctgcaggaggcgcaggtaccgttcctctccctggagcgctgctcagccccggacgtgcacggatcctccatcctccccggcatgctctgcgcagggttcctcgagggcggcaccgatgcgtgccagggtgattccggaggcccgctggtgtgtgaggaccaagctgcagagcgccggctcaccctgcaaggcatcatcagctggggatcgggctgtggtgaccgcaacaagccaggcgtctacaccgatgtggcctactacctggcctggatccgggagcacaccgtttcctgattgctcagggactcatctttccctccttggtgattccgcagtgagagagtggctggggcatggaaggcaagattgtgtcccattcccccagtgcggccagctccgcgccaggatggcgcaggaactcaataaagtgctttgaaaatgc

SEQ ID NO: 287385 - DNA, 3359 bp, Homo sapiens
ctattgatctggactcctggataggcagctggaccaacggacggacgccatgagggctctgctgctcctggggttcctgctggtgagcttggagtcaacactttcgattccaccttgggaagcccccaaggagcataagtacaaagctgaagagcacacagtcgttctcactgtcaccggggagccctgccacttccccttccagtaccaccggcagctgtaccacaaatgtacccacaagggccggccaggccctcagccctggtgtgctaccacccccaactttgatcaggaccagcgatggggatactgtttggagcccaagaaagtgaaagaccactgcagcaaacacagcccctgccagaaaggagggacctgtgtgaacatgccaagcggcccccactgtctctgtccacaacacctcactggaaaccactgccagaaagagaagtgctttgagcctcagcttctccggtttttccacaagaatgagatatggtatagaactgagcaagcagctgtggccagatgccagtgcaagggtcctgatgcccactgccagcggctggccagccaggcctgccgcaccaacccgtgcctccatgggggtcgctgcctagaggtggagggccaccgcctgtgccactgcccggtgggctacaccggacccttctgcgacgtggacaccaaggcaagctgctatgatggccgcgggctcagctaccgcggcctggccaggaccacgctctcgggtgcgccctgtcagccgtgggcctcggaggccacctaccggaacgtgactgccgagcaagcgcggaactggggactgggcggccacgccttctgccggaacccggacaacgacatccgcccgtggtgcttcgtgctgaaccgcgaccggctgagctgggagtactgcgacctggcacagtgccagaccccaacccaggcggcgcctccgaccccggtgtcccctaggcttcatgtcccactcatgcccgcgcagccggcaccgccgaagcctcagcccacgacccggaccccgcctcagtcccagaccccgggaggttaggaagtgggggggggaaggaggagccgagagggcgccgggcgagctagattccggccagccggccgcgggctctccgtcctcagcccctgctcctccacagccttgccggcgaagcgggagcagccgccttccctgaccaggaacggcccactgagctgcgggcagcggctccgcaagagtctgtcttcgatgacccgcgtcgttggcgggctggtggcgctacgcggggcgcacccctacatcgccgcgctgtactggggccacagtttctgcgccggcagcctcatcgccccctgctgggtgctgacggccgctcactgcctgcaggaccggcgagtacccgcccgcccagagccgccccaggggccgcggctcctccgtctcccagcgcagcttccacgctgcacccgaacccgtgccctaccttctcccgccccacccttctttccacgcccctccggagctcccggggaggaagctggaacacgggattggggttcgggagcagggggcttccccagaacgcttgtggccaggtctgagagcgctgcctctcccctaccctccccgcaggcccgcacccgaggatctgacggtggtgctcggccaggaacgccgtaaccacagctgtgagccgtgccagacgttggccgtgcgctcctaccgcttgcacgaggccttctcgcccgtcagctaccagcacgacctgggtgcgtgggggcgccccgcggggacgggaagagagcttggggccccggcgtccccgcctcacgctcctctccgcccgggttagctctgttgcgccttcaggaggatgcggacggcagctgcgcgctcctgtcgccttacgttcagccggtgtgcctgccaagcggcgccgcgcgaccctccgagaccacgctctgccaggtggccggctggggccaccagttcgagggtaggcacaactgctaggggcaggggtaggggaggagacctttgatcactgggttaggcggaagaagcccgcgactttggtatcgttccgggtgcctacagaatgggtggcgctgacctgatgggttgtgagaatgtgtaggtgaatcccaggtagaatcccagggcctgggattcactgctgggatccccaaatctcctggggatacagggagaatcgaacttgctcttggttccctctgggcgccgggctgcaaaggccaactaggacgctggccccgcgctccgggctagtgtgggagccaggttctgcgactctggatgggtggtgggggaggggtttctgtttccgctccgcccattcaaatcctggcttttctctggacctcagcctccttgcctatgaaattgaattaatggcacctcctccccttcgggcttgctgcgagagaggaagggcatgagtgggtttacaagcgcctggagcagctttgtccatcgtccgggcggcaagcgttgtcagatggggtgtgaagaaggcgctctgtgttcgcaggggcggaggaatatgccagcttcctgcaggaggcgcaggtaccgttcctctccctggagcgctgctcagccccggacgtgcacggatcctccatcctccccggcatgctctgcgcagggttcctcgagggcggcaccgatgcgtgccaggtgagctcttagcccggttggcgcccttccccgaggccgtcaggcacaaatctcaggtccacagcgctgagctgcgtgtttccgacccagggtgattccggaggcccgctggtgtgtgaggaccaagctgcagagcgccggctcaccctgcaaggcatcatcagctggggatcgggctgtggtgaccgcaacaagccaggcgtctacaccgatgtggcctactacctggcctggatccgggagcacaccgtttcctgattgctcagggactcatctttccctccttggtgattccgcagtgagagagtggctggggcatggaaggcaagattgtgtcccattcccccagtgcggccagctccgcgccaggatggcgcaggaactcaataaagtgctttgaaaatgctgagaaaaaaagctcttttcttcatgggtcccgccgggaaatgccaagacagaaaagcgattcacagcttctccacagctctcagagaacaaggtctatgagatcttaacgtgcaaaatctagatgccagcccagctaatgtttactgagcctaggatactgtataccaagccctgtgcaaggagaagctgcatgttattccttatgagaaactaacattttgtttacagagcagtagtt

SEQ ID NO: 287386 - DNA, 2451 bp, Homo sapiens
ctattgatctggactcctggataggcagctggaccaacggacggacgccatgagggctctgctgctcctggggttcctgctggtgagcttggagtcaacactttcgattccaccttgggaagcccccaaggagcataagtacaaagctgaagagcacacagtcgttctcactgtcaccggggagccctgccacttccccttccagtaccaccggcagctgtaccacaaatgtacccacaagggccggccaggccctcagccctggtgtgctaccacccccaactttgatcaggaccagcgatggggatactgtttggagcccaagaaagtgaaagaccactgcagcaaacacagcccctgccagaaaggagggacctgtgtgaacatgccaagcggcccccactgtctctgtccacaacacctcactggaaaccactgccagaaagagaagtgctttgagcctcagcttctccggtttttccacaagaatgagatatggtatagaactgagcaagcagctgtggccagatgccagtgcaagggtcctgatgcccactgccagcggctggccagccaggcctgccgcaccaacccgtgcctccatgggggtcgctgcctagaggtggagggccaccgcctgtgccactgcccggtgggctacaccggacccttctgcgacgtggacaccaaggcaagctgctatgatggccgcgggctcagctaccgcggcctggccaggaccacgctctcgggtgcgccctgtcagccgtgggcctcggaggccacctaccggaacgtgactgccgagcaagcgcggaactggggactgggcggccacgccttctgccggaacccggacaacgacatccgcccgtggtgcttcgtgctgaaccgcgaccggctgagctgggagtactgcgacctggcacagtgccagaccccaacccaggcggcgcctccgaccccggtgtcccctaggcttcatgtcccactcatgcccgcgcagccggcaccgccgaagcctcagcccacgacccggaccccgcctcagtcccagaccccgggagccttgccggcgaagcgggagcagccgccttccctgaccaggaacggcccactgagctgcgggcagcggctccgcaagagtctgtcttcgatgacccgcgtcgttggcgggctggtggcgctacgcggggcgcacccctacatcgccgcgctgtactggggccacagtttctgcgccggcagcctcatcgccccctgctgggtgctgacggccgctcactgcctgcaggaccggcgagtacccgcccgcccagagccgccccaggggccgcggctcctccgtctcccagcgcagcttccacgctgcacccgaacccgtgccctaccttctcccgccccacccttctttccacgcccctccggagctcccggggaggaagctggaacacgggattggggttcgggagcagggggcttccccagaacgcttgtggccaggtctgagagcgctgcctctcccctaccctccccgcaggcccgcacccgaggatctgacggtggtgctcggccaggaacgccgtaaccacagctgtgagccgtgccagacgttggccgtgcgctcctaccgcttgcacgaggccttctcgcccgtcagctaccagcacgacctggctctgttgcgccttcaggaggatgcggacggcagctgcgcgctcctgtcgccttacgttcagccggtgtgcctgccaagcggcgccgcgcgaccctccgagaccacgctctgccaggtggccggctggggccaccagttcgaggcctccttgcctatgaaattgaattaatggcacctcctccccttcgggcttgctgcgagagaggaagggcatgagtgggtttacaagcgcctggagcagctttgtccatcgtccgggcggcaagcgttgtcagatggggtgtgaagaaggcgctctgtgttcgcaggggcggaggaatatgccagcttcctgcaggaggcgcaggtaccgttcctctccctggagcgctgctcagccccggacgtgcacggatcctccatcctccccggcatgctctgcgcagggttcctcgagggcggcaccgatgcgtgccagggtgattccggaggcccgctggtgtgtgaggaccaagctgcagagcgccggctcaccctgcaaggcatcatcagctggggatcgggctgtggtgaccgcaacaagccaggcgtctacaccgatgtggcctactacctggcctggatccgggagcacaccgtttcctgattgctcagggactcatctttccctccttggtgattccgcagtgagagagtggctggggcatggaaggcaagattgtgtcccattcccccagtgcggccagctccgcgccaggatggcgcaggaactcaataaagtgctttgaaaatgc

SEQ ID NO: 287387 - DNA, 2070 bp, Homo sapiens
ctattgatctggactcctggataggcagctggaccaacggacggacgccatgagggctctgctgctcctggggttcctgctggtgagcttggagtcaacactttcgattccaccttgggaagcccccaaggagcataagtacaaagctgaagagcacacagtcgttctcactgtcaccggggagccctgccacttccccttccagtaccaccggcagctgtaccacaaatgtacccacaagggccggccaggccctcagccctggtgtgctaccacccccaactttgatcaggaccagcgatggggatactgtttggagcccaagaaagtgaaagaccactgcagcaaacacagcccctgccagaaaggagggacctgtgtgaacatgccaagcggcccccactgtctctgtccacaacacctcactggaaaccactgccagaaagagaagtgctttgagcctcagcttctccggtttttccacaagaatgagatatggtatagaactgagcaagcagctgtggccagatgccagtgcaagggtcctgatgcccactgccagcggctggccagccaggcctgccgcaccaacccgtgcctccatgggggtcgctgcctagaggtggagggccaccgcctgtgccactgcccggtgggctacaccggacccttctgcgacgtggacaccaaggcaagctgctatgatggccgcgggctcagctaccgcggcctggccaggaccacgctctcgggtgcgccctgtcagccgtgggcctcggaggccacctaccggaacgtgactgccgagcaagcgcggaactggggactgggcggccacgccttctgccggaacccggacaacgacatccgcccgtggtgcttcgtgctgaaccgcgaccggctgagctgggagtactgcgacctggcacagtgccagaccccaacccaggcggcgcctccgaccccggtgtcccctaggcttcatgtcccactcatgcccgcgcagccggcaccgccgaagcctcagcccacgacccggaccccgcctcagtcccagaccccgggagccttgccggcgaagcgggagcagccgccttccctgaccaggaacggcccactgagctgcgggcagcggctccgcaagagtctgtcttcgatgacccgcgtcgttggcgggctggtggcgctacgcggggcgcacccctacatcgccgcgctgtactggggccacagtttctgcgccggcagcctcatcgccccctgctgggtgctgacggccgctcactgcctgcaggaccggcccgcacccgaggatctgacggtggtgctcggccaggaacgccgtaaccacagctgtgagccgtgccagacgttggccgtgcgctcctaccgcttgcacgaggccttctcgcccgtcagctaccagcacgacctggctctgttgcgccttcaggaggatgcggacggcagctgcgcgctcctgtcgccttacgttcagccggtgtgcctgccaagcggcgccgcgcgaccctccgagaccacgctctgccaggtggccggctggggccaccagttcgagggggcggaggaatatgccagcttcctgcaggaggcgcaggtaccgttcctctccctggagcgctgctcagccccggacgtgcacggatcctccatcctccccggcatgctctgcgcagggttcctcgagggcggcaccgatgcgtgccagggtgattccggaggcccgctggtgtgtgaggaccaagctgcagagcgccggctcaccctgcaaggcatcatcagctggggatcgggctgtggtgaccgcaacaagccaggcgtctacaccgatgtggcctactacctggcctggatccgggagcacaccgtttcctgattgctcagggactcatctttccctccttggtgattccgcagtgagagagtggctggggcatggaaggcaagattgtgtcccattcccccagtccgctccccacatccccacgatatgggtgtgtgtccccagtggggttggtgtgcatgtgtacaaaggaaaaaaaaactttt

SEQ ID NO: 287388 - DNA, 1561 bp, Homo sapiens
ccctaacttgtggcttaaagcaacaacatttaatgatgatttatcacagtttctgatggtcagttttgccttgaggtctttcataagattgcaagccaaatgtcagcgagggctgcagtatccacttccaaggcagcttattcatgtggctgtccaattggcactggctgtcagcagggtgctttcctttctccctacatgggcttctctgcagggctgcatgtgtgtcctcacaacacagtggctggcttcctccagagtgagcaaccgcttgcacgaggccttctcgcccgtcagctaccagcacgacctgggtgcgtgggggcgccccgcggggacgggaagagagcttggggccccggcgtccccgcctcacgctcctctccgcccgggttagctctgttgcgccttcaggaggatgcggacggcagctgcgcgctcctgtcgccttacgttcagccggtgtgcctgccaagcggcgccgcgcgaccctccgagaccacgctctgccaggtggccggctggggccaccagttcgagggtaggcacaactgctaggggcaggggtaggggaggagacctttgatcactgggttaggcggaagaagcccgcgactttggtatcgttccgggtgcctacagaatgggtggcgctgacctgatgggttgtgagaatgtgtaggtgaatcccaggtagaatcccagggcctgggattcactgctgggatccccaaatctcctggggatacagggagaatcgaacttgctcttggttccctctgggcgccgggctgcaaaggccaactaggacgctggccccgcgctccgggctagtgtgggagccaggttctgcgactctggatgggtggtgggggaggggtttctgtttccgctccgcccattcaaatcctggcttttctctggacctcagcctccttgcctatgaaattgaattaatggcacctcctccccttcgggcttgctgcgagagaggaagggcatgagtgggtttacaagcgcctggagcagctttgtccatcgtccgggcggcaagcgttgtcagatggggtgtgaagaaggcgctctgtgttcgcaggggcggaggaatatgccagcttcctgcaggaggcgcaggtaccgttcctctccctggagcgctgctcagccccggacgtgcacggatcctccatcctccccggcatgctctgcgcagggttcctcgagggcggcaccgatgcgtgccagggtgattccggaggcccgctggtgtgtgaggaccaagctgcagagcgccggctcaccctgcaaggcatcatcagctggggatcgggctgtggtgaccgcaacaagccaggcgtctacaccgatgtggcctactacctggcctggatccgggagcacaccgtttcctgattgctcagggactcatctttccctccttggtgattccgcagtgagagagtggctggggcatggaaggcaagattgtgtcccattcccccagtgcggccagctccgcgccaggatggcgcaggaactcaataaagtgctttgaaaatgc

SEQ ID NO: 287389 - DNA, 2045 bp, Homo sapiens
ctattgatctggactcctggataggcagctggaccaacggacggacgccatgagggctctgctgctcctggggttcctgctggtgagcttggagtcaacactttcgattccaccttgggaagcccccaaggagcataagtacaaagctgaagagcacacagtcgttctcactgtcaccggggagccctgccacttccccttccagtaccaccggcagctgtaccacaaatgtacccacaagggccggccaggccctcagccctggtgtgctaccacccccaactttgatcaggaccagcgatggggatactgtttggagcccaagaaagtgaaagaccactgcagcaaacacagcccctgccagaaaggagggacctgtgtgaacatgccaagcggcccccactgtctctgtccacaacacctcactggaaaccactgccagaaagagaagtgctttgagcctcagcttctccggtttttccacaagaatgagatatggtatagaactgagcaagcagctgtggccagatgccagtgcaagggtcctgatgcccactgccagcggctggccagccaggcctgccgcaccaacccgtgcctccatgggggtcgctgcctagaggtggagggccaccgcctgtgccactgcccggtgggctacaccggacccttctgcgacgtggacaccaaggcaagctgctatgatggccgcgggctcagctaccgcggcctggccaggaccacgctctcgggtgcgccctgtcagccgtgggcctcggaggccacctaccggaacgtgactgccgagcaagcgcggaactggggactgggcggccacgccttctgccggaacccggacaacgacatccgcccgtggtgcttcgtgctgaaccgcgaccggctgagctgggagtactgcgacctggcacagtgccagaccccaacccaggcggcgcctccgaccccggtgtcccctaggcttcatgtcccactcatgcccgcgcagccggcaccgccgaagcctcagcccacgacccggaccccgcctcagtcccagaccccgggagccttgccggcgaagcgggagcagccgccttccctgaccaggaacggcccactgagctgcgggcagcggctccgcaagagtctgtcttcgatgacccgcgtcgttggcgggctggtggcgctacgcggggcgcacccctacatcgccgcgctgtactggggccacagtttctgcgccggcagcctcatcgccccctgctgggtgctgacggccgctcactgcctgcaggaccggcccgcacccgaggatctgacggtggtgctcggccaggaacgccgtaaccacagctgtgagccgtgccagacgttggccgtgcgctcctaccgcttgcacgaggccttctcgcccgtcagctaccagcacgacctggctctgttgcgccttcaggaggatgcggacggcagctgcgcgctcctgtcgccttacgttcagccggtgtgcctgccaagcggcgccgcgcgaccctccgagaccacgctctgccaggtggccggctggggccaccagttcgagggggcggaggaatatgccagcttcctgcaggaggcgcaggtaccgttcctctccctggagcgctgctcagccccggacgtgcacggatcctccatcctccccggcatgctctgcgcagggttcctcgagggcggcaccgatgcgtgccagggtgattccggaggcccgctggtgtgtgaggaccaagctgcagagcgccggctcaccctgcaaggcatcatcagctggggatcgggctgtggtgaccgcaacaagccaggcgtctacaccgatgtggcctactacctggcctggatccgggagcacaccgtttcctgattgctcagggactcatctttccctccttggtgattccgcagtgagagagtggctggggcatggaaggcaagattgtgtcccattcccccagtgcggccagctccgcgccaggatggcgcaggaactcaataaagtgctttgaaaatgc

SEQ ID NO: 287390 - DNA, 2285 bp, Homo sapiens
ctattgatctggactcctggataggcagctggaccaacggacggacgccatgagggctctgctgctcctggggttcctgctggtgagcttggagtcaacactttcgattccaccttgggaagcccccaaggagcataagtacaaagctgaagagcacacagtcgttctcactgtcaccggggagccctgccacttccccttccagtaccaccggcagctgtaccacaaatgtacccacaagggccggccaggccctcagccctggtgtgctaccacccccaactttgatcaggaccagcgatggggatactgtttggagcccaagaaagtgaaagaccactgcagcaaacacagcccctgccagaaaggagggacctgtgtgaacatgccaagcggcccccactgtctctgtccacaacacctcactggaaaccactgccagaaagagaagtgctttgagcctcagcttctccggtttttccacaagaatgagatatggtatagaactgagcaagcagctgtggccagatgccagtgcaagggtcctgatgcccactgccagcggctggccagccaggcctgccgcaccaacccgtgcctccatgggggtcgctgcctagaggtggagggccaccgcctgtgccactgcccggtgggctacaccggacccttctgcgacgtggacaccaaggcaagctgctatgatggccgcgggctcagctaccgcggcctggccaggaccacgctctcgggtgcgccctgtcagccgtgggcctcggaggccacctaccggaacgtgactgccgagcaagcgcggaactggggactgggcggccacgccttctgccggaacccggacaacgacatccgcccgtggtgcttcgtgctgaaccgcgaccggctgagctgggagtactgcgacctggcacagtgccagaccccaacccaggcggcgcctccgaccccggtgtcccctaggcttcatgtcccactcatgcccgcgcagccggcaccgccgaagcctcagcccacgacccggaccccgcctcagtcccagaccccgggagccttgccggcgaagcgggagcagccgccttccctgaccaggaacggcccactgagctgcgggcagcggctccgcaagagtctgtcttcgatgacccgcgtcgttggcgggctggtggcgctacgcggggcgcacccctacatcgccgcgctgtactggggccacagtttctgcgccggcagcctcatcgccccctgctgggtgctgacggccgctcactgcctgcaggaccggcccgcacccgaggatctgacggtggtgctcggccaggaacgccgtaaccacagctgtgagccgtgccagacgttggccgtgcgctcctaccgcttgcacgaggccttctcgcccgtcagctaccagcacgacctggctctgttgcgccttcaggaggatgcggacggcagctgcgcgctcctgtcgccttacgttcagccggtgtgcctgccaagcggcgccgcgcgaccctccgagaccacgctctgccaggtggccggctggggccaccagttcgagggggcggaggaatatgccagcttcctgcaggaggcgcaggtaccgttcctctccctggagcgctgctcagccccggacgtgcacggatcctccatcctccccggcatgctctgcgcagggttcctcgagggcggcaccgatgcgtgccagggtgattccggaggcccgctggtgtgtgaggaccaagctgcagagcgccggctcaccctgcaaggcatcatcagctggggatcgggctgtggtgaccgcaacaagccaggcgtctacaccgatgtggcctactacctggcctggatccgggagcacaccgtttcctgattgctcagggactcatctttccctccttggtgattccgcagtgagagagtggctggggcatggaaggcaagattgtgtcccattcccccagtgcggccagctccgcgccaggatggcgcaggaactcaataaagtgctttgaaaatgctgagaaaaaaagctcttttcttcatgggtcccgccgggaaatgccaagacagaaaagcgattcacagcttctccacagctctcagagaacaaggtctatgagatcttaacgtgcaaaatctagatgccagcccagctaatgtttactgagcctaggatactgtataccaagccctgtgcaaggagaagctgcatgttattccttatgagaaactaacattttgtttacagagcagtagtt

SEQ ID NO: 287391 - DNA, 2286 bp, Homo sapiens
ctattgatctggactcctggataggcagctggaccaacggacggacgccatgagggctctgctgctcctggggttcctgctggtgagcttggagtcaacactttcgattccaccttgggaagcccccaaggagcataagtacaaagctgaagagcacacagtcgttctcactgtcaccggggagccctgccacttccccttccagtaccaccggcagctgtaccacaaatgtacccacaagggccggccaggccctcagccctggtgtgctaccacccccaactttgatcaggaccagcgatggggatactgtttggagcccaagaaagtgaaagaccactgcagcaaacacagcccctgccagaaaggagggacctgtgtgaacatgccaagcggcccccactgtctctgtccacaacacctcactggaaaccactgccagaaagagaagtgctttgagcctcagcttctccggtttttccacaagaatgagatatggtatagaactgagcaagcagctgtggccagatgccagtgcaagggtcctgatgcccactgccagcggctggccagccaggcctgccgcaccaacccgtgcctccatgggggtcgctgcctagaggtggagggccaccgcctgtgccactgcccggtgggctacaccggacccttctgcgacgtggacaccaaggcaagctgctatgatggccgcgggctcagctaccgcggcctggccaggaccacgctctcgggtgcgccctgtcagccgtgggcctcggaggccacctaccggaacgtgactgccgagcaagcgcggaactggggactgggcggccacgccttctgccggaacccggacaacgacatccgcccgtggtgcttcgtgctgaaccgcgaccggctgagctgggagtactgcgacctggcacagtgccagaccccaacccaggcggcgcctccgaccccggtgtcccctaggcttcatgtcccactcatgcccgcgcagccggcaccgccgaagcctcagcccacgacccggaccccgcctcagtcccagaccccgggagccttgccggcgaagcgggagcagccgccttccctgaccaggaacggcccactgagctgcgggcagcggctccgcaagagtctgtcttcgatgacccgcgtcgttggcgggctggtggcgctacgcggggcgcacccctacatcgccgcgctgtactggggccacagtttctgcgccggcagcctcatcgccccctgctgggtgctgacggccgctcactgcctgcaggaccggcgagtacccgcccgcccagagccgccccaggggccgcggctcctccgtctcccagcgcagcttccacgctgcacccgaacccgtgccctaccttctcccgccccacccttctttccacgcccctccggagctcccggggaggaagctggaacacgggattggggttcgggagcagggggcttccccagaacgcttgtggccaggtctgagagcgctgcctctcccctaccctccccgcaggcccgcacccgaggatctgacggtggtgctcggccaggaacgccgtaaccacagctgtgagccgtgccagacgttggccgtgcgctcctaccgcttgcacgaggccttctcgcccgtcagctaccagcacgacctggctctgttgcgccttcaggaggatgcggacggcagctgcgcgctcctgtcgccttacgttcagccggtgtgcctgccaagcggcgccgcgcgaccctccgagaccacgctctgccaggtggccggctggggccaccagttcgagggggcggaggaatatgccagcttcctgcaggaggcgcaggtaccgttcctctccctggagcgctgctcagccccggacgtgcacggatcctccatcctccccggcatgctctgcgcagggttcctcgagggcggcaccgatgcgtgccagggtgattccggaggcccgctggtgtgtgaggaccaagctgcagagcgccggctcaccctgcaaggcatcatcagctggggatcgggctgtggtgaccgcaacaagccaggcgtctacaccgatgtggcctactacctggcctggatccgggagcacaccgtttcctgattgctcagggactcatctttccctccttggtgattccgcagtgagagagtggctggggcatggaaggcaagattgtgtcccattcccccagtgcggccagctccgcgccaggatggcgcaggaactcaataaagtgctttgaaaatgc

SEQ ID NO: 287392 - DNA, 2714 bp, Homo sapiens
ctattgatctggactcctggataggcagctggaccaacggacggacgccatgagggctctgctgctcctggggttcctgctggtgagcttggagtcaacactttcgattccaccttgggaagcccccaaggagcataagtacaaagctgaagagcacacagtcgttctcactgtcaccggggagccctgccacttccccttccagtaccaccggcagctgtaccacaaatgtacccacaagggccggccaggccctcagccctggtgtgctaccacccccaactttgatcaggaccagcgatggggatactgtttggagcccaagaaagtgaaagaccactgcagcaaacacagcccctgccagaaaggagggacctgtgtgaacatgccaagcggcccccactgtctctgtccacaacacctcactggaaaccactgccagaaagagaagtgctttgagcctcagcttctccggtttttccacaagaatgagatatggtatagaactgagcaagcagctgtggccagatgccagtgcaagggtcctgatgcccactgccagcggctggccagccaggcctgccgcaccaacccgtgcctccatgggggtcgctgcctagaggtggagggccaccgcctgtgccactgcccggtgggctacaccggacccttctgcgacgtggacaccaaggcaagctgctatgatggccgcgggctcagctaccgcggcctggccaggaccacgctctcgggtgcgccctgtcagccgtgggcctcggaggccacctaccggaacgtgactgccgagcaagcgcggaactggggactgggcggccacgccttctgccggaacccggacaacgacatccgcccgtggtgcttcgtgctgaaccgcgaccggctgagctgggagtactgcgacctggcacagtgccagaccccaacccaggcggcgcctccgaccccggtgtcccctaggcttcatgtcccactcatgcccgcgcagccggcaccgccgaagcctcagcccacgacccggaccccgcctcagtcccagaccccgggaggttaggaagtgggggggggaaggaggagccgagagggcgccgggcgagctagattccggccagccggccgcgggctctccgtcctcagcccctgctcctccacagccttgccggcgaagcgggagcagccgccttccctgaccaggaacggcccactgagctgcgggcagcggctccgcaagagtctgtcttcgatgacccgcgtcgttggcgggctggtggcgctacgcggggcgcacccctacatcgccgcgctgtactggggccacagtttctgcgccggcagcctcatcgccccctgctgggtgctgacggccgctcactgcctgcaggaccggcgagtacccgcccgcccagagccgccccaggggccgcggctcctccgtctcccagcgcagcttccacgctgcacccgaacccgtgccctaccttctcccgccccacccttctttccacgcccctccggagctcccggggaggaagctggaacacgggattggggttcgggagcagggggcttccccagaacgcttgtggccaggtctgagagcgctgcctctcccctaccctccccgcaggcccgcacccgaggatctgacggtggtgctcggccaggaacgccgtaaccacagctgtgagccgtgccagacgttggccgtgcgctcctaccgcttgcacgaggccttctcgcccgtcagctaccagcacgacctgggtgcgtgggggcgccccgcggggacgggaagagagcttggggccccggcgtccccgcctcacgctcctctccgcccgggttagctctgttgcgccttcaggaggatgcggacggcagctgcgcgctcctgtcgccttacgttcagccggtgtgcctgccaagcggcgccgcgcgaccctccgagaccacgctctgccaggtggccggctggggccaccagttcgagggggcggaggaatatgccagcttcctgcaggaggcgcaggtaccgttcctctccctggagcgctgctcagccccggacgtgcacggatcctccatcctccccggcatgctctgcgcagggttcctcgagggcggcaccgatgcgtgccagggtgattccggaggcccgctggtgtgtgaggaccaagctgcagagcgccggctcaccctgcaaggcatcatcagctggggatcgggctgtggtgaccgcaacaagccaggcgtctacaccgatgtggcctactacctggcctggatccgggagcacaccgtttcctgattgctcagggactcatctttccctccttggtgattccgcagtgagagagtggctggggcatggaaggcaagattgtgtcccattcccccagtgcggccagctccgcgccaggatggcgcaggaactcaataaagtgctttgaaaatgctgagaaaaaaagctcttttcttcatgggtcccgccgggaaatgccaagacagaaaagcgattcacagcttctccacagctctcagagaacaaggtctatgagatcttaacgtgcaaaatctagatgccagcccagctaatgtttactgagcctaggatactgtataccaagccctgtgcaaggagaagctgcatgttattccttatgagaaactaacattttgtttacagagcagtagtt

SEQ ID NO: 287393 - DNA, 3269 bp, Homo sapiens
ctattgatctggactcctggataggcagctggaccaacggacggacgccatgagggctctgctgctcctggggttcctgctggtgagcttggagtcaacactttcgattccaccttgggaagcccccaaggagcataagtacaaagctgaagagcacacagtcgttctcactgtcaccggggagccctgccacttccccttccagtaccaccggcagctgtaccacaaatgtacccacaagggccggccaggccctcagccctggtgtgctaccacccccaactttgatcaggaccagcgatggggatactgtttggagcccaagaaagtgaaagaccactgcagcaaacacagcccctgccagaaaggagggacctgtgtgaacatgccaagcggcccccactgtctctgtccacaacacctcactggaaaccactgccagaaagagaagtgctttgagcctcagcttctccggtttttccacaagaatgagatatggtatagaactgagcaagcagctgtggccagatgccagtgcaagggtcctgatgcccactgccagcggctggccagccaggcctgccgcaccaacccgtgcctccatgggggtcgctgcctagaggtggagggccaccgcctgtgccactgcccggtgggctacaccggacccttctgcgacgtggacaccaaggcaagctgctatgatggccgcgggctcagctaccgcggcctggccaggaccacgctctcgggtgcgccctgtcagccgtgggcctcggaggccacctaccggaacgtgactgccgagcaagcgcggaactggggactgggcggccacgccttctgccggaacccggacaacgacatccgcccgtggtgcttcgtgctgaaccgcgaccggctgagctgggagtactgcgacctggcacagtgccagaccccaacccaggcggcgcctccgaccccggtgtcccctaggcttcatgtcccactcatgcccgcgcagccggcaccgccgaagcctcagcccacgacccggaccccgcctcagtcccagaccccgggaggttaggaagtgggggggggaaggaggagccgagagggcgccgggcgagctagattccggccagccggccgcgggctctccgtcctcagcccctgctcctccacagccttgccggcgaagcgggagcagccgccttccctgaccaggaacggcccactgagctgcgggcagcggctccgcaagagtctgtcttcgatgacccgcgtcgttggcgggctggtggcgctacgcggggcgcacccctacatcgccgcgctgtactggggccacagtttctgcgccggcagcctcatcgccccctgctgggtgctgacggccgctcactgcctgcaggaccggcgagtacccgcccgcccagagccgccccaggggccgcggctcctccgtctcccagcgcagcttccacgctgcacccgaacccgtgccctaccttctcccgccccacccttctttccacgcccctccggagctcccggggaggaagctggaacacgggattggggttcgggagcagggggcttccccagaacgcttgtggccaggtctgagagcgctgcctctcccctaccctccccgcaggcccgcacccgaggatctgacggtggtgctcggccaggaacgccgtaaccacagctgtgagccgtgccagacgttggccgtgcgctcctaccgcttgcacgaggccttctcgcccgtcagctaccagcacgacctgggtgcgtgggggcgccccgcggggacgggaagagagcttggggccccggcgtccccgcctcacgctcctctccgcccgggttagctctgttgcgccttcaggaggatgcggacggcagctgcgcgctcctgtcgccttacgttcagccggtgtgcctgccaagcggcgccgcgcgaccctccgagaccacgctctgccaggtggccggctggggccaccagttcgagggtaggcacaactgctaggggcaggggtaggggaggagacctttgatcactgggttaggcggaagaagcccgcgactttggtatcgttccgggtgcctacagaatgggtggcgctgacctgatgggttgtgagaatgtgtaggtgaatcccaggtagaatcccagggcctgggattcactgctgggatccccaaatctcctggggatacagggagaatcgaacttgctcttggttccctctgggcgccgggctgcaaaggccaactaggacgctggccccgcgctccgggctagtgtgggagccaggttctgcgactctggatgggtggtgggggaggggtttctgtttccgctccgcccattcaaatcctggcttttctctggacctcagcctccttgcctatgaaattgaattaatggcacctcctccccttcgggcttgctgcgagagaggaagggcatgagtgggtttacaagcgcctggagcagctttgtccatcgtccgggcggcaagcgttgtcagatggggtgtgaagaaggcgctctgtgttcgcaggggcggaggaatatgccagcttcctgcaggaggcgcaggtaccgttcctctccctggagcgctgctcagccccggacgtgcacggatcctccatcctccccggcatgctctgcgcagggttcctcgagggcggcaccgatgcgtgccagggtgattccggaggcccgctggtgtgtgaggaccaagctgcagagcgccggctcaccctgcaaggcatcatcagctggggatcgggctgtggtgaccgcaacaagccaggcgtctacaccgatgtggcctactacctggcctggatccgggagcacaccgtttcctgattgctcagggactcatctttccctccttggtgattccgcagtgagagagtggctggggcatggaaggcaagattgtgtcccattcccccagtgcggccagctccgcgccaggatggcgcaggaactcaataaagtgctttgaaaatgctgagaaaaaaagctcttttcttcatgggtcccgccgggaaatgccaagacagaaaagcgattcacagcttctccacagctctcagagaacaaggtctatgagatcttaacgtgcaaaatctagatgccagcccagctaatgtttactgagcctaggatactgtataccaagccctgtgcaaggagaagctgcatgttattccttatgagaaactaacattttgtttacagagcagtagtt

SEQ ID NO: 287394 - DNA, 1609 bp, Homo sapiens
ggtgacccctccgccccagggctccgggctcccggcgctctaacggcgccccgtcgtgtggctacaggaacccggacaacgacatccgcccgtggtgcttcgtgctgaaccgcgaccggctgagctgggagtactgcgacctggcacagtgccagaccccaacccaggcggcgcctccgaccccggtgtcccctaggcttcatgtcccactcatgcccgcgcagccggcaccgccgaagcctcagcccacgacccggaccccgcctcagtcccagaccccgggaggttaggaagtgggggggggaaggaggagccgagagggcgccgggcgagctagattccggccagccggccgcgggctctccgtcctcagcccctgctcctccacagccttgccggcgaagcgggagcagccgccttccctgaccaggaacggcccactgagctgcgggcagcggctccgcaagagtctgtcttcgatgacccgcgtcgttggcgggctggtggcgctacgcggggcgcacccctacatcgccgcgctgtactggggccacagtttctgcgccggcagcctcatcgccccctgctgggtgctgacggccgctcactgcctgcaggaccggcgagtacccgcccgcccagagccgccccaggggccgcggctcctccgtctcccagcgcagcttccacgctgcacccgaacccgtgccctaccttctcccgccccacccttctttccacgcccctccggagctcccggggaggaagctggaacacgggattggggttcgggagcagggggcttccccagaacgcttgtggccaggtctgagagcgctgcctctcccctaccctccccgcaggcccgcacccgaggatctgacggtggtgctcggccaggaacgccgtaaccacagctgtgagccgtgccagacgttggccgtgcgctcctaccgcttgcacgaggccttctcgcccgtcagctaccagcacgacctggctctgttgcgccttcaggaggatgcggacggcagctgcgcgctcctgtcgccttacgttcagccggtgtgcctgccaagcggcgccgcgcgaccctccgagaccacgctctgccaggtggccggctggggccaccagttcgagggggcggaggaatatgccagcttcctgcaggaggcgcaggtaccgttcctctccctggagcgctgctcagccccggacgtgcacggatcctccatcctccccggcatgctctgcgcagggttcctcgagggcggcaccgatgcgtgccagggtgattccggaggcccgctggtgtgtgaggaccaagctgcagagcgccggctcaccctgcaaggcatcatcagctggggatcgggctgtggtgaccgcaacaagccaggcgtctacaccgatgtggcctactacctggcctggatccgggagcacaccgtttcctgattgctcagggactcatctttccctccttggtgattccgcagtgagagagtggctggggcatggaaggcaagattgtgtcccattcccccagtgcggccagctccgcgccaggatggcgcaggaactcaataaagtgctttgaaaatgc

SEQ ID NO: 287395 - DNA, 2933 bp, Homo sapiens
ctattgatctggactcctggataggcagctggaccaacggacggacgccatgagggctctgctgctcctggggttcctgctggtgagcttggagtcaacactttcgattccaccttgggaagcccccaaggagcataagtacaaagctgaagagcacacagtcgttctcactgtcaccggggagccctgccacttccccttccagtaccaccggcagctgtaccacaaatgtacccacaagggccggccaggccctcagccctggtgtgctaccacccccaactttgatcaggaccagcgatggggatactgtttggagcccaagaaagtgaaagaccactgcagcaaacacagcccctgccagaaaggagggacctgtgtgaacatgccaagcggcccccactgtctctgtccacaacacctcactggaaaccactgccagaaagagaagtgctttgagcctcagcttctccggtttttccacaagaatgagatatggtatagaactgagcaagcagctgtggccagatgccagtgcaagggtcctgatgcccactgccagcggctggccagccaggcctgccgcaccaacccgtgcctccatgggggtcgctgcctagaggtggagggccaccgcctgtgccactgcccggtgggctacaccggacccttctgcgacgtggacaccaaggcaagctgctatgatggccgcgggctcagctaccgcggcctggccaggaccacgctctcgggtgcgccctgtcagccgtgggcctcggaggccacctaccggaacgtgactgccgagcaagcgcggaactggggactgggcggccacgccttctgccggaacccggacaacgacatccgcccgtggtgcttcgtgctgaaccgcgaccggctgagctgggagtactgcgacctggcacagtgccagaccccaacccaggcggcgcctccgaccccggtgtcccctaggcttcatgtcccactcatgcccgcgcagccggcaccgccgaagcctcagcccacgacccggaccccgcctcagtcccagaccccgggaggttaggaagtgggggggggaaggaggagccgagagggcgccgggcgagctagattccggccagccggccgcgggctctccgtcctcagcccctgctcctccacagccttgccggcgaagcgggagcagccgccttccctgaccaggaacggcccactgagctgcgggcagcggctccgcaagagtctgtcttcgatgacccgcgtcgttggcgggctggtggcgctacgcggggcgcacccctacatcgccgcgctgtactggggccacagtttctgcgccggcagcctcatcgccccctgctgggtgctgacggccgctcactgcctgcaggaccggcgagtacccgcccgcccagagccgccccaggggccgcggctcctccgtctcccagcgcagcttccacgctgcacccgaacccgtgccctaccttctcccgccccacccttctttccacgcccctccggagctcccggggaggaagctggaacacgggattggggttcgggagcagggggcttccccagaacgcttgtggccaggtctgagagcgctgcctctcccctaccctccccgcaggcccgcacccgaggatctgacggtggtgctcggccaggaacgccgtaaccacagctgtgagccgtgccagacgttggccgtgcgctcctaccgcttgcacgaggccttctcgcccgtcagctaccagcacgacctgggtgcgtgggggcgccccgcggggacgggaagagagcttggggccccggcgtccccgcctcacgctcctctccgcccgggttagctctgttgcgccttcaggaggatgcggacggcagctgcgcgctcctgtcgccttacgttcagccggtgtgcctgccaagcggcgccgcgcgaccctccgagaccacgctctgccaggtggccggctggggccaccagttcgagggtaggcacaactgctaggggcaggggtaggggaggagacctttgatcactgggttaggcggaagaagcccgcgactttggtatcgttccgggtgcctacagaatgggtggcgctgacctgatgggttgtgagaatgtgtaggtgaatcccaggtagaatcccagggcctgggattcactgctgggatccccaaatctcctggggatacagggagaatcgaacttgctcttggttccctctgggcgccgggctgcaaaggccaactaggacgctggccccgcgctccgggctagtgtgggagccaggttctgcgactctggatgggtggtgggggaggggtttctgtttccgctccgcccattcaaatcctggcttttctctggacctcagcctccttgcctatgaaattgaattaatggcacctcctccccttcgggcttgctgcgagagaggaagggcatgagtgggtttacaagcgcctggagcagctttgtccatcgtccgggcggcaagcgttgtcagatggggtgtgaagaaggcgctctgtgttcgcaggggcggaggaatatgccagcttcctgcaggaggcgcaggtaccgttcctctccctggagcgctgctcagccccggacgtgcacggatcctccatcctccccggcatgctcctgcaaggcatcatcagctggggatcgggctgtggtgaccgcaacaagccaggcgtctacaccgatgtggcctactacctggcctggatccgggagcacaccgtttcctgattgctcagggactcatctttccctccttggtgattccgcagtgagagagtggctggggcatggaaggcaagattgtgtcccattcccccagtgcggccagctccgcgccaggatggcgcaggaactcaataaagtgctttgaaaatgc

SEQ ID NO: 287396 - DNA, 1352 bp, Homo sapiens
agggaactggagcatctgccgccatttcttgcttttgcctttgcgatttccaccgccaccgcttgcacgaggccttctcgcccgtcagctaccagcacgacctgggtgcgtgggggcgccccgcggggacgggaagagagcttggggccccggcgtccccgcctcacgctcctctccgcccgggttagctctgttgcgccttcaggaggatgcggacggcagctgcgcgctcctgtcgccttacgttcagccggtgtgcctgccaagcggcgccgcgcgaccctccgagaccacgctctgccaggtggccggctggggccaccagttcgagggtaggcacaactgctaggggcaggggtaggggaggagacctttgatcactgggttaggcggaagaagcccgcgactttggtatcgttccgggtgcctacagaatgggtggcgctgacctgatgggttgtgagaatgtgtaggtgaatcccaggtagaatcccagggcctgggattcactgctgggatccccaaatctcctggggatacagggagaatcgaacttgctcttggttccctctgggcgccgggctgcaaaggccaactaggacgctggccccgcgctccgggctagtgtgggagccaggttctgcgactctggatgggtggtgggggaggggtttctgtttccgctccgcccattcaaatcctggcttttctctggacctcagcctccttgcctatgaaattgaattaatggcacctcctccccttcgggcttgctgcgagagaggaagggcatgagtgggtttacaagcgcctggagcagctttgtccatcgtccgggcggcaagcgttgtcagatggggtgtgaagaaggcgctctgtgttcgcaggggcggaggaatatgccagcttcctgcaggaggcgcaggtaccgttcctctccctggagcgctgctcagccccggacgtgcacggatcctccatcctccccggcatgctctgcgcagggttcctcgagggcggcaccgatgcgtgccagggtgattccggaggcccgctggtgtgtgaggaccaagctgcagagcgccggctcaccctgcaaggcatcatcagctggggatcgggctgtggtgaccgcaacaagccaggcgtctacaccgatgtggcctactacctggcctggatccgggagcacaccgtttcctgattgctcagggactcatctttccctccttggtgattccgcagtgagagagtggctggggcatggaaggcaagattgtgtcccattcccccagtgcggccagctccgcgccaggatggcgcaggaactcaataaagtgctttgaaaatgc

SEQ ID NO: 287397 - DNA, 529 bp, Homo sapiens
ttccagtccagggatcaccggtggagacccattagtctatgccatcctagtcccacccgcctgacacctcatgctcaccagaaggacaccttgggctgaccagagaggagggtttctgtgtgagaagcgatttgtgaatgcatctcataaatgccctgctctcagctgctgaacattctcctgctgaaaggcagggagctaattagcacagccacctcgacagcgtctgttccagtcacccctgcatgcatgctagaacacctttgaacaatggatgacagtctgcagagagcacagagctcccggagaacataaaaatgcaatggaacagaatgaagggatgcaagtcacaatcgtctcaactgcaagttggccaaagtaaacattgccccaaagtgctcccaaagcttgctggcacataaacatgaatgaatgaacaatgtagaattcactcaagaaatttcaaggagagagaggaggagatttacatcacacagcaaacaacctaataaatctgttaaacgccatg

SEQ ID NO: 287398 - DNA, 484 bp, Homo sapiens
ccgagaagagtaatgtcttgctctccgccctgacaacttttatgtattataatttgaccgcgctgggccacgctgcgcagtcgcagctcggaaccgctgcgttaacccagccccggaaataacgtaccgatcttcggagtccaagtcggaagttgactagagagtcacctgctttcgtccgctctaggacaccagacacaccaggccgccatgttgtgtaaggatccccagccagtgagcctaaaatgggtagaaggaaaagatatttcttaccctacgcacccaggtccaagtcatcattattttgtctgaaatttatcttcctaactgatttctctgcttccccattgtgccttaagagttagttttccacagagcagctcgagatatcttttcagatcattatatccctttgcttaaaaacctctaacagcttcctattaggcttagaataaagtacaaactccttaatgtgaaattgagt

SEQ ID NO: 287399 - DNA, 1894 bp, Homo sapiens
ggccctgtagcggaagcccaggtcaaggccctaacaaaagggcccgcctatggccacagtttcaggccctcctttcagtcatggactgttgaagcacgatttcctggtgctttcgcccctttcaccgaccatttcaagagtccgtagttctcgcctgggtttggattcggtataagtgagcctgtttaccatcaaagaaaatggtgaaatgtcttctggagacgatgttctcttctggttctaaccctgtcactcagtgagacccccagagaagcctagttttcagattattctagtccttggcaggctcaagatgtcaacaacacggttggaaacaacccctgagaggtcacatagcgcgcactcagctttacagatcgtccaaggcagcgacccctgagaggtcacatagcgcgcactcagctttatagatcgtccaaggcagcaattagaatcagcaactcggagaggaaaaaaagctgttagcggaatggaggctgaccattatctgtagtaaagaatcggaagtacagtacaaaaataaattaccgaaacgcaacatgcgtgaatttcacacaaaaaaatgaagttgagggaaagaagccagacatggaagagttcatattgcgtggttccatttaaaaactagcccatggtgttaatgagcatagtggggaggacaatgacatgaaagagccaccagggggcttttgaggttcaggtaatgtttcttgatttggacactgattatagataggtgggttcactttagaaatctcattgagttgtaaacgtatatttatgtacgtagttttttctgtagattatgcttaaggcccggcgaaggggaatttgcccaggtaatggaaatattacaccgatacatagaattgtcaaagttcatgggatgaactcctaagagctgtgtattttatcgtataaatttttttaagtgtccaaccaatagcctggaattattaagtacataattaaataaaaacaaatatcccatggacctaatgcagtgaacagttacctcgttctcttaattgctcaggctaaggactcatacctgagtcttctatctcaggccttacatcttatataacaagccttactggcttaatcttcaaaatatgtagcgaatttaacgagttctcacaacctctgcttctaccacctgacggggtttgggacatgctacccaaaaatatggcacctagacatattgaatactttgaactgaaggaatttgagaaagaacatatgcaggaatgtctctaactttcttgcacctttctgctctgaagcaggacgtaataccctcatgtgagaattgccctgtctatacctggaataaaagtaacatctttatctctgaaaacacagggacgtagagacgaatatgaacatcaggccttgctaagtttcccccagtttattacccttagatcacagtcttttagccccatcacattttcccacaattctccattcttcttcaaacctactctaaacaacactaaggttaactatttattcgggtcttcatttctttatgaagtttccatgttatgtaaaactaacattaatatttatgcttttctcttgttaatttgtcttttgttacaggatccccagccagtgagcctaaaatgggtagaaggaaaagatatttcttaccctacgcacccaggtccaagtcatcattattttgtctgaaatttatcttcctaactgatttctctgcttccccattgtgccttaagagttagttttccacagagcagctcgagatatcttttcagatcattatatccctttgcttaaaaacctctaacagcttcctattaggcttagaataaagtacaaactccttaatgtgaaattgagt

SEQ ID NO: 287400 - DNA, 1448 bp, Homo sapiens
  misc_feature (32)..(32): n is a, c, g, or t
cacagtggacagggagacctcacagagaaagncctggaaggtgatttcccgtgtgactcatggataggacccaaaatgtgttccatgcccaaaaataaattaccgaaacgcaacatgcgtgaatttcacacaaaaaaatgaagttgagggaaagaagccagacatggaagagttcatattgcgtggttccatttaaaaactagcccatggtgttaatgagcatagtggggaggacaatgacatgaaagagccaccagggggcttttgaggttcaggtaatgtttcttgatttggacactgattatagataggtgggttcactttagaaatctcattgagttgtaaacgtatatttatgtacgtagttttttctgtagattatgcttaaggcccggcgaaggggaatttgcccaggtaatggaaatattacaccgatacatagaattgtcaaagttcatgggatgaactcctaagagctgtgtattttatcgtataaatttttttaagtgtccaaccaatagcctggaattattaagtacataattaaataaaaacaaatatcccatggacctaatgcagtgaacagttacctcgttctcttaattgctcaggctaaggactcatacctgagtcttctatctcaggccttacatcttatataacaagccttactggcttaatcttcaaaatatgtagcgaatttaacgagttctcacaacctctgcttctaccacctgacggggtttgggacatgctacccaaaaatatggcacctagacatattgaatactttgaactgaaggaatttgagaaagaacatatgcaggaatgtctctaactttcttgcacctttctgctctgaagcaggacgtaataccctcatgtgagaattgccctgtctatacctggaataaaagtaacatctttatctctgaaaacacagggacgtagagacgaatatgaacatcaggccttgctaagtttcccccagtttattacccttagatcacagtcttttagccccatcacattttcccacaattctccattcttcttcaaacctactctaaacaacactaaggttaactatttattcgggtcttcatttctttatgaagtttccatgttatgtaaaactaacattaatatttatgcttttctcttgttaatttgtcttttgttacaggatccccagccagtgagcctaaaatgggtagaaggaaaagatatttcttaccctacgcacccaggtccaagtcatcattattttgtctgaaatttatcttcctaactgatttctctgcttccccattgtgccttaagagttagttttccacagagcagctcgagatatcttttcagatcattatatccctttgcttaaaaacctctaacagcttcctattaggcttagaataaagtacaaactccttaatgtgaaattgagt

SEQ ID NO: 287401 - DNA, 843 bp, Homo sapiens
gatcagtctaggaggtccagtatctaaataggagtcatagaaaaagaaaaatggcaacacagagggaaggaaataattgaggaactaattcaagaacatttattggaacttgaggacattagttttcatattgaaaggacccatcgaatattcagcacaatggatgaaagtgacccacccaaagcacagtcatcctgagatttcagaacactggaaacagagatcctatgagttttcagagagaggaaaaaaaagtcacatacaaaaagtcagaattgccttggactctcaacaacaccagcagctagcaggcaatggagcaatgccttcaacattctgcaggaaaacacattccaagctttcctgcagattctctattcagccgaattataaatccaaggatgagggtagaataaagatatctacaggctgcaaggtctcaaaaacacatacctcccatgcaccctttctcaggaagctactggaagatgtgttccaccaaaataagggagtaatcaaaaaagataaaaacgcgatataggagcaccagtagaggacagacgtgaaaggggtacccaggatggtgatgaagaaagatcccaggatgacagcagtgcacaccagacaaaccagcccagatttgagcaggtcagaaggctccagggagatttctttgggtagtttaaattttgatagactgtctaatgcttttgaacctcttaaaaggagatttaaatagttggtgaagcatttgggggttggattagttataagaattatacatagaaaattaaacaaaaggacaagacattaactccaggtaaaacaaagttgtgaaggaaa

SEQ ID NO: 287402 - DNA, 2857 bp, Homo sapiens
gcagttctcttctaggggctgtgggcaaagggcattttgtaattaatattttcaagaatcagatgtctggagtgtaggggtgggcttggtggtggtggacgggcgggcctgctggagggggagcttggtcgctgttgtgattttaggtttgtttttgttttgttttgaatttggggggttgtggattgttgggggtagggagattttttttttttaaagctgcttcctcaactgtttcaagctgcaaatgtttaagagaataacagcccccactcccacaggaaccgctgtaattaaatcagacagtaggaagactgggctgctgccctcaaagccacagcccttggatgttccttttccgagagcagaaggtctaggctacagggagggggagattggctcccgtgagtcaggctgtgtttggggcttgggccctgggattgggaaaaggggatggggcagactttgtaagcatatgctaggtatccgatagtcctgtagaatttagtgaagaaaccttatacagtttttaatttttatataaactataactcagacccaagctacaaggttggaattttggttggttttttttttaagtaccctgcctgtataattgcatcagaatcccccaccccaccccccgcccccgtgtttgtattttgggttggtttacactcgcacatactcagttttcagttttcccctttttaaaaaataaatcgctgacaagtgtgaatcccgtgaagactttattttgtgttgtgtgtatcctgtacagcaaggttggtccttcgtaacaacggatgaaatggttcccttttttaaagcgccctctctccctccaccctcagcgcccctgtccttggcatgttttgtatcagcgatcattctgaactgtacatatttatgttgcgagaggcaaagggcaagttttggattttgcttcttccaagtttgtttttaaacgacaaataaaaaaagaacattttaaatacaagcggctccgtcccatgaccctcgccgtcagccggatccgtgcggtccgcgaggacccgggggagggcggttaccgaggcccgccaccgccggaagggtgggttccttgccttccgccccagtctggcgactgccatgacgtgggcggaagtggcgtcgccgcagcggggatgtggggcggggcctgccccaagagagtttcctaaagcgaggaaaccaagccgggcgcctcttgcaatggagacggtcatttcttcagatagctccccagctgtggaaaatgagcatcctcaagagaccccagaatccaacaatagcgtgtatacttccttcatgaagtctcatcgctgctatgacctgattcccacaagctccaaattggttgtatttgatacgtccctgcaggtgaagaaagctttttttgctttggtgactaacggtgtacgagctgcccctttatgggatagtaagaagcaaagttttgtgggcatgctgaccatcactgatttcatcaatatcctgcaccgctactataaatcagccttggtacagatctatgagctagaagaacacaagatagaaacttggagagaggtgtatctccaggactcctttaaaccgcttgtctgcatttctcctaatgccagcttgtttgatgctgtctcttcattaattcggaacaagatccacaggctgccagttattgacccagaatcaggcaatactttgtacatcctcacccacaagcgcattctgaagttcctcaaattgtttatcactgagttccccaagccagagttcatgtccaagtctctggaagagctacagattggcacctatgccaatattgctatggttcgcactaccacccccgtctatgtggctctggggatttttgtacagcatcgagtctcagccctgccagtggtggatgagaaggggcgtgtggtggacatctactccaagtttgatgttatcaatctggcagcagaaaagacctacaacaacctagatgtatctgtgactaaagccttgcaacatcgatcacattactttgagggtgttctcaagtgctacctgcatgagactctggagaccatcatcaacaggctagtggaagcagaggttcaccgacttgtagtggtggatgaaaatgatgtggtcaagggaattgtatcactgtctgacatcctgcaggccctggtgctcacaggtggagagaagaagccctgagctgggggaaggggtcatgcagcaccaggggatatgcccaactcactgcctgctggaagctctgtgggaatcagatgaaacttgagggaattgtgactctgttccctgttcagggtcccctgcccttctatctgggagctagggaaggtatgggggaggaaagagaatggatttatagctacccttaccctcacacatacacttgaaaaaactttcagcctagccagttctagcccctgtcctcttagatatatccccctttctgggtgaactataggctctgtgcctctcagacaaattctgatctctaagagatccccagacctcacttgcctctgcctccatcttggccctgattcaaccctaagataatagcacaacaaaattcttcataaagatatttttattcacctgttccgtgctatatggaggaggccaagtccatttagtgacatttcttcccataatgtgagtggggaggattgtggggaggaggggctttgggttcctgtgtttgtgcatatgaagggagatgggggttaggtggaggaggagagcagcgtggttagctaaggttattgctttttgtggcaaatctaattaaatgacaggaatctcttcacga

SEQ ID NO: 287403 - DNA, 1715 bp, Homo sapiens
gcgcccttaaagatggtgagggggctcatgctctgagtagaaggtggtgacctccaggagcggtgggatgatgagggcccgggcgcctcttgcaatggagacggtcatttcttcagatagctccccagctgtggaaaatgagcatcctcaagagaccccagaatccaacaatagcgtgtatacttccttcatgaagtctcatcgctgctatgacctgattcccacaagctccaaattggttgtatttgatacgtccctgcaggtgaagaaagctttttttgctttggtgactaacggtgtacgagctgcccctttatgggatagtaagaagcaaagttttgtgggcatgctgaccatcactgatttcatcaatatcctgcaccgctactataaatcagccttggtacagatctatgagctagaagaacacaagatagaaacttggagagaggtgtatctccaggactcctttaaaccgcttgtctgcatttctcctaatgccagcttgtttgatgctgtctcttcattaattcggaacaagatccacaggctgccagttattgacccagaatcaggcaatactttgtacatcctcacccacaagcgcattctgaagttcctcaaattgtttatcactgagttccccaagccagagttcatgtccaagtctctggaagagctacagattggcacctatgccaatattgctatggttcgcactaccacccccgtctatgtggctctggggatttttgtacagcatcgagtctcagccctgccagtggtggatgagaaggggcgtgtggtggacatctactccaagtttgatgttatcaatctggcagcagaaaagacctacaacaacctagatgtatctgtgactaaagccttgcaacatcgatcacattactttgagggtgttctcaagtgctacctgcatgagactctggagaccatcatcaacaggctagtggaagcagaggttcaccgacttgtagtggtggatgaaaatgatgtggtcaagggaattgtatcactgtctgacatcctgcaggccctggtgctcacaggtggagagaagaagccctgagctgggggaaggggtcatgcagcaccaggggatatgcccaactcactgcctgctggaagctctgtgggaatcagatgaaacttgagggaattgtgactctgttccctgttcagggtcccctgcccttctatctgggagctagggaaggtatgggggaggaaagagaatggatttatagctacccttaccctcacacatacacttgaaaaaactttcagcctagccagttctagcccctgtcctcttagatatatccccctttctgggtgaactataggctctgtgcctctcagacaaattctgatctctaagagatccccagacctcacttgcctctgcctccatcttggccctgattcaaccctaagataatagcacaacaaaattcttcataaagatatttttattcacctgttccgtgctatatggaggaggccaagtccatttagtgacatttcttcccataatgtgagtggggaggattgtggggaggaggggctttgggttcctgtgtttgtgcatatgaagggagatgggggttaggtggaggaggagagcagcgtggttagctaaggttattgctttttgtggcaaatctaattaaatgacaggaatctcttcacga

SEQ ID NO: 287404 - DNA, 3238 bp, Homo sapiens
gcagttctcttctaggggctgtgggcaaagggcattttgtaattaatattttcaagaatcagatgtctggagtgtaggggtgggcttggtggtggtggacgggcgggcctgctggagggggagcttggtcgctgttgtgattttaggtttgtttttgttttgttttgaatttggggggttgtggattgttgggggtagggagattttttttttttaaagctgcttcctcaactgtttcaagctgcaaatgtttaagagaataacagcccccactcccacaggaaccgctgtaattaaatcagacagtaggaagactgggctgctgccctcaaagccacagcccttggatgttccttttccgagagcagaaggtctaggctacagggagggggagattggctcccgtgagtcaggctgtgtttggggcttgggccctgggattgggaaaaggggatggggcagactttgtaagcatatgctaggtatccgatagtcctgtagaatttagtgaagaaaccttatacagtttttaatttttatataaactataactcagacccaagctacaaggttggaattttggttggttttttttttaagtaccctgcctgtataattgcatcagaatcccccaccccaccccccgcccccgtgtttgtattttgggttggtttacactcgcacatactcagttttcagttttcccctttacagtcttctcccctcacctccaggaccctccccctttttaaaaaataaatcgctgacaagtgtgaatcccgtgaagactttattttgtgttgtgtgtatcctgtacagcaaggttggtccttcgtaacaacggatgaaatggttcccttttttaaagcgccctctctccctccaccctcagcgcccctgtccttggcatgttttgtatcagcgatcattctgaactgtacatatttatgttgcgagaggcaaagggcaagttttggattttgcttcttccaagtttgtttttaaacgacaaataaaaaaagaacattttaaatacaagcggctccgtcccatgaccctcgccgtcagccggatccgtgcggtccgcgaggacccgggggagggcggttaccgaggcccgccaccgccggaagggtgggttccttgccttccgccccagtctggcgactgccatgacgtgggcggaagtggcgtcgccgcagcggggatgtggggcggggcctgccccaagagagtttcctaaagcgaggaaaccaagccgggcgcctcttgcaatggagacggtcatttcttcagatagctccccagctgtggaaaatgagcatcctcaagagaccccagaatccaacaatagcgtgtatacttccttcatgaagtctcatcgctgctatgacctgattcccacaagctccaaattggttgtatttgatacgtccctgcaggtgaagaaagctttttttgctttggtgactaacggtgtacgagctgcccctttatgggatagtaagaagcaaagttttgtgggcatgctgaccatcactgatttcatcaatatcctgcaccgctactataaatcagccttggtacagatctatgagctagaagaacacaagatagaaacttggagagaggtgtatctccaggactcctttaaaccgcttgtctgcatttctcctaatgccagcttgtttgatgctgtctcttcattaattcggaacaagatccacaggctgccagttattgacccagaatcaggcaatactttgtacatcctcacccacaagcgcattctgaagttcctcaaattgtttatcactgagttccccaagccagagttcatgtccaagtctctggaagagctacagattggcacctatgccaatattgctatggttcgcactaccacccccgtctatgtggctctggggatttttgtacagcatcgagtctcagccctgccagtggtggatgagaaggggcgtgtggtggacatctactccaagtttgatgttatcaatctggcagcagaaaagacctacaacaacctagatgtatctgtgactaaagccttgcaacatcgatcacattactttgagggtgttctcaagtgctacctgcatgagactctggagaccatcatcaacaggctagtggaagcagaggttcaccgacttgtagtggtggatgaaaatgatgtggtcaagggaattgtatcactgtctgacatcctgcaggccctggtgctcacaggtggagagaagaagccctgagctgggggaaggggtcatgcagcaccaggggatatgcccaactcactgcctgctggaagctctgtgggaatcagatgaaacttgagggaattgtgactctgttccctgttcagggtcccctgcccttctatctgggagctagggaaggtatgggggaggaaagagaatggatttatagctacccttaccctcacacatacacttgaaaaaactttcagcctagccagttctagcccctgtcctcttagatatatccccctttctgggtgaactataggctctgtgcctctcagacaaattctgatctctaagagatccccagacctcacttgcctctgcctccatcttggccctgattcaaccctaagataatagcacaacaaaattcttcataaagatatttttattcacctgttccgtgctatatggaggaggccaagtccatttagtgacatttcttcccataatgtgagtggggaggattgtggggaggaggggctttgggttcctgtgtttgtgcatatgaagggagatgggggttaggtggaggaggagagcagcgtggttagctaaggttattgctttttgtggcaaatctaattaaatgacaggaatctcttcacgaaaaaaaaaaaaaaaaaaaaaaaaaaaaactttttgggacacaagaacaccacaggaaaaactataaaacaaaacataaagagagacggaaaccccaaagaggaagcacaaagagcccaaagaggtaccccaaaagagaacacgagaaacaggaaaaaggggaaggacatctcacacaacaataaaaaaaccgcacgaggcggagacacgcacgaggacggtagagaacaaaaacacagaaagggacacagaggagcgacaacaacgggagaccaaaacacacgagagatacgcacaaagagaggcgagaattaaaaataccccacaagagagagaggagaagg

SEQ ID NO: 287405 - DNA, 1928 bp, Homo sapiens
ttttagaggtttgagagcgcagggttgtgagccggctttgctgggtgaggcacggggcgtccagagggatctccgcttgcaggggacccatggaagatttatgagcaagtcagtgaatgtcctttaggaatgttcatagcagctttctgtacatggactgagctacttcgaaaagtaaagtttcttgttaatggggatgaaagtcccttccaaatctgagatgctttggtgaacaaacttggtgaaagcatgaaagataaattgaagaacagatagatttgggccaaggaccccagtttaaacaacgttggagacggtcatttcttcagatagctccccagctgtggaaaatgagcatcctcaagagaccccagaatccaacaatagcgtgtatacttccttcatgaagtctcatcgctgctatgacctgattcccacaagctccaaattggttgtatttgatacgtccctgcaggtgaagaaagctttttttgctttggtgactaacggtgtacgagctgcccctttatgggatagtaagaagcaaagttttgtgggcatgctgaccatcactgatttcatcaatatcctgcaccgctactataaatcagccttggtacagatctatgagctagaagaacacaagatagaaacttggagagaggtgtatctccaggactcctttaaaccgcttgtctgcatttctcctaatgccagcttgtttgatgctgtctcttcattaattcggaacaagatccacaggctgccagttattgacccagaatcaggcaatactttgtacatcctcacccacaagcgcattctgaagttcctcaaattgtttatcactgagttccccaagccagagttcatgtccaagtctctggaagagctacagattggcacctatgccaatattgctatggttcgcactaccacccccgtctatgtggctctggggatttttgtacagcatcgagtctcagccctgccagtggtggatgagaaggggcgtgtggtggacatctactccaagtttgatgttatcaatctggcagcagaaaagacctacaacaacctagatgtatctgtgactaaagccttgcaacatcgatcacattactttgagggtgttctcaagtgctacctgcatgagactctggagaccatcatcaacaggctagtggaagcagaggttcaccgacttgtagtggtggatgaaaatgatgtggtcaagggaattgtatcactgtctgacatcctgcaggccctggtgctcacaggtggagagaagaagccctgagctgggggaaggggtcatgcagcaccaggggatatgcccaactcactgcctgctggaagctctgtgggaatcagatgaaacttgagggaattgtgactctgttccctgttcagggtcccctgcccttctatctgggagctagggaaggtatgggggaggaaagagaatggatttatagctacccttaccctcacacatacacttgaaaaaactttcagcctagccagttctagcccctgtcctcttagatatatccccctttctgggtgaactataggctctgtgcctctcagacaaattctgatctctaagagatccccagacctcacttgcctctgcctccatcttggccctgattcaaccctaagataatagcacaacaaaattcttcataaagatatttttattcacctgttccgtgctatatggaggaggccaagtccatttagtgacatttcttcccataatgtgagtggggaggattgtggggaggaggggctttgggttcctgtgtttgtgcatatgaagggagatgggggttaggtggaggaggagagcagcgtggttagctaaggttattgctttttgtggcaaatctaattaaatgacaggaatctcttcacga

SEQ ID NO: 287406 - DNA, 3069 bp, Homo sapiens
gcagttctcttctaggggctgtgggcaaagggcattttgtaattaatattttcaagaatcagatgtctggagtgtaggggtgggcttggtggtggtggacgggcgggcctgctggagggggagcttggtcgctgttgtgattttaggtttgtttttgttttgttttgaatttggggggttgtggattgttgggggtagggagattttttttttttaaagctgcttcctcaactgtttcaagctgcaaatgtttaagagaataacagcccccactcccacaggaaccgctgtaattaaatcagacagtaggaagactgggctgctgccctcaaagccacagcccttggatgttccttttccgagagcagaaggtctaggctacagggagggggagattggctcccgtgagtcaggctgtgtttggggcttgggccctgggattgggaaaaggggatggggcagactttgtaagcatatgctaggtatccgatagtcctgtagaatttagtgaagaaaccttatacagtttttaatttttatataaactataactcagacccaagctacaaggttggaattttggttggttttttttttaagtaccctgcctgtataattgcatcagaatcccccaccccaccccccgcccccgtgtttgtattttgggttggtttacactcgcacatactcagttttcagttttcccctttacagtcttctcccctcacctccaggaccctccccctttttaaaaaataaatcgctgacaagtgtgaatcccgtgaagactttattttgtgttgtgtgtatcctgtacagcaaggttggtccttcgtaacaacggatgaaatggttcccttttttaaagcgccctctctccctccaccctcagcgcccctgtccttggcatgttttgtatcagcgatcattctgaactgtacatatttatgttgcgagaggcaaagggcaagttttggattttgcttcttccaagtttgtttttaaacgacaaataaaaaaagaacattttaaatacaagcggctccgtcccatgaccctcgccgtcagccggatccgtgcggtccgcgaggacccgggggagggcggttaccgaggcccgccaccgccggaagggtgggttccttgccttccgccccagtctggcgactgccatgacgtgggcggaagtggcgtcgccgcagcggggatgtggggcggggcctgccccaagagagtttcctaaagcgaggaaaccaagccgggcgcctcttgcaatggagacggtcatttcttcagatagctccccagctgtggaaaatgagcatcctcaaggaagctactggaagatgtgttccaccaaaataagggagtaatcaaaaaagataaaaacgcgatataggagcaccagtagaggacagacgtgaaaggggtacccaggatggtgatgaagaaagatcccaggatgacagcagtgcacaccagacaaaccagcccagatttgagcagagaccccagaatccaacaatagcgtgtatacttccttcatgaagtctcatcgctgctatgacctgattcccacaagctccaaattggttgtatttgatacgtccctgcaggtgaagaaagctttttttgctttggtgactaacggtgtacgagctgcccctttatgggatagtaagaagcaaagttttgtgggcatgctgaccatcactgatttcatcaatatcctgcaccgctactataaatcagccttggtacagatctatgagctagaagaacacaagatagaaacttggagagaggtgtatctccaggactcctttaaaccgcttgtctgcatttctcctaatgccagcttgtttgatgctgtctcttcattaattcggaacaagatccacaggctgccagttattgacccagaatcaggcaatactttgtacatcctcacccacaagcgcattctgaagttcctcaaattgtttatcactgagttccccaagccagagttcatgtccaagtctctggaagagctacagattggcacctatgccaatattgctatggttcgcactaccacccccgtctatgtggctctggggatttttgtacagcatcgagtctcagccctgccagtggtggatgagaaggggcgtgtggtggacatctactccaagtttgatgttatcaatctggcagcagaaaagacctacaacaacctagatgtatctgtgactaaagccttgcaacatcgatcacattactttgagggtgttctcaagtgctacctgcatgagactctggagaccatcatcaacaggctagtggaagcagaggttcaccgacttgtagtggtggatgaaaatgatgtggtcaagggaattgtatcactgtctgacatcctgcaggccctggtgctcacaggtggagagaagaagccctgagctgggggaaggggtcatgcagcaccaggggatatgcccaactcactgcctgctggaagctctgtgggaatcagatgaaacttgagggaattgtgactctgttccctgttcagggtcccctgcccttctatctgggagctagggaaggtatgggggaggaaagagaatggatttatagctacccttaccctcacacatacacttgaaaaaactttcagcctagccagttctagcccctgtcctcttagatatatccccctttctgggtgaactataggctctgtgcctctcagacaaattctgatctctaagagatccccagacctcacttgcctctgcctccatcttggccctgattcaaccctaagataatagcacaacaaaattcttcataaagatatttttattcacctgttccgtgctatatggaggaggccaagtccatttagtgacatttcttcccataatgtgagtggggaggattgtggggaggaggggctttgggttcctgtgtttgtgcatatgaagggagatgggggttaggtggaggaggagagcagcgtggttagctaaggttattgctttttgtggcaaatctaattaaatgacaggaatctcttcacga

SEQ ID NO: 287407 - DNA, 1638 bp, Homo sapiens
tgagagaccgtgttgcaatggagacggtcatttcttcagatagctccccagctgtggaaaatgagcatcctcaagagaccccagaatccaacaatagcgtgtatacttccttcatgaagtctcatcgctgctatgacctgattcccacaagctccaaattggttgtatttgatacgtccctgcaggtgaagaaagctttttttgctttggtgactaacggtgtacgagctgcccctttatgggatagtaagaagcaaagttttgtgggcatgctgaccatcactgatttcatcaatatcctgcaccgctactataaatcagccttggtacagatctatgagctagaagaacacaagatagaaacttggagagaggtgtatctccaggactcctttaaaccgcttgtctgcatttctcctaatgccagcttgtttgatgctgtctcttcattaattcggaacaagatccacaggctgccagttattgacccagaatcaggcaatactttgtacatcctcacccacaagcgcattctgaagttcctcaaattgtttatcactgagttccccaagccagagttcatgtccaagtctctggaagagctacagattggcacctatgccaatattgctatggttcgcactaccacccccgtctatgtggctctggggatttttgtacagcatcgagtctcagccctgccagtggtggatgagaaggggcgtgtggtggacatctactccaagtttgatgttatcaatctggcagcagaaaagacctacaacaacctagatgtatctgtgactaaagccttgcaacatcgatcacattactttgagggtgttctcaagtgctacctgcatgagactctggagaccatcatcaacaggctagtggaagcagaggttcaccgacttgtagtggtggatgaaaatgatgtggtcaagggaattgtatcactgtctgacatcctgcaggccctggtgctcacaggtggagagaagaagccctgagctgggggaaggggtcatgcagcaccaggggatatgcccaactcactgcctgctggaagctctgtgggaatcagatgaaacttgagggaattgtgactctgttccctgttcagggtcccctgcccttctatctgggagctagggaaggtatgggggaggaaagagaatggatttatagctacccttaccctcacacatacacttgaaaaaactttcagcctagccagttctagcccctgtcctcttagatatatccccctttctgggtgaactataggctctgtgcctctcagacaaattctgatctctaagagatccccagacctcacttgcctctgcctccatcttggccctgattcaaccctaagataatagcacaacaaaattcttcataaagatatttttattcacctgttccgtgctatatggaggaggccaagtccatttagtgacatttcttcccataatgtgagtggggaggattgtggggaggaggggctttgggttcctgtgtttgtgcatatgaagggagatgggggttaggtggaggaggagagcagcgtggttagctaaggttattgctttttgtggcaaatctaattaaatgacaggaatctcttcacga

SEQ ID NO: 287408 - DNA, 2944 bp, Homo sapiens
gcagttctcttctaggggctgtgggcaaagggcattttgtaattaatattttcaagaatcagatgtctggagtgtaggggtgggcttggtggtggtggacgggcgggcctgctggagggggagcttggtcgctgttgtgattttaggtttgtttttgttttgttttgaatttggggggttgtggattgttgggggtagggagattttttttttttaaagctgcttcctcaactgtttcaagctgcaaatgtttaagagaataacagcccccactcccacaggaaccgctgtaattaaatcagacagtaggaagactgggctgctgccctcaaagccacagcccttggatgttccttttccgagagcagaaggtctaggctacagggagggggagattggctcccgtgagtcaggctgtgtttggggcttgggccctgggattgggaaaaggggatggggcagactttgtaagcatatgctaggtatccgatagtcctgtagaatttagtgaagaaaccttatacagtttttaatttttatataaactataactcagacccaagctacaaggttggaattttggttggttttttttttaagtaccctgcctgtataattgcatcagaatcccccaccccaccccccgcccccgtgtttgtattttgggttggtttacactcgcacatactcagttttcagttttcccctttacagtcttctcccctcacctccaggaccctccccctttttaaaaaataaatcgctgacaagtgtgaatcccgtgaagactttattttgtgttgtgtgtatcctgtacagcaaggttggtccttcgtaacaacggatgaaatggttcccttttttaaagcgccctctctccctccaccctcagcgcccctgtccttggcatgttttgtatcagcgatcattctgaactgtacatatttatgttgcgagaggcaaagggcaagttttggattttgcttcttccaagtttgtttttaaacgacaaataaaaaaagaacattttaaatacaagcggctccgtcccatgaccctcgccgtcagccggatccgtgcggtccgcgaggacccgggggagggcggttaccgaggcccgccaccgccggaagggtgggttccttgccttccgccccagtctggcgactgccatgacgtgggcggaagtggcgtcgccgcagcggggatgtggggcggggcctgccccaagagagtttcctaaagcgaggaaaccaagccgggcgcctcttgcaatggagacggtcatttcttcagatagctccccagctgtggaaaatgagcatcctcaagagaccccagaatccaacaatagcgtgtatacttccttcatgaagtctcatcgctgctatgacctgattcccacaagctccaaattggttgtatttgatacgtccctgcagtcctgcccctgtggatttgcctttatgattattactgtcttggctacaggtgaagaaagctttttttgctttggtgactaacggtgtacgagctgcccctttatgggatagtaagaagcaaagttttgtgggcatgctgaccatcactgatttcatcaatatcctgcaccgctactataaatcagccttggtacagatctatgagctagaagaacacaagatagaaacttggagagaggtgtatctccaggactcctttaaaccgcttgtctgcatttctcctaatgccagcttgtttgatgctgtctcttcattaattcggaacaagatccacaggctgccagttattgacccagaatcaggcaatactttgtacatcctcacccacaagcgcattctgaagttcctcaaattgtttatcactgagttccccaagccagagttcatgtccaagtctctggaagagctacagattggcacctatgccaatattgctatggttcgcactaccacccccgtctatgtggctctggggatttttgtacagcatcgagtctcagccctgccagtggtggatgagaaggggcgtgtggtggacatctactccaagtttgatgttatcaatctggcagcagaaaagacctacaacaacctagatgtatctgtgactaaagccttgcaacatcgatcacattactttgagggtgttctcaagtgctacctgcatgagactctggagaccatcatcaacaggctagtggaagcagaggttcaccgacttgtagtggtggatgaaaatgatgtggtcaagggaattgtatcactgtctgacatcctgcaggccctggtgctcacaggtggagagaagaagccctgagctgggggaaggggtcatgcagcaccaggggatatgcccaactcactgcctgctggaagctctgtgggaatcagatgaaacttgagggaattgtgactctgttccctgttcagggtcccctgcccttctatctgggagctagggaaggtatgggggaggaaagagaatggatttatagctacccttaccctcacacatacacttgaaaaaactttcagcctagccagttctagcccctgtcctcttagatatatccccctttctgggtgaactataggctctgtgcctctcagacaaattctgatctctaagagatccccagacctcacttgcctctgcctccatcttggccctgattcaaccctaagataatagcacaacaaaattcttcataaagatatttttattcacctgttccgtgctatatggaggaggccaagtccatttagtgacatttcttcccataatgtgagtggggaggattgtggggaggaggggctttgggttcctgtgtttgtgcatatgaagggagatgggggttaggtggaggaggagagcagcgtggttagctaaggttattgctttttgtggcaaatctaattaaatgacaggaatctcttcacga

SEQ ID NO: 287409 - DNA, 2785 bp, Homo sapiens
gcagttctcttctaggggctgtgggcaaagggcattttgtaattaatattttcaagaatcagatgtctggagtgtaggggtgggcttggtggtggtggacgggcgggcctgctggagggggagcttggtcgctgttgtgattttaggtttgtttttgttttgttttgaatttggggggttgtggattgttgggggtagggagattttttttttttaaagctgcttcctcaactgtttcaagctgcaaatgtttaagagaataacagcccccactcccacaggaaccgctgtaattaaatcagacagtaggaagactgggctgctgccctcaaagccacagcccttggatgttccttttccgagagcagaaggtctaggctacagggagggggagattggctcccgtgagtcaggctgtgtttggggcttgggccctgggattgggaaaaggggatggggcagactttgtaagcatatgctaggtatccgatagtcctgtagaatttagtgaagaaaccttatacagtttttaatttttatataaactataactcagacccaagctacaaggttggaattttggttggttttttttttaagtaccctgcctgtataattgcatcagaatcccccaccccaccccccgcccccgtgtttgtattttgggttggtttacactcgcacatactcagttttcagttttcccctttacagtcttctcccctcacctccaggaccctccccctttttaaaaaataaatcgctgacaagtgtgaatcccgtgaagactttattttgtgttgtgtgtatcctgtacagcaaggttggtccttcgtaacaacggatgaaatggttcccttttttaaagcgccctctctccctccaccctcagcgcccctgtccttggcatgttttgtatcagcgatcattctgaactgtacatatttatgttgcgagaggcaaagggcaagttttggattttgcttcttccaagtttgtttttaaacgacaaataaaaaaagaacattttaaatacaagcggctccgtcccatgaccctcgccgtcagccggatccgtgcggtccgcgaggacccgggggagggcggttaccgaggcccgccaccgccggaagggtgggttccttgccttccgccccagtctggcgactgccatgacgtgggcggaagtggcgtcgccgcagcggggatgtggggcggggcctgccccaagagagtttcctaaagcgaggaaaccaagccgggcgcctcttgcaatggagacggtcatttcttcagatagctccccagctgtggaaaatgagcatcctcaaggtgaagaaagctttttttgctttggtgactaacggtgtacgagctgcccctttatgggatagtaagaagcaaagttttgtgggcatgctgaccatcactgatttcatcaatatcctgcaccgctactataaatcagccttggtacagatctatgagctagaagaacacaagatagaaacttggagagaggtgtatctccaggactcctttaaaccgcttgtctgcatttctcctaatgccagcttgtttgatgctgtctcttcattaattcggaacaagatccacaggctgccagttattgacccagaatcaggcaatactttgtacatcctcacccacaagcgcattctgaagttcctcaaattgtttatcactgagttccccaagccagagttcatgtccaagtctctggaagagctacagattggcacctatgccaatattgctatggttcgcactaccacccccgtctatgtggctctggggatttttgtacagcatcgagtctcagccctgccagtggtggatgagaaggggcgtgtggtggacatctactccaagtttgatgttatcaatctggcagcagaaaagacctacaacaacctagatgtatctgtgactaaagccttgcaacatcgatcacattactttgagggtgttctcaagtgctacctgcatgagactctggagaccatcatcaacaggctagtggaagcagaggttcaccgacttgtagtggtggatgaaaatgatgtggtcaagggaattgtatcactgtctgacatcctgcaggccctggtgctcacaggtggagagaagaagccctgagctgggggaaggggtcatgcagcaccaggggatatgcccaactcactgcctgctggaagctctgtgggaatcagatgaaacttgagggaattgtgactctgttccctgttcagggtcccctgcccttctatctgggagctagggaaggtatgggggaggaaagagaatggatttatagctacccttaccctcacacatacacttgaaaaaactttcagcctagccagttctagcccctgtcctcttagatatatccccctttctgggtgaactataggctctgtgcctctcagacaaattctgatctctaagagatccccagacctcacttgcctctgcctccatcttggccctgattcaaccctaagataatagcacaacaaaattcttcataaagatatttttattcacctgttccgtgctatatggaggaggccaagtccatttagtgacatttcttcccataatgtgagtggggaggattgtggggaggaggggctttgggttcctgtgtttgtgcatatgaagggagatgggggttaggtggaggaggagagcagcgtggttagctaaggttattgctttttgtggcaaatctaattaaatgacaggaatctcttcacga

SEQ ID NO: 287410 - DNA, 3094 bp, Homo sapiens
gcagttctcttctaggggctgtgggcaaagggcattttgtaattaatattttcaagaatcagatgtctggagtgtaggggtgggcttggtggtggtggacgggcgggcctgctggagggggagcttggtcgctgttgtgattttaggtttgtttttgttttgttttgaatttggggggttgtggattgttgggggtagggagattttttttttttaaagctgcttcctcaactgtttcaagctgcaaatgtttaagagaataacagcccccactcccacaggaaccgctgtaattaaatcagacagtaggaagactgggctgctgccctcaaagccacagcccttggatgttccttttccgagagcagaaggtctaggctacagggagggggagattggctcccgtgagtcaggctgtgtttggggcttgggccctgggattgggaaaaggggatggggcagactttgtaagcatatgctaggtatccgatagtcctgtagaatttagtgaagaaaccttatacagtttttaatttttatataaactataactcagacccaagctacaaggttggaattttggttggttttttttttaagtaccctgcctgtataattgcatcagaatcccccaccccaccccccgcccccgtgtttgtattttgggttggtttacactcgcacatactcagttttcagttttcccctttacagtcttctcccctcacctccaggaccctccccctttttaaaaaataaatcgctgacaagtgtgaatcccgtgaagactttattttgtgttgtgtgtatcctgtacagcaaggttggtccttcgtaacaacggatgaaatggttcccttttttaaagcgccctctctccctccaccctcagcgcccctgtccttggcatgttttgtatcagcgatcattctgaactgtacatatttatgttgcgagaggcaaagggcaagttttggattttgcttcttccaagtttgtttttaaacgacaaataaaaaaagaacattttaaatacaagcggctccgtcccatgaccctcgccgtcagccggatccgtgcggtccgcgaggacccgggggagggcggttaccgaggcccgccaccgccggaagggtgggttccttgccttccgccccagtctggcgactgccatgacgtgggcggaagtggcgtcgccgcagcggggatgtggggcggggcctgccccaagagagtttcctaaagcgaggaaaccaagccgggcgcctcttgcaatggagacggtcatttcttcagatagctccccagctgtggaaaatgagcatcctcaagagaccccagaatccaacaatagcgtgtatacttccttcatgaagtctcatcgctgctatgacctgattcccacaagctccaaattggttgtatttgatacgtccctgcaggtgggtgaaatcctcttttcccttccccctttggagcctgtggtttaatacctctcatcctatctcatcctaagggtaatatccttatccttctgtgaagttagtctcatgttttacccaacatgcccaaacactgttctttttttacagtcctgcccctgtggatttgcctttatgattattactgtcttggctacaggtgaagaaagctttttttgctttggtgactaacggtgtacgagctgcccctttatgggatagtaagaagcaaagttttgtgggcatgctgaccatcactgatttcatcaatatcctgcaccgctactataaatcagccttggtacagatctatgagctagaagaacacaagatagaaacttggagagaggtgtatctccaggactcctttaaaccgcttgtctgcatttctcctaatgccagcttgtttgatgctgtctcttcattaattcggaacaagatccacaggctgccagttattgacccagaatcaggcaatactttgtacatcctcacccacaagcgcattctgaagttcctcaaattgtttatcactgagttccccaagccagagttcatgtccaagtctctggaagagctacagattggcacctatgccaatattgctatggttcgcactaccacccccgtctatgtggctctggggatttttgtacagcatcgagtctcagccctgccagtggtggatgagaaggggcgtgtggtggacatctactccaagtttgatgttatcaatctggcagcagaaaagacctacaacaacctagatgtatctgtgactaaagccttgcaacatcgatcacattactttgagggtgttctcaagtgctacctgcatgagactctggagaccatcatcaacaggctagtggaagcagaggttcaccgacttgtagtggtggatgaaaatgatgtggtcaagggaattgtatcactgtctgacatcctgcaggccctggtgctcacaggtggagagaagaagccctgagctgggggaaggggtcatgcagcaccaggggatatgcccaactcactgcctgctggaagctctgtgggaatcagatgaaacttgagggaattgtgactctgttccctgttcagggtcccctgcccttctatctgggagctagggaaggtatgggggaggaaagagaatggatttatagctacccttaccctcacacatacacttgaaaaaactttcagcctagccagttctagcccctgtcctcttagatatatccccctttctgggtgaactataggctctgtgcctctcagacaaattctgatctctaagagatccccagacctcacttgcctctgcctccatcttggccctgattcaaccctaagataatagcacaacaaaattcttcataaagatatttttattcacctgttccgtgctatatggaggaggccaagtccatttagtgacatttcttcccataatgtgagtggggaggattgtggggaggaggggctttgggttcctgtgtttgtgcatatgaagggagatgggggttaggtggaggaggagagcagcgtggttagctaaggttattgctttttgtggcaaatctaattaaatgacaggaatctcttcacga

SEQ ID NO: 287411 - DNA, 2841 bp, Homo sapiens
gcagttctcttctaggggctgtgggcaaagggcattttgtaattaatattttcaagaatcagatgtctggagtgtaggggtgggcttggtggtggtggacgggcgggcctgctggagggggagcttggtcgctgttgtgattttaggtttgtttttgttttgttttgaatttggggggttgtggattgttgggggtagggagattttttttttttaaagctgcttcctcaactgtttcaagctgcaaatgtttaagagaataacagcccccactcccacaggaaccgctgtaattaaatcagacagtaggaagactgggctgctgccctcaaagccacagcccttggatgttccttttccgagagcagaaggtctaggctacagggagggggagattggctcccgtgagtcaggctgtgtttggggcttgggccctgggattgggaaaaggggatggggcagactttgtaagcatatgctaggtatccgatagtcctgtagaatttagtgaagaaaccttatacagtttttaatttttatataaactataactcagacccaagctacaaggttggaattttggttggttttttttttaagtaccctgcctgtataattgcatcagaatcccccaccccaccccccgcccccgtgtttgtattttgggttggtttacactcgcacatactcagttttcagttttcccctttacagtcttctcccctcacctccaggaccctccccctttttaaaaaataaatcgctgacaagtgtgaatcccgtgaagactttattttgtgttgtgtgtatcctgtacagcaaggttggtccttcgtaacaacggatgaaatggttcccttttttaaagcgccctctctccctccaccctcagcgcccctgtccttggcatgttttgtatcagcgatcattctgaactgtacatatttatgttgcgagaggcaaagggcaagttttggattttgcttcttccaagtttgtttttaaacgacaaataaaaaaagaacattttaaatacaagcggctccgtcccatgaccctcgccgtcagccggatccgtgcggtccgcgaggacccgggggagggcggttaccgaggcccgccaccgccggaagggtgggttccttgccttccgccccagtctggcgactgccatgacgtgggcggaagtggcgtcgccgcagcggggatgtggggcggggcctgccccaagagagtttcctaaagcgaggaaaccaagccgggcgcctcttgcaatggagacggtcatttcttcagatagctccccagctgtggaaaatgagcatcctcaagagaccccagaatccaacaatagcgtgtatacttccttcatgaagtctcatcgctgctatgacctgattcccacaagctccaaattggttgtatttgatacgtccctgcaggtgaagaaagctttttttgctttggtgactaacggtgtacgagctgcccctttatgggatagtaagaagcaaagttttgtgggcatgctgaccatcactgatttcatcaatatcctgcaccgctactataaatcagccttggtacagatctatgagctagaagaacacaagatagaaacttggagagaggtgtatctccaggactcctttaaaccgcttgtctgcatttctcctaatgccagcttgtttgatgctgtctcttcattaattcggaacaagatccacaggctgccagttattgacccagaatcaggcaatactttgtacatcctcacccacaagcgcattctgaagttcctcaaattgtttatcactgagttccccaagccagagttcatgtccaagtctctggaagagctacagattggcacctatgccaatattgctatggttcgcactaccacccccgtctatgtggctctggggatttttgtacagcatcgagtctcagccctgccagtggtggatgagaaggggcgtgtggtggacatctactccaagtttgatgttatcaatctggcagcagaaaagacctacaacaacctagatgtatctgtgactaaagccttgcaacatcgatcacattactttgagggtgttctcaagtgctacctgcatgagactctggagaccatcatcaacaggctagtggaagcagaggttcaccgacttgtagtggtggatgaaaatgatgtggtcaagggaattgtatcactgtctgacatcctgcaggccctggtgctcacaggtggagagaagaagccctgagctgggggaaggggtcatgcagcaccaggggatatgcccaactcactgcctgctggaagctctgtgggaatcagatgaaacttgagggaattgtgactctgttccctgttcagggtcccctgcccttctatctgggagctagggaaggtatgggggaggaaagagaatggatttatagctacccttaccctcacacatacacttgaatctgggtgaactataggctctgtgcctctcagacaaattctgatctctaagagatccccagacctcacttgcctctgcctccatcttggccctgattcaaccctaagataatagcacaacaaaattcttcataaagatatttttattcacctgttccgtgctatatggaggaggccaagtccatttagtgacatttcttcccataatgtgagtggggaggattgtggggaggaggggctttgggttcctgtgtttgtgcatatgaagggagatgggggttaggtggaggaggagagcagcgtggttagctaaggttattgctttttgtggcaaatctaattaaatgacaggaatctcttcacga

SEQ ID NO: 287412 - DNA, 2211 bp, Homo sapiens
gatcagtctaggaggtccagtatctaaataggagtcatagaaaaagaaaaatggcaacacagagggaaggaaataattgaggaactaattcaagaacatttattggaacttgaggacattagttttcatattgaaaggacccatcgaatattcagcacaatggatgaaagtgacccacccaaagcacagtcatcctgagatttcagaacactggaaacagagatcctatgagttttcagagagaggaaaaaaaagtcacatacaaaaagtcagaattgccttggactctcaacaacaccagcagctagcaggcaatggagcaatgccttcaacattctgcaggaaaacacattccaagctttcctgcagattctctattcagccgaattataaatccaaggatgagggtagaataaagatatctacaggctgcaaggtctcaaaaacacatacctcccatgcaccctttctcaggaagctactggaagatgtgttccaccaaaataagggagtaatcaaaaaagataaaaacgcgatataggagcaccagtagaggacagacgtgaaaggggtacccaggatggtgatgaagaaagatcccaggatgacagcagtgcacaccagacaaaccagcccagatttgagcagagaccccagaatccaacaatagcgtgtatacttccttcatgaagtctcatcgctgctatgacctgattcccacaagctccaaattggttgtatttgatacgtccctgcaggtgaagaaagctttttttgctttggtgactaacggtgtacgagctgcccctttatgggatagtaagaagcaaagttttgtgggcatgctgaccatcactgatttcatcaatatcctgcaccgctactataaatcagccttggtacagatctatgagctagaagaacacaagatagaaacttggagagaggtgtatctccaggactcctttaaaccgcttgtctgcatttctcctaatgccagcttgtttgatgctgtctcttcattaattcggaacaagatccacaggctgccagttattgacccagaatcaggcaatactttgtacatcctcacccacaagcgcattctgaagttcctcaaattgtttatcactgagttccccaagccagagttcatgtccaagtctctggaagagctacagattggcacctatgccaatattgctatggttcgcactaccacccccgtctatgtggctctggggatttttgtacagcatcgagtctcagccctgccagtggtggatgagaaggggcgtgtggtggacatctactccaagtttgatgttatcaatctggcagcagaaaagacctacaacaacctagatgtatctgtgactaaagccttgcaacatcgatcacattactttgagggtgttctcaagtgctacctgcatgagactctggagaccatcatcaacaggctagtggaagcagaggttcaccgacttgtagtggtggatgaaaatgatgtggtcaagggaattgtatcactgtctgacatcctgcaggccctggtgctcacaggtggagagaagaagccctgagctgggggaaggggtcatgcagcaccaggggatatgcccaactcactgcctgctggaagctctgtgggaatcagatgaaacttgagggaattgtgactctgttccctgttcagggtcccctgcccttctatctgggagctagggaaggtatgggggaggaaagagaatggatttatagctacccttaccctcacacatacacttgaaaaaactttcagcctagccagttctagcccctgtcctcttagatatatccccctttctgggtgaactataggctctgtgcctctcagacaaattctgatctctaagagatccccagacctcacttgcctctgcctccatcttggccctgattcaaccctaagataatagcacaacaaaattcttcataaagatatttttattcacctgttccgtgctatatggaggaggccaagtccatttagtgacatttcttcccataatgtgagtggggaggattgtggggaggaggggctttgggttcctgtgtttgtgcatatgaagggagatgggggttaggtggaggaggagagcagcgtggttagctaaggttattgctttttgtggcaaatctaattaaatgacaggaatctcttcacga

SEQ ID NO: 287413 - DNA, 2882 bp, Homo sapiens
gcagttctcttctaggggctgtgggcaaagggcattttgtaattaatattttcaagaatcagatgtctggagtgtaggggtgggcttggtggtggtggacgggcgggcctgctggagggggagcttggtcgctgttgtgattttaggtttgtttttgttttgttttgaatttggggggttgtggattgttgggggtagggagattttttttttttaaagctgcttcctcaactgtttcaagctgcaaatgtttaagagaataacagcccccactcccacaggaaccgctgtaattaaatcagacagtaggaagactgggctgctgccctcaaagccacagcccttggatgttccttttccgagagcagaaggtctaggctacagggagggggagattggctcccgtgagtcaggctgtgtttggggcttgggccctgggattgggaaaaggggatggggcagactttgtaagcatatgctaggtatccgatagtcctgtagaatttagtgaagaaaccttatacagtttttaatttttatataaactataactcagacccaagctacaaggttggaattttggttggttttttttttaagtaccctgcctgtataattgcatcagaatcccccaccccaccccccgcccccgtgtttgtattttgggttggtttacactcgcacatactcagttttcagttttcccctttacagtcttctcccctcacctccaggaccctccccctttttaaaaaataaatcgctgacaagtgtgaatcccgtgaagactttattttgtgttgtgtgtatcctgtacagcaaggttggtccttcgtaacaacggatgaaatggttcccttttttaaagcgccctctctccctccaccctcagcgcccctgtccttggcatgttttgtatcagcgatcattctgaactgtacatatttatgttgcgagaggcaaagggcaagttttggattttgcttcttccaagtttgtttttaaacgacaaataaaaaaagaacattttaaatacaagcggctccgtcccatgaccctcgccgtcagccggatccgtgcggtccgcgaggacccgggggagggcggttaccgaggcccgccaccgccggaagggtgggttccttgccttccgccccagtctggcgactgccatgacgtgggcggaagtggcgtcgccgcagcggggatgtggggcggggcctgccccaagagagtttcctaaagcgaggaaaccaagccgggcgcctcttgcaatggagacggtcatttcttcagatagctccccagctgtggaaaatgagcatcctcaaggtgaagaaagctttttttgctttggtgactaacggtgtacgagctgcccctttatgggatagtaagaagcaaagttttgtgggtaagcaaaagtttctggaacacaatattattggcatcttgtgctgggcagggagacaagcttcaggcagtgctgagggctctgtcttgtcctctaggcatgctgaccatcactgatttcatcaatatcctgcaccgctactataaatcagccttggtacagatctatgagctagaagaacacaagatagaaacttggagagaggtgtatctccaggactcctttaaaccgcttgtctgcatttctcctaatgccagcttgtttgatgctgtctcttcattaattcggaacaagatccacaggctgccagttattgacccagaatcaggcaatactttgtacatcctcacccacaagcgcattctgaagttcctcaaattgtttatcactgagttccccaagccagagttcatgtccaagtctctggaagagctacagattggcacctatgccaatattgctatggttcgcactaccacccccgtctatgtggctctggggatttttgtacagcatcgagtctcagccctgccagtggtggatgagaaggggcgtgtggtggacatctactccaagtttgatgttatcaatctggcagcagaaaagacctacaacaacctagatgtatctgtgactaaagccttgcaacatcgatcacattactttgagggtgttctcaagtgctacctgcatgagactctggagaccatcatcaacaggctagtggaagcagaggttcaccgacttgtagtggtggatgaaaatgatgtggtcaagggaattgtatcactgtctgacatcctgcaggccctggtgctcacaggtggagagaagaagccctgagctgggggaaggggtcatgcagcaccaggggatatgcccaactcactgcctgctggaagctctgtgggaatcagatgaaacttgagggaattgtgactctgttccctgttcagggtcccctgcccttctatctgggagctagggaaggtatgggggaggaaagagaatggatttatagctacccttaccctcacacatacacttgaaaaaactttcagcctagccagttctagcccctgtcctcttagatatatccccctttctgggtgaactataggctctgtgcctctcagacaaattctgatctctaagagatccccagacctcacttgcctctgcctccatcttggccctgattcaaccctaagataatagcacaacaaaattcttcataaagatatttttattcacctgttccgtgctatatggaggaggccaagtccatttagtgacatttcttcccataatgtgagtggggaggattgtggggaggaggggctttgggttcctgtgtttgtgcatatgaagggagatgggggttaggtggaggaggagagcagcgtggttagctaaggttattgctttttgtggcaaatctaattaaatgacaggaatctcttcacga

SEQ ID NO: 287414 - DNA, 1631 bp, Homo sapiens
ttgatatcgaattcgcggccgcgtcgacacggctgcgacgacagaagggggggcgcctcttgcaatggagacggtcatttcttcagatagctccccagctgtggtcatgaagtctcatcgctgctatgacctgattcccacaagctccaaattggttgtatttgatacgtccctgcaggtgaagaaagctttttttgctttggtgactaacggtgtacgagctgcccctttatgggatagtaagaagcaaagttttgtgggcatgctgaccatcactgatttcatcaatatcctgcaccgctactataaatcagccttggtacagatctatgagctagaagaacacaagatagaaacttggagagaggtgtatctccaggactcctttaaaccgcttgtctgcatttctcctaatgccagcttgtttgatgctgtctcttcattaattcggaacaagatccacaggctgccagttattgacccagaatcaggcaatactttgtacatcctcacccacaagcgcattctgaagttcctcaaattgtttatcactgagttccccaagccagagttcatgtccaagtctctggaagagctacagattggcacctatgccaatattgctatggttcgcactaccacccccgtctatgtggctctggggatttttgtacagcatcgagtctcagccctgccagtggtggatgagaaggggcgtgtggtggacatctactccaagtttgatgttatcaatctggcagcagaaaagacctacaacaacctagatgtatctgtgactaaagccttgcaacatcgatcacattactttgagggtgttctcaagtgctacctgcatgagactctggagaccatcatcaacaggctagtggaagcagaggttcaccgacttgtagtggtggatgaaaatgatgtggtcaagggaattgtatcactgtctgacatcctgcaggccctggtgctcacaggtggagagaagaagccctgagctgggggaaggggtcatgcagcaccaggggatatgcccaactcactgcctgctggaagctctgtgggaatcagatgaaacttgagggaattgtgactctgttccctgttcagggtcccctgcccttctatctgggagctagggaaggtatgggggaggaaagagaatggatttatagctacccttaccctcacacatacacttgaaaaaactttcagcctagccagttctagcccctgtcctcttagatatatccccctttctgggtgaactataggctctgtgcctctcagacaaattctgatctctaagagatccccagacctcacttgcctctgcctccatcttggccctgattcaaccctaagataatagcacaacaaaattcttcataaagatatttttattcacctgttccgtgctatatggaggaggccaagtccatttagtgacatttcttcccataatgtgagtggggaggattgtggggaggaggggctttgggttcctgtgtttgtgcatatgaagggagatgggggttaggtggaggaggagagcagcgtggttagctaaggttattgctttttgtggcaaatctaattaaatgacaggaatctcttcacga

SEQ ID NO: 287415 - DNA, 1439 bp, Homo sapiens
cttggtgatctagaggatccctgctgctagactattttatgggatagtaagaagcaaacgttttgtgggcatgctgaccatcactgatttcatcaatatcctgcaccgctactataaatcagccttggtacagatctatgagctagaagaacacaagatagaaacttggagagaggtgtatctccaggactcctttaaaccgcttgtctgcatttctcctaatgccagcttgtttgatgctgtctcttcattaattcggaacaagatccacaggctgccagttattgacccagaatcaggcaatactttgtacatcctcacccacaagcgcattctgaagttcctcaaattgtttatcactgagttccccaagccagagttcatgtccaagtctctggaagagctacagattggcacctatgccaatattgctatggttcgcactaccacccccgtctatgtggctctggggatttttgtacagcatcgagtctcagccctgccagtggtggatgagaaggggcgtgtggtggacatctactccaagtttgatgttatcaatctggcagcagaaaagacctacaacaacctagatgtatctgtgactaaagccttgcaacatcgatcacattactttgagggtgttctcaagtgctacctgcatgagactctggagaccatcatcaacaggctagtggaagcagaggttcaccgacttgtagtggtggatgaaaatgatgtggtcaagggaattgtatcactgtctgacatcctgcaggccctggtgctcacaggtggagagaagaagccctgagctgggggaaggggtcatgcagcaccaggggatatgcccaactcactgcctgctggaagctctgtgggaatcagatgaaacttgagggaattgtgactctgttccctgttcagggtcccctgcccttctatctgggagctagggaaggtatgggggaggaaagagaatggatttatagctacccttaccctcacacatacacttgaaaaaactttcagcctagccagttctagcccctgtcctcttagatatatccccctttctgggtgaactataggctctgtgcctctcagacaaattctgatctctaagagatccccagacctcacttgcctctgcctccatcttggccctgattcaaccctaagataatagcacaacaaaattcttcataaagatatttttattcacctgttccgtgctatatggaggaggccaagtccatttagtgacatttcttcccataatgtgagtggggaggattgtggggaggaggggctttgggttcctgtgtttgtgcatatgaagggagatgggggttaggtggaggaggagagcagcgtggttagctaaggttattgctttttgtggcaaatctaattaaatgacaggaatctcttcacga

SEQ ID NO: 287416 - DNA, 947 bp, Homo sapiens
tcctccgttgtcagtggtggatgagaaggggcaaatggtggacatctactccaagtttgatgttatcaatctggcagcagaaaagacctacaacaacctagatgtatctgtgactaaagccttgcaacatcgatcacattactttgagggtgttctcaagtgctacctgcatgagactctggagaccatcatcaacaggctagtggaagcagaggttcaccgacttgtagtggtggatgaaaatgatgtggtcaagggaattgtatcactgtctgacatcctgcaggccctggtgctcacaggtggagagaagaagccctgagctgggggaaggggtcatgcagcaccaggggatatgcccaactcactgcctgctggaagctctgtgggaatcagatgaaacttgagggaattgtgactctgttccctgttcagggtcccctgcccttctatctgggagctagggaaggtatgggggaggaaagagaatggatttatagctacccttaccctcacacatacacttgaaaaaactttcagcctagccagttctagcccctgtcctcttagatatatccccctttctgggtgaactataggctctgtgcctctcagacaaattctgatctctaagagatccccagacctcacttgcctctgcctccatcttggccctgattcaaccctaagataatagcacaacaaaattcttcataaagatatttttattcacctgttccgtgctatatggaggaggccaagtccatttagtgacatttcttcccataatgtgagtggggaggattgtggggaggaggggctttgggttcctgtgtttgtgcatatgaagggagatgggggttaggtggaggaggagagcagcgtggttagctaaggttattgctttttgtggcaaatctaattaaatgacaggaatctcttcacga

SEQ ID NO: 287417 - DNA, 1035 bp, Homo sapiens
gcagttctcttctaggggctgtgggcaaagggcattttgtaattaatattttcaagaatcagatgtctggagtgtaggggtgggcttggtggtggtggacgggcgggcctgctggagggggagcttggtcgctgttgtgattttaggtttgtttttgttttgttttgaatttggggggttgtggattgttgggggtagggagattttttttttttaaagctgcttcctcaactgtttcaagctgcaaatgtttaagagaataacagcccccactcccacaggaaccgctgtaattaaatcagacagtaggaagactgggctgctgccctcaaagccacagcccttggatgttccttttccgagagcagaaggtctaggctacagggagggggagattggctcccgtgagtcaggctgtgtttggggcttgggccctgggattgggaaaaggggatggggcagactttgtaagcatatgctaggtatccgatagtcctgtagaatttagtgaagaaaccttatacagtttttaatttttatataaactataactcagacccaagctacaaggttggaattttggttggttttttttttaagtaccctgcctgtataattgcatcagaatcccccaccccaccccccgcccccgtgtttgtattttgggttggtttacactcgcacatactcagttttcagttttcccctttacagtcttctcccctcacctccaggaccctccccctttttaaaaaataaatcgctgacaagtgtgaatcccgtgaagactttattttgtgttgtgtgtatcctgtacagcaaggttggtccttcgtaacaacggatgaaatggttcccttttttaaagcgccctctctccctccaccctcagcgcccctgtccttggcatgttttgtatcagcgatcattctgaactgtacatatttatgttgcgagaggcaaagggcaagttttggattttgcttcttccaagtttgtttttaaacgacaaataaaaaaagaacattttaaata

SEQ ID NO: 287418 - DNA, 1615 bp, Homo sapiens
gcagttctcttctaggggctgtgggcaaagggcattttgtaattaatattttcaagaatcagatgtctggagtgtaggggtgggcttggtggtggtggacgggcgggcctgctggagggggagcttggtcgctgttgtgattttaggtttgtttttgttttgttttgaatttggggggttgtggattgttgggggtagggagattttttttttttaaagctgcttcctcaactgtttcaagctgcaaatgtttaagagaataacagcccccactcccacaggaaccgctgtaattaaatcagacagtaggaagactgggctgctgccctcaaagccacagcccttggatgttccttttccgagagcagaaggtctaggctacagggagggggagattggctcccgtgagtcaggctgtgtttggggcttgggccctgggattgggaaaaggggatggggcagactttgtaagcatatgctaggtatccgatagtcctgtagaatttagtgaagaaaccttatacagtttttaatttttatataaactataactcagacccaagctacaaggttggaattttggttggttttttttttaagtaccctgcctgtataattgcatcagaatcccccaccccaccccccgcccccgtgtttgtattttgggttggtttacactcgcacatactcagttttcagttttcccctttacagtcttctcccctcacctccaggaccctccccctttttaaaaaataaatcgctgacaagtgtgaatcccgtgaagactttattttgtgttgtgtgtatcctgtacagcaaggttggtccttcgtaacaacggatgaaatggttcccttttttaaagcgccctctctccctccaccctcagcgcccctgtccttggcatgttttgtatcagcgatcattctgaactgtacatatttatgttgcgagaggcaaagggcaagttttggattttgcttcttccaagtttgtttttaaacgacaaataaaaaaagaacattttaaatacaagcggctccgtcccatgaccctcgccgtcagccggatccgtgcggtccgcgaggacccgggggagggcggttaccgaggcccgccaccgccggaagggtgggttccttgccttccgccccagtctggcgactgccatgacgtgggcggaagtggcgtcgccgcagcggggatgtggggcggggcctgccccaagagagtttcctaaagcgaggaaaccaagccgggcgcctcttgcaatggagacggtcatttcttcagatagctccccagctgtggaaaatgagcatcctcaaggtaagtttactgaagaaaggaaactgggcatgaaaacaatagcctgaccctaacaatgtcttcaacaatgcttttgaatctctcccctggaaaaatcaaagcagggccagataatgtgccaaaccacaaaaatcagtgacagtagtttggcaagatcacccaggaataaatcttgggcagagtggggatgattaatatcttcaattatcaaaccacttgagagaaacatctgaggtacaggcaaaacttccataggcaactctgggctggctaccatgtttta

SEQ ID NO: 287419 - DNA, 963 bp, Homo sapiens
gcagttctcttctaggggctgtgggcaaagggcattttgtaattaatattttcaagaatcagatgtctggagtgtaggggtgggcttggtggtggtggacgggcgggcctgctggagggggagcttggtcgctgttgtgattttaggtttgtttttgttttgttttgaatttggggggttgtggattgttgggggtagggagattttttttttttaaagctgcttcctcaactgtttcaagctgcaaatgtttaagagaataacagcccccactcccacaggaaccgctgtaattaaatcagacagtaggaagactgggctgctgccctcaaagccacagcccttggatgttccttttccgagagcagaaggtctaggctacagggagggggagattggctcccgtgagtcaggctgtgtttggggcttgggccctgggattgggaaaaggggatggggcagactttgtaagcatatgctaggtatccgatagtcctgtagaatttagtgaagaaaccttatacagtttttaatttttatataaactataactcagacccaagctacaaggttggaattttggttggttttttttttaagtaccctgcctgtataattgcatcagaatcccccaccccaccccccgcccccgtgtttgtattttgggttggtttacactcgcacatactcagttttcagttttcccctttacagtcttctcccctcacctccaggaccctccccctttttaaaaaataaatcgctgacaagtgtgaatcccgtgaagactttattttgtgttgtgtgtatcctgtacagcaaggttggtccttggcatgttttgtatcagcgatcattctgaactgtacatatttatgttgcgagaggcaaagggcaagttttggattttgcttcttccaagtttgtttttaaacgacaaataaaaaaagaacattttaaata

SEQ ID NO: 287420 - DNA, 448 bp, Homo sapiens
gatgctgtctcttcattaattcggaacaagatccacaggctgccagttattgacccagaatcaggcaatactttgtacatcctcacccacaagcgcattctgaagttcctcaaattgtttgtaagtgctcctcagcccagttcttttttctcttttttcattgattgattgattgattgattgaaaagagagacgaggtctcactgtgttgctcaggctagtgtcaaactcctgagctcaagtgatcctcccgcctcagcctcccaaagtgctaggattacaggtgtgagccactgcatccagccccacttcttatttatttattaatttattttgagacaagttcttactctgttgcccaggctggcgtgcagaggcgctatcatggctcactgcagcctccaacctcttggtctcaggtgacccccgacctcaacccccagaagag

SEQ ID NO: 287421 - DNA, 2895 bp, Homo sapiens
gcagttctcttctaggggctgtgggcaaagggcattttgtaattaatattttcaagaatcagatgtctggagtgtaggggtgggcttggtggtggtggacgggcgggcctgctggagggggagcttggtcgctgttgtgattttaggtttgtttttgttttgttttgaatttggggggttgtggattgttgggggtagggagattttttttttttaaagctgcttcctcaactgtttcaagctgcaaatgtttaagagaataacagcccccactcccacaggaaccgctgtaattaaatcagacagtaggaagactgggctgctgccctcaaagccacagcccttggatgttccttttccgagagcagaaggtctaggctacagggagggggagattggctcccgtgagtcaggctgtgtttggggcttgggccctgggattgggaaaaggggatggggcagactttgtaagcatatgctaggtatccgatagtcctgtagaatttagtgaagaaaccttatacagtttttaatttttatataaactataactcagacccaagctacaaggttggaattttggttggttttttttttaagtaccctgcctgtataattgcatcagaatcccccaccccaccccccgcccccgtgtttgtattttgggttggtttacactcgcacatactcagttttcagttttcccctttacagtcttctcccctcacctccaggaccctccccctttttaaaaaataaatcgctgacaagtgtgaatcccgtgaagactttattttgtgttgtgtgtatcctgtacagcaaggttggtccttcgtaacaacggatgaaatggttcccttttttaaagcgccctctctccctccaccctcagcgcccctgtccttggcatgttttgtatcagcgatcattctgaactgtacatatttatgttgcgagaggcaaagggcaagttttggattttgcttcttccaagtttgtttttaaacgacaaataaaaaaagaacattttaaatacaagcggctccgtcccatgaccctcgccgtcagccggatccgtgcggtccgcgaggacccgggggagggcggttaccgaggcccgccaccgccggaagggtgggttccttgccttccgccccagtctggcgactgccatgacgtgggcggaagtggcgtcgccgcagcggggatgtggggcggggcctgccccaagagagtttcctaaagcgaggaaaccaagccgggcgcctcttgcaatggagacggtcatttcttcagatagctccccagctgtggaaaatgagcatcctcaagagaccccagaatccaacaatagcgtgtatacttccttcatgaagtctcatcgctgctatgacctgattcccacaagctccaaattggttgtatttgatacgtccctgcaggtgaagaaagctttttttgctttggtgactaacggtgtacgagctgcccctttatgggatagtaagaagcaaagttttgtgggcatgctgaccatcactgatttcatcaatatcctgcaccgctactataaatcagccttggtacagatctatgagctagaagaacacaagatagaaacttggagagaggtgtatctccaggactcctttaaaccgcttgtctgcatttctcctaatgccagcttgtttgatgctgtctcttcattaattcggaacaagatccacaggctgccagttattgacccagaatcaggcaatactttgtacatcctcacccacaagcgcattctgaagttcctcaaattgtttatcactgagttccccaagccagagttcatgtccaagtctctggaagagctacagattggcacctatgccaatattgctatggttcgcactaccacccccgtctatgtggctctggggatttttgtacagcatcgagtctcagccctgccagtggtggatgagaaggggcgtgtggtggacatctactccaagtttgatgttatcaatctggcagcagaaaagacctacaacaacctagatgtatctgtgactaaagccttgcaacatcgatcacattactttgagggtgttctcaagtgctacctgcatgagactctggagaccatcatcaacaggctagtggaagcagaggttcaccgacttgtagtggtggatgaaaatgatgtggtcaagggaattgtatcactgtctgacatcctgcaggccctggtgctcacaggtggagagaagaagccctgagctgggggaaggggtcatgcagcaccaggggatatgcccaactcactgcctgctggaagctctgtgggaatcagatgaaacttgagggaattgtgactctgttccctgttcagggtcccctgcccttctatctgggagctagggaaggtatgggggaggaaagagaatggatttatagctacccttaccctcacacatacacttgaaaaaactttcagcctagccagttctagcccctgtcctcttagatatatccccctttctgggtgaactataggctctgtgcctctcagacaaattctgatctctaagagatccccagacctcacttgcctctgcctccatcttggccctgattcaaccctaagataatagcacaacaaaattcttcataaagatatttttattcacctgttccgtgctatatggaggaggccaagtccatttagtgacatttcttcccataatgtgagtggggaggattgtggggaggaggggctttgggttcctgtgtttgtgcatatgaagggagatgggggttaggtggaggaggagagcagcgtggttagctaaggttattgctttttgtggcaaatctaattaaatgacaggaatctcttcacga

SEQ ID NO: 287422 - DNA, 2711 bp, Homo sapiens
gcagttctcttctaggggctgtgggcaaagggcattttgtaattaatattttcaagaatcagatgtctggagtgtaggggtgggcttggtggtggtggacgggcgggcctgctggagggggagcttggtcgctgttgtgattttaggtttgtttttgttttgttttgaatttggggggttgtggattgttgggggtagggagattttttttttttaaagctgcttcctcaactgtttcaagctgcaaatgtttaagagaataacagcccccactcccacaggaaccgctgtaattaaatcagacagtaggaagactgggctgctgccctcaaagccacagcccttggatgttccttttccgagagcagaaggtctaggctacagggagggggagattggttggttttttttttaagtaccctgcctgtataattgcatcagaatcccccaccccaccccccgcccccgtgtttgtattttgggttggtttacactcgcacatactcagttttcagttttcccctttacagtcttctcccctcacctccaggaccctccccctttttaaaaaataaatcgctgacaagtgtgaatcccgtgaagactttattttgtgttgtgtgtatcctgtacagcaaggttggtccttcgtaacaacggatgaaatggttcccttttttaaagcgccctctctccctccaccctcagcgcccctgtccttggcatgttttgtatcagcgatcattctgaactgtacatatttatgttgcgagaggcaaagggcaagttttggattttgcttcttccaagtttgtttttaaacgacaaataaaaaaagaacattttaaatacaagcggctccgtcccatgaccctcgccgtcagccggatccgtgcggtccgcgaggacccgggggagggcggttaccgaggcccgccaccgccggaagggtgggttccttgccttccgccccagtctggcgactgccatgacgtgggcggaagtggcgtcgccgcagcggggatgtggggcggggcctgccccaagagagtttcctaaagcgaggaaaccaagccgggcgcctcttgcaatggagacggtcatttcttcagatagctccccagctgtggaaaatgagcatcctcaagagaccccagaatccaacaatagcgtgtatacttccttcatgaagtctcatcgctgctatgacctgattcccacaagctccaaattggttgtatttgatacgtccctgcaggtgaagaaagctttttttgctttggtgactaacggtgtacgagctgcccctttatgggatagtaagaagcaaagttttgtgggcatgctgaccatcactgatttcatcaatatcctgcaccgctactataaatcagccttggtacagatctatgagctagaagaacacaagatagaaacttggagagaggtgtatctccaggactcctttaaaccgcttgtctgcatttctcctaatgccagcttgtttgatgctgtctcttcattaattcggaacaagatccacaggctgccagttattgacccagaatcaggcaatactttgtacatcctcacccacaagcgcattctgaagttcctcaaattgtttatcactgagttccccaagccagagttcatgtccaagtctctggaagagctacagattggcacctatgccaatattgctatggttcgcactaccacccccgtctatgtggctctggggatttttgtacagcatcgagtctcagccctgccagtggtggatgagaaggggcgtgtggtggacatctactccaagtttgatgttatcaatctggcagcagaaaagacctacaacaacctagatgtatctgtgactaaagccttgcaacatcgatcacattactttgagggtgttctcaagtgctacctgcatgagactctggagaccatcatcaacaggctagtggaagcagaggttcaccgacttgtagtggtggatgaaaatgatgtggtcaagggaattgtatcactgtctgacatcctgcaggccctggtgctcacaggtggagagaagaagccctgagctgggggaaggggtcatgcagcaccaggggatatgcccaactcactgcctgctggaagctctgtgggaatcagatgaaacttgagggaattgtgactctgttccctgttcagggtcccctgcccttctatctgggagctagggaaggtatgggggaggaaagagaatggatttatagctacccttaccctcacacatacacttgaaaaaactttcagcctagccagttctagcccctgtcctcttagatatatccccctttctgggtgaactataggctctgtgcctctcagacaaattctgatctctaagagatccccagacctcacttgcctctgcctccatcttggccctgattcaaccctaagataatagcacaacaaaattcttcataaagatatttttattcacctgttccgtgctatatggaggaggccaagtccatttagtgacatttcttcccataatgtgagtggggaggattgtggggaggaggggctttgggttcctgtgtttgtgcatatgaagggagatgggggttaggtggaggaggagagcagcgtggttagctaaggttattgctttttgtggcaaatctaattaaatgacaggaatctcttcacga

SEQ ID NO: 287423 - DNA, 1704 bp, Homo sapiens
atccttaattaaattaatcttccccccccgctgccccaagagagtttcctaaagcgaggaaaccaagccgggcgcctcttgcaatggagacggtcatttcttcagatagctccccagctgtggaaaatgagcatcctcaagagaccccagaatccaacaatagcgtgtatacttccttcatgaagtctcatcgctgctatgacctgattcccacaagctccaaattggttgtatttgatacgtccctgcaggtgaagaaagctttttttgctttggtgactaacggtgtacgagctgcccctttatgggatagtaagaagcaaagttttgtgggcatgctgaccatcactgatttcatcaatatcctgcaccgctactataaatcagccttggtacagatctatgagctagaagaacacaagatagaaacttggagagaggtgtatctccaggactcctttaaaccgcttgtctgcatttctcctaatgccagcttgtttgatgctgtctcttcattaattcggaacaagatccacaggctgccagttattgacccagaatcaggcaatactttgtacatcctcacccacaagcgcattctgaagttcctcaaattgtttatcactgagttccccaagccagagttcatgtccaagtctctggaagagctacagattggcacctatgccaatattgctatggttcgcactaccacccccgtctatgtggctctggggatttttgtacagcatcgagtctcagccctgccagtggtggatgagaaggggcgtgtggtggacatctactccaagtttgatgttatcaatctggcagcagaaaagacctacaacaacctagatgtatctgtgactaaagccttgcaacatcgatcacattactttgagggtgttctcaagtgctacctgcatgagactctggagaccatcatcaacaggctagtggaagcagaggttcaccgacttgtagtggtggatgaaaatgatgtggtcaagggaattgtatcactgtctgacatcctgcaggccctggtgctcacaggtggagagaagaagccctgagctgggggaaggggtcatgcagcaccaggggatatgcccaactcactgcctgctggaagctctgtgggaatcagatgaaacttgagggaattgtgactctgttccctgttcagggtcccctgcccttctatctgggagctagggaaggtatgggggaggaaagagaatggatttatagctacccttaccctcacacatacacttgaaaaaactttcagcctagccagttctagcccctgtcctcttagatatatccccctttctgggtgaactataggctctgtgcctctcagacaaattctgatctctaagagatccccagacctcacttgcctctgcctccatcttggccctgattcaaccctaagataatagcacaacaaaattcttcataaagatatttttattcacctgttccgtgctatatggaggaggccaagtccatttagtgacatttcttcccataatgtgagtggggaggattgtggggaggaggggctttgggttcctgtgtttgtgcatatgaagggagatgggggttaggtggaggaggagagcagcgtggttagctaaggttattgctttttgtggcaaatctaattaaatgacaggaatctcttcacga

SEQ ID NO: 287424 - DNA, 1384 bp, Homo sapiens
gagctgtgcttggggcggggcctggcgtgtattcgaaaggaaggcgccggctgcgggaagatggcggctcagccgctgcggcatcgctcacgttgtgcaacgccgccccggggggacttttgtggtggcactgagagggcgattgaccaagcttcttttacgacctccatggagtgggatacgcaggtggtgaaggggtcctcgccgctcggccccgcagggctgggggctgaggagccagccgccggcccgcagctgccgtcttggctgcagcctgagaggtgcgctgtgttccagtgcgcacagtgtcacgcagtgctcgccgactcggtgcacctcgcctgggacctgtcgcggtccctcggggccgtggtcttctccagagttacaaataacgtcgttttggaagcgcccttcctagttggcattgaaggttcactcaaaggcagtacttacaaccttttattctgtggttcttgtgggattcccgttggtttccatctgtattctacccatgctgccctggctgccttgagaggtcacttctgcctttccagtgacaaaatggtgtgctatctcttaaaaacaaaagccatagtaaatgcatcagagatggatattcaaaatgttcctctatcagaaaagattgcagagctgaaagagaagatagtgctaacgcacaatcgcttaaaatcactaatgaagattctgagtgaagtgactcctgaccagtccaagccagaaaactgatcctgtaccaaagcttgagtgtcaggttcaggctttattgctgtcttcaacaacaggtgctgcttagtcatttcttgaaaaagattggcttcaagaatggaggggaaatgcagtttctatttacctttaggctgattttccaaattatttgtgaagctgtttttagaagatgagagactaaggattcttctcttttatagctatttgccttaagaacttactttagattcttattgaattcataatacttatctctgaaaatgtctttgactgtaaatttaggaattaagatgcagagtcccatgtgtcctctgatctaaagttgcatggttggtctgaaaatagagttgggcttaatgttgacttctattactcctgcatggagcagttgttatgaatactaatacatcactttttaacttctgtaaaatacagatcataatattctataggtaatgtttaataaattgcctgaataatatacaatttgtctttttcagttgtaaactgaggttaacagagaaataatgaaagcaatgataaaacgaaacagttaccaaagtactattttctataattttgttttatgtagcactttgagtaacttatcaaaatattaatttaatatatattt

SEQ ID NO: 287425 - DNA, 1051 bp, Homo sapiens
gagctgtgcttggggcggggcctggcgtgtattcgaaaggaaggcgccggctgcgggaagatggcggctcagccgctgcggcatcgctcacgttgtgcaacgccgccccggggggacttttgtggtggcactgagagggcgattgaccaagcttcttttacgacctgtcgcggtccctcggggccgtggtcttctccagagttacaaataacgtcgttttggaagcgcccttcctagttggcattgaaggttcactcaaaggcagtacttacaaccttttattctgtggttcttgtgggattcccgttggtttccatctgtattctacccatgctgccctggctgccttgagaggtcacttctgcctttccagtgacaaaatggtgtgctatctcttaaaaacaaaagccatagtaaatgcatcagagatggatattcaaaatgttcctctatcagaaaagattgcagagctgaaagagaagatagtgctaacgcacaatcgcttaaaatcactaatgaagattctgagtgaagtgactcctgaccagtccaagccagaaaactgatcctgtaccaaagcttgagtgtcaggttcaggctttattgctgtcttcaacaacaggtgctgcttagtcatttcttgaaaaagattggcttcaagaatggaggggaaatgcagtttctatttacctttaggctgattttccaaattatttgtgaagctgtttttagaagatgagagactaaggattcttctcttttatagctatttgccttaagaacttactttagattcttattgaattcataatacttatctctgaaaatgtctttgactgtaaatttaggaattaagatgcagagtcccatgtgtcctctgatctaaagttgcatggttggtctgaaaatagagttgggcttaatgttgacttctattactcctgcatggagcagttgttatgaatactaatacatcactttttaacttctgtaaaatacagatcataatattctataggtaatgtttaataaattgcctgaataatataca

SEQ ID NO: 287426 - DNA, 1782 bp, Homo sapiens
ccaggcagaggggctcctcacatcccagacgatgggtggccaggcagagacgctcctcacttcccagacggggtggcggctgggcagaggctgtaatctcggcactttgggaggccaaggcaggcggctgggaggtggaggttgtagcgagccaagatcatgccactgcactccagcctgggcaccattgagcactgagtgaacgagacgagactccgtctgcaatcccggcaccctgggaggccgaggctggtggatcactcgcggttaggagctggagaccagcccagccaacacagcgaaaccccgtctccaccaaaaaaatatgaaaacctgtcaagtgtggcggcgcgtgcctgcaatcgcaggcactcggcaggctgaggcaggagaatcaggcagggaggttgcagtgagccgagatggcagcagtacagtccagctttggcttggcatcagagggagaccgtggaaagagagggagagggagaccgtggggagaggagggagagggagagggcgcatttttttcattaactttcttttttaatataagcaaaagacaaaccttgattttagttctatgaacaatttgtttagtaaggccccagtcaacttgattatttttcaacaactgtgaatttatataatgatagccattttacatgatttgtagttttaaatgtttaaatgttaatcagattagttagctctttttgtgtttattaggggtaaattacctttctcttctgaagcgacaattatacatccatgattgctttgaccagaatatacgagggtatccgcaatccagcatgtaattaaattacaatctgagttaccctttcttgaatgtgacattctttccgtctcattcctattacaatgtaattttcaccctgacttaggtgttaggaatgcttcagagactagttattttttatttcttatatgattttttattcttacccatattgtgtttttccccacccctagtacttacaaccttttattctgtggttcttgtgggattcccgttggtttccatctgtattctacccatgctgccctggctgccttgagaggtcacttctgcctttccagtgacaaaatggtgtgctatctcttaaaaacaaaagccatagtaaatgcatcagagatggatattcaaaatgttcctctatcagaaaagattgcagagctgaaagagaagatagtgctaacgcacaatcgcttaaaatcactaatgaagattctgagtgaagtgactcctgaccagtccaagccagaaaactgatcctgtaccaaagcttgagtgtcaggttcaggctttattgctgtcttcaacaacaggtgctgcttagtcatttcttgaaaaagattggcttcaagaatggaggggaaatgcagtttctatttacctttaggctgattttccaaattatttgtgaagctgtttttagaagatgagagactaaggattcttctcttttatagctatttgccttaagaacttactttagattcttattgaattcataatacttatctctgaaaatgtctttgactgtaaatttaggaattaagatgcagagtcccatgtgtcctctgatctaaagttgcatggttggtctgaaaatagagttgggcttaatgttgacttctattactcctgcatggagcagttgttatgaatactaatacatcactttttaacttctgtaaaatacagatcataatattctataggtaatgtttaataaattgcctgaataatataca

SEQ ID NO: 287427 - DNA, 1488 bp, Homo sapiens
ccaggcagaggggctcctcacatcccagacgatgggtggccaggcagagacgctcctcacttcccagacggggtggcggctgggcagaggctgtaatctcggcactttgggaggccaaggcaggcggctgggaggtggaggttgtagcgagccaagatcatgccactgcactccagcctgggcaccattgagcactgagtgaacgagacgagactccgtctgcaatcccggcaccctgggaggccgaggctggtggatcactcgcggttaggagctggagaccagcccagccaacacagcgaaaccccgtctccaccaaaaaaatatgaaaacctgtcaagtgtggcggcgcgtgcctgcaatcgcaggcactcggcaggctgaggcaggagaatcaggcagggaggttgcagtgagccgagatggcagcagtacagtccagctttggcttggcatcagagggagaccgtggaaagagagggagagggagaccgtggggagaggagggagagggagagggcgcatttttttcattaactttcttttttaatataagcaaaagacaaaccttgattttagttctatgaacaatttgtttagtaaggccccagtcaacttgattatttttcaacaactgtgaatttatataatgatagccattttacatgatttgtagttttaaatgtttaaatgttaatcagattagttagctctttttgtgtttattaggggtaaattacctttctcttctgaagcgacaattatacatccatgattgctttgaccagaatatacgagggtatccgcaatccagcatgtaattaaattacaatctgagttaccctttcttgaatgtgacattctttccgtctcattcctattacaatgtaattttcaccctgacttaggtgttaggaatgcttcagagactagttattttttatttcttatatgattttttattcttacccatattgtgtttttccccacccctagtacttacaaccttttattctgtggttcttgtgggattcccgttggtttccatctgtattctacccatgctgccctggctgccttgagaggtcacttctgcctttccagtgacaaaatggtgtgctatctcttaaaaacaaaagccatagtaaatgcatcagagatggatattcaaaatgttcctctatcagaaaagattgcagaggtaaaatttcatgatggttgtatgcttttttaaaatacagacaactcttgataacttctaccaatgaacttggggatgatgaaatggcatgatgctcaataatcctttttacttgatttgaccttccctattgaatttgtaatgaaaaacaaaatactaaaaccacactgtaaggtatagttcaggaagaaaggaaaagctgctcaactgctgcactcctgcattctcctttgtgctgggaatggatatcatcatcttgccatagaggtgtcttctttgcaaatacc

SEQ ID NO: 287428 - DNA, 1235 bp, Homo sapiens
gagctgtgcttggggcggggcctggcgtgtattcgaaaggaaggcgccggctgcgggaagatggcggctcagccgctgcggcatcgctcacgttgtgcaacgccgccccggggggacttttgtggtggcactgagagggcgattgaccaagcttcttttacgacctccatggagtgggatacgcaggtggtgaaggggtcctcgccgctcggccccgcagggctgggggctgaggagccagccgccggcccgcagctgccgtcttggctgcagcctgagaggtgcgctgtgttccagtgcgcacagtgtcacgcagtgctcgccgactcggtgcacctcgcctgggacctgtcgcggtccctcggggccgtggtcttctccagagttacaaataacgtcgttttggaagcgcccttcctagttggcattgaaggttcactcaaaggcagtacttacaaccttttattctgtggttcttgtgggattcccgttggtttccatctgtattctacccatgctgccctggctgccttgagaggtcacttctgcctttccagtgacaaaatggtgtgctatctcttaaaaacaaaagccatagtaaatgcatcagagatggatattcaaaatgttcctctatcagaaaagattgcagagctgaaagagaagatagtgctaacgcacaatcgcttaaaatcactaatgaagattctgagtgaagtgactcctgaccagtccaagccagaaaactgatcctgtaccaaagcttgagtgtcaggttcaggctttattgctgtcttcaacaacaggtgctgcttagtcatttcttgaaaaagattggcttcaagaatggaggggaaatgcagtttctatttacctttaggctgattttccaaattatttgtgaagctgtttttagaagatgagagactaaggattcttctcttttatagctatttgccttaagaacttactttagattcttattgaattcataatacttatctctgaaaatgtctttgactgtaaatttaggaattaagatgcagagtcccatgtgtcctctgatctaaagttgcatggttggtctgaaaatagagttgggcttaatgttgacttctattactcctgcatggagcagttgttatgaatactaatacatcactttttaacttctgtaaaatacagatcataatattctataggtaatgtttaataaattgcctgaataatataca

SEQ ID NO: 287429 - DNA, 1112 bp, Homo sapiens
gagctgtgcttggggcggggcctggcgtgtattcgaaaggaaggcgccggctgcgggaagatggcggctcagccgctgcggcatcgctcacgttgtgcaacgccgccccggggggacttttgtggtggcactgagagggcgattgaccaagcttcttttacgacctccatggagtgggatacgcaggtggtgaaggggtcctcgccgctcggccccgcagggctgggggctgaggagccagccgccggcccgcagctgccgtcttggctgcagcctgagaggtgcgctgtgttccagtgcgcacagtgtcacgcagtgctcgccgactcggtgcacctcgcctgggacctgtcgcggtccctcggggccgtggtcttctccagagttacaaataacgtcgttttggaagcgcccttcctagttggcattgaaggttcactcaaaggcagctatctcttaaaaacaaaagccatagtaaatgcatcagagatggatattcaaaatgttcctctatcagaaaagattgcagagctgaaagagaagatagtgctaacgcacaatcgcttaaaatcactaatgaagattctgagtgaagtgactcctgaccagtccaagccagaaaactgatcctgtaccaaagcttgagtgtcaggttcaggctttattgctgtcttcaacaacaggtgctgcttagtcatttcttgaaaaagattggcttcaagaatggaggggaaatgcagtttctatttacctttaggctgattttccaaattatttgtgaagctgtttttagaagatgagagactaaggattcttctcttttatagctatttgccttaagaacttactttagattcttattgaattcataatacttatctctgaaaatgtctttgactgtaaatttaggaattaagatgcagagtcccatgtgtcctctgatctaaagttgcatggttggtctgaaaatagagttgggcttaatgttgacttctattactcctgcatggagcagttgttatgaatactaatacatcactttttaacttctgtaaaatacagatcataatattctataggtaatgtttaataaattgcctgaataatataca

SEQ ID NO: 287430 - DNA, 1012 bp, Homo sapiens
tcctactcgcacagcccagggagtggggaggataaggcgctgtcatggaggacgccgccgcgccggggcggaccgagggggtccttgaaaggcaaggagcgccgccagctgcaggccagggaggagccctggtggagctcaccccgacccccggcggcctggccctggtgagcccctaccacacccaccgggccggggaccccttagacctcgtggcgctcgcagagcaggtgcagaaggctgatgaattcatccgagcaaatgccaccaacaagctgacagtcatagctgagcaaatccaacatttgcaagaacaagccaggaaggtactggaagatgctcacagagatgccaacctgcaccatgtagcttgtaatatagtgaaaaaacctggcaacatttactatctctataaacgggagagtggtcagcagtatttttccatcatttctccaaaggaatgggggacaagttgtccacatgacttccttggtgcctacaaactacagcatgacttgtcctggactccgtatgaggacattgagaagcaagatgctaaaatcagcatgatggacacgttgctaagccagtcagtggccctgcctccgtgcactgaacccaacttccagggactgactcactgagagtgggctttgacaaacagctctcacaggacctggctgtcaacctccttgttgcccccactgttgccttgagaattgaagacatgtaggtgactcacaaacttcttggaaagagaccctgtgtgaatgtaaatgctgtcattatgacttttaattgggatgggaataatcattgagacagagtcactgtctttcgggatcctctttggaccacagatacccaagtcagtcagtttcagagtattggccagtgtactttccttcttcctctccatcacttcttcccttaagttaaagtgttagagaagaccttcttcccataaaaaggttggtggatcgttttccagagagaactgttttcagtcttt

SEQ ID NO: 287431 - DNA, 795 bp, Homo sapiens
ctaaaaatacaaaaaattagccgggcatggtggcagacgcccgtaattccagctactcatgaggctgaggccggagaatcacttgaacctgggaggcagatgttgcagtgagtggagattgtgccacttcactccagcctgggtgacaaggctgatgaattcatccgagcaaatgccaccaacaagctgacagtcatagctgagcaaatccaacatttgcaagaacaagccaggaaggtactggaagatgctcacagagatgccaacctgcaccatgtagcttgtaatatagtgaaaaaacctggcaacatttactatctctataaacgggagagtggtcagcagtatttttccatcatttctccaaaggaatgggggacaagttgtccacatgacttccttggtgcctacaaactacagcatgacttgtcctggactccgtatgaggacattgagaagcaagatgctaaaatcagcatgatggacactgttgccttgagaattgaagacatgtaggtgactcacaaacttcttggaaagagaccctgtgtgaatgtaaatgctgtcattatgacttttaattgggatgggaataatcattgagacagagtcactgtctttcgggatcctctttggaccacagatacccaagtcagtcagtttcagagtattggccagtgtactttccttcttcctctccatcacttcttcccttaagttaaagtgttagagaagaccttcttcccataaaaaggttggtggatcgttttccagagagaactgttttcagtcttt

SEQ ID NO: 287432 - DNA, 853 bp, Homo sapiens
tcctactcgcacagcccagggagtggggaggataaggcgctgtcatggaggacgccgccgcgccggggcggaccgagggggtccttgaaaggcaaggagcgccgccagctgcaggccagggaggtactggaagatgctcacagagatgccaacctgcaccatgtagcttgtaatatagtgaaaaaacctggcaacatttactatctctataaacgggagagtggtcagcagtatttttccatcatttctccaaaggaatgggggacaagttgtccacatgacttccttggtgcctacaaactacagcatgacttgtcctggactccgtatgaggacattgagaagcaagatgctaaaatcagcatgatggacacgttgctaagccagtcagtggccctgcctccgtgcactgaacccaacttccagggactgactcactgagagtgggctttgacaaacagctctcacaggacctggctgtcaacctccttgttgcccccactgttgccttgagaattgaagacatgaaatgccactatgcctcccggatgctcctggtcagcttcctgttagacatggcagtcagggcaatgaccagccacatcaacatatgctccaaattgggagccgagctgaatgactttgccgtcttcaccaccttcggcttggcctccgctctgctcctaggcgtggatggacttctgagtgggatcctggccatcatctatgtgtcagctgcttctttccacttgtgcttttattcacctggagtcccctccacatacaagggtctaccctgcccctatgcttcctgcatcttggcttccacctcccttctgaccaaaggcaacag

SEQ ID NO: 287433 - DNA, 1256 bp, Homo sapiens
tcctactcgcacagcccagggagtggggaggataaggcgctgtcatggaggacgccgccgcgccggggcggaccgagggggtccttgaaaggcaaggagcgccgccagctgcaggccagggaggagccctggtggagctcaccccgacccccggcggcctggccctggtgagcccctaccacacccaccgggccggggaccccttagacctcgtggcgctcgcagagcaggtgcagaaggctgatgaattcatccgagcaaatgccaccaacaagctgacagtcatagctgagcaaatccaacatttgcaagaacaagccaggaaggtactggaagatgctcacagagatgccaacctgcaccatgtagcttgtaatatagtgaaaaaacctggcaacatttactatctctataaacgggagagtggtcagcagtatttttccatcatttctccaaaggaatgggggacaagttgtccacatgacttccttggtgcctacaaactacagcatgacttgtcctggactccgtatgaggacattgagaagcaagatgctaaaatcagcatgatggacacgttgctaagccagtcagtggccctgcctccgtgcactgaacccaacttccagggactgactcactgagagtgggctttgacaaacagctctcacaggacctggctgtcaacctccttgttgcccccactgttgccttgagaattgaagacatgtaggtgactcacaaacttcttggaaagagaccctgtgtgaatgtaaatgctgtcattatgacttttaattgggatgggaataatcattgagacagagtcactgtctttcgggatcctctttggaccacagatacccaagtcagtcagtttcagagtattggccagtgtactttccttcttcctctccatcacttcttcccttaagttaaagtgttagagaagaccttcttcccataaaaaggttggtggatcgttttccagagagaactgttttcagtcttttatatatatatatatatatatatatataactggtagtatttaacattggggttgaggctgtctcacagttggtgcaactccagtttaaaattcatctgggaacgagaatgttgagtaatggagggtgatttaaaaaacaacaacaacaacaaaaaaaaaaacacttggcttggctggaccagagagtgtgtgattctgggatttctgtgctgttgatgaggtttgtcttgccccttttgctctc

SEQ ID NO: 287434 - DNA, 1180 bp, Homo sapiens
gcggtgactctacaggatccctcataggttcgcaggaggaaaaatggattggttggaggagaggatatattcagtatatttggtagcaggagagagaaagagagaaggcatgctggagaaccaaagaagttcagtgtaactgcagttcatagcgaaggggtggaaagctatgggaaatagaagagagcacttaactctgtggcgtggagtcatgtcagggtggccttctcatgacagtgctatctgagtggggcctcggatgagtgggaggctatggggcagtggcaagaatgggaaaaatattttaggcagaagcaaaatattaacataaccctgggatcaagataagaacatcatagaagtcttttcctctttcaacccacagtttagttttttctcacctgtaggctgatgaattcatccgagcaaatgccaccaacaagctgacagtcatagctgagcaaatccaacatttgcaagaacaagccaggaaggtactggaagatgctcacagagatgccaacctgcaccatgtagcttgtaatatagtgaaaaaacctggcaacatttactatctctataaacgggagagtggtcagcagtatttttccatcatttctccaaaggaatgggggacaagttgtccacatgacttccttggtgcctacaaactacagcatgacttgtcctggactccgtatgaggacattgagaagcaagatgctaaaatcagcatgatggacacgttgctaagccagtcagtggccctgcctccgtgcactgaacccaacttccagggactgactcactgagagtgggctttgacaaacagctctcacaggacctggctgtcaacctccttgttgcccccactgttgccttgagaattgaagacatgtaggtgactcacaaacttcttggaaagagaccctgtgtgaatgtaaatgctgtcattatgacttttaattgggatgggaataatcattgagacagagtcactgtctttcgggatcctctttggaccacagatacccaagtcagtcagtttcagagtattggccagtgtactttccttcttcctctccatcacttcttcccttaagttaaagtgttagagaagaccttcttcccataaaaaggttggtggatcgttttccagagagaactgttttcagtcttt

SEQ ID NO: 287435 - DNA, 631 bp, Homo sapiens
ttgtggcatgattaggaaatgagctcagtttgtttacaacccacgctgatgggaactgcctcctttgccttctctaggaatgggggacaagttgtccacatgacttccttggtgcctacaaactacagcatgacttgtcctggactccgtatgaggacattgagaagcaagatgctaaaatcagcatgatggacacgttgctaagccagtcagtggccctgcctccgtgcactgaacccaacttccagggactgactcactgagagtgggctttgacaaacagctctcacaggacctggctgtcaacctccttgttgcccccactgttgccttgagaattgaagacatgtaggtgactcacaaacttcttggaaagagaccctgtgtgaatgtaaatgctgtcattatgacttttaattgggatgggaataatcattgagacagagtcactgtctttcgggatcctctttggaccacagatacccaagtcagtcagtttcagagtattggccagtgtactttccttcttcctctccatcacttcttcccttaagttaaagtgttagagaagaccttcttcccataaaaaggttggtggatcgttttccagagagaactgttttcagtcttt

SEQ ID NO: 287436 - DNA, 896 bp, Homo sapiens
tcctactcgcacagcccagggagtggggaggataaggcgctgtcatggaggacgccgccgcgccggggcggaccgagggggtccttgaaaggcaaggagcgccgccagctgcaggccagggaggctgatgaattcatccgagcaaatgccaccaacaagctgacagtcatagctgagcaaatccaacatttgcaagaacaagccaggaaggtactggaagatgctcacagagatgccaacctgcaccatgtagcttgtaatatagtgaaaaaacctggcaacatttactatctctataaacgggagagtggtcagcagtatttttccatcatttctccaaaggaatgggggacaagttgtccacatgacttccttggtgcctacaaactacagcatgacttgtcctggactccgtatgaggacattgagaagcaagatgctaaaatcagcatgatggacacgttgctaagccagtcagtggccctgcctccgtgcactgaacccaacttccagggactgactcactgagagtgggctttgacaaacagctctcacaggacctggctgtcaacctccttgttgcccccactgttgccttgagaattgaagacatgtaggtgactcacaaacttcttggaaagagaccctgtgtgaatgtaaatgctgtcattatgacttttaattgggatgggaataatcattgagacagagtcactgtctttcgggatcctctttggaccacagatacccaagtcagtcagtttcagagtattggccagtgtactttccttcttcctctccatcacttcttcccttaagttaaagtgttagagaagaccttcttcccataaaaaggttggtggatcgttttccagagagaactgttttcagtcttt

SEQ ID NO: 287437 - DNA, 4451 bp, Homo sapiens
ctctttatacttttgtattgtttaattttttttaacagttgtcttgttttttcttctgcagtgaaaataatggtgacaagaagcccactgcctgattcacataagcaaggcatgctgcagggaagacagggttcttattaatatttcctttcatgtgcttacatatgagttacagttgctaatcctttcccacagtttagcacctagttaaaagaaagggcttcggaatcaggtaagtgtagattaaagttataacggcaaattgctgaacctttggaagcctcggtttttccacctggaaaatggatttttatcttacaggactgtcgtgaggattgatgagctaacattcctaaatcagggagtttgaagtctggcccagggtattttcctcctttcctgaaataatgtgtagttctgaccaagtgagaagaatcataagaatatgggattttgaaaaacatgaaaacatcctaagaaataccaggaaggagtcccacagtgaagcacaaatgaaactcaagatgactgcctaaaataagaaatcatggatcttaggagaaagggggcaaggaagtaaatcaaaggacaaagctgaagaccaagtggaccgaaaagaagatggaatacattttcccaaacactggtgttctctggagttggcttatcaacatcttgtgcaatcggaggatcgtgtggtttacttccagccagctgccccgtggtcctccagccagctccgggggccacagttttcacacgctccgggagcgatccgagagccgccttttcgtggaaagttacgctgccgcctggcaacccccgggaacgtcgggaggggcaagttgctgctcatccctcagtgctcaagtcatgagtagcgaattcctggctgagctgcactgggaggatgggttcgccatcccggtggcgaacgaggagaacaagctactggaagatcagttgtcaaagctgaaggatgaaagagcaagcttgcaagatgagttacgtgagtatgaagagcgaattaattctatgacttctcacttcaaaaatgttaagcaagagctctcaattacacagtctctttgcaaagcaagggagcgtgagactgaaagtgaagaacattttaaggccattgctcaaagagaattgggacgagtgaaagatgaaattcaacggctggaaaatgagatggcttcaatactggaaaagaaaagtgataaagaaaatggcatatttaaagccactcaaaaattggatggtttgaaatgtcaaatgaactgggaccagcaagcattggaggcctggttagaagaatcagctcataaagatagtgatgctctcactctccagaagtatgcacaacaagatgataataaaatcagggcactgactctgcaattagaaagactaactttggaatgtaatcagaaaagaaagatacttgacaacgaacttacagagactataagcgcacagttagaattggataaagcagcacaagattttcgtaagattcataatgaaagacaagaactcattaaacaatgggagaacacaatagaacagatgcagaagagggatggagacatagataactgtgctttggaattagcaaggataaagcaggaaacgagagaaaaagaaaatttggttaaagaaaagatcaagtttttggaaagtgagattgggaataacacagagtttgagaaaagaatttctgtggctgatcgtaaacttttaaaatgtagaacggcatatcaggaccatgaaactagtagaattcagctgaagggtgagctggattctttaaaagccactgtgaatagaacttccagtgatttagaagctctgaggaaaaatatttccaagataaagaaggacattcatgaagaaacagcaaggttacaaaaaactaaaaatcataatgagataatacaaacaaaattaaaggagataactgagaaaaccatgtctgtagaagagaaagctactaatttggaagatatgctaaaggaggaggaaaaagatgtgaaggaagtagatgttcaactgaacctcataaaaggtgtgctgtttaagaaagctcaggagttacagactgagacaatgaaagaaaaagctgttttatcagaaattgaaggaactcgttcctctctgaaacatctcaaccatcagttacaaaaactggattttgaaaccttgaagcagcaagaaattatgtacagccaggattttcacattcaacaagtggaacggagaatgtcacggttaaagggagaaattaattcagaagaaaaacaagcgcttgaagcaaaaattgttgaacttaggaagtctttggaagagaaaaaatctacatgtggccttttggaaacacagatcaagaagcttcataatgatctttattttatcaagaaggcacatagtaaaaacagtgatgaaaaacagtcccttatgaccaaaataaatgaactaaaccttttcatcgacagatcagagaaagaacttgataaagccaaaggttttaagcaggatttgatgatagaggacaatcttttaaaacttgaagttaagcgtactcgagaaatgcttcacagtaaggcagaagaagttctttccctagaaaaaagaaaacagcaattatacacagcaatggaagagcgaactgaagaaatcaaggttcataaaacaatgcttgcgtcacaaataagatatgttgatcaagaacgggaaaacataagcactgagtttcgcgagcggctaagtaaaattgagaagctgaagaatagatatgaaattctgactgttgttatgctgcctcctgaaggagaagaggagaaaacacaggcctattatgtaataaaggtgatgagtatgagctaaaaattcaactagaagaacaaaaaagagctgttgatgaaaaatacagatacaaacaaagacaaatcagagaacttcaagaagacatccagagcatggaaaatacattagatgttatagaacatttggcaaataatgttaaagaaaagttatcagagaagcaggcttattcatttcaactaagtaaagaaacggaggagcagaagccaaaattagaaagagtgaccaaacagtgtgcaaaactcacaaaggaaatccgtcttttgaaagacacaaaagatgaaacaatggaagaacaagacatcaaacttcgtgaaatgaaacagtttcacaaagttattgatgaaatgttagttgatatcatagaagaaaatactgagatccgtattatccttcaaacatactttcaacagagtgggttagaactacctacagctagcacaaaaggcagtcgtcagagctctagatctccttcacatacttcactatcagcaaggtcatctaggagtacaagtacatctacttctcagtcttcaattaaagtactggagcttaaattcccggcctcctcttcactagtaggcagcccttctaggccatctagtgctagtagtagctctagtaatgttaagagcaaaaagagcagcaaataaacattttaatctcttctgaaaaagttgtaaacacaaaaacaaaaatatactttaaaatacaaaacgacccaacacattttatctagtggaaagtgtaaaaacttagtggtaagtgtaaaaactgatagttttaaaaaaaaaggaacgttctcattttctctactgttttcttcatactgaagaaattaatagcagattcttgacaaggctacatgttatacaagcataggaaaaatgctgtatttcactgtaattctgatgttcgtagtgttagaaaatagtttgcttcattatttcacgaaactacactcacttctaatgtaacaatctttcaagaagaaatttctaaagatttactgtactattatgagcgtattgcaatgtgaaaatctcatttaccctacaagacaccaaaattaggttttctttattcaaagtaactatttctcagacttttggggagaaaaattgttaaaggcagtttcttcttttgctataatttttaaccaaaaaatagcatcaacccctacccaccccacccccccaaaaaaaaaccggtaagagaaacactgtatatcaattttaaaatgcagcataaatttagaaaaatcacttctgaccttgaaataaatcacttctgaccttgaaataaacgcattaaagatttgctttcagatacagccaaccaagtataaacaattttgaaattttcttgatttaataaacgatttaatgaaagctaggtatgacttgatttgcaatagaaatttcatttacagttggaggtagactgccaaatgtagtagtttttccagttaacacttcattataacatgtgcccaacactttgtactcttggaatagagtgtggaatattataaaactggattttaaataaatgtattagaattc

SEQ ID NO: 287438 - DNA, 2230 bp, Homo sapiens
cataaatcagtaatatcttttattatcactatcaagtattatgcactgtacataattgtatgtgctagacttttatatgactggcaatgcaggtttgtttacaccagccatcaccacaaactcatgactaatgtattgtgccacattacaatgtcgctaggtaacaggaatttttcagctccattataatcctatgggaccaccatcatatatacagtccatcattgaccgagatgtcattaagaggtacatcaacagaaataatgtatattatgtacaaaaataaatgaattaaaattaaatgaatacttgataaatgacaagttataaaagtcaatttctgattctaaaaaatacatgttaatattttttctacagagcatggaaaatacattagatgttatagaacatttggcaaataatgttaaagaaaagttatcagagaagcaggcttattcatttcaactaagtaaagaaacggaggagcagaagccaaaattagaaagagtgaccaaacaggtatcgatatcttttaaaaactgacctttcatatttacatttttgaagtcccaaatcctccttcatctattaaaaatattaaattctggtaaacacgtttatagaataattgactattatttaccaacagtgtgcaaaactcacaaaggaaatccgtcttttgaaagacacaaaagatgaaacaatggaagaacaagacatcaaacttcgtgaaatgaaacagtttcacaaagttattgatgaaatgttagttgatatcatagaagaaaatactgagatccgtattatccttcaaacatactttcaacaggtaatacagcaccttctattaaatatttcttaaaaacttcatgaaaataaaaactttcatgacattcatcatgaagtgaaagctaattaaaaatatttatcttctaaaaaacagtaggtagtactaatgattgctattgaatattcctccagagtgggttagaactacctacagctagcacaaaaggcagtcgtcagagctctagatctccttcacatacttcactatcagcaaggtcatctaggagtacaagtacatctacttctcagtcttcaattaaagtactggagcttaaattcccggcctcctcttcactagtaggcagcccttctaggccatctagtgctagtagtagctctagtaatgttaagagcaaaaagagcagcaaataaacattttaatctcttctgaaaaagttgtaaacacaaaaacaaaaatatactttaaaatacaaaacgacccaacacattttatctagtggaaagtgtaaaaacttagtggtaagtgtaaaaactgatagttttaaaaaaaaaggaacgttctcattttctctactgttttcttcatactgaagaaattaatagcagattcttgacaaggctacatgttatacaagcataggaaaaatgctgtatttcactgtaattctgatgttcgtagtgttagaaaatagtttgcttcattatttcacgaaactacactcacttctaatgtaacaatctttcaagaagaaatttctaaagatttactgtactattatgagcgtattgcaatgtgaaaatctcatttaccctacaagacaccaaaattaggttttctttattcaaagtaactatttctcagacttttggggagaaaaattgttaaaggcagtttcttcttttgctataatttttaaccaaaaaatagcatcaacccctacccaccccacccccccaaaaaaaaaccggtaagagaaacactgtatatcaattttaaaatgcagcataaatttagaaaaatcacttctgaccttgaaataaatcacttctgaccttgaaataaacgcattaaagatttgctttcagatacagccaaccaagtataaacaattttgaaattttcttgatttaataaacgatttaatgaaagctaggtatgacttgatttgcaatagaaatttcatttacagttggaggtagactgccaaatgtagtagtttttccagttaacacttcattataacatgtgcccaacactttgtactcttggaatagagtgtggaatattataaaactggattttaaataaatgtattagaattcacgaatgtacatgtgtctccttcaaaccttgggaaaaaatgctcattacaactgtcattattttagaactgttgtttgtacttctttctgaaaagca

SEQ ID NO: 287439 - DNA, 1492 bp, Homo sapiens
cataaatcagtaatatcttttattatcactatcaagtattatgcactgtacataattgtatgtgctagacttttatatgactggcaatgcaggtttgtttacaccagccatcaccacaaactcatgactaatgtattgtgccacattacaatgtcgctaggtaacaggaatttttcagctccattataatcctatgggaccaccatcatatatacagtccatcattgaccgagatgtcattaagaggtacatcaacagaaataatgtatattatgtacaaaaataaatgaattaaaattaaatgaatacttgataaatgacaagttataaaagtcaatttctgattctaaaaaatacatgttaatattttttctacagagcatggaaaatacattagatgttatagaacatttggcaaataatgttaaagaaaagttatcagagaagcaggcttattcatttcaactaagtaaagaaacggaggagcagaagccaaaattagaaagagtgaccaaacaggtatcgatatcttttaaaaactgacctttcatatttacatttttgaagtcccaaatcctccttcatctattaaaaatattaaattctggtaaacacgtttatagaataattgactattatttaccaacagtgtgcaaaactcacaaaggaaatccgtcttttgaaagacacaaaagatgaaacaatggaagaacaagacatcaaacttcgtgaaatgaaacagtttcacaaagttattgatgaaatgttagttgatatcatagaagaaaatactgagatccgtattatccttcaaacatactttcaacaggtaatacagcaccttctattaaatatttcttaaaaacttcatgaaaataaaaactttcatgacattcatcatgaagtgaaagctaattaaaaatatttatcttctaaaaaacagtaggtagtactaatgattgctattgaatattcctccagagtgggttagaactacctacagctagcacaaaaggcagtcgtcagagctctagatctccttcacatacttcactatcagcaaggtaagcggagggttaaaaaaaaatctgcttaactctcacagctgtacactaagtgattccagccacttcactgtcagacatctcactagtcagcatcatatagattagatgcagaaacagccagcagaacaagaatttccttctgacttctgctggtgtcactatttccagtatagcccaagtgctctgtgactatgagctatttcagtaggataaaacagaaataaatttgggggctacatctagcatttgggggtgaacccccaagttgggggaatttaaaaacatgtaagggcagcttagatgtacagacatatagaatatgatttttgtgattcaaaccacactgtggtattttacataatcaggatttgactttatgaagctttattttgctaaaaaggaaacccctttttttttcttctgca

SEQ ID NO: 287440 - DNA, 1183 bp, Homo sapiens
cataaatcagtaatatcttttattatcactatcaagtattatgcactgtacataattgtatgtgctagacttttatatgactggcaatgcaggtttgtttacaccagccatcaccacaaactcatgactaatgtattgtgccacattacaatgtcgctaggtaacaggaatttttcagctccattataatcctatgggaccaccatcatatatacagtccatcattgaccgagatgtcattaagaggtacatcaacagaaataatgtatattatgtacaaaaataaatgaattaaaattaaatgaatacttgataaatgacaagttataaaagtcaatttctgattctaaaaaatacatgttaatattttttctacagagcatggaaaatacattagatgttatagaacatttggcaaataatgttaaagaaaagttatcagagaagcaggcttattcatttcaactaagtaaagaaacggaggagcagaagccaaaattagaaagagtgaccaaacaggtatcgatatcttttaaaaactgacctttcatatttacatttttgaagtcccaaatcctccttcatctattaaaaatattaaattctggtaaacacgtttatagaataattgactattatttaccaacagtgtgcaaaactcacaaaggaaatccgtcttttgaaagacacaaaagatgaaacaatggaagaacaagacatcaaacttcgtgaaatgaaacagtttcacaaagttattgatgaaatgttagttgatatcatagaagaaaatactgagatccgtattatccttcaaacatactttcaacagagtgggttagaactacctacagctagcacaaaaggcagtcgtcagagctctagatctccttcacatacttcactatcagcaaggtcatctaggagtacaagtacatctacttctcagtcttcaattaaagtactggagcttaaattcccggcctcctcttcactaaaataggaaaaaggcatagcaaagtcaagaataaggtgggcgaaaaaaaagaagttgcaggtgcatctgatttccaggaaagtgcaaaaagcagatccgcttttttggagatgaatttctgtatctcgatgttgtcaactctcttctcttttcttaaaaagaaaaaaatatatatgaaaattgggaaaa

SEQ ID NO: 287441 - DNA, 3956 bp, Homo sapiens
tagggctcccccggcaattgccgcggcactgtgcaggtgcctgggcttgacgcgggtgctgctcacccgctgtacaagaaggcggatctttgctctgtatcttctctatccgtttgcagtcatgagtagcgaattcctggctgagctgcactgggaggatgggttcgccatcccggtggcgaacgaggagaacaagctactggaagatcagttgtcaaagctgaaggatgaaagagcaagcttgcaagatgagttacgtgagtatgaagagcgaattaattctatgacttctcacttcaaaaatgttaagcaagagctctcaattacacagtctctttgcaaagcaagggagcgtgagactgaaagtgaagaacattttaaggccattgctcaaagagaattgggacgagtgaaagatgaaattcaacggctggaaaatgagatggcttcaatactggaaaagaaaagtgataaagaaaatggcatatttaaagccactcaaaaattggatggtttgaaatgtcaaatgaactgggaccagcaagcattggaggcctggttagaagaatcagctcataaagatagtgatgctctcactctccagaagtatgcacaacaagatgataataaaatcagggcactgactctgcaattagaaagactaactttggaatgtaatcagaaaagaaagatacttgacaacgaacttacagagactataagcgcacagttagaattggataaagcagcacaagattttcgtaagattcataatgaaagacaagaactcattaaacaatgggagaacacaatagaacagatgcagaagagggatggagacatagataactgtgctttggaattagcaaggataaagcaggaaacgagagaaaaagaaaatttggttaaagaaaagatcaagtttttggaaagtgagattgggaataacacagagtttgagaaaagaatttctgtggctgatcgtaaacttttaaaatgtagaacggcatatcaggaccatgaaactagtagaattcagctgaagggtgagctggattctttaaaagccactgtgaatagaacttccagtgatttagaagctctgaggaaaaatatttccaagataaagaaggacattcatgaagaaacagcaaggttacaaaaaactaaaaatcataatgagataatacaaacaaaattaaaggagataactgagaaaaccatgtctgtagaagagaaagctactaatttggaagatatgctaaaggaggaggaaaaagatgtgaaggaagtagatgttcaactgaacctcataaaaggtgtgctgtttaagaaagctcaggagttacagactgagacaatgaaagaaaaagctgttttatcagaaattgaaggaactcgttcctctctgaaacatctcaaccatcagttacaaaaactggattttgaaaccttgaagcagcaagaaattatgtacagccaggattttcacattcaacaagtggaacggagaatgtcacggttaaagggagaaattaattcagaagaaaaacaagcgcttgaagcaaaaattgttgaacttaggaagtctttggaagagaaaaaatctacatgtggccttttggaaacacagatcaagaagcttcataatgatctttattttatcaagaaggcacatagtaaaaacagtgatgaaaaacagtcccttatgaccaaaataaatgaactaaaccttttcatcgacagatcagagaaagaacttgataaagccaaaggttttaagcaggatttgatgatagaggacaatcttttaaaacttgaagttaagcgtactcgagaaatgcttcacagtaaggcagaagaagttctttccctagaaaaaagaaaacagcaattatacacagcaatggaagagcgaactgaagaaatcaaggttcataaaacaatgcttgcgtcacaaataagatatgttgatcaagaacgggaaaacataagcactgagtttcgcgagcggctaagtaaaattgagaagctgaagaatagatatgaaattctgactgttgttatgctgcctcctgaaggagaagaggagaaaacacaggcctattatgtaataaaggctgctcaagaaaaagaagaacttcaaagggaaggtgactgtttggatgccaagatcaacaaagctgaaaaagaaatctacgctctagaaaatacccttcaagtgctgaacagctgtaacaacaattataagcaatcttttaaaaaagtgactccatctagtgatgagtatgagctaaaaattcaactagaagaacaaaaaagagctgttgatgaaaaatacagatacaaacaaagacaaatcagagaacttcaagaagacatccagagcatggaaaatacattagatgttatagaacatttggcaaataatgttaaagaaaagttatcagagaagcaggcttattcatttcaactaagtaaagaaacggaggagcagaagccaaaattagaaagagtgaccaaacagtgtgcaaaactcacaaaggaaatccgtcttttgaaagacacaaaagatgaaacaatggaagaacaagacatcaaacttcgtgaaatgaaacagtttcacaaagttattgatgaaatgttagttgatatcatagaagaaaatactgagatccgtattatccttcaaacatactttcaacagagtgggttagaactacctacagctagcacaaaaggcagtcgtcagagctctagatctccttcacatacttcactatcagcaaggtcatctaggagtacaagtacatctacttctcagtcttcaattaaagtactggagcttaaattcccggcctcctcttcactagtaggcagcccttctaggccatctagtgctagtagtagctctagtaatgttaagagcaaaaagagcagcaaataaacattttaatctcttctgaaaaagttgtaaacacaaaaacaaaaatatactttaaaatacaaaacgacccaacacattttatctagtggaaagtgtaaaaacttagtggtaagtgtaaaaactgatagttttaaaaaaaaaggaacgttctcattttctctactgttttcttcatactgaagaaattaatagcagattcttgacaaggctacatgttatacaagcataggaaaaatgctgtatttcactgtaattctgatgttcgtagtgttagaaaatagtttgcttcattatttcacgaaactacactcacttctaatgtaacaatctttcaagaagaaatttctaaagatttactgtactattatgagcgtattgcaatgtgaaaatctcatttaccctacaagacaccaaaattaggttttctttattcaaagtaactatttctcagacttttggggagaaaaattgttaaaggcagtttcttcttttgctataatttttaaccaaaaaatagcatcaacccctacccaccccacccccccaaaaaaaaaccggtaagagaaacactgtatatcaattttaaaatgcagcataaatttagaaaaatcacttctgaccttgaaataaatcacttctgaccttgaaataaacgcattaaagatttgctttcagatacagccaaccaagtataaacaattttgaaattttcttgatttaataaacgatttaatgaaagctaggtatgacttgatttgcaatagaaatttcatttacagttggaggtagactgccaaatgtagtagtttttccagttaacacttcattataacatgtgcccaacactttgtactcttggaatagagtgtggaatattataaaactggattttaaataaatgtattagaattcacgaatgtacatgtgtctccttcaaaccttgggaaaaaatgctcattacaactgtcattattttagaactgttgtttgtacttctttctgaaaagca

SEQ ID NO: 287442 - DNA, 1844 bp, Homo sapiens
cattcttgtgctttgctgacaaaaatttattaataatgatcctgattttagaattcacaatctcctgcattcagcagctacttattaaattactattccttagtccaggtaaaaatttcatgaagaggcccctaaaaaaagtgtttcatttaagtataaaaaactgtttctatataactgaacatccctgtactttcataaaatatatatttaaaacttttttcagaattatatagctagctgtttttcaaatgaccccaccactttatccatcaatatgcttctctcttctcttcagcttaaattacaaaaggtatcattttaattatttttgccagcaccaaatcctcttggccctatttcctctgttttggaaactttcaatgcttaatgattccaactctaaaaaactgattatagttcaaagcatttttaccatgtaggaacatacttattaaactacttttctactggtttgaaactcatctatgttcatctttcctttcctgtttaaattgtttgatatctattgatggtcatttaaaaacttaacactattaatatgtacttttttgatgtctttacttatggaattatggtaccttttgccaataatgagagggtctatactaaaatataaactttgcattgaatttataattctggtttttcttctaggtcatctaggagtacaagtacatctacttctcagtcttcaattaaagtactggagcttaaattcccggcctcctcttcactagtaggcagcccttctaggccatctagtgctagtagtagctctagtaatgttaagagcaaaaagagcagcaaataaacattttaatctcttctgaaaaagttgtaaacacaaaaacaaaaatatactttaaaatacaaaacgacccaacacattttatctagtggaaagtgtaaaaacttagtggtaagtgtaaaaactgatagttttaaaaaaaaaggaacgttctcattttctctactgttttcttcatactgaagaaattaatagcagattcttgacaaggctacatgttatacaagcataggaaaaatgctgtatttcactgtaattctgatgttcgtagtgttagaaaatagtttgcttcattatttcacgaaactacactcacttctaatgtaacaatctttcaagaagaaatttctaaagatttactgtactattatgagcgtattgcaatgtgaaaatctcatttaccctacaagacaccaaaattaggttttctttattcaaagtaactatttctcagacttttggggagaaaaattgttaaaggcagtttcttcttttgctataatttttaaccaaaaaatagcatcaacccctacccaccccacccccccaaaaaaaaaccggtaagagaaacactgtatatcaattttaaaatgcagcataaatttagaaaaatcacttctgaccttgaaataaatcacttctgaccttgaaataaacgcattaaagatttgctttcagatacagccaaccaagtataaacaattttgaaattttcttgatttaataaacgatttaatgaaagctaggtatgacttgatttgcaatagaaatttcatttacagttggaggtagactgccaaatgtagtagtttttccagttaacacttcattataacatgtgcccaacactttgtactcttggaatagagtgtggaatattataaaactggattttaaataaatgtattagaattcacgaatgtacatgtgtctccttcaaaccttgggaaaaaatgctcattacaactgtcattattttagaactgttgtttgtacttctttctgaaaagca

SEQ ID NO: 287443 - DNA, 456 bp, Homo sapiens
taaaataaaaatatatttccacattattttgtgagattcagagtataaaaatggccattcatagggctttatgttttttggatagcgtaagtttaacttcaggaataacttcttccctttgttttttataatagcaaagcttgactttaaaattgaattatgaaaaagatttggaataactataaacccttttcttaaaagaaaaaaaaaaactatgatcaattttaggcctagctaatatcttagtcaatggttaaattggaaaaaggtatattttcaagttttacttatatagcaataaaaaaaattttggttttgcaattaaaaataatttcaatatttgaccattttgttacgttgataggatttgatgatagaggacaatcttttaaaacttgaagttaagcgtactcgagaaatgcttcacagtaaggcagaagaagttctttccctaga

SEQ ID NO: 287444 - DNA, 562 bp, Homo sapiens
tgagctttggtggagagaaagaggaagaactgttgggagggaacatggaggcagaagatacggaataccctgtgtccatggagacttcagggcagacaaagagaagagtcaggaagccttttcttcactttacagcctatagacacctgtgatagtagttcattattgcaatgttcttccagagttcaaatggtatttttcagctcaagggaagttggagaagtgggtgtggtaggttccatgatatttattcccaggtaagacatcgctggaggagtggaagaggcagatgcaggagaacctggctcctggggagagctggccacggacaacatcatcctgacagtgccaaccacaaaccttcaggccctgaaggaccccgagcctgtgctccgcctctgggatgagatgatgcaggctgtggccaggctggcagctgagcccttccctttccgccgtcctgagaggattgtggctgatgtgcagatctcagctggtgggtgctcccagggaatcctccctgagcgtgcggatactagggactgacggacaggctctcagt

SEQ ID NO: 287445 - DNA, 694 bp, Homo sapiens
cgagaatgggaacttggaaaagagctgtctggcaaagttgagagttgatggtgcagccttcctacagattcctgcggagggggtccctgcttacatatccctgcacaggctcctgaggaagatgctacgagggtctggcctcccagctgtgagccaggaaaatccagttgccagtgactcctatgaggctgccgtgctctccctggccactgggctggctcactctggaactgactgctcccagctggcccaggggcttggcacctggacctgctcctccagtttgtacccctcaaaacaccccatcaccgtggagatcaatggaatcaacccaggcaacaatgattgctgggtgagtaccgggctctacctcctggaaggacaaaatgcagaagtctcactgtctgaagctgctgcctctgctggcctgagggtaaggtctgaacacccacatctgccacctctcaaaaccgtagagctgtgtcattctcatccactgtctagttccagctcatggcaatgctgccaggagtacagagatggattattctgcccattttacagattttacagatgaagcagctaaatttcagggcatctaagtgagtgactgaagtgcctagtgttatcaagcaagagaagctcactgcagaatggactagaagccaaaactatgacacttgagtttttcacc

SEQ ID NO: 287446 - DNA, 1518 bp, Homo sapiens
taaaacaaaagaaaacattttattgcaatttgattaacaaggagacaggagcccagctcaaatctgtcccattgtacttattttaaagagttattttagtagaaaaggtgtagggagtggattctgtgattagtaggtgattgacagaaagaaaaggaagggctggaaaatcctcgggcatgggcagttacctcttcatgcctcctcatgggtcccatgtgcaaactcagagggagttagtatgaaacatgcggtacaaatttaggctgtgtgtcagcaagctcattctgtacaaactctggttttatctctttatcttgacacctgaagggtgtgcataatcccatcactccccaaaatatgccctacatgcagaatttaaattcatcctgcctccttgactctgagggccacttcctaccacagctagggtcccttttctgtcagcattctttctggagcttgcttatatcaaacctaagaaaagcaactccaggactccagacaaaacagatctccacccatctggcggccagaaagggaagctctgggcaaagagggagagagaatcaacctcactcactctggatgggcctcctgtgtgttcacagaggacagagcagagtcccccagctcatcctcaatatcagcgtccccagactggcttaggtcctgctagaagaacccaggattttgcctggcagaaagacacaagacctttgccaggatcagcctggtctctcaccaattcatgtcaggtgaagacttatagtggagctgtttaaatccttagaaaaatgattttaaatgccttgaagtccaaatgactttggagtgctaaaatttcataagtttccatgcctagcacatagaaaagggaagctggggtttcatgggcatgtttgtctaataccttccatctacacaacctcacacgcacatcacaaagcatcacaaagactctaatttctccaacgcttggtggaatcacctgtccaggtacagattggctgccacaccgatgaccttaccaaggccaggaagctatctcgagcccccgtggtgactcaccaatgctggatggacaggactgagcggtcagtctcctgcctctggggcggcctcctctacgtcatcgtgcccaagggcagccaactaggccctgtgcctgtcactatcaggggagctgtgcctgccccatactacaagctgggtaagacatcgctggaggagtggaagaggcagatgcaggagaacctggctcctggggagagctggccacggacaacatcatcctgacagtgccaaccacaaaccttcaggccctgaaggaccccgagcctgtgctccgcctctgggatgagatgatgcaggctgtggccaggctggcagctgagcccttccctttccgccgtcctgagaggattgtggctgatgtgcagatctcagctggtgggtgctcccagggaatcctccctgagcgtgcggatactagggactgacggacaggctctcagt

SEQ ID NO: 287447 - DNA, 1331 bp, Homo sapiens
caaacccatgaggatccatgaggatgcaagttcaatccctggtcttgctcagtgggttaagcatcccttgttgctgtggctgtgtgtcagcaagctcattctgtacaaactctggttttatctctttatcttgacacctgaagggtgtgcataatcccatcactccccaaaatatgccctacatgcagaatttaaattcatcctgcctccttgactctgagggccacttcctaccacagctagggtcccttttctgtcagcattctttctggagcttgcttatatcaaacctaagaaaagcaactccaggactccagacaaaacagatctccacccatctggcggccagaaagggaagctctgggcaaagagggagagagaatcaacctcactcactctggatgggcctcctgtgtgttcacagaggacagagcagagtcccccagctcatcctcaatatcagcgtccccagactggcttaggtcctgctagaagaacccaggattttgcctggcagaaagacacaagacctttgccaggatcagcctggtctctcaccaattcatgtcaggtgaagacttatagtggagctgtttaaatccttagaaaaatgattttaaatgccttgaagtccaaatgactttggagtgctaaaatttcataagtttccatgcctagcacatagaaaagggaagctggggtttcatgggcatgtttgtctaataccttccatctacacaacctcacacgcacatcacaaagcatcacaaagactctaatttctccaacgcttggtggaatcacctgtccaggtacagattggctgccacaccgatgaccttaccaaggccaggaagctatctcgagcccccgtggtgactcaccaatgctggatggacaggactgagcggtcagtctcctgcctctggggcggcctcctctacgtcatcgtgcccaagggcagccaactaggccctgtgcctgtcactatcaggggagctgtgcctgccccatactacaagctgggtaagacatcgctggaggagtggaagaggcagatgcaggagaacctggctcctggggagagctggccacggacaacatcatcctgacagtgccaaccacaaaccttcaggccctgaaggaccccgagcctgtgctccgcctctgggatgagatgatgcaggctgtggccaggctggcagctgagcccttccctttccgccgtcctgagaggattgtggctgatgtgcagatctcagctggtgggtgctcccagggaatcctccctgagcgtgcggatactagggactgacggacaggctctcagt

SEQ ID NO: 287448 - DNA, 952 bp, Homo sapiens
cgagaatgggaacttggaaaagagctgtctggcaaagttgagagttgatggtgcagccttcctacagattcctgcggagggggtccctgcttacatatccctgcacaggctcctgaggaagatgctacgagggtctggcctcccagctgtgagccaggaaaatccagttgccagtgactcctatgaggctgccgtgctctccctggccactgggctggctcactctggaactgactgctcccagctggcccaggggcttggcacctggacctgctcctccagtttgtacccctcaaaacaccccatcaccgtggagatcaatggaatcaacccaggcaacaatgattgctgggtgagtaccgggctctacctcctggaaggacaaaatgcagaagtctcactgtctgaagctgctgcctctgctggcctgagggtacagattggctgccacaccgatgaccttaccaaggccaggaagctatctcgagcccccgtggtgactcaccaatgctggatggacaggactgagcggtcagtctcctgcctctggggcggcctcctctacgtcatcgtgcccaagggcagccaactaggccctgtgcctgtcactatcaggggagctgtgcctgccccatactacaagctgggtaagacatcgctggaggagtggaagaggcagatgcaggagaacctggctcctggggagagctggccacggacaacatcatcctgacagtgccaaccacaaaccttcaggccctgaaggaccccgagcctgtgctccgcctctgggatgagatgatgcaggctgtggccaggctggcagctgagcccttccctttccgccgtcctgagaggattgtggctgatgtgcagatctcagctggtgggtgctcccagggaatcctccctgagcgtgcggatactagggactgacggacaggctctcagt

SEQ ID NO: 287449 - DNA, 366 bp, Homo sapiens
ctacagattcctgcggagggggtccctgcttacatatccctgcacaggctcctgaggaagatgctacgagggtctggcctcccagctgtgagccaggaaaatccagttgccagtgactcctatgaggctgccgtgctctccctggccactgggctggctcactctggaactgactgctcccagctggcccaggggcttggcacctggacctgctcctccagtttgtacccctcaaaacaccccatcaccgtggagatcaatggaatcaacccaggtatgaaaacaggagagagtgcccagaacattaaagatgtaggggaaagtgggattggctgacactacacaggacattgcaggtacctaccc

SEQ ID NO: 287450 - DNA, 332 bp, Homo sapiens
cccacagctgtgtccggaagcagcaagcgtgcctgggcagagacccccagagtgtaaagaggtcctgggacaggctttgcacgttccacaagagtgtctcgctgtgtcgtctagactggagtgcagtggtgtgatcatggctcaactcctaggctcaagcgatcctcctgcctcagcctccggagtagctgctgggactgcaggaacgtgccaccatgcctggctcaaacacaaagttttttcataaaactcacttggcggcaaaattctaccttacctgaagttatttacggggtttttaatttccactttgaataaatattcacatcttg

SEQ ID NO: 287451 - DNA, 449 bp, Homo sapiens
cccacagctgtgtccggaagcagcaagcgtgcctgggcagagacccccagagtgtaaagaggtcctgggacaggctttgcacgttccacaagagtgtctcgctgtgtcgtctagactggagtgcagtggtgtgatcatggctcaactcctaggctcaagcgatcctcctgcctcagcctccggagtagctgctgggactgcaggaacgtgccaccatgcctggctcaaacacaaagttttttcataaaactcacttggcggcaaaattctaccttacctgaagttatttacggggtttttaatttccactttgaataaatattcacatcttgttgagtagtattatagtttcaggtaagggattaggaaaggagctgttaagtggaagggctctctcgggtggtttctgcaactgtggtcccagaggaagcactcacctcctgagcaac

SEQ ID NO: 287452 - DNA, 1021 bp, Homo sapiens
cccacagctgtgtccggaagcagcaagcgtgcctgggcagagacccccagagtgtaaagaggtcctgggacaggctttgcacgttccacaagagaccaaagaccaaagaggccaaagacctcaagcagggcctgtaggacccaaagtattggcaggtgccagagccactcctccccacatccaggtgagccctgtgccctggcaccaggatctgctgtctttgctaagtggaaggatctggtagtgccaaatagtgtttggaccttctaagctagctggtgtgggggtcaagtgcatggtctttggagctagacagcctttccacttaggacatatgtgaccttcaacaagtttctaaacctctctgggtttcagttttgccatctgtagaatggagctggtatctcccttacaggattaaaggaaataatgtgtgtcccatgctcagccctgcacctgccacagatcctgcaggacctcctcctttgccatatgctccttcagcagttctgtctgcacaatccccggccacagagacacacagctgaccccatggcgccgcagctcgtgggcacagtcagcagccagcttgtcacactgtggagaggcggaaggcagggagccccaaggtctcagctgcccacgctccccagtgtgatgcctactttagccaaccaagaggagcacaagcaaaggaactgtccatggatgaggcagaggaggagctgagaggagccagccttaccattctgaccactggggattgtacctcctgagctatagtgtctcgctgtgtcgtctagactggagtgcagtggtgtgatcatggctcaactcctaggctcaagcgatcctcctgcctcagcctccggagtagctgctgggactgcaggaacgtgccaccatgcctggctcaaacacaaagttttttcataaaactcacttggcggcaaaattctaccttacctgaagttatttacggggtttttaatttccactttgaataaatattcacatcttg

SEQ ID NO: 287453 - DNA, 1138 bp, Homo sapiens
cccacagctgtgtccggaagcagcaagcgtgcctgggcagagacccccagagtgtaaagaggtcctgggacaggctttgcacgttccacaagagaccaaagaccaaagaggccaaagacctcaagcagggcctgtaggacccaaagtattggcaggtgccagagccactcctccccacatccaggtgagccctgtgccctggcaccaggatctgctgtctttgctaagtggaaggatctggtagtgccaaatagtgtttggaccttctaagctagctggtgtgggggtcaagtgcatggtctttggagctagacagcctttccacttaggacatatgtgaccttcaacaagtttctaaacctctctgggtttcagttttgccatctgtagaatggagctggtatctcccttacaggattaaaggaaataatgtgtgtcccatgctcagccctgcacctgccacagatcctgcaggacctcctcctttgccatatgctccttcagcagttctgtctgcacaatccccggccacagagacacacagctgaccccatggcgccgcagctcgtgggcacagtcagcagccagcttgtcacactgtggagaggcggaaggcagggagccccaaggtctcagctgcccacgctccccagtgtgatgcctactttagccaaccaagaggagcacaagcaaaggaactgtccatggatgaggcagaggaggagctgagaggagccagccttaccattctgaccactggggattgtacctcctgagctatagtgtctcgctgtgtcgtctagactggagtgcagtggtgtgatcatggctcaactcctaggctcaagcgatcctcctgcctcagcctccggagtagctgctgggactgcaggaacgtgccaccatgcctggctcaaacacaaagttttttcataaaactcacttggcggcaaaattctaccttacctgaagttatttacggggtttttaatttccactttgaataaatattcacatcttgttgagtagtattatagtttcaggtaagggattaggaaaggagctgttaagtggaagggctctctcgggtggtttctgcaactgtggtcccagaggaagcactcacctcctgagcaac

SEQ ID NO: 287454 - DNA, 766 bp, Homo sapiens
cccacagctgtgtccggaagcagcaagcgtgcctgggcagagacccccagagtgtaaagaggtcctgggacaggctttgcacgttccacaagagaccaaagaccaaagaggccaaagacctcaagcagggcctgtaggacccaaagtattggcaggtgccagagccactcctccccacatccaggtgagccctgtgccctggcaccaggatctgctgtctttgctaagtggaaggatctggtagtgccaaatagtgtttggaccttctaagctagctggtgtgggggtcaagtgcatggtctttggagctagacagcctttccacttaggacatatgtgaccttcaacaagtttctaaacctctctgggtttcagttttgccatctgtagaatggagctggtatctcccttacaggattaaaggaaataatgtgtgtcccatgctcagccctgcacctgccacagtaagcacctggtgagtgggagtatctgatcttgttattgaggatgcagaggccgactcccctgttctctgcttccttcgccctccccttgccaacctgcttcaacacaggatcctgcaggacctcctcctttgccatatgctccttcagcagttctgtctgcacaatccccggccacagagacacacagctgaccccatggcgccgcagctcgtgggcacagtcagcagccagcttgtcacactgtggagaggcggaaggcagggtaagagccacctagccatgtcactttcctgccctgc

SEQ ID NO: 287455 - DNA, 581 bp, Homo sapiens
tgcctagctaattatttaaaaaatattttttgtagagactgggtctagctatgttgcccagactggtctccaactgctggcctcaagtgatcttgctgccttggccacccaaagtgctgggactacaggcatgagccactgtactccaccatggactgaatctttgaagagcagaaattagattttattagtcttggtaacttcagtggtttaccaatgcctagcaaatcatggatactcaaatatttatttaactgaagtctagtaaataagtaaaaaatgtgcagttcaataaagtcttgcctgaaatagaggaaagcacaggtccacaaccctttagttgcaattccaaaatctctgctctcaaacaaaaagttttttacttttctttcttttcttttttttaatacagtgtctcgctgtgtcgtctagactggagtgcagtggtgtgatcatggctcaactcctaggctcaagcgatcctcctgcctcagcctccggagtagctgctgggactgcaggaacgtgccaccatgcctggctcaaacacaaagttttttcataaaactcacttggcggca

SEQ ID NO: 287456 - DNA, 462 bp, Homo sapiens
cggccgcggcccctcggcagcatcgcggcccaggaaggcctggagcagctgctccgcctcagcactccccgcgcaacgctcccaggcgcccgcagccggccgcaggctcatggccacgtaggtccccaggagtcgcagtcgtcggtcggcgccgggttccccatccgcgttctccgccgcgagcgcggcccgctcctccgcgagccgcatcgcgcgcggcctccagctgcatcggtttccctagcgacggggacgcggccaggactcactcctctgctcccttcctattgggcacggacccctggtcccgccccttccaggctaataagtacctacaggggtggagacaggatggcaacgtgatgttgttattgttgttttctgcaaagaagggttgtggaaaaacaagatggagaaggtgagaaaatgaaagtggaagatctggaatatctgggtcaatgg

SEQ ID NO: 287457 - DNA, 377 bp, Homo sapiens
tggcttcttgtgattggccagaacttttcctcactggagagatgaggagaatccagtcctccaaccagctgagagaaaacactgcagtagcagagatagcaatggctgttccaccccacactgatacgatgtcagggagccaggggtgggctcaacaggctgaatgatgccagggactcccaagggtctatacatttaaccctggaggaagtggcctctgaccaggcagtgtttcaagaacccagctccattcatcctatgatgccaccatcctcagcatttgacttccatggctcctgtaagagaagagaacatgaagaacaaaacaggaggtttttatgggagatatgctgccaagagaatttttttctttaaga

SEQ ID NO: 287458 - DNA, 685 bp, Homo sapiens
gatacatttttattctttattaatatcatttgaggtcttcaacagttttgtttcaatgtgaagtcttctctgcaaaaaagacttctgagatattgaaatataatctgggctatgaaaaagccacttttctgatatgaactcagattccccagggttttttgtgctaacaggccatggcaggggatggtggtaaatggtggtgatttcgccttctccactctcacttttagctaacaaaattctttgccttgaaagctttattaaaccattcattttacccaaagataaaatgttagaggaatagtctgtctttttctttgaggcttcctttcctgagccattccatatttcagcattgttttgtgtcttccgttgtatcttttcctcggcagatatgcaaataatgggtttctttttcccttttccaggagcacattttgatttatctgaaattgtctgaggtgccaagtccattcttctagccctgtgtaatttatctgcattcatgcacattgcagagctcactgtattagatcttttagctaaacagctagacatttattttctcacagttctgagagactgagtttatgagatcagggtcgccagcagtggttaagtttctggtcaggtctctcttcccagcgtgcagacagctccactcctgtctgtgtggtcacctaag

SEQ ID NO: 287459 - DNA, 657 bp, Homo sapiens
cgtgtggtgtggtggcgcgcaggccacatgggatggaatgatgaggtacgaccccagcgccgcccgcccagctccgccgcaccttcgtcctgccttctgggactgacccccagctctggccacaaggacagcgcccctcccaccccagctgctctggccccggccctagaaggagcacattttgatttatctgaaattgtctgaggtgccaagtccattcttctagccctgtgtaatttatctgcattcatgcacattgcagagctcactgtattagaactctgagcactgtggtagtttaatttaaccaagtgctcccataatgagaagccattcctagaaccctcagaatgttgctggctcataccttgaggccaatatctccggctccggatccactcaatttctctcagaaggctgcaaaagatcaaaagttgtcaagaggtcatatatatagcatgaataaccagaagcatatttctgtttggaacatgaaacagaaactcactgcaggattccatggattccatggattgatgaatgagaagatcccaggtggatcacccttaaatcaactgatctgtataaatagcctactgcctcaatcatgacgtgatgacaagagtcacttgccaataaatgacctgctagatattt

SEQ ID NO: 287460 - DNA, 337 bp, Homo sapiens
gcggccgcgggcaccgggagagcagcgcgccgcggcccctcgcctccctcagagcgctccgcaccgccgtccccaccgaccttcaacggggccggggccaggctccgaccgccagcagtcggctcctccgtgcagtcccgggtagagagcccggtccctgcgctagtcgatttgtgcagtaggaaaggaggctgcaggggatctgcgccggggcaggacagatgcctttcgggacccagtgtttgcatcttgggagatgtgggtgctgatctggttgtttcttggtttatgacgccaaaaagggcgggagggggctgatgaagtgaagcctttcgct

SEQ ID NO: 287461 - DNA, 873 bp, Homo sapiens
gagggccgcagctagagtcggcgccacgagggggccgagcagggtgcggcggcggcggggcgctccggggaggccaggacagctgatggttgtggcagaaacatctcaaggtagctggtccgcccccacttccccatctacctcttgtcctccccccaacaccaccaccaccctggctcccctccctcatgaccgcctggatcctcctgcctgtcagcctgtcagcgttctccatcactggcatatggactgtgtatgccatggctgtgatgaaccaccatgtatgccctgtggagaactggtatgaaggactctgcagacaaccttgctctaaagcttccttcatctctgtcccctcttgggcctgaggctgccacgagccagactgcaaccctgagcctcactgctcttctctgaaattggtccccaggtcctacaacgagtcctgccctcctgaccctgctgagcaagggggtcccaagacctgctgcaccctggacgatgtccccctcatcaggtcacacagctaataagcggaggcacctggatttaagctggagccctcagattgcccagcccgtgttctggctcaaggatagccaaaccagccgcagggctcagcaaagagtgtcagggttgcccgaacactcctgggcactcccttctctctcacacacatgagctctgctttgggggcccagcctggaaccagttgttcatgagggaccctggatcttcacataaatcagtggcctgcctgctaaggagcaggtgcagcaagtgtggctcctatcccccagaaagctgcctcttcagcctcattggcaacatgggtgctttcatgggtgagttgtacccttagccctgaccctg

SEQ ID NO: 287462 - DNA, 1533 bp, Homo sapiens
gagggccgcagctagagtcggcgccacgagggggccgagcagggtgcggcggcggcggggcgctccggggaggccaggacagctgatggttgtggcagaaacatctcaaggtagctggtccgcccccacttccccatctacctcttgtcctccccccaacaccaccaccaccctggctcccctccctcatgaccgcctggatcctcctgcctgtcagcctgtcagcgttctccatcactggcatatggactgtgtatgccatggctgtgatgaaccaccatgtatgccctgtggagaactggtcctacaacgagtcctgccctcctgaccctgctgagcaagggggtcccaagacctgctgcaccctggacgatgtccccctcatcagcaagtgtggctcctatcccccagaaagctgcctcttcagcctcattggcaacatgggtgctttcatggtggccctgatctgcctcctgcgctacgggcagctcctggagcagagtcggcactcttgggttaacaccacggcactcatcacaggctgcaccaacgctgcgggcctcttggtggttggcaactttcaggtggatcatgccaggtctctgcactacgttggagctggcgtggccttccctgcggggctgctctttgtttgcctgcactgtgctctctcctaccaaggggccaccgccccgctggacctggctgtggcctatctgcgaagtgtgctggctgtcatcgcctttatcaccctggtcctcagtggagtcttctttgtccatgagagttctcagctgcaacatggggcagccctgtgtgagtgggtgtgtgtcatcgatatcctcattttctatggcaccttcagctacgagtttggggcagtctcctcagacacactggtggctgcactgcagcctacccctggccgggcctgcaagtcctccgggagcagcagcacctccacccacctcaactgtgcccccgagagcatcgctatgatctaaggtctggggagggtggctggcccggcctccacagcaccccaccccatatcttctttccatttatttcgtaccaaaaacaattttgagaaagtattctgttgggatctgggcttcctcacttctggagaagtggccatcccatgcccacctgtgccatggaggagtgggccctgccagctgccacagctgcatgacctgcttccccaccccacggtgtcgttttgtttttaaaggtcacctgtcctcactcacccagccagcccttcaggtgccttctactcccagtgccaaagccagaccactggggtttcctgctgcaggaattgggggctgggaacagcagaggggatagaagtctggtggaggtggagtgggcacgccttagcctacggaaaggcccatttctgggcccactgagctgcactgggattcttcactctgcccctcacttcctttagggcaaataacacagcagaaccacgtgggtattttagtacttttttttatattaaaagaattctaatttgca

SEQ ID NO: 287463 - DNA, 2075 bp, Homo sapiens
gagggccgcagctagagtcggcgccacgagggggccgagcagggtgcggcggcggcggggcgctccggggaggtgcgtactgggctccttcccttcctccgggcttccaggaatcacctggggactctcgcgtcccgggtcctggggggtcgccggccgcagggtccggccccagccggggtccccgcgcccaggcgagcgggggccgggccgggctgggctttccgcgtgaacccgcccctcgcccagggcgccgatggtcaggtggttgcctgcgcgccgccgactcgccaccgctccactgggccggcacccagcctctccttggcgtggcctcttcggttgtccagcccttctcccagccctggtccctcagaaggagggtaactcccttccagatgttacggtccgcctgcgtctctcagcacgccggtggcatttgggttgaccgcggaggcccccagtgccagagggtgttcacgttctgccgtgggctcagcccaaactttggacgctcagagacccaacgggagcgctggataaggtgttgacccccttcccctcccccttcccggccagttacccactcctggactttgatctctctccaccaggccaggacagctgatggttgtggcagaaacatctcaaggtagctggtccgcccccacttccccatctacctcttgtcctccccccaacaccaccaccaccctggctcccctccctcatgaccgcctggatcctcctgcctgtcagcctgtcagcgttctccatcactggcatatggactgtgtatgccatggctgtgatgaaccaccatgtatgccctgtggagaactggtcctacaacgagtcctgccctcctgaccctgctgagcaagggggtcccaagacctgctgcaccctggacgatgtccccctcatcagcaagtgtggctcctatcccccagaaagctgcctcttcagcctcattggcaacatgggtgctttcatggtggccctgatctgcctcctgcgctacgggcagctcctggagcagagtcggcactcttgggttaacaccacggcactcatcacaggctgcaccaacgctgcgggcctcttggtggttggcaactttcaggtggatcatgccaggtctctgcactacgttggagctggcgtggccttccctgcggggctgctctttgtttgcctgcactgtgctctctcctaccaaggggccaccgccccgctggacctggctgtggcctatctgcgaagtgtgctggctgtcatcgcctttatcaccctggtcctcagtggagtcttctttgtccatgagagttctcagctgcaacatggggcagccctgtgtgagtgggtgtgtgtcatcgatatcctcattttctatggcaccttcagctacgagtttggggcagtctcctcagacacactggtggctgcactgcagcctacccctggccgggcctgcaagtcctccgggagcagcagcacctccacccacctcaactgtgcccccgagagcatcgctatgatctaaggtctggggagggtggctggcccggcctccacagcaccccaccccatatcttctttccatttatttcgtaccaaaaacaattttgagaaagtattctgttgggatctgggcttcctcacttctggagaagtggccatcccatgcccacctgtgccatggaggagtgggccctgccagctgccacagctgcatgacctgcttccccaccccacggtgtcgttttgtttttaaaggtcacctgtcctcactcacccagccagcccttcaggtgccttctactcccagtgccaaagccagaccactggggtttcctgctgcaggaattgggggctgggaacagcagaggggatagaagtctggtggaggtggagtgggcacgccttagcctacggaaaggcccatttctgggcccactgagctgcactgggattcttcactctgcccctcacttcctttagggcaaataacacagcagaaccacgtgggtattttagtacttttttttatattaaaagaattctaatttgca

SEQ ID NO: 287464 - DNA, 2402 bp, Homo sapiens
gagggccgcagctagagtcggcgccacgagggggccgagcagggtgcggcggcggcggggcgctccggggaggtgcgtactgggctccttcccttcctccgggcttccaggaatcacctggggactctcgcgtcccgggtcctggggggtcgccggccgcagggtccggccccagccggggtccccgcgcccaggcgagcgggggccgggccgggctgggctttccgcgtgaacccgcccctcgcccagggcgccgatggtcaggtggttgcctgcgcgccgccgactcgccaccgctccactgggccggcacccagcctctccttggcgtggcctcttcggttgtccagcccttctcccagccctggtccctcagaaggagggtaactcccttccagatgttacggtccgcctgcgtctctcagcacgccggtggcatttgggttgaccgcggaggcccccagtgccagagggtgttcacgttctgccgtgggctcagcccaaactttggacgctcagagacccaacgggagcgctggataaggtgttgacccccttcccctcccccttcccggccagttacccactcctggactttgatctctctccaccaggccaggacagctgatggttgtggcagaaacatctcaaggtagctggtccgcccccacttccccatctacctcttgtcctccccccaacaccaccaccaccctggctcccctccctcatgaccgcctggatcctcctgcctgtcagcctgtcagcgttctccatcactggcatatggactgtgtatgccatggctgtgatgaaccaccatgtatgccctgtggagaactggtatgaaggactctgcagacaaccttgctctaaagcttccttcatctctgtcccctcttgggcctgaggctgccacgagccagactgcaaccctgagcctcactgctcttctctgaaattggtccccaggcatggcttcttgccacctacccacttcccactatccctttgcccctttggttactgcttcaggcgggcactggggagtgggatcttctgtccctgtaggggaggtctgggagagagtcctctttgaggcctgaggctataggccaagggcctgggggcagtcccttcccccagtctactccctgtcctgcctgccaggtcctacaacgagtcctgccctcctgaccctgctgagcaagggggtcccaagacctgctgcaccctggacgatgtccccctcatcagcaagtgtggctcctatcccccagaaagctgcctcttcagcctcattggcaacatgggtgctttcatggtggccctgatctgcctcctgcgctacgggcagctcctggagcagagtcggcactcttgggttaacaccacggcactcatcacaggctgcaccaacgctgcgggcctcttggtggttggcaactttcaggtggatcatgccaggtctctgcactacgttggagctggcgtggccttccctgcggggctgctctttgtttgcctgcactgtgctctctcctaccaaggggccaccgccccgctggacctggctgtggcctatctgcgaagtgtgctggctgtcatcgcctttatcaccctggtcctcagtggagtcttctttgtccatgagagttctcagctgcaacatggggcagccctgtgtgagtgggtgtgtgtcatcgatatcctcattttctatggcaccttcagctacgagtttggggcagtctcctcagacacactggtggctgcactgcagcctacccctggccgggcctgcaagtcctccgggagcagcagcacctccacccacctcaactgtgcccccgagagcatcgctatgatctaaggtctggggagggtggctggcccggcctccacagcaccccaccccatatcttctttccatttatttcgtaccaaaaacaattttgagaaagtattctgttgggatctgggcttcctcacttctggagaagtggccatcccatgcccacctgtgccatggaggagtgggccctgccagctgccacagctgcatgacctgcttccccaccccacggtgtcgttttgtttttaaaggtcacctgtcctcactcacccagccagcccttcaggtgccttctactcccagtgccaaagccagaccactggggtttcctgctgcaggaattgggggctgggaacagcagaggggatagaagtctggtggaggtggagtgggcacgccttagcctacggaaaggcccatttctgggcccactgagctgcactgggattcttcactctgcccctcacttcctttagggcaaataacacagcagaaccacgtgggtattttagtacttttttttatattaaaagaattctaatttgca

SEQ ID NO: 287465 - DNA, 1844 bp, Homo sapiens
gagggccgcagctagagtcggcgccacgagggggccgagcagggtgcggcggcggcggggcgctccggggaggtgcgtactgggctccttcccttcctccgggcttccaggaatcacctggggactctcgcgtcccgggtcctggggggtcgccggccgcagggtccggccccagccggggtccccgcgcccaggcgagcgggggccgggccgggctgggctttccgcgtgaacccgcccctcgcccagggcgccgatggtcaggtggttgcctgcgcgccgccgactcgccaccgctccactgggccggcacccagcctctccttggcgtggcctcttcggttgtccagcccttctcccagccctggtccctcagaaggagggccaggacagctgatggttgtggcagaaacatctcaaggtagctggtccgcccccacttccccatctacctcttgtcctccccccaacaccaccaccaccctggctcccctccctcatgaccgcctggatcctcctgcctgtcagcctgtcagcgttctccatcactggcatatggactgtgtatgccatggctgtgatgaaccaccatgtatgccctgtggagaactggtcctacaacgagtcctgccctcctgaccctgctgagcaagggggtcccaagacctgctgcaccctggacgatgtccccctcatcagcaagtgtggctcctatcccccagaaagctgcctcttcagcctcattggcaacatgggtgctttcatggtggccctgatctgcctcctgcgctacgggcagctcctggagcagagtcggcactcttgggttaacaccacggcactcatcacaggctgcaccaacgctgcgggcctcttggtggttggcaactttcaggtggatcatgccaggtctctgcactacgttggagctggcgtggccttccctgcggggctgctctttgtttgcctgcactgtgctctctcctaccaaggggccaccgccccgctggacctggctgtggcctatctgcgaagtgtgctggctgtcatcgcctttatcaccctggtcctcagtggagtcttctttgtccatgagagttctcagctgcaacatggggcagccctgtgtgagtgggtgtgtgtcatcgatatcctcattttctatggcaccttcagctacgagtttggggcagtctcctcagacacactggtggctgcactgcagcctacccctggccgggcctgcaagtcctccgggagcagcagcacctccacccacctcaactgtgcccccgagagcatcgctatgatctaaggtctggggagggtggctggcccggcctccacagcaccccaccccatatcttctttccatttatttcgtaccaaaaacaattttgagaaagtattctgttgggatctgggcttcctcacttctggagaagtggccatcccatgcccacctgtgccatggaggagtgggccctgccagctgccacagctgcatgacctgcttccccaccccacggtgtcgttttgtttttaaaggtcacctgtcctcactcacccagccagcccttcaggtgccttctactcccagtgccaaagccagaccactggggtttcctgctgcaggaattgggggctgggaacagcagaggggatagaagtctggtggaggtggagtgggcacgccttagcctacggaaaggcccatttctgggcccactgagctgcactgggattcttcactctgcccctcacttcctttagggcaaataacacagcagaaccacgtgggtattttagtacttttttttatattaaaagaattctaatttgca

SEQ ID NO: 287466 - DNA, 2530 bp, Homo sapiens
gagggccgcagctagagtcggcgccacgagggggccgagcagggtgcggcggcggcggggcgctccggggaggtgcgtactgggctccttcccttcctccgggcttccaggaatcacctggggactctcgcgtcccgggtcctggggggtcgccggccgcagggtccggccccagccggggtccccgcgcccaggcgagcgggggccgggccgggctgggctttccgcgtgaacccgcccctcgcccagggcgccgatggtcaggtggttgcctgcgcgccgccgactcgccaccgctccactgggccggcacccagcctctccttggcgtggcctcttcggttgtccagcccttctcccagccctggtccctcagaaggagggtaactcccttccagatgttacggtccgcctgcgtctctcagcacgccggtggcatttgggttgaccgcggaggcccccagtgccagagggtgttcacgttctgccgtgggctcagcccaaactttggacgctcagagacccaacgggagcgctggataaggtgttgacccccttcccctcccccttcccggccagttacccactcctggactttgatctctctccaccaggccaggacagctgatggttgtggcagaaacatctcaaggtagctggtccgcccccacttccccatctacctcttgtcctccccccaacaccaccaccaccctggctcccctccctcatgaccgcctggatcctcctgcctgtcagcctgtcagcgttctccatcactggcatatggactgtgtgagtaaaggggggtgcccggggggcaacaggagcttgatgacgcacacaaagtctcttgtcctgtcatagccacggtggtacccagggtcactctgggtgtctcaaaagcctgacttggtgcctgggcacacagccccttgggacaagctggcaccactgctgtccagcagggtggccctgacaaatatacttctagccagggcaatttccagagggcctgtagctgggggcatgctgcaggtgctggtgtggcatcaagccttagggacctcaacttgagtccccagcaacaataatgaggctgaatggggccagaaatcaaggtatgccatggctgtgatgaaccaccatgtatgccctgtggagaactggtatgaaggactctgcagacaaccttgctctaaagcttccttcatctctgtcccctcttgggcctgaggctgccacgagccagactgcaaccctgagcctcactgctcttctctgaaattggtccccaggtcctacaacgagtcctgccctcctgaccctgctgagcaagggggtcccaagacctgctgcaccctggacgatgtccccctcatcagcaagtgtggctcctatcccccagaaagctgcctcttcagcctcattggcaacatgggtgctttcatggtggccctgatctgcctcctgcgctacgggcagctcctggagcagagtcggcactcttgggttaacaccacggcactcatcacaggctgcaccaacgctgcgggcctcttggtggttggcaactttcaggtggatcatgccaggtctctgcactacgttggagctggcgtggccttccctgcggggctgctctttgtttgcctgcactgtgctctctcctaccaaggggccaccgccccgctggacctggctgtggcctatctgcgaagtgtgctggctgtcatcgcctttatcaccctggtcctcagtggagtcttctttgtccatgagagttctcagctgcaacatggggcagccctgtgtgagtgggtgtgtgtcatcgatatcctcattttctatggcaccttcagctacgagtttggggcagtctcctcagacacactggtggctgcactgcagcctacccctggccgggcctgcaagtcctccgggagcagcagcacctccacccacctcaactgtgcccccgagagcatcgctatgatctaaggtctggggagggtggctggcccggcctccacagcaccccaccccatatcttctttccatttatttcgtaccaaaaacaattttgagaaagtattctgttgggatctgggcttcctcacttctggagaagtggccatcccatgcccacctgtgccatggaggagtgggccctgccagctgccacagctgcatgacctgcttccccaccccacggtgtcgttttgtttttaaaggtcacctgtcctcactcacccagccagcccttcaggtgccttctactcccagtgccaaagccagaccactggggtttcctgctgcaggaattgggggctgggaacagcagaggggatagaagtctggtggaggtggagtgggcacgccttagcctacggaaaggcccatttctgggcccactgagctgcactgggattcttcactctgcccctcacttcctttagggcaaataacacagcagaaccacgtgggtattttagtacttttttttatattaaaagaattctaatttgca

SEQ ID NO: 287467 - DNA, 1860 bp, Homo sapiens
gagggccgcagctagagtcggcgccacgagggggccgagcagggtgcggcggcggcggggcgctccggggaggccaggacagctgatggttgtggcagaaacatctcaaggtagctggtccgcccccacttccccatctacctcttgtcctccccccaacaccaccaccaccctggctcccctccctcatgaccgcctggatcctcctgcctgtcagcctgtcagcgttctccatcactggcatatggactgtgtatgccatggctgtgatgaaccaccatgtatgccctgtggagaactggtatgaaggactctgcagacaaccttgctctaaagcttccttcatctctgtcccctcttgggcctgaggctgccacgagccagactgcaaccctgagcctcactgctcttctctgaaattggtccccaggcatggcttcttgccacctacccacttcccactatccctttgcccctttggttactgcttcaggcgggcactggggagtgggatcttctgtccctgtaggggaggtctgggagagagtcctctttgaggcctgaggctataggccaagggcctgggggcagtcccttcccccagtctactccctgtcctgcctgccaggtcctacaacgagtcctgccctcctgaccctgctgagcaagggggtcccaagacctgctgcaccctggacgatgtccccctcatcagcaagtgtggctcctatcccccagaaagctgcctcttcagcctcattggcaacatgggtgctttcatggtggccctgatctgcctcctgcgctacgggcagctcctggagcagagtcggcactcttgggttaacaccacggcactcatcacaggctgcaccaacgctgcgggcctcttggtggttggcaactttcaggtggatcatgccaggtctctgcactacgttggagctggcgtggccttccctgcggggctgctctttgtttgcctgcactgtgctctctcctaccaaggggccaccgccccgctggacctggctgtggcctatctgcgaagtgtgctggctgtcatcgcctttatcaccctggtcctcagtggagtcttctttgtccatgagagttctcagctgcaacatggggcagccctgtgtgagtgggtgtgtgtcatcgatatcctcattttctatggcaccttcagctacgagtttggggcagtctcctcagacacactggtggctgcactgcagcctacccctggccgggcctgcaagtcctccgggagcagcagcacctccacccacctcaactgtgcccccgagagcatcgctatgatctaaggtctggggagggtggctggcccggcctccacagcaccccaccccatatcttctttccatttatttcgtaccaaaaacaattttgagaaagtattctgttgggatctgggcttcctcacttctggagaagtggccatcccatgcccacctgtgccatggaggagtgggccctgccagctgccacagctgcatgacctgcttccccaccccacggtgtcgttttgtttttaaaggtcacctgtcctcactcacccagccagcccttcaggtgccttctactcccagtgccaaagccagaccactggggtttcctgctgcaggaattgggggctgggaacagcagaggggatagaagtctggtggaggtggagtgggcacgccttagcctacggaaaggcccatttctgggcccactgagctgcactgggattcttcactctgcccctcacttcctttagggcaaataacacagcagaaccacgtgggtattttagtacttttttttatattaaaagaattctaatttgca

SEQ ID NO: 287468 - DNA, 2183 bp, Homo sapiens
gagggccgcagctagagtcggcgccacgagggggccgagcagggtgcggcggcggcggggcgctccggggaggccaggacagctgatggttgtggcagaaacatctcaaggtagctggtccgcccccacttccccatctacctcttgtcctccccccaacaccaccaccaccctggctcccctccctcatgaccgcctggatcctcctgcctgtcagcctgtcagcgttctccatcactggcatatggactgtgtatgccatggctgtgatgaaccaccatgtatgccctgtggagaactggtatgaaggactctgcagacaaccttgctctaaagcttccttcatctctgtcccctcttgggcctgaggctgccacgagccagactgcaaccctgagcctcactgctcttctctgaaattggtccccaggtcctacaacgagtcctgccctcctgaccctgctgagcaagggggtcccaagacctgctgcaccctggacgatgtccccctcatcaggtaaggcctggacattgggccggtcagggagatctaagggcctcccagacagcccctcaagcaaagagctgtccttgggtctcaggaacaataagtatcctaagagccacttaataacaacactacttgacagttactgtggggcaggcactctgctgagtgctttatatgcattgtctcttttcatcctcccaggagtgaggcaggtattgttttcaccattttataggtgaggaaacaggctcagtcttcctcatccaggtcacacagctaataagcggaggcacctggatttaagctggagccctcagattgcccagcccgtgttctggctcaaggatagccaaaccagccgcagggctcagcaaagagtgtcagggttgcccgaacactcctgggcactcccttctctctcacacacatgagctctgctttgggggcccagcctggaaccagttgttcatgagggaccctggatcttcacataaatcagtggcctgcctgctaaggagcaggtgcagcaagtgtggctcctatcccccagaaagctgcctcttcagcctcattggcaacatgggtgctttcatggtggccctgatctgcctcctgcgctacgggcagctcctggagcagagtcggcactcttgggttaacaccacggcactcatcacaggctgcaccaacgctgcgggcctcttggtggttggcaactttcaggtggatcatgccaggtctctgcactacgttggagctggcgtggccttccctgcggggctgctctttgtttgcctgcactgtgctctctcctaccaaggggccaccgccccgctggacctggctgtggcctatctgcgaagtgtgctggctgtcatcgcctttatcaccctggtcctcagtggagtcttctttgtccatgagagttctcagctgcaacatggggcagccctgtgtgagtgggtgtgtgtcatcgatatcctcattttctatggcaccttcagctacgagtttggggcagtctcctcagacacactggtggctgcactgcagcctacccctggccgggcctgcaagtcctccgggagcagcagcacctccacccacctcaactgtgcccccgagagcatcgctatgatctaaggtctggggagggtggctggcccggcctccacagcaccccaccccatatcttctttccatttatttcgtaccaaaaacaattttgagaaagtattctgttgggatctgggcttcctcacttctggagaagtggccatcccatgcccacctgtgccatggaggagtgggccctgccagctgccacagctgcatgacctgcttccccaccccacggtgtcgttttgtttttaaaggtcacctgtcctcactcacccagccagcccttcaggtgccttctactcccagtgccaaagccagaccactggggtttcctgctgcaggaattgggggctgggaacagcagaggggatagaagtctggtggaggtggagtgggcacgccttagcctacggaaaggcccatttctgggcccactgagctgcactgggattcttcactctgcccctcacttcctttagggcaaataacacagcagaaccacgtgggtattttagtacttttttttatattaaaagaattctaatttgca

SEQ ID NO: 287469 - DNA, 1982 bp, Homo sapiens
cttggatttcttaagaaacagccaagtctttgtgtctgcttctctggacccaccgcagccctggccagaggcaggcatggggcgccacgttgagagagcttcctagaggactcaccgttggccggtgcaggctgcaaaatgtgcgcagtggcggagagacgctcctccagccatgtgcacggcgacaatcccaggccaggacagctgatggttgtggcagaaacatctcaaggtagctggtccgcccccacttccccatctacctcttgtcctccccccaacaccaccaccaccctggctcccctccctcatgaccgcctggatcctcctgcctgtcagcctgtcagcgttctccatcactggcatatggactgtgtatgccatggctgtgatgaaccaccatgtatgccctgtggagaactggtatgaaggactctgcagacaaccttgctctaaagcttccttcatctctgtcccctcttgggcctgaggctgccacgagccagactgcaaccctgagcctcactgctcttctctgaaattggtccccaggcatggcttcttgccacctacccacttcccactatccctttgcccctttggttactgcttcaggcgggcactggggagtgggatcttctgtccctgtaggggaggtctgggagagagtcctctttgaggcctgaggctataggccaagggcctgggggcagtcccttcccccagtctactccctgtcctgcctgccaggtcctacaacgagtcctgccctcctgaccctgctgagcaagggggtcccaagacctgctgcaccctggacgatgtccccctcatcagcaagtgtggctcctatcccccagaaagctgcctcttcagcctcattggcaacatgggtgctttcatggtggccctgatctgcctcctgcgctacgggcagctcctggagcagagtcggcactcttgggttaacaccacggcactcatcacaggctgcaccaacgctgcgggcctcttggtggttggcaactttcaggtggatcatgccaggtctctgcactacgttggagctggcgtggccttccctgcggggctgctctttgtttgcctgcactgtgctctctcctaccaaggggccaccgccccgctggacctggctgtggcctatctgcgaagtgtgctggctgtcatcgcctttatcaccctggtcctcagtggagtcttctttgtccatgagagttctcagctgcaacatggggcagccctgtgtgagtgggtgtgtgtcatcgatatcctcattttctatggcaccttcagctacgagtttggggcagtctcctcagacacactggtggctgcactgcagcctacccctggccgggcctgcaagtcctccgggagcagcagcacctccacccacctcaactgtgcccccgagagcatcgctatgatctaaggtctggggagggtggctggcccggcctccacagcaccccaccccatatcttctttccatttatttcgtaccaaaaacaattttgagaaagtattctgttgggatctgggcttcctcacttctggagaagtggccatcccatgcccacctgtgccatggaggagtgggccctgccagctgccacagctgcatgacctgcttccccaccccacggtgtcgttttgtttttaaaggtcacctgtcctcactcacccagccagcccttcaggtgccttctactcccagtgccaaagccagaccactggggtttcctgctgcaggaattgggggctgggaacagcagaggggatagaagtctggtggaggtggagtgggcacgccttagcctacggaaaggcccatttctgggcccactgagctgcactgggattcttcactctgcccctcacttcctttagggcaaataacacagcagaaccacgtgggtattttagtacttttttttatattaaaagaattctaatttgca

SEQ ID NO: 287470 - DNA, 1465 bp, Homo sapiens
gagggccgcagctagagtcggcgccacgagggggccgagcagggtgcggcggcggcggggcgctccggggaggccaggacagctgatggttgtggcagaaacatctcaaggtagctggtccgcccccacttccccatctacctcttgtcctccccccaacaccaccaccaccctggctcccctccctcatgaccgcctggatcctcctgcctgtcagcctgtcagcgttctccatcactggcatatggactgtgtatgccatggctgtgatgaaccaccatgtatgccctgtggagaactggtcctacaacgagtcctgccctcctgaccctgctgagcaagggggtcccaagacctgctgcaccctggacgatgtccccctcatcagtggccctgatctgcctcctgcgctacgggcagctcctggagcagagtcggcactcttgggttaacaccacggcactcatcacaggctgcaccaacgctgcgggcctcttggtggttggcaactttcaggtggatcatgccaggtctctgcactacgttggagctggcgtggccttccctgcggggctgctctttgtttgcctgcactgtgctctctcctaccaaggggccaccgccccgctggacctggctgtggcctatctgcgaagtgtgctggctgtcatcgcctttatcaccctggtcctcagtggagtcttctttgtccatgagagttctcagctgcaacatggggcagccctgtgtgagtgggtgtgtgtcatcgatatcctcattttctatggcaccttcagctacgagtttggggcagtctcctcagacacactggtggctgcactgcagcctacccctggccgggcctgcaagtcctccgggagcagcagcacctccacccacctcaactgtgcccccgagagcatcgctatgatctaaggtctggggagggtggctggcccggcctccacagcaccccaccccatatcttctttccatttatttcgtaccaaaaacaattttgagaaagtattctgttgggatctgggcttcctcacttctggagaagtggccatcccatgcccacctgtgccatggaggagtgggccctgccagctgccacagctgcatgacctgcttccccaccccacggtgtcgttttgtttttaaaggtcacctgtcctcactcacccagccagcccttcaggtgccttctactcccagtgccaaagccagaccactggggtttcctgctgcaggaattgggggctgggaacagcagaggggatagaagtctggtggaggtggagtgggcacgccttagcctacggaaaggcccatttctgggcccactgagctgcactgggattcttcactctgcccctcacttcctttagggcaaataacacagcagaaccacgtgggtattttagtacttttttttatattaaaagaattctaatttgca

SEQ ID NO: 287471 - DNA, 1654 bp, Homo sapiens
tggtaccggtcggagtctataggataccaccaccctggctcccctccctcatgaccgcctggatcctcctgcctgtcagcctgtcagcgttctccatcactggcatatggactgtgtatgccatggctgtgatgaaccaccatgtatgccctgtggagaactggtatgaaggactctgcagacaaccttgctctaaagcttccttcatctctgtcccctcttgggcctgaggctgccacgagccagactgcaaccctgagcctcactgctcttctctgaaattggtccccaggcatggcttcttgccacctacccacttcccactatccctttgcccctttggttactgcttcaggcgggcactggggagtgggatcttctgtccctgtaggggaggtctgggagagagtcctctttgaggcctgaggctataggccaagggcctgggggcagtcccttcccccagtctactccctgtcctgcctgccaggtcctacaacgagtcctgccctcctgaccctgctgagcaagggggtcccaagacctgctgcaccctggacgatgtccccctcatcagtggccctgatctgcctcctgcgctacgggcagctcctggagcagagtcggcactcttgggttaacaccacggcactcatcacaggctgcaccaacgctgcgggcctcttggtggttggcaactttcaggtggatcatgccaggtctctgcactacgttggagctggcgtggccttccctgcggggctgctctttgtttgcctgcactgtgctctctcctaccaaggggccaccgccccgctggacctggctgtggcctatctgcgaagtgtgctggctgtcatcgcctttatcaccctggtcctcagtggagtcttctttgtccatgagagttctcagctgcaacatggggcagccctgtgtgagtgggtgtgtgtcatcgatatcctcattttctatggcaccttcagctacgagtttggggcagtctcctcagacacactggtggctgcactgcagcctacccctggccgggcctgcaagtcctccgggagcagcagcacctccacccacctcaactgtgcccccgagagcatcgctatgatctaaggtctggggagggtggctggcccggcctccacagcaccccaccccatatcttctttccatttatttcgtaccaaaaacaattttgagaaagtattctgttgggatctgggcttcctcacttctggagaagtggccatcccatgcccacctgtgccatggaggagtgggccctgccagctgccacagctgcatgacctgcttccccaccccacggtgtcgttttgtttttaaaggtcacctgtcctcactcacccagccagcccttcaggtgccttctactcccagtgccaaagccagaccactggggtttcctgctgcaggaattgggggctgggaacagcagaggggatagaagtctggtggaggtggagtgggcacgccttagcctacggaaaggcccatttctgggcccactgagctgcactgggattcttcactctgcccctcacttcctttagggcaaataacacagcagaaccacgtgggtattttagtacttttttttatattaaaagaattctaatttgca

SEQ ID NO: 287472 - DNA, 1897 bp, Homo sapiens
gagggccgcagctagagtcggcgccacgagggggccgagcagggtgcggcggcggcggggcgctccggggaggtgcgtactgggctccttcccttcctccgggcttccaggaatcacctggggactctcgcgtcccgggtcctggggggtcgccggccgcagggtccggccccagccggggtccccgcgcccaggcgagcgggggccgggccgggctgggctttccgcgtgaacccgcccctcgcccagggcgccgatggtcaggtggttgcctgcgcgccgccgactcgccaccgctccactgggccggcacccagcctctccttggcgtggcctcttcggttgtccagcccttctcccagccctggtccctcagaaggagggtaactcccttccagatgttacggtccgcctgcgtctctcagcacgccggtggcatttgggttgaccgcggaggcccccagtgccagagggtgttcacgttctgccgtgggctcagcccaaactttggacgctcagagacccaacgggagcgctggataaggtgttgacccccttcccctcccccttcccggccagttacccactcctggactttgatctctctccaccaggccaggacagctgatggttgtggcagaaacatctcaaggtagctggtccgcccccacttccccatctacctcttgtcctccccccaacaccaccaccaccctggctcccctccctcatgaccgcctggatcctcctgcctgtcagcctgtcagcgttctccatcactggcatatggactgtgtatgccatggctgtgatgaaccaccatgtatgccctgtggagaactggtcctacaacgagtcctgccctcctgaccctgctgagcaagggggtcccaagacctgctgcaccctggacgatgtccccctcatcagcaagtgtggctcctatcccccagaaagctgcctcttcagcctcattggcaacatgggtgctttcatggtggccctgatctgcctcctgcgctacgggcagctcctggagcagagtcggcactcttgggttaacaccacggcactcatcacaggctgcaccaacgctgcgggcctcttggtggttggcaactttcaggtggagtcttctttgtccatgagagttctcagctgcaacatggggcagccctgtgtgagtgggtgtgtgtcatcgatatcctcattttctatggcaccttcagctacgagtttggggcagtctcctcagacacactggtggctgcactgcagcctacccctggccgggcctgcaagtcctccgggagcagcagcacctccacccacctcaactgtgcccccgagagcatcgctatgatctaaggtctggggagggtggctggcccggcctccacagcaccccaccccatatcttctttccatttatttcgtaccaaaaacaattttgagaaagtattctgttgggatctgggcttcctcacttctggagaagtggccatcccatgcccacctgtgccatggaggagtgggccctgccagctgccacagctgcatgacctgcttccccaccccacggtgtcgttttgtttttaaaggtcacctgtcctcactcacccagccagcccttcaggtgccttctactcccagtgccaaagccagaccactggggtttcctgctgcaggaattgggggctgggaacagcagaggggatagaagtctggtggaggtggagtgggcacgccttagcctacggaaaggcccatttctgggcccactgagctgcactgggattcttcactctgcccctcacttcctttagggcaaataacacagcagaaccacgtgggtattttagtacttttttttatattaaaagaattctaatttgca

SEQ ID NO: 287473 - DNA, 1096 bp, Homo sapiens
gagggccgcagctagagtcggcgccacgagggggccgagcagggtgcggcggcggcggggcgctccggggaggccaggacagctgatggttgtggcagaaacatctcaaggtcctacaacgagtcctgccctcctgaccctgctgagcaagggggtcccaagacctgctgcaccctggacgatgtccccctcatcagtggccctgatctgcctcctgcgctacgggcagctcctggagcagagtcggcactcttgggttaacaccacggcactcatcacaggctgcaccaacgctgcgggcctcttggtggttggcaactttcaggtggagtcttctttgtccatgagagttctcagctgcaacatggggcagccctgtgtgagtgggtgtgtgtcatcgatatcctcattttctatggcaccttcagctacgagtttggggcagtctcctcagacacactggtggctgcactgcagcctacccctggccgggcctgcaagtcctccgggagcagcagcacctccacccacctcaactgtgcccccgagagcatcgctatgatctaaggtctggggagggtggctggcccggcctccacagcaccccaccccatatcttctttccatttatttcgtaccaaaaacaattttgagaaagtattctgttgggatctgggcttcctcacttctggagaagtggccatcccatgcccacctgtgccatggaggagtgggccctgccagctgccacagctgcatgacctgcttccccaccccacggtgtcgttttgtttttaaaggtcacctgtcctcactcacccagccagcccttcaggtgccttctactcccagtgccaaagccagaccactggggtttcctgctgcaggaattgggggctgggaacagcagaggggatagaagtctggtggaggtggagtgggcacgccttagcctacggaaaggcccatttctgggcccactgagctgcactgggattcttcactctgcccctcacttcctttagggcaaataacacagcagaaccacgtgggtattttagtacttttttttatattaaaagaattctaatttgca

SEQ ID NO: 287474 - DNA, 1943 bp, Homo sapiens
gagggccgcagctagagtcggcgccacgagggggccgagcagggtgcggcggcggcggggcgctccggggaggccaggacagctgatggttgtggcagaaacatctcaaggtagctggtccgcccccacttccccatctacctcttgtcctccccccaacaccaccaccaccctggctcccctccctcatgaccgcctggatcctcctgcctgtcagcctgtcagcgttctccatcactggcatatggactgtgtatgccatggctgtgatgaaccaccatgtatgccctgtggagaactggtcctacaacgagtcctgccctcctgaccctgctgagcaagggggtcccaagacctgctgcaccctggacgatgtccccctcatcagcaagtgtggctcctatcccccagaaagctgcctcttcagcctcattggcaacatgggtgctttcatggtggccctgatctgcctcctgcgctacgggcagctcctggagcagagtcggcactcttgggttaacaccacggcactcatcacaggctgcaccaacgctgcgggcctcttggtggttggcaactttcaggtggatcatgccaggtctctgcactacgttggagctggcgtggccttccctgcggggctgctctttgtttgcctgcactgtgctctctcctaccaaggggccaccgccccgctggacctggctgtggcctatctgcgaagtgtgctggctgtcatcgcctttatcaccctggtcctcagtggagtcttctttgtccatgagagttctcagctgcaacatggggcagccctgtgtgagtgggtgtgtgtcatcgatatcctcattttctatggcaccttcagctacgagtttggggcagtctcctcagacacactggtggctgcactgcagcctacccctggccgggcctgcaagtcctccgggagcagcagcacctccacccacctcaactgtgcccccgagagcatcgctatgatctaaggtctggggagggtggctggcccggcctccacagcaccccaccccatatcttctttccatttatttcgtaccaaaaacaattttgagaaagtattctgttgggatctgggcttcctcacttctggagaagtggccatcccatgcccacctgtgccatggaggagtgggccctgccagctgccacagctgcatgacctgcttccccaccccacggtgtcgttttgtttttaaaggtcacctgtcctcactcacccagccagcccttcaggtgccttctactcccagtgccaaagccagaccactggggtttcctgctgcaggaattgggggctgggaacagcagaggggatagaagtctggtggaggtggagtgggcacgccttagcctacggaaaggcccatttctgggcccactgagctgcactgggattcttcactctgcccctcacttcctttagggcaaataacacagcagaaccacgtgggtattttagtacttttttttatattaaaagaattctaatttgcatgtttgtagcctgttctggagagttggggggcctgatctgggatggctttccataagccaaggatgggaggaagcccttgccccccaggagtgctgagtgcactctgttgccagaaacaaaggatgccaggtgccacccaaataccccttcaaagggcttgaaacccttctgggcctctaagcaatctaaagaactaacttggtctgataatctcacccatcccccactcagagtctggtttgaactttgattccttaggaggcatggggggaaggtgggggtggtacagagagcaactttaaaatattaaaagtggctttctcaatggagcaaaaagaaaacctgtgggattacaaagttaactagacattgcagtgggaggagggtgcaggctagtttatcagctttt

SEQ ID NO: 287475 - DNA, 424 bp, Homo sapiens
gtgttgccaggtttccgtatgtcctactgaacatttccttagcctcgttgtggagtcttctttgtccatgagagttctcagctgcaacatggggcagccctgtgtgagtgggtgtgtgtcatcgatatcctcattttctatggcaccttcagctacgagtttggggcagtctcctcagacacactggtggctgcactgcagcctacccctggccgggcctgcaagtcctccgggagcagcagcacctccacccacctcaactgtgcccccgagagcatcgctatgatctaaggtctggggagggtggctggcccggcctccacagcaccccaccccatatcttctttccatttatttcgtaccaaaaacaattttgagaaagtattctgttgggatctgggcttcctcacttctggagaagtgg

SEQ ID NO: 287476 - DNA, 662 bp, Homo sapiens
gcaacagctgtttgttattgtagtcgtcaaggacagaaaaaggacaaggctgccagaagatgttgcatatggaacagaagattcttgccctggaagaaggaatagaggagatgtaaatatcccttctttcttgggggaaggaaatagatgaactgtatgctaagttagagcctctctttatctataaatgatctgttggttaaacaggatacctcccttctgaacatctcagcaccccatcaagagaacttcaggtctctgccatttagacgtgtcatttgtaagtaaaataaatcagggaagtaataggaggaaagctaagaatgaaaggaattcatcaccactgcaaatttgtccctgaagcaagaaagaaacttaactgtttcaaccaactgccaatcagaacacctttgaattcaactatcagctgtaagcccaacaccctccttgaagttgtcctacctttctggaccaaatgaacatatacgttacatacactgattgatgtctgcctataaattctgtccccctaaactgtgtaaaatcaagctgtaacccaaccactgtgtttggatacatgttctcaggacctcctgaggctatgtcatgggtcatggtcctcacatttggctcagaataaatgtctttaaatattttacaga

SEQ ID NO: 287477 - DNA, 433 bp, Homo sapiens
gcaacagctgtttgttattgtagtcgtcaaggacagaaaaaggacaaggctgccagaagatgttgcatatggaacagaagattcttgccctggaagaaggaatagaggagatgtaaatatcccttctttcttgggggaaggaaatagatgaactgtatgctaagttagagcctctctttatctataaatgatctgttggttaaacaggatacctcccttctgaacatctcagcaccccatcaagagaacttcaggtctctgccatttagacgtgtcatttgtaagtaaaataaatcagggaagtaataggaggaaagctaagaatgaaaggaattcatcaccactgcaaatttgtccctgaagcaaggtgagtccctgcccatctggctacaccagctcttttttttttttttttttttttttttttttggcc

SEQ ID NO: 287478 - DNA, 2204 bp, Homo sapiens
gcggccgccgccatcttcgcgcgcccgctcgccctaaccccgcccccagacgccatgcccacgtgaccgctcgcccccggacccggagcgtgggcggggatttcgtcacgtgacgttgccgcggggcggtgccaagatggcgaggcccaaagaggtgaggagccggcagcgggggcggctgtaactgtgaggaaggctgcagagtggcgacgtctacgccgtaggttggaggctgtggggggtggccgggcgccagctcccaggccgcagaagtgacctgcggtggagttccctcctcgctgctggagaacggagggagaaggttgctggccgggtgaaagtgcctccctctgcttgacggggctgaggggcccgaagtctagggcgtccgtagtcgccccggcctccgtgaagccccaggtctagagatatgacccgagagtgcccatctccggccccggggcctggggctccgctgagtggatcggtgctggcagaggcggcagtagtgtttgcagtggtgctgagcatccacgcaaccgtatgggaccgatactcgtggtgcgccgtggccctcgcagtgcaggccttctacgtccaatacaagtgggaccggctgctacagcagggaagcgccgtcttccagttccgaatgtccgcaaacagtggcctattgcccgcctccatggtcatgcctttgcttggactagtcatgaaggagcggtgccagactgctgggaacccgttctttgagcgttttggcattgtggtggcagccactggcatggcagtggccctcttctcatcagtgttggcgctcggcatcactcgcccagtgccaaccaacacttgtgtcatcttgggcttggctggaggtgttatcatttatatcatgaagcactcgttgagcgtgggggaggtgatcgaagtcctggaagtccttctgatcttcgtttatctcaacatgatcctgctgtacctgctgccccgctgcttcacccctggtgaggcactgctggtattgggtggcattagctttgtcctcaaccagctcatcaagcgctctctgacactggtggaaagtcagggggacccagtggacttcttcctgctggtggtggtagtagggatggtactcatgggcattttcttcagcactctgtttgtcttcatggactcaggcacctgggcctcctccatcttcttccacctcatgacctgtgtgctgagccttggtgtggtcctaccctggctgcaccggctcatccgcaggaatcccctgctctggcttcttcagtttctcttccagacagacacccgcatctacctcctagcctattggtctctgctggccaccttggcctgcctggtggtgctgtaccagaatgccaagcggtcatcttccgagtccaagaagcaccaggcccccaccatcgcccgaaagtatttccacctcattgtggtagccacctacatcccaggtatcatctttgaccggccactgctctatgtagccgccactgtatgcctggcggtcttcatcttcctggagtatgtgcgctacttccgcatcaagcctttgggtcacactctacggagcttcctgtccctttttctggatgaacgagacagtggaccactcattctgacacacatctacctgctcctgggcatgtctcttcccatctggctgatccccagaccctgcacacagaagggtagcctgggaggagccagggccctcgtcccctatgccggtgtcctggctgtgggtgtgggtgatactgtggcctccatcttcggtagcaccatgggggagatccgctggcctggaaccaaaaagacttttgaggggaccatgacatctatatttgcgcagatcatttctgtagctctgatcttaatctttgacagtggagtggacctaaactacagttatgcttggattttggggtccatcagcactgtgtccctcctggaagcatacactacacagatagacaatctccttctgcctctctacctcctgatattgctgatggcctagctgttacagtgcagcagcagtgacggaggaaacagacatggggagggtgaacagtccccacagcagacagctacttgggcatgaagagccaaggtgtgaaaagcagatttgatttttcagttgattcagatttaaaataaaaagcaaagctctccta

SEQ ID NO: 287479 - DNA, 2847 bp, Homo sapiens
gcggccgccgccatcttcgcgcgcccgctcgccctaaccccgcccccagacgccatgcccacgtgaccgctcgcccccggacccggagcgtgggcggggatttcgtcacgtgacgttgccgcggggcggtgccaagatggcgaggcccaaagaggtgaggagccggcagcgggggcggctgtaactgtgaggaaggctgcagagtggcgacgtctacgccgtaggttggaggctgtggggggtggccgggcgccagctcccaggccgcagaagtgacctgcggtggagttccctcctcgctgctggagaacggagggagaaggttgctggccgggtgaaagtgcctccctctgcttgacggggctgaggggcccgaagtctagggcgtccgtagtcgccccggcctccgtgaagccccaggtctagagatatgacccgagagtgcccatctccggccccggggcctggggctccgctgagtggatcggtgctggcagaggcggcagtagtgtttgcagtggtgctgagcatccacgcaaccgtatgggaccgatactcgtggtgcgccgtggccctcgcagtgcaggccttctacgtccaatacaagtgggaccggctgctacagcagggaagcgccgtcttccagttccgaatgtccgcaaacagtggcctattgcccgcctccatggtcatgcctttgcttggactagtcatgaaggagcggtgccagactgctgggaacccgttctttgagcgttttggcattgtggtggcagccactggcatggcagtggccctcttctcatcagtgttggcgctcggcatcactcgcccagtgccaaccaacacttgtgtcatcttgggcttggctggaggtgttatcatttatatcatgaagcactcgttgagcgtgggggaggtgatcgaagtcctggaagtccttctgatcttcgtttatctcaacatgatcctgctgtacctgctgccccgctgcttcacccctggtgaggcactgctggtattgggtggcattagctttgtcctcaaccagctcatcaagcgctctctgacactggtggaaagtcagggggacccagtggacttcttcctgctggtggtggtagtagggatggtactcatgggcattttcttcagcactctgtttgtcttcatggactcaggcacctgggcctcctccatcttcttccacctcatgacctgtgtgctgagccttggtgtggtcctaccctggctgcaccggctcatccgcaggaatcccctgctctggcttcttcagtttctcttccagacagacacccgcatctacctcctagcctattggtctctgctggccaccttggcctgcctggtggtgctgtaccagaatgccaagcggtcatcttccgagtccaagaagcaccaggcccccaccatcgcccgaaagtatttccacctcattgtggtagccacctacatcccaggtatcatctttgaccggccactgctctatgtagccgccactgtatgcctggcggtcttcatcttcctggagtatgtgcgctacttccgcatcaagcctttgggtcacactctacggagcttcctgtccctttttctggatgaacgagacagtggaccactcattctgacacacatctacctgctcctgggcatgtctcttcccatctggctgatccccagaccctgcacacagaagggtagcctgggaggagccagggccctcgtcccctatgccggtgtcctggctgtgggtgtgggtgatactgtggcctccatcttcggtagcaccatgggggagatccgctggcctggaaccaaaaagacttttgaggggaccatgacatctatatttgcgcagatcatttctgtagctctgatcttaatctttgacagtggagtggacctaaactacagttatgcttggattttggggtccatcagcactgtgtccctcctggaagcatacactacacagatagacaatctccttctgcctctctacctcctgatattgctgatggcctagctgttacagtgcagcagcagtgacggaggaaacagacatggggagggtgaacagtccccacagcagacagctacttgggcatgaagagccaaggtgtgaaaagcagatttgatttttcagttgattcagatttaaaataaaaagcaaagctctcctaaaaaaaaaaaaaaaaaaaaaaaaaaaaaaaaaaaaaaaaaaaaaaacaacaaaaaaaaaaaacaaaaaaaaaaaacaaaaaaaacagagaaacgcaagcaacgacggcaacacacgacgagacgacagaagcgacaaagcgagcaacggcacaagcaacgacaaagaggcgggggcagcggccgcaacacgcagcaacggcgcagcagacagcgaagcgtgcagcactgccagctcacagtgaccgtataagcaggaagacagcagacaacagagcaagcggggaagacaacagaacaagggggcaaaaccgcaaacacacagcatcgaagaaacacaccacgcgaccgcggagatacagcgcgcgccgcaagcacgcgaagccgtcggcagtaaccagcagaacaagacaggcggctggcggtggggacgcgcgaggacgggggagaacgaccgagcaccggacgaccacgcaccagcagggcggagaaaagacgggaggcagagagcggcgcgactgcggaggggagcgagacgggcgcggcgcagcgaggcgcagcgcagagagccaaggaggagccagcggacgccacgggggcagcaaggcggccaagagcgcagcggggagaccagacagcaacagg

SEQ ID NO: 287480 - DNA, 2745 bp, Homo sapiens
aacctagtgctaagtacgaggcccgggtgtaatcggccgagggcccaaagaggtgaggagccggcagcgggggcggctgtaactgtgaggaaggctgcagagtggcgacgtctacgccgtaggttggaggctgtggggggtggccgggcgccagctcccaggccgcagaagtgacctgcggtggagttccctcctcgctgctggagaacggagggagaaggttgctggccgggtgaaagtgcctccctctgcttgacggggctgaggggcccgaagtctagggcgtccgtagtcgccccggcctccgtgaagccccaggtctagagatatgacccgagagtgcccatctccggccccggggcctggggctccgctgagtggatcggtgctggcagaggcggcagtagtgtttgcagtggtgctgagcatccacgcaaccgtatgggaccgatactcgtggtgcgccgtggccctcgcagtgcaggccttctacgtccaatacaagtgggaccggctgctacagcagggaagcgccgtcttccagttccgaatgtccgcaaacagtggcctattgcccgcctccatggtcatgcctttgcttggactagtcatgaaggagcggtgccagactgctgggaacccgttctttgagcgttttggcattgtggtggcagccactggcatggcagtggccctcttctcatcagtgttggcgctcggcatcactcgcccagtgccaaccaacacttgtgtcatcttgggcttggctggaggtgttatcatttatatcatgaagcactcgttgagcgtgggggaggtgatcgaagtcctggaagtccttctgatcttcgtttatctcaacatgatcctgctgtacctgctgccccgctgcttcacccctggtgaggcactgctggtattgggtggcattagctttgtcctcaaccagctcatcaagcgctctctgacactggtggaaagtcagggggacccagtggacttcttcctgctggtggtggtagtagggatggtactcatgggcattttcttcagcactctgtttgtcttcatggactcaggcacctgggcctcctccatcttcttccacctcatgacctgtgtgctgagccttggtgtggtcctaccctggctgcaccggctcatccgcaggaatcccctgctctggcttcttcagtttctcttccagacagacacccgcatctacctcctagcctattggtctctgctggccaccttggcctgcctggtggtgctgtaccagaatgccaagcggtcatcttccgagtccaagaagcaccaggcccccaccatcgcccgaaagtatttccacctcattgtggtagccacctacatcccaggtatcatctttgaccggccactgctctatgtagccgccactgtatgcctggcggtcttcatcttcctggagtatgtgcgctacttccgcatcaagcctttgggtcacactctacggagcttcctgtccctttttctggatgaacgagacagtggaccactcattctgacacacatctacctgctcctgggcatgtctcttcccatctggctgatccccagaccctgcacacagaagggtagcctgggaggagccagggccctcgtcccctatgccggtgtcctggctgtgggtgtgggtgatactgtggcctccatcttcggtagcaccatgggggagatccgctggcctggaaccaaaaagacttttgaggggaccatgacatctatatttgcgcagatcatttctgtagctctgatcttaatctttgacagtggagtggacctaaactacagttatgcttggattttggggtccatcagcactgtgtccctcctggaagcatacactacacagatagacaatctccttctgcctctctacctcctgatattgctgatggcctagctgttacagtgcagcagcagtgacggaggaaacagacatggggagggtgaacagtccccacagcagacagctacttgggcatgaagagccaaggtgtgaaaagcagatttgatttttcagttgattcagatttaaaataaaaagcaaagctctcctaaaaaaaaaaaaaaaaaaaaaaaaaaaaaaaaaaaaaaaaaaaaaaacaacaaaaaaaaaaaacaaaaaaaaaaaacaaaaaaaacagagaaacgcaagcaacgacggcaacacacgacgagacgacagaagcgacaaagcgagcaacggcacaagcaacgacaaagaggcgggggcagcggccgcaacacgcagcaacggcgcagcagacagcgaagcgtgcagcactgccagctcacagtgaccgtataagcaggaagacagcagacaacagagcaagcggggaagacaacagaacaagggggcaaaaccgcaaacacacagcatcgaagaaacacaccacgcgaccgcggagatacagcgcgcgccgcaagcacgcgaagccgtcggcagtaaccagcagaacaagacaggcggctggcggtggggacgcgcgaggacgggggagaacgaccgagcaccggacgaccacgcaccagcagggcggagaaaagacgggaggcagagagcggcgcgactgcggaggggagcgagacgggcgcggcgcagcgaggcgcagcgcagagagccaaggaggagccagcggacgccacgggggcagcaaggcggccaagagcgcagcggggagaccagacagcaacagg

SEQ ID NO: 287481 - DNA, 1435 bp, Homo sapiens
gcggccgccgccatcttcgcgcgcccgctcgccctaaccccgcccccagacgccatgcccacgtgaccgctcgcccccggacccggagcgtgggcggggatttcgtcacgtgacgttgccgcggggcggtgccaagatggcgaggcccaaagaggtgaggagccggcagcgggggcggctgtaactgtgaggaaggctgcagagtggcgacgtctacgccgtaggttggaggctgtggggggtggccgggcgccagctcccaggccgcagaagtgacctgcggtggagttccctcctcgctgctggagaacggagggagaaggttgctggccgggtgaaagtgcctccctctgcttgacggggctgaggggcccgaagtctagggcgtccgtagtcgccccggcctccgtgaagccccaggtctagagatatgacccgagagtgcccatctccggccccggggcctggggctccgctgagtggatcggtgctggcagaggcggcagtagtgtttgcagtggtgctgagcatccacgcaaccgtatgggaccgatactcgtggtgcgccgtggccctcgcagtgcaggccttctacgtccaatacaagtgggaccggctgctacagcagggaagcgccgtcttccagttccgaatgtccgcaaacagtggcctattgcccgcctccatggtcatgcctttgcttggactagtcatgaaggagcggtgccagactgctgggaacccgttctttgagcgttttggcattgtggtggcagccactggcatggcagtggccctcttctcatcagtgttggcgctcggcatcactcgcccagtgccaaccaacacttgtgtcatcttgggcttggctggaggtgttatcatttatatcatgaagcactcgttgagcgtgggggaggtgatcgaagtcctggaagtccttctgatcttcgtttatctcaacatgatcctgctgtacctgctgccccgctgcttcacccctggtgaggcactgctggtattgggtggcattagctttgtcctcaaccagctcatcaagcgctctctgacactggtggaaagtcagggggacccagtggacttcttcctgctggtggtggtagtagggatggtactcatgggcattttcttcagcactctgtttgtcttcatggactcaggcacctgggcctcctccatcttcttccacctcatgacctgtgtgctgagccttggtgtggtcctaccctggctgcaccggctcatccgcaggaatcccctgctctggcttcttcagtttctcttccagacagacacccgcatctacctcctagcctattggtctctgctggccaccttggcctgcctggtggtgctgtaccagaatgccaagcggtcatcttccgagtcacactcgggatcctcaaggagtcag

SEQ ID NO: 287482 - DNA, 3185 bp, Homo sapiens
  misc_feature (711)..(711): n is a, c, g, or t
  misc_feature (1206)..(1206): n is a, c, g, or t
  misc_feature (1345)..(1345): n is a, c, g, or t
  misc_feature (1428)..(1428): n is a, c, g, or t
  misc_feature (3003)..(3003): n is a, c, g, or t
  misc_feature (3088)..(3088): n is a, c, g, or t
  misc_feature (3131)..(3131): n is a, c, g, or t
ggcacgagggggaggctggcgcaaacgcagcgggtggctggggtaggggctcattgggagcccacggagcgcggcggcggctcgggggccgagttccctacaacaaggatggcggtgacgggcgcagggagcggggcccggctctccttgcctcgaggctcctctgattccactcgcgtggctgcgcggccctggcagcggccttcgtcccgggggtgggagctacacagggttccgccccgtcctggcgaggacgcctgagggggctctgtggtaaggctctgtcgggcaggccgggcttccgggaggacctggtctggatcggtcaccgctgggtgcctgagctccgcatggagcctgcagcctttgtttaacttataaagaaatgggggctccgagcagtcaagaagaacatgccccaagttattcgtcagtgaggcggaaattgtggtgtacttgttccagaccaactatgaagataggatgcccatccagaagaacgggaagcattttcttcctcacctttggaaagtaaaacaaaaaaaaaaagaaaaataaaagaaaaaagagagtattaaaatttctcattgtaaaatctatattttagaatcactctacaatataagcaaataatgtgttttttactgattacatgccttttttttggggggggggggttctttttttttgagacagggtcttgctctgtcncccaggctggagtgcagtggcgtgatgagacttcaatgcagccttgatctcccgggctcaagtgattctcccgcctcagcctcccaagcaactgggaccacaaggtgtgtgccaccatgcctgggtaattttttgtttttttgtggagatgcgggtctcactgttttccaggctggtctcaaattcctgggctcaagtgatcctcccacttcagcctcacattgttgggattacagtcacgagccactgtacccatccatatgtcattctttagacacactacttactaaatttctctttttaaaggatatactgaatttccggttgagccaacttaactgctaattttctattttagctttaaaacattgataagcaacatgaagcaatctagaacttaacctttaaatggctttattaaagaaatccagctatgaaaatcatgcagaaatgattatttacaaacaatcctaccagcacataagaaattcttcntctattctgaaataccatcttctcacaatatactttgatgttatgaatcaatgtctgttctcgaacattatttgtctttctccattaaacaataccaaaataaaatttccagcacaactaagtattgttgacgataagnggatttaaaaaaaaattcttttaaaacagaagcttatatacaacttagaatctaaaaccaatagatttatggtaaaccttaanactgaaccaaaacaaacaaaaaccaaagttttaatcatttaaaaatcatgtttattgaggtacaacttacttatagtaaaacctgcccttttcagcatatagcactgagtcttgacaaatgcacagttacgtaccaccaccgaccaaggcctggcacattttcacctcctcaaagttctccctggctgcttctcccactccttggcaaccgctaacctgttttctgtccttatagttctgcttttttcagagtgtcatataagtagaatcacactgtacatagtattttgagtctgacctctgtcaactggcataaggcatttgagaattatccatgttgctgtactggcagtgcattcttttttattgctgagcagtattcaattgcatggctgtaccagtttattcatttgccagttgaaggataactgagatcttcctcgtttttagcaattttaaagaaagtttctatgaataattgtgtacaggtttttaattaaatgttttggagatataattcatataccacataattcacctttttaaagtgcataagtcactggtttttaatatattcacaaggtttgtgcataggtttttgtgtgaatactggttttcattcctcttggataaagatttaatttggtattatccttccagacacctttctgtgttttcatacgtatatatgtatgacagtttgaccttaggcagagtagcattttcaaaattttacatggggaaattttctagagttaaagccattttatttttgtgttctgtctggttttatctgcgtgttatttacaatctgctgcgtaacaaattacaaagttagtaccttaacacatatttatttcacagtttctgtgggtcaggagatcagaaatggttctatttcaaggtctctcacagggctgcaatcaagatgttggcatggctggggtctcatctgaaggctggactggagaagaatctacttccaaacttatgtggtagttggaagaatttagttcctcaaggccgctaaactgatggcctgtgttccttgcctatgggatggtagcttgcttcaacaaagtgtgcaagcagagaagacagagagtccgctagcaagatagaagccacaatctcttgtaatctatcatttttgctgtattctactggttaaaaataactcattaggttagcctactggctctcaaggggaagagattatacaaaggcatgaatttctggaggagggaatgagggcaaagaattctgagaagtctgtcttccacaatctgaagaacttctagaaagtaggaggaagcgatattgcttagggatggacaacttggcactggttatgtatttcaagtgaggtaaccttgttcccaagaataaagagaaccagacgactgtaaacatttccctaaactgaaatgcagactgttgtatgttcccctgaaatgaatggtgtaagctgaatataagatttttgacaaaaattttgctgtgttctcagatctggcaggcccctgcccttgtgcaaacaatgttcctggcagctattcatctccttaggtaaanaagaattggagaaaagctgtgctaagataggatgcatttgctcttgccttggaaggttgttttctgataaggttctatatcctcngcaaatcaaatcaggcacttacagtgtgagtatgcattctctncctgccagtctggagatgatcaaaaagcctataacaggcttggcctattttcct

SEQ ID NO: 287483 - DNA, 3096 bp, Homo sapiens
  misc_feature (622)..(622): n is a, c, g, or t
  misc_feature (1117)..(1117): n is a, c, g, or t
  misc_feature (1256)..(1256): n is a, c, g, or t
  misc_feature (1339)..(1339): n is a, c, g, or t
  misc_feature (2914)..(2914): n is a, c, g, or t
  misc_feature (2999)..(2999): n is a, c, g, or t
  misc_feature (3042)..(3042): n is a, c, g, or t
aattccagttggtatggtaccaaaatttagtttaacttcaaaattcacagtactgccgagaaatgggcgggtcctgaggttccagagaagtggggagtgaattcattcctggtggttttattctggcagcatgcatgggaaatcacatgagttagagggctgtggcctgctatcaacacttcaagctgttgtacttttacttcaagatgaaacttttaaaatacatctgtcatatagatgtacaaatatatgtagatgcaaacatatatacacactttttgacaaaagaattgtggtaatatacgtgaaccatttttgtaaatagattctatttggttaataaaaatattccttccatcaacctatcgaagtccagaccaactatgaagataggatgcccatccagaagaacgggaagcattttcttcctcacctttggaaagtaaaacaaaaaaaaaaagaaaaataaaagaaaaaagagagtattaaaatttctcattgtaaaatctatattttagaatcactctacaatataagcaaataatgtgttttttactgattacatgccttttttttggggggggggggttctttttttttgagacagggtcttgctctgtcncccaggctggagtgcagtggcgtgatgagacttcaatgcagccttgatctcccgggctcaagtgattctcccgcctcagcctcccaagcaactgggaccacaaggtgtgtgccaccatgcctgggtaattttttgtttttttgtggagatgcgggtctcactgttttccaggctggtctcaaattcctgggctcaagtgatcctcccacttcagcctcacattgttgggattacagtcacgagccactgtacccatccatatgtcattctttagacacactacttactaaatttctctttttaaaggatatactgaatttccggttgagccaacttaactgctaattttctattttagctttaaaacattgataagcaacatgaagcaatctagaacttaacctttaaatggctttattaaagaaatccagctatgaaaatcatgcagaaatgattatttacaaacaatcctaccagcacataagaaattcttcntctattctgaaataccatcttctcacaatatactttgatgttatgaatcaatgtctgttctcgaacattatttgtctttctccattaaacaataccaaaataaaatttccagcacaactaagtattgttgacgataagnggatttaaaaaaaaattcttttaaaacagaagcttatatacaacttagaatctaaaaccaatagatttatggtaaaccttaanactgaaccaaaacaaacaaaaaccaaagttttaatcatttaaaaatcatgtttattgaggtacaacttacttatagtaaaacctgcccttttcagcatatagcactgagtcttgacaaatgcacagttacgtaccaccaccgaccaaggcctggcacattttcacctcctcaaagttctccctggctgcttctcccactccttggcaaccgctaacctgttttctgtccttatagttctgcttttttcagagtgtcatataagtagaatcacactgtacatagtattttgagtctgacctctgtcaactggcataaggcatttgagaattatccatgttgctgtactggcagtgcattcttttttattgctgagcagtattcaattgcatggctgtaccagtttattcatttgccagttgaaggataactgagatcttcctcgtttttagcaattttaaagaaagtttctatgaataattgtgtacaggtttttaattaaatgttttggagatataattcatataccacataattcacctttttaaagtgcataagtcactggtttttaatatattcacaaggtttgtgcataggtttttgtgtgaatactggttttcattcctcttggataaagatttaatttggtattatccttccagacacctttctgtgttttcatacgtatatatgtatgacagtttgaccttaggcagagtagcattttcaaaattttacatggggaaattttctagagttaaagccattttatttttgtgttctgtctggttttatctgcgtgttatttacaatctgctgcgtaacaaattacaaagttagtaccttaacacatatttatttcacagtttctgtgggtcaggagatcagaaatggttctatttcaaggtctctcacagggctgcaatcaagatgttggcatggctggggtctcatctgaaggctggactggagaagaatctacttccaaacttatgtggtagttggaagaatttagttcctcaaggccgctaaactgatggcctgtgttccttgcctatgggatggtagcttgcttcaacaaagtgtgcaagcagagaagacagagagtccgctagcaagatagaagccacaatctcttgtaatctatcatttttgctgtattctactggttaaaaataactcattaggttagcctactggctctcaaggggaagagattatacaaaggcatgaatttctggaggagggaatgagggcaaagaattctgagaagtctgtcttccacaatctgaagaacttctagaaagtaggaggaagcgatattgcttagggatggacaacttggcactggttatgtatttcaagtgaggtaaccttgttcccaagaataaagagaaccagacgactgtaaacatttccctaaactgaaatgcagactgttgtatgttcccctgaaatgaatggtgtaagctgaatataagatttttgacaaaaattttgctgtgttctcagatctggcaggcccctgcccttgtgcaaacaatgttcctggcagctattcatctccttaggtaaanaagaattggagaaaagctgtgctaagataggatgcatttgctcttgccttggaaggttgttttctgataaggttctatatcctcngcaaatcaaatcaggcacttacagtgtgagtatgcattctctncctgccagtctggagatgatcaaaaagcctataacaggcttggcctattttcct

SEQ ID NO: 287484 - DNA, 2429 bp, Homo sapiens
  misc_feature (711)..(711): n is a, c, g, or t
  misc_feature (1206)..(1206): n is a, c, g, or t
  misc_feature (1345)..(1345): n is a, c, g, or t
  misc_feature (1428)..(1428): n is a, c, g, or t
ggcacgagggggaggctggcgcaaacgcagcgggtggctggggtaggggctcattgggagcccacggagcgcggcggcggctcgggggccgagttccctacaacaaggatggcggtgacgggcgcagggagcggggcccggctctccttgcctcgaggctcctctgattccactcgcgtggctgcgcggccctggcagcggccttcgtcccgggggtgggagctacacagggttccgccccgtcctggcgaggacgcctgagggggctctgtggtaaggctctgtcgggcaggccgggcttccgggaggacctggtctggatcggtcaccgctgggtgcctgagctccgcatggagcctgcagcctttgtttaacttataaagaaatgggggctccgagcagtcaagaagaacatgccccaagttattcgtcagtgaggcggaaattgtggtgtacttgttccagaccaactatgaagataggatgcccatccagaagaacgggaagcattttcttcctcacctttggaaagtaaaacaaaaaaaaaaagaaaaataaaagaaaaaagagagtattaaaatttctcattgtaaaatctatattttagaatcactctacaatataagcaaataatgtgttttttactgattacatgccttttttttggggggggggggttctttttttttgagacagggtcttgctctgtcncccaggctggagtgcagtggcgtgatgagacttcaatgcagccttgatctcccgggctcaagtgattctcccgcctcagcctcccaagcaactgggaccacaaggtgtgtgccaccatgcctgggtaattttttgtttttttgtggagatgcgggtctcactgttttccaggctggtctcaaattcctgggctcaagtgatcctcccacttcagcctcacattgttgggattacagtcacgagccactgtacccatccatatgtcattctttagacacactacttactaaatttctctttttaaaggatatactgaatttccggttgagccaacttaactgctaattttctattttagctttaaaacattgataagcaacatgaagcaatctagaacttaacctttaaatggctttattaaagaaatccagctatgaaaatcatgcagaaatgattatttacaaacaatcctaccagcacataagaaattcttcntctattctgaaataccatcttctcacaatatactttgatgttatgaatcaatgtctgttctcgaacattatttgtctttctccattaaacaataccaaaataaaatttccagcacaactaagtattgttgacgataagnggatttaaaaaaaaattcttttaaaacagaagcttatatacaacttagaatctaaaaccaatagatttatggtaaaccttaanactgaaccaaaacaaacaaaaaccaaagttttaatcatttaaaaatcatgtttattgaggtacaacttacttatagtaaaacctgcccttttcagcatatagcactgagtcttgacaaatgcacagttacgtaccaccaccgaccaaggcctggcacattttcacctcctcaaagttctccctggctgcttctcccactccttggcaaccgctaacctgttttctgtccttatagttctgcttttttcagagtgtcatataagtagaatcacactgtacatagtattttgagtctgacctctgtcaactggcataaggcatttgagaattatccatgttgctgtactggcagtgcattcttttttattgctgagcagtattcaattgcatggctgtaccagtttattcatttgccagttgaaggataactgagatcttcctcgtttttagcaattttaaagaaagtttctatgaataattgtgtacaggtttttaattaaatgttttggagatataattcatataccacataattcacctttttaaagtgcataagtcactggtttttaatatattcacaaggtttgtgcataggtttttgtgtgaatactggttttcattcctcttggataaagatttaatttggtattatccttccagacacctttctgtgttttcatacgtatatatgtatgacagtttgaccttaggcagagtagcattttcaaaattttacatggggaaattttctagagttaaagccattttatttttgtgttctgtctggttttatctgcgtgttatttacaatctgctgcgtaacaaattacaaagttagtaccttaacacatatttatttcacagtttctgtgggtcaggagatcagaaatggttctatttcaaggtctctcacagggctgcaatcaagatgttggcatggctggggtctcatctgaaggctggactggagaagaatctactcaccgggatctcagatcacc

SEQ ID NO: 287485 - DNA, 796 bp, Homo sapiens
tgggccagtagccgagccgcggtgacgaaccggctccgcggttgcggtgtttgcggttgctgtgatggcgatgtgagggggcccggggcgggatggtgctgacccgggtcgggccgtcttcttgcagctggacaacgagctcctccgttcgacaggcgggggaagaggccgagccgggcgagagggttgaagatcaactggattatgtatttggttctggaatctcaaagcagtccacaaacaaattcttccttatgttgtctgtgtcagagtcccactgtattgcctctacctcccggattcaagcgattcatgtgcctcagcctcccaagtagctggaattacatgcccaggccaccacacctggctaatttttgtatttttagtagagatggggtttcaccatattggccagcaggtctcaaactcctggcctcaagtgattctcccgcctcagccacccaaagtgctgggattacaggcatgaactactatgcctggctgtagtctgggacatttctgttaagtgttatgaaatgttcttttgctactggtcttaatttaacctgaactagaataagtattcctttattgaaatacccttgaagttgcctataggatgcagctgtttcattcatgattgtttttagagcagtgttaactatgacacttgctctttgatgtcttcagattgccagcaagtcaagggcttacattggaaatactgctatctataaatgtctaagcagcaaggtcagcccttattggcaataaaaaatgtaagactgtggaagcc

SEQ ID NO: 287486 - DNA, 280 bp, Homo sapiens
ctcctccgttcgacaggcgggggaagaggccgagccgggcgagaggtaacccccttactgtcccctctggctcccccggctcccgacacccacgacccctccctccgtccctcttgcccaggggccaggaaggaagcggcctcctcttcgtccgccgttcgcccgccgcggcccctcacccgactgctggcggtcggagcctggccccggccccgttgaaggtcggtggggacggcggtgcggagcgctctgagggaggcgaggggccgcggcgcgctgc

SEQ ID NO: 287487 - DNA, 767 bp, Homo sapiens
aaagcccaaagccatagtattggcttctctgtgtgtcgggcagtaagcccattgcttggtagcaagtctgtcttcactgtctaaaaaatgctttgatcaatagctccctgcccctcctctagtgatctagacccatccgtagtaatttcactcttttcccgaggacaaagtctggtgggaaagaaacactgaggctaacatcagcttcctaaagtcatgattccacatttggcaggcagatggacccaccagtctctgattatggccagtctttgaacacctgactccactttctacctgcagtctccactgtagcttattttagtctcaagcaagtaaatacctgggaaggtttagtagctcacctgtgaaaatacatgttaattttccaccctggaatttaataagctccttgagggcaggggtggcattttcatttttatttctctaacacctgacacaaacgtttggtgtctagtttaggtcctcaataaatgttagttgaataaacagttttctctctgttaactctcctctctaatggcagttttttcaaaatccaggcacggattgggcttactgcacacttcagcgtaggagcacgtcggttcaccattagagtaacggatctcaggggtcaaagttgtggactcaatcgtagaggaaaccactgggctcaccaagagaatgatcgtttccggcccctttctacataacttcatgcaacacggagactcctgaaagttgtagatgagttggatttctga

SEQ ID NO: 287488 - DNA, 318 bp, Homo sapiens
accctccaattgcagacacaatattacatgagatgccgtttgaagctttcacctggagttggcacatctctgaaactccaaacacataacaataatagttttttcaaaatccaggcacggattgggcttactgcacacttcagcgtaggagcacgtcggttcaccattagagtaacggatctcaggggtcaaagttgtggactcaatcgtagaggaaaccactgggctcaccaagagaatgatcgtttccggcccctttctacataacttcatgcaacacggagactcctgaaagttgtagatgagttggatttctga

SEQ ID NO: 287489 - DNA, 436 bp, Homo sapiens
tctcattgaggtgaggtggtttggattcacctgctcgcttaggaggttttagagtcccgcactccttttccccacctccttccagaatgtcaggaaactgagaatgcagattcctgcagaaagtggcctcttgttcactaaaggtaaaggtttcacctctggtgagattaaagaagaaaggcctcccaggtgatgctcattcacagggaacttgtacagattctggggggaggaaaaaagggggaaagggctgaaaacaaaactgttgggtgccatgcgcactacctgggtgacaggatcattcatgtcccaaacctcagcatcatgcaatataccctcgtaacatacctgtacatgcaatccctgaacctaaaataaaagtggaaattatttttctttatcgggagtttgagaccattctgaccagtgtagagaa

SEQ ID NO: 287490 - DNA, 1134 bp, Homo sapiens
ctatttttcccacagtctctataacctaagggaagtacatattctttgatctaagaattccactgctgcaacaaataagggattagagaaataaatgatcatacatcctcccaatagaatacgtacaagtattaaaaagaatgagagatatttacatgaaaaatctgaaagaatatatgccaggctattaatagtagctatatatcaggcaagagagcaagggatggcactgaggggaataagattatactggtcttcagattttttccatatttaaaaaaagtaacacacacataacttggtaaccagaataaatttcttttgcatagggaaagaattaggaccttccaaatgaaaacaagtagagttatagttttaaaggaaagtgcagcccaaggtaatacagaggaaaggcagtaaatgcgcatggggaatgggtgggcaggaggtgctggggggctgtcaggggctcatcaaggggcctttaccttggataattcatcagggcccaaggtcgagggtctgggcctctgccttgaatctctgcttcagggtcaaaaccctggccagcaagagatgagggtgtggaaggcacctctctttggaggctatggtcatgaacactggccaatttccagctcttaacgtgtccctttcttgcctttggcctcaccatcctcctctgtcctaatgatcttccttccactttggaaatcacaattgcattctaatcctgcttccttgggattgttaccagagtaccaaaattggagcggtgggtgttcttacatgctttagtcacagatttgccgataatctcgtggttactcccacaggtgactgatcacatccatcaggcatgacttgattatatgagagtgtaacatcattccaacagtaacagaggcataactggtgtgcattatgctaggcgaattctaaatgctgtgtttcatctcactcctgggctaaatgaccctgtgtgacccagtgatgtacctgctctcccaactctgacccggcagtgcccttgcctgtgggtgtggagtgaggatgtggagactaaacagcattggtgttcgctccttcttcttaagcttctcccagtctaaaataaaacaatttctccctcta

SEQ ID NO: 287491 - DNA, 474 bp, Homo sapiens
tgtccttcccaggagccccaaggtctcagctgcccacgctccccagtgtgatgcctactctagccaaccaagaggagcacaagcaaaggaactgtccatggatgaggcagaggaggagctgagaggagccagccttaccattctgaccactggggattgtacctcctgagctataggtgactgatcacatccatcaggcatgacttgattatatgagagtgtaacatcattccaacagtaacagaggcataactggtgtgcattatgctaggcgaattctaaatgctgtgtttcatctcactcctgggctaaatgaccctgtgtgacccagtgatgtacctgctctcccaactctgacccggcagtgcccttgcctgtgggtgtggagtgaggatgtggagactaaacagcattggtgttcgctccttcttcttaagcttctcccagtctaaaataaaacaatttctccctcta

SEQ ID NO: 287492 - DNA, 543 bp, Homo sapiens
ggtcccgctgttcccacgtctgcctccctaccagactgagctccaagctgccaggggcctcgtctccatctgggtcccagttcccaccatagagctgggcatggaggacagctcagggaagcttcttgggaaatgaattctgggagttccctctgccaaggacccactgtgttaagagctttaagtcccccttcctcccaggtgaatgtccacttcgaggccggctcaaccaccgtcttcagagaactctcccacactggccacagcctatctgccagcgtcacccactgtctaggtctttgcccataatgtgtcaagggcaaaacagaggggtggatatgatgcacgtgcctcagcccggggcccgtacatggctggcgtccagctgggccaggggagcaggaagacccctggagcaccggaagcaagaaagaggcaggcaggggcggctagccaggtttgtgctcggactattcacacagagacatgtggcagcttacgttggacaaaacgagtaataaaaattggctttaaatatggaaa

SEQ ID NO: 287493 - DNA, 885 bp, Homo sapiens
ggtcccgctgttcccacgtctgcctccctaccagactgagctccaagctgccaggggcctcgtctccatctgggtcccagttcccaccatagagctgggcatggaggacagctcagggaagcttcttgggaaatgaattctgggagttccctctgccaaggacccactgtgttaagagctttaagtcccccttcctcccaggtgaatgtccacttcgaggccggctcaaccaccgtcttcagagaactctcccacactggccacagcctatctgccagcgtcacccactgtctaggtctttgcccataatgtgtcaagggcaaaacagaggggtggatatgatgcacgtgcctcagcccggggcccgtacatggctggcgtccaggtaacgcaggcctggggcagacattccttacacagctcccaccctactcttacgtccacatttaggcagccaggccaccttagccttggaggggaggacaccaacggggcccgccttaccagcagtcagaaacagacccacatcccagtgggtacccaaggcttctttccttaggccccatcccatttaggaagttgggaaacccactgggtgagcccaaaggctaccaaagcctggctgtctggagaggctagttcagagtcagccctgggggctcctgggcctcggaagggcacaccctgcttccctccaggcccacctccaatcccttcccgcttccagctgggccaggggagcaggaagacccctggagcaccggaagcaagaaagaggcaggcaggggcggctagccaggtttgtgctcggactattcacacagagacatgtggcagcttacgttggacaaaacgagtaataaaaattggctttaaatatggaaa

SEQ ID NO: 287494 - DNA, 749 bp, Homo sapiens
gttcgtcctgcggctcgctggcgatctgccgcagcgtggccttgtccacgctgcccactccgatggcgaacagctcgacgccgctggcccgggcccgcgcagacacgtcctgcacgctgtcctggggcctcccgtctgtcaccacgatgaccacctgcgacacgcggggcggtgtgacaccgggctcccggaagcccacgggactgtccaggagaggaggctgaggcccggagaggcgggaggactgccgggtcgcacagccaggcggcacccgggggaagaggacccggctggccgaagaggagacccgtttcctctgactgagagacgtggctggggggctttccatctgcttcgcctccctcgggcaggcagctctgagatgcccggagggatgtgatgccccatcgccaaattggggtctctaagctatgaaatggccacctcacggggcatcatgggaatcaaagtgtctgcaggcaaagctcataactccgagcgggagcctccaaacagcagcatcctagcagggtggcgtgcacgtaccttgctgatgtcaggggacctggaacgaccaccctctgcatcgccgaaggctttggtgatagcgaactggatggccaggccggtcatggtgcctgtggacagcggctggatacggcgcacagcctgcagcagtgcggccttggagacatgagcccgcagcgagaactcctgcttcacggtgctggcatagttgaccatgccca

SEQ ID NO: 287495 - DNA, 864 bp, Homo sapiens
cagagataaagagtggaggaagaaagtgagagccagagagagacagaaacagggaatgaccatttacatatgtacacataggctacagcaagacttcatccccagatccactgtggtttccaactcctgaaatacttggaatgaggtggaagaagcaaagaaagaagggagcagagcatttgtgttgtcttgttgagaaggcagaagcaaacagatgaggtagaaggttactgtaatattccagacaaatgatgatgcagcttgaagaatgtggtaactgtggcgatacaaagcagtcaaaatcaggaagtactgtgaaggtagagccaacgggatgtgccgtcaaattggatatgggtggaaaataaaaagaagggtccaagataatgccaaggttttttgctgaacaactagaaagatgaagctgccattcaccgagaagggaactaatgcaggaggagcaggttttggggtgacaatagggagctcagtttcagatctgttcaatctgtgatgtgtatttaacatgaaaacggagatgccaaataggcaccggctagacaagtgtgaagagaacttctggctggagatgtaaactcaagaggtgtgggccttgagactggatcagttcaccaagggaataagagtaaagagaagagaaacagtgcaaggcctgggttgtaggcactcaaaccttcagaggtcacagaggtgaggagggatcagtctttactggaaaggagtaaccagtgtgataacaggagaatcgagaggagaggagaggggctgggagggtgactaacgcctataatcccagtactttaggaggctaaagtgggaagactgcttgagctcaagagttca

SEQ ID NO: 287496 - DNA, 910 bp, Homo sapiens
tttgagacttgaagaatcagtctcccaaaggagcatcagagcagattttgatgctggcaccagcctttgacttctgcttggctggccccatctcttagatccctgcttgactgacagcccaattctgtcgagcccttctctataacggtcattacaaacaaccctgaagtggctggaatatagtcagcaaggggcccacatgaacagctcatctggaatctttgcaaaactgtgccgacttctctggtggctacggctgcggctacggctgctggagcgggacctgtggcgatggcgtttctcccgagatttggatcgagttctcctcttgcgttcacgtgacatggagcgagatcgatgtctgcgatgctctctggacctggatctaccagacaagatttgattttgtttctacctttgtaattactatatttctcatttattaaagccttttctttaaagagaaactttttttcagtagtcttaatgtcaattatattccaagtcagctaaatctacactgaattgctggtgtgttaataactacatactagaattcaaaataaaacattaataattctcagccaggcgccgtggctcacacctgtaatcccaacactttgggagtctgaggcaggaggatcgcttgagctcaggatttcaagaccagcctaggcaacatggcgaaactctgtctctataaaacatacaaaaattagctggacacagaggcacatgcctgtagtcccagctactcaggaagctgaggtgagagaatctcttgagccagggaggtcaaggctgctgcaatgacctggtgatcacatcgctgcagtccagcctgggcaaaagagtgaaattctgtctcaaaaacaagacactgattgataattctcagagagcaatcagt

SEQ ID NO: 287497 - DNA, 836 bp, Homo sapiens
cactctcataggaccgcttcttatctttccgatctctgtcacgaggtgatctgtctcttgaactcctgtctctgtcacatgatgctaagtcttggtctctgaatctttcttttgaggatctcctcttggatcgttctctgctcctatctctagaactgtgccgacttctctggtggctacggctgcggctacggctgctggagcgggacctgtggcgatggcgtttctcccgagatttggatcgagttctcctcttgcgttcacgtgacatggagcgagatcgatgtctgcgatgctctctggacctggatctaccagacaagatttgattttgtttctacctttgtaattactatatttctcatttattaaagccttttctttaaagagaaactttttttcagtagtcttaatgtcaattatattccaagtcagctaaatctacactgaattgctggtgtgttaataactacatactagaattcaaaataaaacattaataattctcagccaggcgccgtggctcacacctgtaatcccaacactttgggagtctgaggcaggaggatcgcttgagctcaggatttcaagaccagcctaggcaacatggcgaaactctgtctctataaaacatacaaaaattagctggacacagaggcacatgcctgtagtcccagctactcaggaagctgaggtgagagaatctcttgagccagggaggtcaaggctgctgcaatgacctggtgatcacatcgctgcagtccagcctgggcaaaagagtgaaattctgtctcaaaaacaagacactgattgataattctcagagagcaatcagt

SEQ ID NO: 287498 - DNA, 635 bp, Homo sapiens
accatcattcagcctctcatctcctggtaacattttctggaaatacattttttaaattatttgcacggtgtaacttctataagatcgatgtgtcagagtgccgacttttacttagattctatgtgactctttcaacaaattcattctttcagcaaatatgcattgaatacctagcatgcgctgggtcttgctctaggtgctgaggatactgtggcctcccagtcaggcagtgtgacagggagaaccacgactgtgcgtaggttattctcctctgacctcacaacctttttgatgtacatgtggtcatctccattcctcaatgcagccacaggctgggagggtggagcctgatataagccaggcccattgactccaaacccaggtcctcctgcatcctcacaggcttctttctgattctgcatcctcctttctagatcaacccagaacgccatgaccgcaggctgaatcacttcagggtctgcagtgacatcactctgtacaaggctaaaacgtggggcttaggagatgatcaccacaagtagcatcccagcggatgagcccatctgtggatctaatgccttaagtgtgcacagcccagagaaataaaatactactttaaaacgaaaaatcacttt

SEQ ID NO: 287499 - DNA, 638 bp, Homo sapiens
gacgccgttgcctggagacagcggggacgcgttgcctggagactgtggaaggcccaggcaagagggcgcgtggcagcccaaggccatggcgggacacccaaaagagaaggtgattccagatgaggtccatcagaaccagatcttgcgggaactgtacctcaaggagctacgaacccagaaactctacacgcagtatcacgtgaatcccctccgcaagagtgagagttcatacagtcaccaggaagcccatgtcttggcatgataacctggaggaacctgcagatgccaggtttctgaatctcattcaccatgctgcccagggaccaaggaagaagtacccagagacacagactgaaaaccaggaagttggatgggacttagagcccttggtaagcgtggctccttcctcaggaaatacgaggaaacacagcagcaatatcaacccagaacgccatgaccgcaggctgaatcacttcagggtctgcagtgacatcactctgtacaaggctaaaacgtggggcttaggagatgatcaccacaagtagcatcccagcggatgagcccatctgtggatctaatgccttaagtgtgcacagcccagagaaataaaatactactttaaaacgaaaaatcacttt

SEQ ID NO: 287500 - DNA, 590 bp, Homo sapiens
gacgccgttgcctggagacagcggggacgcgttgcctggagactgtggaaggcccaggcaagagggcgcgtggcagcccaaggccatggcgggacacccaaaagagaaggtgattccagatgaggtccatcagaaccagatcttgcgggaactgtacctcaaggagctacgaacccagaaactctacacgcagtatcacgtgaatcccctccgcaagagtgagagttcatacagtcaccaggaagcccatgtcttggcatgataacctggaggaacctgcagatgccaggtttctgaatctcattcaccatgctgcccagggaccaaggaagaagtacccagagacacagactgaaaaccaggaagttggatgggacttagagcccttgatcaacccagaacgccatgaccgcaggctgaatcacttcagggtctgcagtgacatcactctgtacaaggctaaaacgtggggcttaggagatgatcaccacaagtagcatcccagcggatgagcccatctgtggatctaatgccttaagtgtgcacagcccagagaaataaaatactactttaaaacgaaaaatcacttt

SEQ ID NO: 287501 - DNA, 380 bp, Homo sapiens
cagcgagactccgtgggcgtaggaccctccgagccaggtgcgggatatcatctcgtggtgcgccgtttaagccagtcggaaaagcgcagtattcgggtgggagtgacccgattttccagttcatacagtcaccaggaagcccatgtcttggcatgataacctggaggaacctgcagatgatcaacccagaacgccatgaccgcaggctgaatcacttcagggtctgcagtgacatcactctgtacaaggctaaaacgtggggcttaggagatgatcaccacaagtagcatcccagcggatgagcccatctgtggatctaatgccttaagtgtgcacagcccagagaaataaaatactactttaaaacgaaaaatcacttt

SEQ ID NO: 287502 - DNA, 486 bp, Homo sapiens
gacgccgttgcctggagacagcggggacgcgttgcctggagactgtggaaggcccaggcaagagggcgcgtggcagcccaaggccatggcgggacacccaaaagagaaggtgattccagatgaggtccatcagaaccagatcttgcgggaactgtacctcaaggagctacgaacccagaaactctacacgcagtatcacgtgaatcccctccgcaagagtgagagttcatacagtcaccaggaagcccatgtcttggcatgataacctggaggaacctgcagatgatcaacccagaacgccatgaccgcaggctgaatcacttcagggtctgcagtgacatcactctgtacaaggctaaaacgtggggcttaggagatgatcaccacaagtagcatcccagcggatgagcccatctgtggatctaatgccttaagtgtgcacagcccagagaaataaaatactactttaaaacgaaaaatcacttt

SEQ ID NO: 287503 - DNA, 375 bp, Homo sapiens
aggaaagggcacaggaccaacctctggtcccaaagcctgactccttcataactcatacctcgtctcccagccaggtttctgaatctcattcaccatgctgcccagggaccaaggaagaagtacccagagacacagactgaaaaccaggaagttggatgggacttagagcccttgatcaacccagaacgccatgaccgcaggctgaatcacttcagggtctgcagtgacatcactctgtacaaggctaaaacgtggggcttaggagatgatcaccacaagtagcatcccagcggatgagcccatctgtggatctaatgccttaagtgtgcacagcccagagaaataaaatactactttaaaacgaaaaatcacttt

SEQ ID NO: 287504 - DNA, 633 bp, Homo sapiens
gacgccgttgcctggagacagcggggacgcgttgcctggagactgtggaaggcccaggcaagagggcgcgtggcagcccaaggccatggcgggacacccaaaagagaaggtgattccagatgaggtccatcagaaccagatcttgcgggaactgtacctcaaggagctacgaacccagaaactctacacgcagtatcacgtgaatcccctccgcaagagtgagagttcatacagtcaccaggaagcccatgtcttggcatgataacctggaggaacctgcagatgccaggtttctgaatctcattcaccatgctgcccagggaccaaggaagaagtacccagagacacagactgaaaaccaggaagttggatgggacttagagcccttggtctcttctacagaaaaagacataccacatctggtcacatagcagcttgccttctgccccagggtgaggacgaacagaactgaagggagagggcagggttgggagtgggaggggaggctgagcctgctcctcacccgggcacctgggctcacttacatttgaccctttcttgccaggcctcttgaggcctctgccatgagctgtcttggcccggaagctagatacatcatcatagctctcccga

SEQ ID NO: 287505 - DNA, 430 bp, Homo sapiens
aaggtattatcagtaagcccattttacagatggggaaactaaagctcaagagacggttaggtgacttaggacaatcaaaaatgactagtcaaaccaatgatctagccaatttctagtgccggtgagtgggaagagtggtgaagaccctaagacatataccccgtgggcgcctaaagcactaagctcacgacgctgggaaagcggggccgagaaggagggactcggggcgacccgacagcgccagacagggcggccggcgccgagggccgctacctcggtgcggcggtacagcgtggcttccccgaaggcgccgcggcccaggacgcggatggggatgtagtgcagttcctcctgctccgccgcgccgccgccggctcgcggcccctgactggcgctaggccccggactcgagtccccgcaacccccggac

SEQ ID NO: 287506 - DNA, 473 bp, Homo sapiens
aattcagtgggcacctactaccatttggtagtaggcacttggaatgcaataggctattgtcgctttcctgatggggcatgttagggagggaggaacatgtcagaaaatacaagacttaccccatcactgagctgtccagcatcagtcacagaacccatcacttttatacctaattatcacaagtcaacaggatatggaatatagacaaggggaaggaagacgaggggggaaaagagaacaagctatattctgacttgtactgcagatgttcaggaaacgttcctgatagcaatgattggtgtaatgattgtagctccaagattactaaaccttctgaagtactcattgtgtataaaatcagaggcaaaaatacaatttattttctgactagcaattcaaagctatttctctttatttaacaaatgtactgcatactcttcttttggaatgctgtctgaatgtccagagaataa

SEQ ID NO: 287507 - DNA, 2903 bp, Homo sapiens
  misc_feature (8)..(8): n is a, c, g, or t
  misc_feature (425)..(425): n is a, c, g, or t
ctctctcnctctccctctctccctctccctctctccctctccctctctcctctctctcctctctcctctctctcctctctcctctctctctgctggctggctggctgtctaggcctatgtgtcaccacctggcacttgctctcattgtcttgtgcgagtgcttttgccagcagtttggagtgcagacccatcacccctcactggggccccccatgaggcctgcctgactgcatgccccacccgggcccatggcagcgcacctggaagcggacggctgaggacttgttgcagtgcatggagatgggcgcgaagctgtacagggccttcagtacgtcgcggttgaaggagttccagggaacagaggtgaactgctgagacacggacgcctgagggcaggtgcagacatcctcgttgttgaacctggnggggacaaggaacagccaggctggggagcagctgacgggcagggagcccagtgggcaccagcaacacctccctgcaactcgagtcctgtccctggggcaaccgtcctgccacctcctccccagccccgctgcctccgccaggccaccccagatgctgccttcaccggcaacggcctcacctctcctgtcaccttggcgggtgggtaatggctgctgcaggctgggttgaggaggctctgaagccaaatccagactcagcaggaaacgagtgaggggaggggtgagtgatgccgccacaggtctctgctcctagaacttagcctggactcctccaatctgcccagccgcctaacaggcccgaggttctgtgtcggggttccctgggggcagggagcttgtgcagggagccctcacctgttgatgaggtggaagtacttctgcaggaagccggcgtccacagcgctcttgcagagctccagctgcgtctgggggtagtagtgcacgtagttgacacacatctcctccaggatcccgaagcccccctgcaagttggaggagacccgtcagccccgggccatgccacgcagacgctgccatccagcagctttcgccgcacccacgtgtacactgcgtccactcgtctgttcactgcaccgtgccaggcatgctctggggaaccgagtccctgccctcaaggaattgccaccattggcaggagagacaggcagtgagtgagtgagtcaaccaggaaattcgtatcaggtactgatgatgctgtgaggaaaaatgaaacgggacaagcggatggggtgttattgtgcccattttatgggtacagaaactgagtctcagagcaggcaaggggatgccccgtggtggccacagcatcggtggcacagcctgagtgcacccagcgtcccggccattgtctggaagctgtccccatgacctccagcgagagcctggagccaaggactgcaagggaggccctttccactgcagccccgcaccgtccaccagtcatttctccaacgtggctctgaggggagcagggactctataagacaggaccgtgactagaggccgcgacaacctccagcctctcacggcaaccctacggcctgccatcgcatgggaggggcagggcaggcaccctctgagtccccactgccagctttaagcccctcgctgggttgctgctcttggagctggtgaccgtggagcctcagccataggaggaagaacagcagcagcttggaggagctggggctggagagagcaaagctcccccggcagcagctcagatcccagcaggtcaggggccgggacatgacgccctggccacccttgcccctccaggctccccgctgtttgtgaagctgctgtgggcctggggatttcatctggctggtggggaagaaaggcaatctttactctatggcagaacaaagggactgggcaaagcttggcgtggcacttacaccagctgccgccccctcctcccgtgcagacaaagagcatggggcagttctgcccagagacgaaacctggcacctgttggccaggacgcgtttttgccagcattgttctctgggccggattcctcctttcccagcttttctcatccatcccgcccccgtcagatcgggacgattgccctcctgtgtgagttcctgtccctccccaccctctgccaccacagacatcaaaagggaactgagtccgaccctgtgtagaatctgttctcctctttcacctggggaaggaaatcgaatttcaaaggccactgtgtcttggatcagcaggcgagggcttgtcagagtgtgagaagctcaggtccacctggggagctgccctcccctttgatcccacctggtgctgtgatgtggccactgccaagaggaggacatgggccagggaagccacagaactgcccacggggacgctggcaccgagggcctcaacctgcagaacggccatctgagatgtccgcggtgctcaccaggcctggcagccccgaacgccctgggacgtggcgtcagttccgccgccgtgaagccagattgggcagggaatatgcagtctcctcgctggatgcccggcaagaccctcccatccctggccccggggccgcgcctgcagaatggggctgatggtggggacttgcctggggtgctccacctgcagagccctctgtttgcgagcccactcagtcactgcacaggtgcttagccgagaggcggcacagtcggggttggcacctgcacccataccagccctgcctcctgttcgctgtgtggcctgagtggctggacctcactgtatctcctggtgggattgctcagaggtctcagcaaggcttggtgtggttaggatgagttattagagcagtgctgagctgtggcaagcacccgacatcagccactgctgtgatatactgagcacctcctctagagagaataaaggactgacaaagct

SEQ ID NO: 287508 - DNA, 2314 bp, Homo sapiens
  misc_feature (8)..(8): n is a, c, g, or t
ctctctcnctctccctctctccctctccctctctccctctccctctctcctctctctcctctctcctctctctcctctctcctctctctctgctggctggctggctgtctaggcctatgtgtcaccacctggcacttgctctcattgtcttgtgcgagtgcttttgccagcagtttggagtgcagacccatcacccctcactggggccccccatgaggcctgcctgactgcatgccccacccgggcccatggcagcgcacctggaagcggacggctgaggacttgttgcagtgcatggagatgggcgcgaagctgtacagggccttcagtacgtcgcggttgaaggagttccagggaacagaggatcccgaagcccccctgcaagttggaggagacccgtcagccccgggccatgccacgcagacgctgccatccagcagctttcgccgcacccacgtgtacactgcgtccactcgtctgttcactgcaccgtgccaggcatgctctggggaaccgagtccctgccctcaaggaattgccaccattggcaggagagacaggcagtgagtgagtgagtcaaccaggaaattcgtatcaggtactgatgatgctgtgaggaaaaatgaaacgggacaagcggatggggtgttattgtgcccattttatgggtacagaaactgagtctcagagcaggcaaggggatgccccgtggtggccacagcatcggtggcacagcctgagtgcacccagcgtcccggccattgtctggaagctgtccccatgacctccagcgagagcctggagccaaggactgcaagggaggccctttccactgcagccccgcaccgtccaccagtcatttctccaacgtggctctgaggggagcagggactctataagacaggaccgtgactagaggccgcgacaacctccagcctctcacggcaaccctacggcctgccatcgcatgggaggggcagggcaggcaccctctgagtccccactgccagctttaagcccctcgctgggttgctgctcttggagctggtgaccgtggagcctcagccataggaggaagaacagcagcagcttggaggagctggggctggagagagcaaagctcccccggcagcagctcagatcccagcaggtcaggggccgggacatgacgccctggccacccttgcccctccaggctccccgctgtttgtgaagctgctgtgggcctggggatttcatctggctggtggggaagaaaggcaatctttactctatggcagaacaaagggactgggcaaagcttggcgtggcacttacaccagctgccgccccctcctcccgtgcagacaaagagcatggggcagttctgcccagagacgaaacctggcacctgttggccaggacgcgtttttgccagcattgttctctgggccggattcctcctttcccagcttttctcatccatcccgcccccgtcagatcgggacgattgccctcctgtgtgagttcctgtccctccccaccctctgccaccacagacatcaaaagggaactgagtccgaccctgtgtagaatctgttctcctctttcacctggggaaggaaatcgaatttcaaaggccactgtgtcttggatcagcaggcgagggcttgtcagagtgtgagaagctcaggtccacctggggagctgccctcccctttgatcccacctggtgctgtgatgtggccactgccaagaggaggacatgggccagggaagccacagaactgcccacggggacgctggcaccgagggcctcaacctgcagaacggccatctgagatgtccgcggtgctcaccaggcctggcagccccgaacgccctgggacgtggcgtcagttccgccgccgtgaagccagattgggcagggaatatgcagtctcctcgctggatgcccggcaagaccctcccatccctggccccggggccgcgcctgcagaatggggctgatggtggggacttgcctggggtgctccacctgcagagccctctgtttgcgagcccactcagtcactgcacaggtgcttagccgagaggcggcacagtcggggttggcacctgcacccataccagccctgcctcctgttcgctgtgtggcctgagtggctggacctcactgtatctcctggtgggattgctcagaggtctcagcaaggcttggtgtggttaggatgagttattagagcagtgctgagctgtggcaagcacccgacatcagccactgctgtgatatactgagcacctcctctagagagaataaaggactgacaaagct

SEQ ID NO: 287509 - DNA, 1518 bp, Homo sapiens
  misc_feature (8)..(8): n is a, c, g, or t
  misc_feature (425)..(425): n is a, c, g, or t
ctctctcnctctccctctctccctctccctctctccctctccctctctcctctctctcctctctcctctctctcctctctcctctctctctgctggctggctggctgtctaggcctatgtgtcaccacctggcacttgctctcattgtcttgtgcgagtgcttttgccagcagtttggagtgcagacccatcacccctcactggggccccccatgaggcctgcctgactgcatgccccacccgggcccatggcagcgcacctggaagcggacggctgaggacttgttgcagtgcatggagatgggcgcgaagctgtacagggccttcagtacgtcgcggttgaaggagttccagggaacagaggtgaactgctgagacacggacgcctgagggcaggtgcagacatcctcgttgttgaacctggnggggacaaggaacagccaggctggggagcagctgacgggcagggagcccagtgggcaccagcaacacctccctgcaactcgagtcctgtccctggggcaaccgtcctgccacctcctccccagccccgctgcctccgccaggccaccccagatgctgccttcaccggcaacggcctcacctctcctgtcaccttggcgggtgggtaatggctgctgcaggctgggttgaggaggctctgaagccaaatccagactcagcaggaaacgagtgaggggaggggtgagtgatgccgccacaggtctctgctcctagaacttagcctggactcctccaatctgcccagccgcctaacaggcccgaggttctgtgtcggggttccctgggggcagggagcttgtgcagggagccctcacctgttgatgaggtggaagtacttctgcaggaagccggcgtccacagcgctcttgcagagctccagctgcgtctgggggtagtagtgcacgtagttgacacacatctcctccaggatcccgaagcccccctgcaagttggaggagacccgtcagccccgggccatgccacgcagacgctgccatccagcagctttcgccgcacccacgtgtacactgcgtccactcgtctgttcactgcaccgtgccaggcatgctctggggaaccgagtccctgccctcaaggaattgccaccattggcaggagagacaggcagtgagtgagtgagtcaaccaggaaattcgtatcaggtatgatggtggggacttgcctggggtgctccacctgcagagccctctgtttgcgagcccactcagtcactgcacaggtgcttagccgagaggcggcacagtcggggttggcacctgcacccataccagccctgcctcctgttcgctgtgtggcctgagtggctggacctcactgtatctcctggtgggattgctcagaggtctcagcaaggcttggtgtggttaggatgagttattagagcagtgctgagctgtggcaagcacccgacatcagccactgctgtgatatactgagcacctcctctagagagaataaaggactgacaaagct

SEQ ID NO: 287510 - DNA, 2664 bp, Homo sapiens
cgcgcgctgcagtgccttccccacctcggccccgcccgcccccgccgagccgagcaccagggcggcggcggcggcggcggcggcggcggcggctggagcagcccgggaggaggaggcggcgagaatggcagcggcgtcgtgggcgcggcggagatgagcgcccgcgaccccgggcccagggcggcacagccggagtgggcgggggtcccgatgcaggcccgaggggggccatggggcaggtcctgccggtcttcgcccactgcaaagaagctccgtctacagcctcctcaactcctgattccacagaaggagggaacgacgactctgattttcgagagctgcacacagcccgggaattctcagaggaggacgaggaggagaccacgtcgcaggactggggcaccccccgggagctgaccttctcctacatcgcctttgatggtgtagtgggctccgggggccgcagggattcaactgcccgccgcccccgcccccagggccgctcagtctcggaaccacgagaccagcaccctcagcccagcctgggcgacagcttggagagcatccccagcctgagccaatccccggagcctggacgacggggtgatcctgacaccgcgcctccatccgagcgccctctggaagacctgaggcttcggttggaccatctgggctgggtggcccggggaacgggatccggggaggactcttccaccagcagctccaccccgctggaagacgaagaaccccaagaacccaacagattggagacaggagaagctggggaagaactggacctacgactccgacttgctcagccctcatcgcccgaggtcttgactccccagctcagtccgggctctgggacaccccaggccggtactccgtccccatcccgatcgcgagattcgaactctgggcccgaagagccattgctggaagaggaagaaaagcagtgggggccactggagcgagagccagtaaggggacagtgcctcgatagcacggaccaattagaattcacggtggagccacgccttctaggaacagctatggaatggttaaagacatcattgcttttggctgtttacaagacggttccaattttggaattgtccccacctctgtggacagccattggctgggtccaaaggggccccaccccccctactcctgtcctccgggttctactgaagtgggcaaaatccccgagaagcagcggtgtccccagcctctcactcggagccgatatggggagtaaagtggcggacctgctgtactggaaggacacgaggacgtcaggagtggtcttcacaggcctgatggtctccctcctctgcctcctgcactttagcatcgtgtccgtggccgcgcacttggctctgttgctgctctgcggcaccatctctctcagggtttaccgcaaagtgctgcaggccgtgcaccggggggatggagccaaccctttccaggcctacctggatgtggacctcaccctgactcgggagcagacggaacgtttgtcccaccagatcacctcccgcgtggtctcggcggccacgcagctgcggcacttcttcctggtagaagacctcgtggattccctcaagctggccctcctcttctacatcttgaccttcgtgggtgccatcttcaatggtttgactcttctcattctgggagtgattggtctattcaccatccccctgctgtaccggcagcaccaggctcagatcgaccaatatgtggggttggtgaccaatcagttgagccacatcaaagctaagatccgagctaaaatcccagggaccggagccctggcctctgcagcagccgcagtctccggatccaaagccaaagccgaatgagaacggtgtctctgcccgcaggacgcctgcccccagcccccgcagccctctggccccctccatctcttgtccgttcccacccacccccctcctcggcccgagccttttcccggtgggtgtcaggatcactcccactagggactctgcgctaattacctgagcgaccaggactacatttcccaagaggctctgctccaggagtccaggaaagacgaggcaccttggccgcggggcctgctgggacttgtagttgcctagacagggcaccaccctgcacttccggacccgccgctggaggcgccgtgaggcgttggtgtctcctggatgctactagccccaacgccggggctttgcatggggcccaggggaggcctgagcttggatttacactgtaataaagactcctgtggaaaacccgaggcctcttgtgcttccagaaccctccagttgttcacctttctgcactgaaaggcacttaagtgacactccaggagaaccttccccatctctggagaaggagctccctctgccatctgtgtaggttatgaaatgattgaggggaggccgggcgcagtggctcacgcctgtaatcccagcactttgggaggccgaggagggcggatcacttgagaccagaagttcaagaccagcctggccaacatggtgaaacctcatctctactaaaaatacaaaatttagccgggtgtggtggtgcatgcctgtaatcacagctactcgggaggctgaggcatgagagtcgcttgaatctgggagatggaggttgtagtgagccaag

SEQ ID NO: 287511 - DNA, 2153 bp, Homo sapiens
  misc_feature (2145)..(2145): n is a, c, g, or t
  misc_feature (2150)..(2150): n is a, c, g, or t
cgcgcgctgcagtgccttccccacctcggccccgcccgcccccgccgagccgagcaccagggcggcggcggcggcggcggcggcggcggcggctggagcagcccgggaggaggaggcggcgagaatggcagcggcgtcgtgggcgcggcggagatgagcgcccgcgaccccgggcccagggcggcacagccggagtgggcgggggtcccgatgcaggcccgaggggggccatggggcaggtcctgccggtcttcgcccactgcaaagaagctccgtctacagcctcctcaactcctgattccacagaaggagggaacgacgactctgattttcgagagctgcacacagcccgggaattctcagaggaggacgaggaggagaccacgtcgcaggactggggcaccccccgggagctgaccttctcctacatcgcctttgatggtgtagtgggctccgggggccgcagggattcaactgcccgccgcccccgcccccagggccgctcagtctcggaaccacgagaccagcaccctcagcccagcctgggcgacagcttggagagcatccccagcctgagccaatccccggagcctggacgacggggtgatcctgacaccgcgcctccatccgagcgccctctggaagacctgaggcttcggttggaccatctgggctgggtggcccggggaacgggatccggggaggactcttccaccagcagctccaccccgctggaagacgaagaaccccaagaacccaacagattggagacaggagaagctggggaagaactggacctacgactccgacttgctcagccctcatcgcccgaggtcttgactccccagctcagtccgggctctgggacaccccaggccggtactccgtccccatcccgatcgcgagattcgaactctgggcccgaagagccattgctggaagaggaagaaaagcagtgggggccactggagcgagagccagtaaggggacagtgcctcgatagcacggaccaattagaattcacggtggagccacgccttctaggtaagcaacgtgtatgaagatgctgcattggcccacagaaggcaaaagtggcggacctgctgtactggaaggacacgaggacgtcaggagtggtcttcacaggcctgatggtctccctcctctgcctcctgcactttagcatcgtgtccgtggccgcgcacttggctctgttgctgctctgcggcaccatctctctcagggtttaccgcaaagtgctgcaggccgtgcaccggggggatggagccaaccctttccaggcctacctggatgtggacctcaccctgactcgggagcagacggaacgtttgtcccaccagatcacctcccgcgtggtctcggcggccacgcagctgcggcacttcttcctggtagaagacctcgtggattccctcaagctggccctcctcttctacatcttgaccttcgtgggtgccatcttcaatggtttgactcttctcattctgggagtgattggtctattcaccatccccctgctgtaccggcagcaccaggctcagatcgaccaatatgtggggttggtgaccaatcagttgagccacatcaaagctaagatccgagctaaaatcccagggaccggagccctggcctctgcagcagccgcagtctccggatccaaagccaaagccgaatgagaacggtgtctctgcccgcaggacgcctgcccccagcccccgcagccctctggccccctccatctcttgtccgttcccacccacccccctcctcggcccgagccttttcccggtgggtgtcaggatcactcccactagggactctgcgctaattacctgagcgaccaggactacatttcccaagaggctctgctccaggagtccaggaaagacgaggcaccttggccgcggggcctgctgggacttgtagttgcctagacagggcaccaccctgcacttccggacccgccgctggaggcgccgtgaggcgttggtgtctcctggatgctactagccccaacgccggggctttgcatggggcccaggggaggcctgagcttggatttacactgtaataaagactcctgggattgcccgagaaaaaaaaggttaaaaaaaaaaagctgtngcggnagc

SEQ ID NO: 287512 - DNA, 2445 bp, Homo sapiens
cgcgcgctgcagtgccttccccacctcggccccgcccgcccccgccgagccgagcaccagggcggcggcggcggcggcggcggcggcggcggctggagcagcccgggaggaggaggcggcgagaatggcagcggcgtcgtgggcgcggcggagatgagcgcccgcgaccccgggcccagggcggcacagccggagtgggcgggggtcccgatgcaggcccgaggggggccatggggcaggtcctgccggtcttcgcccactgcaaagaagctccgtctacagcctcctcaactcctgattccacagaaggagggaacgacgactctgattttcgagagctgcacacagcccgggaattctcagaggaggacgaggaggagaccacgtcgcaggactggggcaccccccgggagctgaccttctcctacatcgcctttgatggtgtagtgggctccgggggccgcagggattcaactgcccgccgcccccgcccccagggccgctcagtctcggaaccacgagaccagcaccctcagcccagcctgggcgacagcttggagagcatccccagcctgagccaatccccggagcctggacgacggggtgatcctgacaccgcgcctccatccgagcgccctctggaagacctgaggcttcggttggaccatctgggctgggtggcccggggaacgggatccggggaggactcttccaccagcagctccaccccgctggaagacgaagaaccccaagaacccaacagattggagacaggagaagctggggaagaactggacctacgactccgacttgctcagccctcatcgcccgaggtcttgactccccagctcagtccgggctctgggacaccccaggccggtactccgtccccatcccgatcgcgagattcgaactctgggcccgaagagccattgctggaagaggaagaaaagcagtgggggccactggagcgagagccagtaaggggacagtgcctcgatagcacggaccaattagaattcacggtggagccacgccttctagtggcggacctgctgtactggaaggacacgaggacgtcaggagtggtcttcacaggcctgatggtctccctcctctgcctcctgcactttagcatcgtgtccgtggccgcgcacttggctctgttgctgctctgcggcaccatctctctcagggtttaccgcaaagtgctgcaggccgtgcaccggggggatggagccaaccctttccaggcctacctggatgtggacctcaccctgactcgggagcagacggaacgtttgtcccaccagatcacctcccgcgtggtctcggcggccacgcagctgcggcacttcttcctggtagaagacctcgtggattccctcaagctggccctcctcttctacatcttgaccttcgtgggtgccatcttcaatggtttgactcttctcattctgggagtgattggtctattcaccatccccctgctgtaccggcagcaccaggctcagatcgaccaatatgtggggttggtgaccaatcagttgagccacatcaaagctaagatccgagctaaaatcccagggaccggagccctggcctctgcagcagccgcagtctccggatccaaagccaaagccgaatgagaacggtgtctctgcccgcaggacgcctgcccccagcccccgcagccctctggccccctccatctcttgtccgttcccacccacccccctcctcggcccgagccttttcccggtgggtgtcaggatcactcccactagggactctgcgctaattacctgagcgaccaggactacatttcccaagaggctctgctccaggagtccaggaaagacgaggcaccttggccgcggggcctgctgggacttgtagttgcctagacagggcaccaccctgcacttccggacccgccgctggaggcgccgtgaggcgttggtgtctcctggatgctactagccccaacgccggggctttgcatggggcccaggggaggcctgagcttggatttacactgtaataaagactcctgtggaaaacccgaggcctcttgtgcttccagaaccctccagttgttcacctttctgcactgaaaggcacttaagtgacactccaggagaaccttccccatctctggagaaggagctccctctgccatctgtgtaggttatgaaatgattgaggggaggccgggcgcagtggctcacgcctgtaatcccagcactttgggaggccgaggagggcggatcacttgagaccagaagttcaagaccagcctggccaacatggtgaaacctcatctctactaaaaatacaaaatttagccgggtgtggtggtgcatgcctgtaatcacagctactcgggaggctgaggcatgagagtcgcttgaatctgggagatggaggttgtagtgagccaag

SEQ ID NO: 287513 - DNA, 2520 bp, Homo sapiens
cgcgcgctgcagtgccttccccacctcggccccgcccgcccccgccgagccgagcaccagggcggcggcggcggcggcggcggcggcggcggctggagcagcccgggaggaggaggcggcgagaatggcagcggcgtcgtgggcgcggcggagatgagcgcccgcgaccccgggcccagggcggcacagccggagtgggcgggggtcccgatgcaggcccgaggggggccatggggcaggtcctgccggtcttcgcccactgcaattccaggactgggacacttctgtgattcggacagtctaagcttctaagagtcttcgattctttccctctcgcagaagaagctccgtctacagcctcctcaactcctgattccacagaaggagggaacgacgactctgattttcgagagctgcacacagcccgggaattctcagaggaggacgaggaggagaccacgtcgcaggactggggcaccccccgggagctgaccttctcctacatcgcctttgatggtgtagtgggctccgggggccgcagggattcaactgcccgccgcccccgcccccagggccgctcagtctcggaaccacgagaccagcaccctcagcccagcctgggcgacagcttggagagcatccccagcctgagccaatccccggagcctggacgacggggtgatcctgacaccgcgcctccatccgagcgccctctggaagacctgaggcttcggttggaccatctgggctgggtggcccggggaacgggatccggggaggactcttccaccagcagctccaccccgctggaagacgaagaaccccaagaacccaacagattggagacaggagaagctggggaagaactggacctacgactccgacttgctcagccctcatcgcccgaggtcttgactccccagctcagtccgggctctgggacaccccaggccggtactccgtccccatcccgatcgcgagattcgaactctgggcccgaagagccattgctggaagaggaagaaaagcagtgggggccactggagcgagagccagtaaggggacagtgcctcgatagcacggaccaattagaattcacggtggagccacgccttctagtggcggacctgctgtactggaaggacacgaggacgtcaggagtggtcttcacaggcctgatggtctccctcctctgcctcctgcactttagcatcgtgtccgtggccgcgcacttggctctgttgctgctctgcggcaccatctctctcagggtttaccgcaaagtgctgcaggccgtgcaccggggggatggagccaaccctttccaggcctacctggatgtggacctcaccctgactcgggagcagacggaacgtttgtcccaccagatcacctcccgcgtggtctcggcggccacgcagctgcggcacttcttcctggtagaagacctcgtggattccctcaagctggccctcctcttctacatcttgaccttcgtgggtgccatcttcaatggtttgactcttctcattctgggagtgattggtctattcaccatccccctgctgtaccggcagcaccaggctcagatcgaccaatatgtggggttggtgaccaatcagttgagccacatcaaagctaagatccgagctaaaatcccagggaccggagccctggcctctgcagcagccgcagtctccggatccaaagccaaagccgaatgagaacggtgtctctgcccgcaggacgcctgcccccagcccccgcagccctctggccccctccatctcttgtccgttcccacccacccccctcctcggcccgagccttttcccggtgggtgtcaggatcactcccactagggactctgcgctaattacctgagcgaccaggactacatttcccaagaggctctgctccaggagtccaggaaagacgaggcaccttggccgcggggcctgctgggacttgtagttgcctagacagggcaccaccctgcacttccggacccgccgctggaggcgccgtgaggcgttggtgtctcctggatgctactagccccaacgccggggctttgcatggggcccaggggaggcctgagcttggatttacactgtaataaagactcctgtggaaaacccgaggcctcttgtgcttccagaaccctccagttgttcacctttctgcactgaaaggcacttaagtgacactccaggagaaccttccccatctctggagaaggagctccctctgccatctgtgtaggttatgaaatgattgaggggaggccgggcgcagtggctcacgcctgtaatcccagcactttgggaggccgaggagggcggatcacttgagaccagaagttcaagaccagcctggccaacatggtgaaacctcatctctactaaaaatacaaaatttagccgggtgtggtggtgcatgcctgtaatcacagctactcgggaggctgaggcatgagagtcgcttgaatctgggagatggaggttgtagtgagccaag

SEQ ID NO: 287514 - DNA, 2274 bp, Homo sapiens
ggcataggagacaaaggaagctctcccctcccccgcgctctggcggcgacgggggtagcctgacccggaggacctggacgaaacagggcggagaagaagctccgtctacagcctcctcaactcctgattccacagaaggagggaacgacgactctgattttcgagagctgcacacagcccgggaattctcagaggaggacgaggaggagaccacgtcgcaggactggggcaccccccgggagctgaccttctcctacatcgcctttgatggtgtagtgggctccgggggccgcagggattcaactgcccgccgcccccgcccccagggccgctcagtctcggaaccacgagaccagcaccctcagcccagcctgggcgacagcttggagagcatccccagcctgagccaatccccggagcctggacgacggggtgatcctgacaccgcgcctccatccgagcgccctctggaagacctgaggcttcggttggaccatctgggctgggtggcccggggaacgggatccggggaggactcttccaccagcagctccaccccgctggaagacgaagaaccccaagaacccaacagattggagacaggagaagctggggaagaactggacctacgactccgacttgctcagccctcatcgcccgaggtcttgactccccagctcagtccgggctctgggacaccccaggccggtactccgtccccatcccgatcgcgagattcgaactctgggcccgaagagccattgctggaagaggaagaaaagcagtgggggccactggagcgagagccagtaaggggacagtgcctcgatagcacggaccaattagaattcacggtggagccacgccttctagtggcggacctgctgtactggaaggacacgaggacgtcaggagtggtcttcacaggcctgatggtctccctcctctgcctcctgcactttagcatcgtgtccgtggccgcgcacttggctctgttgctgctctgcggcaccatctctctcagggtttaccgcaaagtgctgcaggccgtgcaccggggggatggagccaaccctttccaggcctacctggatgtggacctcaccctgactcgggagcagacggaacgtttgtcccaccagatcacctcccgcgtggtctcggcggccacgcagctgcggcacttcttcctggtagaagacctcgtggattccctcaagctggccctcctcttctacatcttgaccttcgtgggtgccatcttcaatggtttgactcttctcattctgggagtgattggtctattcaccatccccctgctgtaccggcagcaccaggctcagatcgaccaatatgtggggttggtgaccaatcagttgagccacatcaaagctaagatccgagctaaaatcccagggaccggagccctggcctctgcagcagccgcagtctccggatccaaagccaaagccgaatgagaacggtgtctctgcccgcaggacgcctgcccccagcccccgcagccctctggccccctccatctcttgtccgttcccacccacccccctcctcggcccgagccttttcccggtgggtgtcaggatcactcccactagggactctgcgctaattacctgagcgaccaggactacatttcccaagaggctctgctccaggagtccaggaaagacgaggcaccttggccgcggggcctgctgggacttgtagttgcctagacagggcaccaccctgcacttccggacccgccgctggaggcgccgtgaggcgttggtgtctcctggatgctactagccccaacgccggggctttgcatggggcccaggggaggcctgagcttggatttacactgtaataaagactcctgtggaaaacccgaggcctcttgtgcttccagaaccctccagttgttcacctttctgcactgaaaggcacttaagtgacactccaggagaaccttccccatctctggagaaggagctccctctgccatctgtgtaggttatgaaatgattgaggggaggccgggcgcagtggctcacgcctgtaatcccagcactttgggaggccgaggagggcggatcacttgagaccagaagttcaagaccagcctggccaacatggtgaaacctcatctctactaaaaatacaaaatttagccgggtgtggtggtgcatgcctgtaatcacagctactcgggaggctgaggcatgagagtcgcttgaatctgggagatggaggttgtagtgagccaag

SEQ ID NO: 287515 - DNA, 2105 bp, Homo sapiens
  misc_feature (2097)..(2097): n is a, c, g, or t
  misc_feature (2102)..(2102): n is a, c, g, or t
cgcgcgctgcagtgccttccccacctcggccccgcccgcccccgccgagccgagcaccagggcggcggcggcggcggcggcggcggcggcggctggagcagcccgggaggaggaggcggcgagaatggcagcggcgtcgtgggcgcggcggagatgagcgcccgcgaccccgggcccagggcggcacagccggagtgggcgggggtcccgatgcaggcccgaggggggccatggggcaggtcctgccggtcttcgcccactgcaaagaagctccgtctacagcctcctcaactcctgattccacagaaggagggaacgacgactctgattttcgagagctgcacacagcccgggaattctcagaggaggacgaggaggagaccacgtcgcaggactggggcaccccccgggagctgaccttctcctacatcgcctttgatggtgtagtgggctccgggggccgcagggattcaactgcccgccgcccccgcccccagggccgctcagtctcggaaccacgagaccagcaccctcagcccagcctgggcgacagcttggagagcatccccagcctgagccaatccccggagcctggacgacggggtgatcctgacaccgcgcctccatccgagcgccctctggaagacctgaggcttcggttggaccatctgggctgggtggcccggggaacgggatccggggaggactcttccaccagcagctccaccccgctggaagacgaagaaccccaagaacccaacagattggagacaggagaagctggggaagaactggacctacgactccgacttgctcagccctcatcgcccgaggtcttgactccccagctcagtccgggctctgggacaccccaggccggtactccgtccccatcccgatcgcgagattcgaactctgggcccgaagagccattgctggaagaggaagaaaagcagtgggggccactggagcgagagccagtaaggggacagtgcctcgatagcacggaccaattagaattcacggtggagccacgccttctagtggcggacctgctgtactggaaggacacgaggacgtcaggagtggtcttcacaggcctgatggtctccctcctctgcctcctgcactttagcatcgtgtccgtggccgcgcacttggctctgttgctgctctgcggcaccatctctctcagggtttaccgcaaagtgctgcaggccgtgcaccggggggatggagccaaccctttccaggcctacctggatgtggacctcaccctgactcgggagcagacggaacgtttgtcccaccagatcacctcccgcgtggtctcggcggccacgcagctgcggcacttcttcctggtagaagacctcgtggattccctcaagctggccctcctcttctacatcttgaccttcgtgggtgccatcttcaatggtttgactcttctcattctgggagtgattggtctattcaccatccccctgctgtaccggcagcaccaggctcagatcgaccaatatgtggggttggtgaccaatcagttgagccacatcaaagctaagatccgagctaaaatcccagggaccggagccctggcctctgcagcagccgcagtctccggatccaaagccaaagccgaatgagaacggtgtctctgcccgcaggacgcctgcccccagcccccgcagccctctggccccctccatctcttgtccgttcccacccacccccctcctcggcccgagccttttcccggtgggtgtcaggatcactcccactagggactctgcgctaattacctgagcgaccaggactacatttcccaagaggctctgctccaggagtccaggaaagacgaggcaccttggccgcggggcctgctgggacttgtagttgcctagacagggcaccaccctgcacttccggacccgccgctggaggcgccgtgaggcgttggtgtctcctggatgctactagccccaacgccggggctttgcatggggcccaggggaggcctgagcttggatttacactgtaataaagactcctgggattgcccgagaaaaaaaaggttaaaaaaaaaaagctgtngcggnagc

SEQ ID NO: 287516 - DNA, 2493 bp, Homo sapiens
cgcgcgctgcagtgccttccccacctcggccccgcccgcccccgccgagccgagcaccagggcggcggcggcggcggcggcggcggcggcggctggagcagcccgggaggaggaggcggcgagaatggcagcggcgtcgtgggcgcggcggagatgagcgcccgcgaccccgggcccagggcggcacagccggagtgggcgggggtcccgatgcaggcccgaggggggccatggggcaggtcctgccggtcttcgcccactgcaaagaagctccgtctacagcctcctcaactcctgattccacagaaggagggaacgacgactctgattttcgagagctgcacacagcccgggaattctcagaggaggacgaggaggagaccacgtcgcaggactggggcaccccccgggagctgaccttctcctacatcgcctttgatggtgtagtgggctccgggggccgcagggattcaactgcccgccgcccccgcccccagggccgctcagtctcggaaccacgagaccagcaccctcagcccagcctgggcgacagcttggagagcatccccagcctgagccaatccccggagcctggacgacggggtgatcctgacaccgcgcctccatccgagcgccctctggaagacctgaggcttcggttggaccatctgggctgggtggcccggggaacgggatccggggaggactcttccaccagcagctccaccccgctggaagacgaagaaccccaagaacccaacagattggagacaggagaagctggggaagaactggacctacgactccgacttgctcagccctcatcgcccgaggtcttgactccccagctcagtccgggctctgggacaccccaggccggtactccgtccccatcccgatcgcgagattcgaactctgggcccgaagagccattgctggaagaggaagaaaagcagtgggggccactggagcgagagccagtaaggggacagtgcctcgatagcacggaccaattagaattcacggtggagccacgccttctaggtaagcaacgtgtatgaagatgctgcattggcccacagaaggcaaaagtggcggacctgctgtactggaaggacacgaggacgtcaggagtggtcttcacaggcctgatggtctccctcctctgcctcctgcactttagcatcgtgtccgtggccgcgcacttggctctgttgctgctctgcggcaccatctctctcagggtttaccgcaaagtgctgcaggccgtgcaccggggggatggagccaaccctttccaggcctacctggatgtggacctcaccctgactcgggagcagacggaacgtttgtcccaccagatcacctcccgcgtggtctcggcggccacgcagctgcggcacttcttcctggtagaagacctcgtggattccctcaagctggccctcctcttctacatcttgaccttcgtgggtgccatcttcaatggtttgactcttctcattctgggagtgattggtctattcaccatccccctgctgtaccggcagcaccaggctcagatcgaccaatatgtggggttggtgaccaatcagttgagccacatcaaagctaagatccgagctaaaatcccagggaccggagccctggcctctgcagcagccgcagtctccggatccaaagccaaagccgaatgagaacggtgtctctgcccgcaggacgcctgcccccagcccccgcagccctctggccccctccatctcttgtccgttcccacccacccccctcctcggcccgagccttttcccggtgggtgtcaggatcactcccactagggactctgcgctaattacctgagcgaccaggactacatttcccaagaggctctgctccaggagtccaggaaagacgaggcaccttggccgcggggcctgctgggacttgtagttgcctagacagggcaccaccctgcacttccggacccgccgctggaggcgccgtgaggcgttggtgtctcctggatgctactagccccaacgccggggctttgcatggggcccaggggaggcctgagcttggatttacactgtaataaagactcctgtggaaaacccgaggcctcttgtgcttccagaaccctccagttgttcacctttctgcactgaaaggcacttaagtgacactccaggagaaccttccccatctctggagaaggagctccctctgccatctgtgtaggttatgaaatgattgaggggaggccgggcgcagtggctcacgcctgtaatcccagcactttgggaggccgaggagggcggatcacttgagaccagaagttcaagaccagcctggccaacatggtgaaacctcatctctactaaaaatacaaaatttagccgggtgtggtggtgcatgcctgtaatcacagctactcgggaggctgaggcatgagagtcgcttgaatctgggagatggaggttgtagtgagccaag

SEQ ID NO: 287517 - DNA, 2783 bp, Homo sapiens
cgcgcgctgcagtgccttccccacctcggccccgcccgcccccgccgagccgagcaccagggcggcggcggcggcggcggcggcggcggcggctggagcagcccgggaggaggaggcggcgagaatggcagcggcgtcgtgggcgcggcggagatgagcgcccgcgaccccgggcccagggcggcacagccggagtgggcgggggtcccgatgcaggcccgaggggggccatggggcaggtcctgccggtcttcgcccactgcaaagaagctccgtctacagcctcctcaactcctgattccacagaaggagggaacgacgactctgattttcgagagctgcacacagcccgggaattctcagaggaggacgaggaggagaccacgtcgcaggactggggcaccccccgggagctgaccttctcctacatcgcctttgatggtgtagtgggctccgggggccgcagggattcaactgcccgccgcccccgcccccagggccgctcagtctcggaaccacgagaccagcaccctcagcccagcctgggcgacagcttggagagcatccccagcctgagccaatccccggagcctggacgacggggtgatcctgacaccgcgcctccatccgagcgccctctggaagacctgaggcttcggttggaccatctgggctgggtggcccggggaacgggatccggggaggactcttccaccagcagctccaccccgctggaagacgaagaaccccaagaacccaacagattggagacaggagaagctggggaagaactggacctacgactccgacttgctcagccctcatcgcccgaggtcttgactccccagctcagtccgggctctgggacaccccaggccggtactccgtccccatcccgatcgcgagattcgaactctgggcccgaagagccattgctggaagaggaagaaaagcagtgggggccactggagcgagagccagtaaggggacagtgcctcgatagcacggaccaattagaattcacggtggagccacgccttctaggaacagctatggaatggttaaagacatcattgcttttggctgtttacaagacggttccaattttggaattgtccccacctctgtggacagccattggctgggtccaaaggggccccaccccccctactcctgtcctccgggttctactgaagtgggcaaaatccccgagaagcagcggtgtccccagcctctcactcggagccgatatggggagtaaagtggcggacctgctgtactggaaggacacgaggacgtcaggagtggtcttcacaggcctgatggtctccctcctctgcctcctgcactttagcatcgtgtccgtggccgcgcacttggctctgttgctgctctgcggcaccatctctctcagggtttaccgcaaagtgctgcaggccgtgcaccggggggatggagccaaccctttccaggcctacctggatgtggacctcaccctgactcgggagcagacggaacgtttgtcccaccagatcacctcccgcgtggtctcggcggccacgcagctgcggcacttcttcctggtagaagacctcgtggattccctcaagctggccctcctcttctacatcttgaccttcgtgggtgccatcttcaatggtttgactcttctcattctgggtgagctgggaaggccgtaaggggcaaatggggacttggagtctggtgggggacagggctccagatggaactgttcatctcttgggaacaccctgacgcccccatctctgtacccacaggagtgattggtctattcaccatccccctgctgtaccggcagcaccaggctcagatcgaccaatatgtggggttggtgaccaatcagttgagccacatcaaagctaagatccgagctaaaatcccagggaccggagccctggcctctgcagcagccgcagtctccggatccaaagccaaagccgaatgagaacggtgtctctgcccgcaggacgcctgcccccagcccccgcagccctctggccccctccatctcttgtccgttcccacccacccccctcctcggcccgagccttttcccggtgggtgtcaggatcactcccactagggactctgcgctaattacctgagcgaccaggactacatttcccaagaggctctgctccaggagtccaggaaagacgaggcaccttggccgcggggcctgctgggacttgtagttgcctagacagggcaccaccctgcacttccggacccgccgctggaggcgccgtgaggcgttggtgtctcctggatgctactagccccaacgccggggctttgcatggggcccaggggaggcctgagcttggatttacactgtaataaagactcctgtggaaaacccgaggcctcttgtgcttccagaaccctccagttgttcacctttctgcactgaaaggcacttaagtgacactccaggagaaccttccccatctctggagaaggagctccctctgccatctgtgtaggttatgaaatgattgaggggaggccgggcgcagtggctcacgcctgtaatcccagcactttgggaggccgaggagggcggatcacttgagaccagaagttcaagaccagcctggccaacatggtgaaacctcatctctactaaaaatacaaaatttagccgggtgtggtggtgcatgcctgtaatcacagctactcgggaggctgaggcatgagagtcgcttgaatctgggagatggaggttgtagtgagccaag

SEQ ID NO: 287518 - DNA, 2594 bp, Homo sapiens
cgcgcgctgcagtgccttccccacctcggccccgcccgcccccgccgagccgagcaccagggcggcggcggcggcggcggcggcggcggcggctggagcagcccgggaggaggaggcggcgagaatggcagcggcgtcgtgggcgcggcggagatgagcgcccgcgaccccgggcccagggcggcacagccggagtgggcgggggtcccgatgcaggcccgaggggggccatggggcaggtcctgccggtcttcgcccactgcaaagaagctccgtctacagcctcctcaactcctgattccacagaaggagggaacgacgactctgattttcgagagctgcacacagcccgggaattctcagaggaggacgaggaggagaccacgtcgcaggactggggcaccccccgggagctgaccttctcctacatcgcctttgatggtgtagtgggctccgggggccgcagggattcaactgcccgccgcccccgcccccagggccgctcagtctcggaaccacgagaccagcaccctcagcccagcctgggcgacagcttggagagcatccccagcctgagccaatccccggagcctggacgacggggtgatcctgacaccgcgcctccatccgagcgccctctggaagacctgaggcttcggttggaccatctgggctgggtggcccggggaacgggatccggggaggactcttccaccagcagctccaccccgctggaagacgaagaaccccaagaacccaacagattggagacaggagaagctggggaagaactggacctacgactccgacttgctcagccctcatcgcccgaggtcttgactccccagctcagtccgggctctgggacaccccaggccggtactccgtccccatcccgatcgcgagattcgaactctgggcccgaagagccattgctggaagaggaagaaaagcagtgggggccactggagcgagagccagtaaggggacagtgcctcgatagcacggaccaattagaattcacggtggagccacgccttctaggaacagctatggaatggttaaagacatcattgcttttggctgtttacaagacggttccaattttggaattgtccccacctctgtggacagccattggctgggtccaaaggggccccaccccccctactcctgtcctccgggttctactgaagtgggcaaaatccccgagaagcagcggtgtccccagcctctcactcggagccgatatggggagtaaagtggcggacctgctgtactggaaggacacgaggacgtcaggagtggtcttcacaggcctgatggtctccctcctctgcctcctgcactttagcatcgtgtccgtggccgcgcacttggctctgttgctgctctgcggcaccatctctctcagggtttaccgcaaagtgctgcaggccgtgcaccggggggatggagccaaccctttccaggcctacctggatgtggacctcaccctgactcgggagcagacggaacgtttgtcccaccagatcacctcccgcgtggtctcggcggccacgcagctgcggcacttcttcctggtagaagacctcgtggattccctcaaggagtgattggtctattcaccatccccctgctgtaccggcagcaccaggctcagatcgaccaatatgtggggttggtgaccaatcagttgagccacatcaaagctaagatccgagctaaaatcccagggaccggagccctggcctctgcagcagccgcagtctccggatccaaagccaaagccgaatgagaacggtgtctctgcccgcaggacgcctgcccccagcccccgcagccctctggccccctccatctcttgtccgttcccacccacccccctcctcggcccgagccttttcccggtgggtgtcaggatcactcccactagggactctgcgctaattacctgagcgaccaggactacatttcccaagaggctctgctccaggagtccaggaaagacgaggcaccttggccgcggggcctgctgggacttgtagttgcctagacagggcaccaccctgcacttccggacccgccgctggaggcgccgtgaggcgttggtgtctcctggatgctactagccccaacgccggggctttgcatggggcccaggggaggcctgagcttggatttacactgtaataaagactcctgtggaaaacccgaggcctcttgtgcttccagaaccctccagttgttcacctttctgcactgaaaggcacttaagtgacactccaggagaaccttccccatctctggagaaggagctccctctgccatctgtgtaggttatgaaatgattgaggggaggccgggcgcagtggctcacgcctgtaatcccagcactttgggaggccgaggagggcggatcacttgagaccagaagttcaagaccagcctggccaacatggtgaaacctcatctctactaaaaatacaaaatttagccgggtgtggtggtgcatgcctgtaatcacagctactcgggaggctgaggcatgagagtcgcttgaatctgggagatggaggttgtagtgagccaag

SEQ ID NO: 287519 - DNA, 2200 bp, Homo sapiens
cgcgcgctgcagtgccttccccacctcggccccgcccgcccccgccgagccgagcaccagggcggcggcggcggcggcggcggcggcggcggctggagcagcccgggaggaggaggcggcgagaatggcagcggcgtcgtgggcgcggcggagatgagcgcccgcgaccccgggcccagggcggcacagccggagtgggcgggggtcccgatgcaggcccgaggggggccatggggcaggtcctgccggtcttcgcccactgcaaagaagctccgtctacagcctcctcaactcctgattccacagaaggagggaacgacgactctgattttcgagagctgcacacagcccgggaattctcagaggaggacgaggaggagaccacgtcgcaggactggggcaccccccgggagctgaccttctcctacatcgcctttgatggtgtagtgggctccgggggccgcagggattcaactgcccgccgcccccgcccccagggccgctcagtctcggaaccacgagaccagcaccctcagcccagcctgggcgacagcttggagagcatccccagcctgagccaatccccggagcctggacgacggggtgatcctgacaccgcgcctccatccgagcgccctctggaagacctgaggcttcggttggaccatctgggctgggtggcccggggaacgggatccggggaggactcttccaccagcagctccaccccgctggaagacgaagaaccccaagaacccaacagattggagacaggagaagctggggaagaactggacctacgactccgacttgctcagccctcatcgcccgaggtcttgactccccagctcagtccgggctctgggacaccccaggccggtactccgtccccatcccgatcgcgagattcgaactctgggcccgaagagccattgctggaagaggaagaaaagcagtgggggccactggagcgagagccagtaaggggacagtgcctcgatagcacggaccaattagaattcacggtggagccacgccttctaggaacagctatggaatggttaaagacatcattgcttttggctgtttacaagacggttccaattttggaattgtccccacctctgtggacagccattggctgggtccaaaggggccccaccccccctactcctgtcctccgggttctactgaagtgggcaaaatccccgagaagcagcggtgtccccagcctctcactcggagccgatatggggagtaaaggctcagatcgaccaatatgtggggttggtgaccaatcagttgagccacatcaaagctaagatccgagctaaaatcccagggaccggagccctggcctctgcagcagccgcagtctccggatccaaagccaaagccgaatgagaacggtgtctctgcccgcaggacgcctgcccccagcccccgcagccctctggccccctccatctcttgtccgttcccacccacccccctcctcggcccgagccttttcccggtgggtgtcaggatcactcccactagggactctgcgctaattacctgagcgaccaggactacatttcccaagaggctctgctccaggagtccaggaaagacgaggcaccttggccgcggggcctgctgggacttgtagttgcctagacagggcaccaccctgcacttccggacccgccgctggaggcgccgtgaggcgttggtgtctcctggatgctactagccccaacgccggggctttgcatggggcccaggggaggcctgagcttggatttacactgtaataaagactcctgtggaaaacccgaggcctcttgtgcttccagaaccctccagttgttcacctttctgcactgaaaggcacttaagtgacactccaggagaaccttccccatctctggagaaggagctccctctgccatctgtgtaggttatgaaatgattgaggggaggccgggcgcagtggctcacgcctgtaatcccagcactttgggaggccgaggagggcggatcacttgagaccagaagttcaagaccagcctggccaacatggtgaaacctcatctctactaaaaatacaaaatttagccgggtgtggtggtgcatgcctgtaatcacagctactcgggaggctgaggcatgagagtcgcttgaatctgggagatggaggttgtagtgagccaag

SEQ ID NO: 287520 - DNA, 2284 bp, Homo sapiens
cgcgcgctgcagtgccttccccacctcggccccgcccgcccccgccgagccgagcaccagggcggcggcggcggcggcggcggcggcggcggctggagcagcccgggaggaggaggcggcgagaatggcagcggcgtcgtgggcgcggcggagatgagcgcccgcgaccccgggcccagggcggcacagccggagtgggcgggggtcccgatgcaggcccgaggggggccatggggcaggtcctgccggtcttcgcccactgcaaagaagctccgtctacagcctcctcaactcctgattccacagaaggagggaacgacgactctgattttcgagagctgcacacagcccgggaattctcagaggaggacgaggaggagaccacgtcgcaggactggggcaccccccgggagctgaccttctcctacatcgcctttgatggtgtagtgggctccgggggccgcagggattcaactgcccgccgcccccgcccccagggccgctcagtctcggaaccacgagaccagcaccctcagcccagcctgggcgacagcttggagagcatccccagcctgagccaatccccggagcctggacgacggggtgatcctgacaccgcgcctccatccgagcgccctctggaagacctgaggcttcggttggaccatctgggctgggtggcccggggaacgggatccggggaggactcttccaccagcagctccaccccgctggaagacgaagaaccccaagaacccaacagattggagacaggagaagctggggaagaactggacctacgactccgacttgctcagccctcatcgcccgaggtcttgactccccagctcagtccgggctctgggacaccccaggccggtactccgtccccatcccgatcgcgagattcgaactctgggcccgaagagccattgctggaagaggaagaaaagcagtgggggccactggagcgagagccagtaaggggacagtgcctcgatagcacggaccaattagaattcacggtggagccacgccttctaggaacagctatggaatggttaaagacatcattgcttttggctgtttacaagacggttccaattttggaattgtccccacctctgtggacagccattggctgggtccaaaggggccccaccccccctactcctgtcctccgggttctactgaagtgggcaaaatccccgagaagcagcggtgtccccagcctctcactcggagccgatatggggagtaaagtggcggacctgctgtactggaaggacacgaggacgtcaggagtggtcttcacaggcctgatggtctccctcctctgcctcctgcactttagcatcgtgtccgtggccgcgcacttggctctgttgctgctctgcggcaccatctctctcagggtttaccgcaaagtgctgcaggccgtgcaccggggggatggagccaaccctttccaggcctacctggatgtggacctcaccctgactcgggagcagacggaacgtttgtcccaccagatcacctcccgcgtggtctcggcggccacgcagctgcggcacttcttcctggtagaagacctcgtggattccctcaagctggccctcctcttctacatcttgaccttcgtgggtgccatcttcaatggtttgactcttctcattctgggagtgattggtctattcaccatccccctgctgtaccggcagcaccaggctcagatcgaccaatatgtggggttggtgaccaatcagttgagccacatcaaagctaagatccgagctaaaatcccagggaccggagccctggcctctgcagcagccgcagtctccggatccaaagccaaagccgaatgagaacggtgtctctgcccgcaggacgcctgcccccagcccccgcagccctctggccccctccatctcttgtccgttcccacccacccccctcctcggcccgagccttttcccggtgggtgtcaggatcactcccactagggactctgcgctaattacctgagcgaccaggactacatttcccaagaggctctgctccaggagtccaggaaagacgaggcaccttggccgcggggcctgctgggacttgtagttgcctagacagggcaccaccctgcacttccggacccgccgctggaggcgccgtgaggcgttggtgtctcctggatgctactagccccaacgccggggctttgcatggggcccacaggagtctttattacagtgtaaatccaagctcaggcctcccctggtcgacc

SEQ ID NO: 287521 - DNA, 2155 bp, Homo sapiens
cgcgcgctgcagtgccttccccacctcggccccgcccgcccccgccgagccgagcaccagggcggcggcggcggcggcggcggcggcggcggctggagcagcccgggaggaggaggcggcgagaatggcagcggcgtcgtgggcgcggcggagatgagcgcccgcgaccccgggcccagggcggcacagccggagtgggcgggggtcccgatgcaggcccgaggggggccatggggcaggtcctgccggtcttcgcccactgcaaagaagctccgtctacagcctcctcaactcctgattccacagaaggagggaacgacgactctgattttcgagagctgcacacagcccgggaattctcagaggaggacgaggaggagaccacgtcgcaggactggggcaccccccgggagctgaccttctcctacatcgcctttgatggtgtagtgggctccgggggccgcagggattcaactgcccgccgcccccgcccccagggccgctcagtctcggaaccacgagaccagcaccctcagcccagcctgggcgacagcttggagagcatccccagcctgagccaatccccggagcctggacgacggggtgatcctgacaccgcgcctccatccgagcgccctctggaagacctgaggcttcggttggaccatctgggctgggtggcccggggaacgggatccggggaggactcttccaccagcagctccaccccgctggaagacgaagaaccccaagaacccaacagattggagacaggagaagctggggaagaactggacctacgactccgacttgctcagccctcatcgcccgaggtcttgactccccagctcagtccgggctctgggacaccccaggccggtactccgtccccatcccgatcgcgagattcgaactctgggcccgaagagccattgctggaagaggaagaaaagcagtgggggccactggagcgagagccagtaaggggacagtgcctcgatagcacggaccaattagaattcacggtggagccacgccttctaggaacagctatggaatggttaaagacatcattgcttttggctgtttacaagacggttccaattttggaattgtccccacctctgtggacagccattggctgggtccaaaggggccccaccccccctactcctgtcctccgggttctactgaagtgggcaaaatccccgagaagcagcggtgtccccagcctctcactcggagccgatatggggagtaaagtggcggacctgctgtactggaaggacacgaggacgtcaggagtggtcttcacaggcctgatggtctccctcctctgcctcctgcactttagcatcgtgtccgtggccgcgcacttggctctgttgctgctctgcggcaccatctctctcagggtttaccgcaaagtgctgcaggccgtgcaccggggggatggagccaaccctttccaggcctacctggatgtggacctcaccctgactcgggagcagacggaacgtttgtcccaccagatcacctcccgcgtggtctcggcggccacgcagctgcggcacttcttcctggtagaagacctcgtggattccctcaagctggccctcctcttctacatcttgaccttcgtgggtgccatcttcaatggtttgactcttctcattctgggtgagctgggaaggccgtaaggggcaaatggggacttggagtctggtgggggacagggctccagatggaactgttcatctcttgggaacaccctgacgcccccatctctgtacccacaggagtgattggtctattcaccatccccctgctgtaccggcagcaccaggtgagtgtgacaccctcagttgtcagcaccccagctaaacatgggggtctgaccatctccttccagaaccggggtcccattgacagatgtcccggccagacacaggtgtcctggctgcagcaccttcccaatacaaccagagtctaagtaacatgtcttatcagcatcagccagggacaggctttttgtttgtttttgttttgttttgggttttctttgagacggagtcatgccactgcactccaggctgggtgacagagcgagaccctgtctcaaaaaaataaatacaaataaataaataatttttta

SEQ ID NO: 287522 - DNA, 1947 bp, Homo sapiens
cgcgcgctgcagtgccttccccacctcggccccgcccgcccccgccgagccgagcaccagggcggcggcggcggcggcggcggcggcggcggctggagcagcccgggaggaggaggcggcgagaatggcagcggcgtcgtgggcgcggcggagatgagcgcccgcgaccccgggcccagggcggcacagccggagtgggcgggggtcccgatgcaggcccgaggggggccatggggcaggtcctgccggtcttcgcccactgcaaagaagctccgtctacagcctcctcaactcctgattccacagaaggagggaacgacgactctgattttcgagagctgcacacagcccgggaattctcagaggaggacgaggaggagaccacgtcgcaggactggggcaccccccgggagctgaccttctcctacatcgcctttgatggtgtagtgggctccgggggccgcagggattcaactgcccgccgcccccgcccccagggccgctcagtctcggaaccacgagaccagcaccctcagcccagcctgggcgacagcttggagagcatccccagcctgagccaatccccggagcctggacgacggggtgatcctgacaccgcgcctccatccgagcgccctctggaagacctgaggcttcggttggaccatctgggctgggtggcccggggaacgggatccggggaggactcttccaccagcagctccaccccgctggaagacgaagaaccccaagaacccaacagattggagacaggagaagctggggaagaactggacctacgactccgacttgctcagccctcatcgcccgaggtcttgactccccagctcagtccgggctctgggacaccccaggccggtactccgtccccatcccgatcgcgagattcgaactctgggcccgaagagccattgctggaagaggaagaaaagcagtgggggccactggagcgagagccagtaaggggacagtgcctcgatagcacggaccaattagaattcacggtggagccacgccttctagtggcggacctgctgtactggaaggacacgaggacgtcaggagtggtcttcacaggcctgatggtctccctcctctgcctcctgcactttagcatcgtgtccgtggccgcgcacttggctctgttgctgctctgcggcaccatctctctcagggtttaccgcaaagtgctgcaggccgtgcaccggggggatggagccaaccctttccaggcctacctggatgtggacctcaccctgactcgggagcagacggaacgtttgtcccaccagatcacctcccgcgtggtctcggcggccacgcagctgcggcacttcttcctggtagaagacctcgtggattccctcaaggtggcctggagctctcagcccctcctgggttcccccattcacctctgcatggctagggggtgggagggcgactgttgggtaaattcacagcatgagagggaattcccggtgggctctgctgaccctgaccttcacccccagctggccctcctcttctacatcttgaccttcgtgggtgccatcttcaatggtttgactcttctcattctgggtgagctgggaaggccgtaaggggcaaatggggacttggagtctggtgggggacagggctccagatggaactgttcatctcttgggaacaccctgacgcccccatctctgtacccacaggagtgattggtctattcaccatccccctgctgtaccggcagcaccaggctcagatcgaccaatatgtggggttggtgaccaatcagttgagccacatcaaagctaagtaagagcatggggcggaggtcgatgggagggggaagtgggggagcttgggaacctttcctttctactctcgctgtccgcaaatctcctggggtaatgtccccttgaaaaggctgaggag

SEQ ID NO: 287523 - DNA, 4838 bp, Homo sapiens
ctcccacgggctggctggcaagcggccctggtgggtctgcgggggcaggggcagccttcctggtttatctccaccggcgcgatctgctcgtccgcctcggctccagaagctggggctcagggtccggcgaggcaggaagcctgaggccacagcccagagcagcctgagtgcagtcatgtgggggcgactgctcctgtggcccctggtgctggggttcagcctgtctggcggcacccagacccccagcgtctacgacgagagcgggagcaccggaggtggtgatgacagcacgccctcaatcctgcctgccccccgcggctacccaggccaagtctgtgccaatgacagtgacaccctggagctcccggacagctcacgggcactgcttctgggctgggtgcccaccaggctggtgcccgccctctatgggctggtcctggtggtggggctgccggccaatgggctggcgctgtgggtgctggccacgcaggcacctcggctgccctccaccatgctgctgatgaacctcgcgactgctgacctcctgctggccctggcgctgcccccgcggatcgcctaccacctgcgtggccagcgctggcccttcggggaggccgcctgccgcctggccacggccgcactctatggtcacatgtatggctcagtgctgctgctggccgccgtcagcctggatcgctacctggccctggtgcacccgctgcgggcccgcgccctgcgtggccggcgcctggcccttggactctgcatggctgcttggctcatggcggccgccctggcactgcccctgacactgcagcggcagaccttccggctggcgcgctccgatcgcgtgctctgccatgacgcgctgcccctggacgcacaggcctcccactggcaaccggccttcacctgcctggcgctgttgggctgtttcctgcccctgctggccatgctgctgtgctacggggccaccctgcacacgctggcggccagcggccggcgctacggccacgcgctgaggctgaccgcagtggtgctggcctccgccgtggccttcttcgtgcccagcaacctgctgctgctgctgcattactcggacccgagccccagcgcctggggcaacctctatggtgcctacgtgcccagcctggcgctgagcaccctcaacagctgcgtggatcccttcatctactactacgtgtcggccgagttcagggacaaggtgcgggcagggctcttccaacggtcgccgggggacaccgtggcctccaaggcctctgcggaagggggcagccggggcatgggcacccactcctctttgctccagtgacacaaagtggggaaggctgtactgggtcgaacagggtcccttcccccacttcacgtccttcctgggacctcagaatgtgaccttatttggaaatagggttgttacaactgtcactagcggaggtcactttggagaagggtgggccttacatccagtgtgggtggtgtcctcataagataaggagaggccaggcctggtggctcacgcctgtaatcccagcactttaagaggccaaggcggatggatcacttgagcccaggagttcaacaccagcctgagcaacatggtaaaaccccatctctaccaaaaatacaaaaattagctgggcttggtggctggcgcctgtaatcccagctactcaggagactgaggcagaaggatcgcttgaacctgggaggcagaggttgcagtgagccgagattgcgccactggactccagcctgcgtgacagagagcctgtctctaaattaattaattaattaatttaattcaattttaaaaagacgaaaagtgacggccaggtgcagtggctcacgcctataatctcagcactctgggaggccaagatggaggattgcttgaagccaggagtttgggaccagcctgggcaacatagggggatcccatctctacacacaaaaaaattttttaatgaaccaggcattgtggcatgcgcctatagtcccagccactcaagaggcacaggcgggaggatcacttgagcctgggaggttgtggttgcagtgagctatgattgtaccactgcactccagcctgggcaacagagcaagaccttgtctcaaaaataaacaaactaaaattaaaaaaagaagacgagagatagtgggtgtggtggctcacacctgcaatcccagcactttggaaggccgaggtgggcagatcatctgaggccaggagttcaagaccagcctggctaacatggtgaaatcctatctctaccaaaaatacaaaaattagccaggcgtggtggtgggcacctgtactggggaggtgcccacccagctactggggaggctgagtcaggagaatcgcttgaacctgggaggcggaggttgcggtcagctgagatggtgccactgcactccagcctgggcgaaagagcgactctgtctccaaaaaaaagagaagaggagaggacacagagacacacagagaagaaagccatgtggcggcagaggcagagatgggagtgatgcggacggacacaaactaagggatgccacgatgccaagcacagccaacagccaccagcagccaggagacaggcctgggacgggctctccctcacagcctccagagggaaccagccctgccaccaccttgaccctggacttctggcctgcagaactgtgagacaataaactctcattgttttaagctgcctggcatgtggcactttgtcagggcagcccaggaatctgaaacaggatcaaactctgcttcctgggccctgccagcatctctggctcggctttctgggctggatgcagcccacgacgcactggtgtctgagatggggctggagctggggctggggctgcattccctggagactcactgcaagttcctgcccaggaggctgagggcaccccatcctcagtgcccaatgctgtggccccaccaggcccagagcctggttggccattctcatgcccaccagcttctggctttgggatgtctcttgagcaaccagaatagcacccccaactctgctccccaaaacccatcactagcacggctcagcctcctgctatcccctgactgctggggaccctcgccttccctcctctcacctgcaggctgatccttcttttcactttctgtcaatgtcaccagggataaggtgggacaatggggggtgggggtggacagtgtgtgctggggggttcgggtgctgcagacctggaactcccttctgccaggatgttggcagccggttgtaagccttgcacgggacagaccacacccaccgcaacctcatcccctcagcactaaccacatccactctcaaccccgtccccttcgcactgaccacacccaccccgttcggccccgccccccgcactgaacactcccgccctcaaccccgcaccctccgcactcacctccccctcgccgctcgaccccgccctcaccacactgaccaccctcaacccattgcgcccagtccccaccacagtgaccacaccctcactggctcggccctgcccccagtatactgaccattccccagccacttcccttccgcacttaccactcccccagccacgcccctccccgctgaccgctcctccagccccgcctcccccgtacaggcagagcgcccgcccacctctatgctgcgttctcctgactttacgttggcccctcctctgccaagcccccaggggagccctccctggcgtccgagggtgggagtcggggtgtggcaggccgcggtggggggcggcagtggctccgcgcactcacccgggccccgggcaggggcgcgctccacttcgttgcacgcgggtccggcgcacagttcccgggcgagtgggctgtgcgtgctgacgttgtagaagcgagtggcctcgaaggctacgggacgagggtggcgggtgaccaagtgcaggcgcgacgggtcagggaccgggccgggccgggggtgcgggcgcgcgggcctaccgggttcgtagtagtcgtacacggagactggcagcgccgacgtcctgcccaccacgcactcccggagagcacggaaccgcacgcacgtcaggcaccggctggggatctgtggggcagcggcgggcgcaggctcgacccgggccaggaggcccggggcgctgagctcaggcccagaactggctgatttcagggatacccaggacgcgtgaaacacagaagaaacgtgatcccattttctttttttcttttacttttctttttttttttttttcctgagacagagtctcgcgctgttgcccaggctggagtgcagtggcgtgatctcggctcactgcaagctcggcctcctgggttcaaatgattctcctgcctcagcctcccaagtagctgggataacaggcgcccaccaccgcaccctgctaattttttgtatttttgatcaagacggagtttcaccatgttggccaggctggtctccaactcctgccctcaagtgatccgcctcggtcccattttttattctttgggtccttccatcccactgggaaaacgtctcaggtggcctctgaaacaccactcctttttgtgtgtgtgcacgcatggctgagcatgtgtgggtgggagtcagcacattcacgatactgtgcaatcatcacctctgtctagttacaggacggtttctttctcccccaaagaaaccccatcgccatcagcactcactccccactcccccagcccctggcaaccacaaatctttccaactctacggatttgcctgttctgggcatttcatgtcaatggaatcatgtactctgtg

SEQ ID NO: 287524 - DNA, 2568 bp, Homo sapiens
ctcccacgggctggctggcaagcggccctggtgggtctgcgggggcaggggcagccttcctggtttatctccaccggcgcgatctgctcgtccgcctcggctccagaagctggggctcagggtccggcgaggcaggaagcctgaggccacagcccagagcagcctgagtgcagtcatgtgggggcgactgctcctgtggcccctggtgctggggttcagcctgtctggcggcacccagacccccagcgtctacgacgagagcgggagcaccggaggtggtgatgacagcacgccctcaatcctgcctgccccccgcggctacccaggccaagtctgtgccaatgacagtgacaccctggagctcccggacagctcacgggcactgcttctgggctgggtgcccaccaggctggtgcccgccctctatgggctggtcctggtggtggggctgccggccaatgggctggcgctgtgggtgctggccacgcaggcacctcggctgccctccaccatgctgctgatgaacctcgcgactgctgacctcctgctggccctggcgctgcccccgcggatcgcctaccacctgcgtggccagcgctggcccttcggggaggccgcctgccgcctggccacggccgcactctatggtcacatgtatggctcagtgctgctgctggccgccgtcagcctggatcgctacctggccctggtgcacccgctgcgggcccgcgccctgcgtggccggcgcctggcccttggactctgcatggctgcttggctcatggcggccgccctggcactgcccctgacactgcagcggcagaccttccggctggcgcgctccgatcgcgtgctctgccatgacgcgctgcccctggacgcacaggcctcccactggcaaccggccttcacctgcctggcgctgttgggctgtttcctgcccctgctggccatgctgctgtgctacggggccaccctgcacacgctggcggccagcggccggcgctacggccacgcgctgaggctgaccgcagtggtgctggcctccgccgtggccttcttcgtgcccagcaacctgctgctgctgctgcattactcggacccgagccccagcgcctggggcaacctctatggtgcctacgtgcccagcctggcgctgagcaccctcaacagctgcgtggatcccttcatctactactacgtgtcggccgagttcagggacaaggtgcgggcagggctcttccaacggtcgccgggggacaccgtggcctccaaggcctctgcggaagggggcagccggggcatgggcacccactcctctttgctccagtgacacaaagtggggaaggctgtactgggtcgaacagggtcccttcccccacttcacgtccttcctgggacctcagaatgtgaccttatttggaaatagggttgttacaactgtcactagcggaggtcactttggagaagggtgggccttacatccagtgtgggtggtgtcctcataagataaggagaggccaggcctggtggctcacgcctgtaatcccagcactttaagaggccaaggcggatggatcacttgagcccaggagttcaacaccagcctgagcaacatggtaaaaccccatctctaccaaaaatacaaaaattagctgggcttggtggctggcgcctgtaatcccagctactcaggagactgaggcagaaggatcgcttgaacctgggaggcagaggttgcagtgagccgagattgcgccactggactccagcctgcgtgacagagagcctgtctctaaattaattaattaattaatttaattcaattttaaaaagacgaaaagtgacggccaggtgcagtggctcacgcctataatctcagcactctgggaggccaagatggaggattgcttgaagccaggagtttgggaccagcctgggcaacatagggggatcccatctctacacacaaaaaaattttttaatgaaccaggcattgtggcatgcgcctatagtcccagccactcaagaggcacaggcgggaggatcacttgagcctgggaggttgtggttgcagtgagctatgattgtaccactgcactccagcctgggcaacagagcaagaccttgtctcaaaaataaacaaactaaaattaaaaaaagaagacgagagatagtgggtgtggtggctcacacctgcaatcccagcactttggaaggccgaggtgggcagatcatctgaggccaggagttcaagaccagcctggctaacatggtgaaatcctatctctaccaaaaatacaaaaaaaaaaaagagaagaggagaggacacagagacacacagagaagaaagccatgtggcggcagaggcagagatgggagtgatgcggacggacacaaactaagggatgccacgatgccaagcacagccaacagccaccagcagccaggagacaggcctgggacgggctctccctcacagcctccagagggaaccagccctgccaccaccttgaccctggacttctggcctgcagaactgtgagacaataaactctcattgtttta

SEQ ID NO: 287525 - DNA, 973 bp, Homo sapiens
ctcccacgggctggctggcaagcggccctggtgggtctgcgggggcaggggcagccttcctggtttatctccaccggcgcgatctgctcgtccgcctcggctccagaagctggggctcagggtccggcgaggcaggaagcctgaggccacagcccagagcagcctgagtgcagtcatgtgggggcgactgctcctgtggcccctggtgctggggttcagcctgtctggcggcacccagacccccagcgtctacgacgagagcgggagcaccggaggtggtgatgacagcacgccctcaatcctgcctgccccccgcggctacccaggccaagtctgtgccaatgacagtgacaccctggagctcccggacagctcacgggcactgcttctgggctgggtgcccaccaggctggtgcccgccctctatgggctggtcctggtggtggggctgccggccaatgggctggcgctgtgggtgctggccacgcaggcacctcggctgccctccaccatgctgctgatgaacctcgcgactgctgacctcctgctggccctggcgctgcccccgcggatcgcctaccacctgcgtggccagcgctggcccttcggggaggccgcctgccgcctggccacggccgcactctatggtcacatgtatggctcagtgctgctgctggccgccgtcagcctggatcgctacctggccctgctggccatgctgctgtgctacggggccaccctgcacacgctggcggccagcggccggcgctacggccacgcgctgaggctgaccgcagtggtgctggcctccgccgtggccttcttcaagcacagccaacagccaccagcagccaggagacaggcctgggacgggctctccctcacagcctccagagggaaccagccctgccaccaccttgaccctggacttctggcctgcagaactgtgagacaataaactctcattgtttta

SEQ ID NO: 287526 - DNA, 2245 bp, Homo sapiens
gaccctgtttctctagccgtgcagctgcaaggtcactagacagaaaaactcaagtcataaacatgttttttcttgaaagggcagtagtcagaaaagaaaggaactgatcttggacttgaagaaacagccccagaggtgaaagagatagtcgttaacctgcacagcctctttccagcctcttcacagataacaagggctttcggaacaagaaacttgtatattctgtgcagctcaaataaaattaagaagctgaacatcagttgacaaagagtaaaaaataactgggagttgacgggaaaataaactgtcgtttatgaaaatgtagcttattccagaacaccagatttcaaaagatacagaatcctgttgctccacaattcaatttgtcctacaaaaagcaaatatagtaaatagaagttgccaacactgaagagaagattaacaaatctgagcatcccaatggagcagacaacatgttcagaccatccaaagatccaaatggcaggtttgatcactccaattgacaccaggtacaagccaggtaatgtagtaatcatgggatcccactttaaaatgaaagaaaatgaagtaaaagcaagaggtaataggaacaagacaggcacaaatatgtcaagcccaagtctcatctccagcaacaatcagaaattttgagaagttattctatgacaagattaagtaagtccttggcagaacaggattcgtttttcctattttttgcccccggaccagcttagtgatggttcaggtagcagcaaccaataaacaacaacaacttaaaatctatttctattttccaagaaatgttctttaaaagcctttattttgataaataaactgcaaatgttccagtttttaaaagcatggaaacattgtttgggactcttaagtttaggaaaacatttggaccacaggctccatgatgacagctaacataaactgagacagaaattgttgccaaaccctctgtattaacgttacaatatgccctatagtaaagattattgtcattttgcagatgagtaacctgaatttctgaaactcagaacatctccaagatcacaaaactagtaaatcacagcaccaagatttaagatcagatctttctctaaaacagactttatatttctagccagtaccctatattgtgtcaccagagaagcaggggatgcttattttgatatttatatgtacatacttgcacagtcaaatatatactcaaaaatgatgtgacttgactggttgccagtttatccagttaacagttcactaaaaatacccagggaaggaatttgtgattataaattgtcactttttggtagctgaagatccctccagtccaccctatcccacccctaaaatgcacagtgaggtgcttgacaggtgagctaaaggaaagttttctggtatttccaaggagcacccgaatgcctttaatcctaaaacaaggaaagacaaagtgggatcgatatcgtcagctgccaagaggagggctcagttccccgttgagtattctcccagatcactccttcctggaggacagatctgctgtttattcattcatttaataaatatttcacagatctcagagacaggaacaaaagactatacccagtttctttcatgttctgaggcttgagggggtggaacaggacgagtgaagtctaaggatgggaggacgtggggacgctgggacctctcaggcctctcctggggtggggacaggttggggaccccacctgggaaagggagaaatggccctcacagtagcgctgcgcctgaggcaggtggaagatctcgtccatgtagggctctcgcaacgcccggctgaaggcggagaagaggaggcaggatactaaaaaggtagctcaaggcggccgagaaatagtaaccttccagctgcgccattccagctcccacagccactgcccaagaacctactcctggaaaattctgagcctggaaacccgagctggaaacttgggctcgaaatgggcgcgctaggcgggactagccagacggggccacataccggaaggcaaaggatgctgggagagcgcggatccggaaagatcgggtcgctgtttcccggagtgacgggtttagataacggaccggatgattaccctctcaatcgcattgcccggggcgcacaaagtgtcaaaacttccggaaggggcgggtctcggatttcgccagcgcgggaggtgcgtggcttgctgcttag

SEQ ID NO: 287527 - DNA, 543 bp, Homo sapiens
agcgtcggagtctacgaggaaaataaacagctggaaataagcagactagtgtaagagtgaattgaaaagaaaacccaaggtcacatctcccaagaagcagtaatgttccagcaataagaaaaggacagttttttgtcttttgcatggtgagccttatatgaattacatcaattttgtcaccaatatccatcatcagaacattttgattctacataacacattgcaaatggtcacagcaatcaagactatatccatagatgtcccagaaataatatctgactatacagagcagcattaccaagccaccaagaagtctgcctagtaatgacaatgataacaacagctaacacttatcaacagagcagaggaacagagccacagataactgaaaaccactttggcactgaggaggtatgcagacaagatctggaagggaatctagaaaaatggcaactttggaataatagataccttttgttttcttatcgcttttatttttgtcatgataaatattaagagtaaaaagaaaattcacattgtttg

SEQ ID NO: 287528 - DNA, 762 bp, Homo sapiens
cgtcttgacgggctgctcccctcctttcctcccgccacaagcgctcgctgtggttctggcagcgaagtgcgagactgggctcgccaggcggaagtggttggagactgcgtgttttcctagaaagtcctcgaccttcgtcggggagaggaggggagtgataaattggaaggcggacaagcgacaagtgcggtactggaaagacccaaacatacttggttgtgacctcagaaaataaacagctggaaataagcagactagtgtaagagtgaattgaaaagaaaacccaaggtcacatctcccaagaagcagtaatgttccagcaataagaaaaggacagttttttgtcttttgcatggtgagccttatatgaattacatcaattttgtcaccaatatccatcatcagaacattttgcctactcactgtgaagacaataaggatgaagacctttatgacaatccacttccacttaatgaataatgaggaaactggggcacagagaaattaagtgacttgtccaggaggacagggccaataaccggtggaaccataagaaaaaaatccagtaacagctttgaaaaaggaagataacaatgacctgtgtgtacagcgtccaagggaaccattagcagtggagctccccaggctcctgggacgaccaagcacatggtccaaccaaccatcttctgacaaggtaggggtgggcagtggaaggcaaaaagaatggctgcacttgtgtttctgaaggtcagaccaagaaac

SEQ ID NO: 287529 - DNA, 2246 bp, Homo sapiens
ttttccattagaagctgaagttttattataggataacagtacataaagcacatctaaaattgatgtgttcaatgcacttttaataaaggtaatgtaatattaaaggtacagtttctaagtacaatataacaacattcatattagaatgaaaattggagtatttaaaagacaacattaaatctctcttttttgtacagcttgtatttacaaaatgaatcaaaatattttttttttaaattcaggactcaataaaataaacagctggaaataagcagactagtgtaagagtgaattgaaaagaaaacccaaggtaagtgaaaagttggacgatcctctaataaagatcattagcaaagttttagttcaatactagttttaggattcccataaatggcttgcatttttagtgtggcagaaaaggagtttttacatactgtacacaaaacagacagcatatatttataggtacagtattactgtttccaaacttgcatgtatatttacagaaggctgagtttgtttactcaaacagaagtttgtgaaatttgtgtgcttaatcctcaagacctacacacaattagaatcagcatttcatgtggtctttttaaatgtggctttaatacttggttgtagaggagaatgttaaccgtaaggcttggcttactttgtaaatttaacaaaacaacccaggaaaaacgttttaattggggcacacttgttatcatttaacaattgtcaaatgctgacatgtgctagccattgtgcagacgcaaaaagatacaatctctaccctcaggaagcttaggatgctaaatcgtgctttaaaaaaaaggtttcaatctctttccaagagaggcagttaaggaatgatgtgatttatattaaaagagatttctccctcaactgtagccaatccactttaaaaggttaactactagcattagctctcattaaccacacaattgcatttataattaaggtaacagcaactcttccacaaaaatggaaaatgtctagaattgtggataaatattgcagtgcatggaagccaataatcatggcttgagaatttatcaccttcagttacaaaaagtgcagtaaacagaaacatttgctctacatttataaattgctcaaaaatctttgctaaagatcttacaaattcagtaatattacagaacaattctaatcaatatttaataaggttaactacatccttagttagatatttgataaactttgcttttcaataatgccaatagatcttgggagaatgggtagaaaggcttaattaagctacttattaaataactttgaaaatgaaggtccttcactcagttcatggaactggttgaggtcatactgaaacagaacatcccatgtcgaatttgctttatggcccatgttatggcagaggacgtctccatccttctcatgactcaggtaggaggggaaaggtttattctgccatcaagccatctaggatattttatgtaaatgcccattatctataataggagctaagaatacaactgtgttaggtgccagtaatacaattccttaataagaaaaaaaagtatattactccattaaacaagtttctttaggatcttgaaggcctggcaaattatttttcagcttaggagatatgctgtaaagccaagtagcaaacataaagtaaatgctaataagtttccatatagccatatttataaacaaattcaccctatagatgtcaaatatccatactaaggaagtaattttatcctaattaaatacactctagaataatttatataatgatattatgtatttaaagagaaaagcatgtcccaaatccagcactctgatacagctgccagttgggcataggtgagatatatatatatatgtatatatatacaaatatatagttatactcagtgaaattaacaagacccaaaggtggtattgtctaggaataaaagggataatttttgttgttcacaaaagtaacttgtctagcaccacacatcagaaaaacacaaaaatagcacactctagttctaaacagctatgtctaaaatagattatatagtaaaaccggtattatacagcatattgtggatttgataaacagataaatatttgcactgagtaggctgtttataatataacattttcttatctatacagaatgaaagccaaaaagttaactgtatagagatgtgcagaacaacattaaatattatgactcaaaagcaggg

SEQ ID NO: 287530 - DNA, 2192 bp, Homo sapiens
ttttccattagaagctgaagttttattataggataacagtacataaagcacatctaaaattgatgtgttcaatgcacttttaataaaggtaatgtaatattaaaggtacagtttctaagtacaatataacaacattcatattagaatgaaaattggagtatttaaaagacaacattaaatctctcttttttgtacagcttgtatttacaaaatgaatcaaaatattttttttttaaattcaggactcaataaaataaacagctggaaataagcagactagtgtaagagtgaattgaaaagaaaacccaaggtaagtgaaaagttggacgatcctctaataaagatcattagcaaagttttagttcaatactagttttaggattcccataaatggcttgcatttttagtgtggcagaaaaggagtttttacatactgtacacaaaacagacagcatatatttataggtacagtattactgtttccaaacttgcatgtatatttacagaaggctgagtttgtttactcaaacagaagtttgtgaaatttgtgttaaatgtggctttaatacttggttgtagaggagaatgttaaccgtaaggcttggcttactttgtaaatttaacaaaacaacccaggaaaaacgttttaattggggcacacttgttatcatttaacaattgtcaaatgctgacatgtgctagccattgtgcagacgcaaaaagatacaatctctaccctcaggaagcttaggatgctaaatcgtgctttaaaaaaaaggtttcaatctctttccaagagaggcagttaaggaatgatgtgatttatattaaaagagatttctccctcaactgtagccaatccactttaaaaggttaactactagcattagctctcattaaccacacaattgcatttataattaaggtaacagcaactcttccacaaaaatggaaaatgtctagaattgtggataaatattgcagtgcatggaagccaataatcatggcttgagaatttatcaccttcagttacaaaaagtgcagtaaacagaaacatttgctctacatttataaattgctcaaaaatctttgctaaagatcttacaaattcagtaatattacagaacaattctaatcaatatttaataaggttaactacatccttagttagatatttgataaactttgcttttcaataatgccaatagatcttgggagaatgggtagaaaggcttaattaagctacttattaaataactttgaaaatgaaggtccttcactcagttcatggaactggttgaggtcatactgaaacagaacatcccatgtcgaatttgctttatggcccatgttatggcagaggacgtctccatccttctcatgactcaggtaggaggggaaaggtttattctgccatcaagccatctaggatattttatgtaaatgcccattatctataataggagctaagaatacaactgtgttaggtgccagtaatacaattccttaataagaaaaaaaagtatattactccattaaacaagtttctttaggatcttgaaggcctggcaaattatttttcagcttaggagatatgctgtaaagccaagtagcaaacataaagtaaatgctaataagtttccatatagccatatttataaacaaattcaccctatagatgtcaaatatccatactaaggaagtaattttatcctaattaaatacactctagaataatttatataatgatattatgtatttaaagagaaaagcatgtcccaaatccagcactctgatacagctgccagttgggcataggtgagatatatatatatatgtatatatatacaaatatatagttatactcagtgaaattaacaagacccaaaggtggtattgtctaggaataaaagggataatttttgttgttcacaaaagtaacttgtctagcaccacacatcagaaaaacacaaaaatagcacactctagttctaaacagctatgtctaaaatagattatatagtaaaaccggtattatacagcatattgtggatttgataaacagataaatatttgcactgagtaggctgtttataatataacattttcttatctatacagaatgaaagccaaaaagttaactgtatagagatgtgcagaacaacattaaatattatgactcaaaagcaggg

SEQ ID NO: 287531 - DNA, 1110 bp, Homo sapiens
  misc_feature (1092)..(1092): n is a, c, g, or t
ttttccattagaagctgaagttttattataggataacagtacataaagcacatctaaaattgatgtgttcaatgcacttttaataaaggtaatgtaatattaaaggtacagtttctaagtacaatataacaacattcatattagaatgaaaattggagtatttaaaagacaacattaaatctctcttttttgtacagcttgtatttacaaaatgaatcaaaatattttttttttaaattcaggactcaataaaataaacagctggaaataagcagactagtgtaagagtgaattgaaaagaaaacccaaggtaagtgaaaagttggacgatcctctaataaagatcattagcaaagttttagttcaatactagttttaggattcccataaatggcttgcatttttagtgtggcagaaaaggagtttttacatactgtacacaaaacagacagcatatatttataggtacagtattactgtttccaaacttgcatgtatatttacagaaggctgagtttgtttactcaaacagaagtttgtgaaatttgtgtgcttaatcctcaagacctacacacaattagaatcagcatttcatgtggtctttttaaatgtggctttaatacttggttgtagaggagaatgttaaccgtaaggcttggcttactttgtaaatttaacaaaacaacccaggaaaaacgttttaattggggcacacttgttatcatttaacaattgtcaaatgctgacatgtgctagccattgtgcagacgcaaaaagatacaatctctaccctcaggaagcttaggatgctaaatcgtgctttaaaaaaaaggtttcaatctctttccaagagaggcagttaaggaatgatgtgatttatattaaaagagatttctccctcaactgtagccaatccactttaaaaggttaactactagcattagctctcattaaccacacaattgcatttataattaaggtaacagcaactcttccacaaaaatggaaaatgtctagaattgtggataaatattgcagtgcatggaagccaataatcatggcttgagaatctcgtgccgaattcctgcagcncggggatcgcactagttc

SEQ ID NO: 287532 - DNA, 2178 bp, Homo sapiens
ttttccattagaagctgaagttttattataggataacagtacataaagcacatctaaaattgatgtgttcaatgcacttttaataaaggtaatgtaatattaaaggtacagtttctaagtacaatataacaacattcatattagaatgaaaattggagtatttaaaagacaacattaaatctaaaataaacagctggaaataagcagactagtgtaagagtgaattgaaaagaaaacccaaggtaagtgaaaagttggacgatcctctaataaagatcattagcaaagttttagttcaatactagttttaggattcccataaatggcttgcatttttagtgtggcagaaaaggagtttttacatactgtacacaaaacagacagcatatatttataggtacagtattactgtttccaaacttgcatgtatatttacagaaggctgagtttgtttactcaaacagaagtttgtgaaatttgtgtgcttaatcctcaagacctacacacaattagaatcagcatttcatgtggtctttttaaatgtggctttaatacttggttgtagaggagaatgttaaccgtaaggcttggcttactttgtaaatttaacaaaacaacccaggaaaaacgttttaattggggcacacttgttatcatttaacaattgtcaaatgctgacatgtgctagccattgtgcagacgcaaaaagatacaatctctaccctcaggaagcttaggatgctaaatcgtgctttaaaaaaaaggtttcaatctctttccaagagaggcagttaaggaatgatgtgatttatattaaaagagatttctccctcaactgtagccaatccactttaaaaggttaactactagcattagctctcattaaccacacaattgcatttataattaaggtaacagcaactcttccacaaaaatggaaaatgtctagaattgtggataaatattgcagtgcatggaagccaataatcatggcttgagaatttatcaccttcagttacaaaaagtgcagtaaacagaaacatttgctctacatttataaattgctcaaaaatctttgctaaagatcttacaaattcagtaatattacagaacaattctaatcaatatttaataaggttaactacatccttagttagatatttgataaactttgcttttcaataatgccaatagatcttgggagaatgggtagaaaggcttaattaagctacttattaaataactttgaaaatgaaggtccttcactcagttcatggaactggttgaggtcatactgaaacagaacatcccatgtcgaatttgctttatggcccatgttatggcagaggacgtctccatccttctcatgactcaggtaggaggggaaaggtttattctgccatcaagccatctaggatattttatgtaaatgcccattatctataataggagctaagaatacaactgtgttaggtgccagtaatacaattccttaataagaaaaaaaagtatattactccattaaacaagtttctttaggatcttgaaggcctggcaaattatttttcagcttaggagatatgctgtaaagccaagtagcaaacataaagtaaatgctaataagtttccatatagccatatttataaacaaattcaccctatagatgtcaaatatccatactaaggaagtaattttatcctaattaaatacactctagaataatttatataatgatattatgtatttaaagagaaaagcatgtcccaaatccagcactctgatacagctgccagttgggcataggtgagatatatatatatatgtatatatatacaaatatatagttatactcagtgaaattaacaagacccaaaggtggtattgtctaggaataaaagggataatttttgttgttcacaaaagtaacttgtctagcaccacacatcagaaaaacacaaaaatagcacactctagttctaaacagctatgtctaaaatagattatatagtaaaaccggtattatacagcatattgtggatttgataaacagataaatatttgcactgagtaggctgtttataatataacattttcttatctatacagaatgaaagccaaaaagttaactgtatagagatgtgcagaacaacattaaatattatgactcaaaagcaggg

SEQ ID NO: 287533 - DNA, 774 bp, Homo sapiens
ttttccattagaagctgaagttttattataggataacagtacataaagcacatctaaaattgatgtgttcaatgcacttttaataaaggtaatgtaatattaaaggtacagtttctaagtacaatataacaacattcatattagaatgaaaattggagtatttaaaagacaacattaaatctctcttttttgtacagcttgtatttacaaaatgaatcaaaatattttttttttaaattcaggactcaataaaataaacagctggaaataagcagactagtgtaagagtgaattgaaaagaaaacccaaggtcacatctcccaagaagcagtaatgttccagcaataagaaaaggacagttttttgtcttttgcatggtgagccttatatgaattacatcaattttgtcaccaatatccatcatcagaacattttgattctacataacacattgcaaatggtcacagcaatcaagactatatccatagatgtcccagaaataatatctgactatacagagcagcattaccaagccaccaagaagtctgcctagtaatgacaatgataacaacagctaacacttatcaacagagcagaggaacagagccacagataactgaaaaccactttggcactgaggaggtatgcagacaagatctggaagggaatctagaaaaatggcaactttggaataatagataccttttgttttcttatcgcttttatttttgtcatgataaatattaagagtaaaaagaaaattcacattgtttg

SEQ ID NO: 287534 - DNA, 1031 bp, Homo sapiens
ttttccattagaagctgaagttttattataggataacagtacataaagcacatctaaaattgatgtgttcaatgcacttttaataaaggtaatgtaatattaaaggtacagtttctaagtacaatataacaacattcatattagaatgaaaattggagtatttaaaagacaacattaaatctctcttttttgtacagcttgtatttacaaaatgaatcaaaatattttttttttaaattcaggactcaataaaataaacagctggaaataagcagactagtgtaagagtgaattgaaaagaaaacccaaggtcacatctcccaagaagcagtaatgttccagcaataagaaaaggacagttttttgtcttttgcatggtgagccttatatgaattacatcaattttgtcaccaatatccatcatcagaacattttgattctacataacacattgcaaatggtcacagcaatcaagactatatccatagatgtcccagaaataatatctgactatacagagcagcattaccaagccaccaagaagtctgcctagtaatgacaatgataacaacagctaacacttaggatttgatttaggacaaattgttatttggatggatgcttgtctattgagagagtaattgttaaactaaaggaaactggtcacaaatactttagcaatggctataaatgaccagtgggccaaggattttgagatcgtgagagacttctccgggaatgttgtcattcatttcactccagtgtggctcttttcctccatctgcgctcacttttctaggagaactatggccactatggagaatatgaaaacattgctgaaggaggtgaaagccatttcagaagaagagttatatattagcttttggcagtgacagcgttatgggcacggacattcagcctttccagttgactgctttgaaggggcaatgttcacgtggaagtatacctcctagtacgtttgctaaaataaaatcagcttcattacctaataacataaatgactttgggag

SEQ ID NO: 287535 - DNA, 672 bp, Homo sapiens
gtagagacagagtcttggtgtgttgctcaggctggtcttgaactcttgtgctcacatcttcctctcaactcagcctcccaaactgctggggctacaggtgtgagccactgtgcccagcctatatgtgcttcttatgtatatcatagattgtggccttactctatattagttcttgcattgctatttagctttccctacacaggcctcatctctacaactagaccataaactgcttgagggaaagatgtggtcttctatgtctttggatcccttacagtgcttacatagtgcttggtcccaagggagtgctcatagtattcttttttattggcagattctacataacacattgcaaatggtcacagcaatcaagactatatccatagatgtcccagaaataatatctgactatacagagcagcattaccaagccaccaagaagtctgcctagtaatgacaatgataacaacagctaacacttatcaacagagcagaggaacagagccacagataactgaaaaccactttggcactgaggaggtatgcagacaagatctggaagggaatctagaaaaatggcaactttggaataatagataccttttgttttcttatcgcttttatttttgtcatgataaatattaagagtaaaaagaaaattcacattgtttg

SEQ ID NO: 287536 - DNA, 1056 bp, Homo sapiens
cgtcttgacgggctgctcccctcctttcctcccgccacaagcgctcgctgtggttctggcagcgaagtgcgagactgggctcgccaggcggaagtggttggagactgcgtgttttcctagaaagtcctcgaccttcgtcggggagaggaggggagtgataaattggaaggcggacaagcgacaagtgcggtactggaaagacccaaacatacttggttgtgacctcagaaaataaacagctggaaataagcagactagtgtaagagtgaattgaaaagaaaacccaaggtcacatctcccaagaagcagtaatgttccagcaataagaaaaggacagttttttgtcttttgcatggtgagccttatatgaattacatcaattttgtcaccaatatccatcatcagaacattttgtggcactgtggctcgaaccaatgtccagcttccacactatctgcttggaagaggattacccttatttggaagtctcagttttgaggatttggggaaagcaggcacgcaagcagatacaccttattctctacagcatcatttatacctcaactaagtcagctgaacaaatgcctgctgaaaagttctgggagtggcatagctaagaaccagaaaggcgatctttcttttggattaagtcaacagagtcatacccacaaggagaactatcaaatatcagatgcgagaggtgaagtgcggttataagattctacataacacattgcaaatggtcacagcaatcaagactatatccatagatgtcccagaaataatatctgactatacagagcagcattaccaagccaccaagaagtctgcctagtaatgacaatgataacaacagctaacacttatcaacagagcagaggaacagagccacagataactgaaaaccactttggcactgaggaggtatgcagacaagatctggaagggaatctagaaaaatggcaactttggaataatagataccttttgttttcttatcgcttttatttttgtcatgataaatattaagagtaaaaagaaaattcacattgtttg

SEQ ID NO: 287537 - DNA, 1504 bp, Homo sapiens
agttcccagctgtccgaaaggtcttcggaacttcggctctaaagcgttcctcagcgccatccgcccggaaacacgagcgacagagaaaaggtccgcgaggccggcagactccagagtggctgggtccgagcgcggggcgggttgccgaagggcctcggcctgggctgcgtgctggagagcggggacggggccgactcaccagaggctgcagcaacaggtccactttgctctccagtctctttctccgacaccgctgaggcggtttcccaccgacttcctttccatacagcaccggcaggcaccggggtgaagggtcataaaaatggcgctggccgctcgtttgctaccccagttcctgcactctcggtcgctgccctgcggggccgtccgactccggactcctgctgtggccgaggtgaggctgccgtcggccacactttgctacttctgccgctgtcgcctcggcttgggagcggcgttatttccacgaagcgctagggccttggcagcctcggcgctacctgcccagggctcccggtggccagtgctcagcagcccgggactccccgcagccttcgcttctttccctgcctgccctcagcgcagctacagcacggaggagaagccccagcagcaccagaaaaccaagatgatcgtcctgggattctccaaccccatcaactgggttaggactcgaattaaggccttccttatctgggcctatttcgacaaagagttcagcatcacagagttctccgagggagcgaagcaggcttttgctcatgtatccaagttgctgtcacagtgtaaatttgatctgttggaagaacttgtggccaaagaggtgctacatgcattgaaagaaaaggttacttcactacctgacaaccataaaaatgcccttgctgctaacatagatgaaattgtatttacatcaacaggagacatctccatttactatgatgagaaaggaaggaagtttgttaacatcctgatgtgcttttggtatctaaccagtgccaacatccccagtgaaactttaagaggagccagtgtattccaggttaagttggggaatcagaatgtggaaactaaacaacttcttagtgcaagctatgagtttcagagggagttcacacaaggagtaaagcctgactggaccattgcacggattgaacactcaaaattattagaataattttcttggaaaaatcagcttatggactttagcagttgctgtgaaaaactaaggaagaaaaattttggggtcatttgatcttcacttaatctaagtctgtgaattacttttatattattttgaaatactccttgcagtatattggcatgatacagtaaaagcattttccacagattgttatcaccttctttaaaagaagtcaaaatttaaaaaatacaatagcacgttgttggtgtcatattcaataacatttccaatgctacatataattttatagacataataaagaaggtattgaaaaaacta

SEQ ID NO: 287538 - DNA, 702 bp, Homo sapiens
ttgtggtcaatcgacgtggtacctgcattgatcgaaaaggtaactcccaactagctgaccagaacataaaaatgccctggtcatgatacacataacatcaaagtggccactaaagcttgcaagcgagcgccaacatctccattaactatctatgacgagaaggcacagtgaaggaagtttgttaacatcctgatgtgcttttggtatctaaccagtgccaacatccccagtgaaactttaagaggagccagtgtattccaggttaagttggggaatcagaatgtggaaactaaacaacttcttagtgcaagctatgagtttcagagggagttcacacaaggagtaaagcctgactggaccattgcacggattgaacactcaaaattattagaataattttcttggaaaaatcagcttatggactttagcagttgctgtgaaaaactaaggaagaaaaattttggggtcatttgatcttcacttaatctaagtctgtgaattacttttatattattttgaaatactccttgcagtatattggcatgatacagtaaaagcattttccacagattgttatcaccttctttaaaagaagtcaaaatttaaaaaatacaatagcacgttgttggtgtcatattcaataacatttccaatgctacatataattttatagacataataaagaaggtattgaaaaaacta

SEQ ID NO: 287539 - DNA, 285 bp, Homo sapiens
gctttctagaggatcccagctatgcagtttcagagggagttcacacaaggagtaaagcctgactggaccattgcacggattgaacactcaaaattattagaataattttcttggaaaaatcagcttatggactttagcagttgctgtgaaaaactaaggaagaaaaattttggggtcatttgatcttcacttaatctaagtctgtgaattacttttatattattttgaaatactccttgcagtatattggcatgaaaggcctcgacatgaagggtaccgagctcg

SEQ ID NO: 287540 - DNA, 1525 bp, Homo sapiens
agttcccagctgtccgaaaggtcttcggaacttcggctctaaagcgttcctcagcgccatccgcccggaaacacgagcgacagagaaaaggtccgcgaggccggcagactccagagtggctgggtccgagcgcggggcgggttgccgaagggcctcggcctgggctgcgtgctggagagcggggacggggccgactcaccagaggctgcagcaacaggtccactttgctctccagtctctttctccgacaccgctgaggcggtttcccaccgacttcctttccatacagcaccggcaggcaccggggtgaagggtcataaaaatggcgctggccgctcgtttgctaccccagttcctgcactctcggtcgctgccctgcggggccgtccgactccggactcctgctgtggccgaggtgaggctgccgtcggccacactttgctacttctgccgctgtcgcctcggcttgggagcggcgttatttccacgaagcgctagggccttggcagcctcggcgctacctgcccagggctcccggtggccagtgctcagcagcccgggactccccgcagccttcgcttctttccctgcctgccctcagcgcagctacagcacggaggagaagccccagcagcaccagaaaaccaagatgatcgtcctgggattctccaaccccatcaactgggttaggactcgaattaaggccttccttatctgggcctatttcgacaaagagttcagcatcacagagttctccgagggagcgaagcaggcttttgctcatgtatccaagttgctgtcacagtgtaaatttgatctgttggaagaacttgtggccaaagaggtgctacatgcattgaaagaaaaggttacttcactacctgacaaccataaaaatgcccttgctgctaacatagatgaaattgtatttacatcaacaggagacatctccatttactatgatgagaaaggaaggaagtttgttaacatcctgatgtgcttttggtatctaaccagtgccaacatccccagtgaaactttaagaggagccagtgtattccaggttaagttggggaatcagaatgtggaaactaaacaacttcttagtgcaagctatgagtttcagagggagttcacacaaggagtaaagcctgactggaccattgcacggattgaacactcaaaattattagaataattttcttggaaaaatcagcttatggactttagcagttgctgtgaaaaactaaggaagaaaaattttggggtcatttgatcttcacttaatctaagtctgtgaattacttttatattattttgaaatactccttgcagtatattggcatgatacagtaaaagcattttccacagattgttatcaccttctttaaaagaagtcaaaatttaaaaaatacaatagcacgttgttggtgtcatattcaataacatttccaatgctacatataattttatagacataataaagaaggtattgaaaaaactaaaaaaaaaaaaccagaaaaaa

SEQ ID NO: 287541 - DNA, 1211 bp, Homo sapiens
  misc_feature (6)..(6): n is a, c, g, or t
agaggncccccgacgagttgtccgagttacacaaatctgcttcaaaataacaaaccccaaaaatgacctaagaaataaaatgtattctgttttactaaggtaaaagagaattatatcctcattttttttttgctcttcttaaaagaaatgtgtttttttttaaattttgctttatttgtaattacccaaaatattctatatatttaaatacttaatttaaatctactgaattgcctgttaagaaataatttttaaagagcactgtcgtcaatactaaactttatcttttctgatgtttcttactaagactatgggtacttcataaacattgttattttcaagattgatttaatgtatgtaaactaaattccactatttattcctaaattggtaacagtgctatttgaaaaatagctttttgcctgtatcctaggttatgtatttaaagtgctgtttgcatcaccagagtccagtttatctgtcctcatattaggcatgtgttatagctagtatttaacacatactagctatatgtgttatttatataacacatatatccaagtttctcttaggggctggtagatgttgaatatagattagtccattaaaaatacttacattacttgagaatgtacttcaattttgtgggtatatttattgtgattgaatgggtaggttaaacttttttttgttttgattttgatttaatattaaccattatcttgttgccaaaaattcttctaaatatacacttgcaaattacatagttatctaacacatacttggactgatgtaagatttacattatttgcaatgtctttcctaggtttcagagggagttcacacaaggagtaaagcctgactggaccattgcacggattgaacactcaaaattattagaataattttcttggaaaaatcagcttatggactttagcagttgctgtgaaaaactaaggaagaaaaattttggggtcatttgatcttcacttaatctaagtctgtgaattacttttatattattttgaaatactccttgcagtatattggcatgatacagtaaaagcattttccacagattgttatcaccttctttaaaagaagtcaaaatttaaaaaatacaatagcacgttgttggtgtcatattcaataacatttccaatgctacatataattttatagacataataaagaaggtattgaaaaaacta

SEQ ID NO: 287542 - DNA, 1356 bp, Homo sapiens
agttcccagctgtccgaaaggtcttcggaacttcggctctaaagcgttcctcagcgccatccgcccggaaacacgagcgacagagaaaaggtccgcgaggccggcagactccagagtggctgggtccgagcgcggggcgggttgccgaagggcctcggcctgggctgcgtgctggagagcggggacggggccgactcaccagaggctgcagcaacaggtccactttgctctccagtctctttctccgacaccgctgaggcggtttcccaccgacttcctttccatacagcaccggcaggcaccggggtgaagggtcataaaaatggcgctggccgctcgtttgctaccccagttcctgcactctcggtcgctgccctgcggggccgtccgactccggactcctgctgtggccgaggtgaggctgccgtcggccacactttgctacttctgccgctgtcgcctcggcttgggagcggcgttatttccacgaagcgctagggccttggcagcctcggcgctacctgcccagggctcccggtggccagtgctcagcagcccgggactccccgcagccttcgcttctttccctgcctgccctcagcgcagctacagcacggaggagaagccccagcagcaccagaaaaccaagatgatcgtcctgggattctccaaccccatcaactgggttaggactcgaattaaggccttccttatctgggcctatttcgacaaagagttcagcatcacagagttctccgagggagcgaagcaggcttttgctcatgtatccaagttgctgtcacagtgtaaatttgatctgttggaagaacttgtggccaaagaggtgctacatgcattgaaagaaaaggttacttcactacctgacaaccataaaaatgcccttgctgctaacatagatgaaattgtatttacatcaacaggagacatctccatttactatgatgagaaaggtttcagagggagttcacacaaggagtaaagcctgactggaccattgcacggattgaacactcaaaattattagaataattttcttggaaaaatcagcttatggactttagcagttgctgtgaaaaactaaggaagaaaaattttggggtcatttgatcttcacttaatctaagtctgtgaattacttttatattattttgaaatactccttgcagtatattggcatgatacagtaaaagcattttccacagattgttatcaccttctttaaaagaagtcaaaatttaaaaaatacaatagcacgttgttggtgtcatattcaataacatttccaatgctacatataattttatagacataataaagaaggtattgaaaaaacta

SEQ ID NO: 287543 - DNA, 448 bp, Homo sapiens
agacgggtgatttctgcatttccatctgagatggagtgaatatgatgattctgtgaaggtttattgcaacatgactttttcagcacagcaacaggaaaatttgactctgggtctgttctacaaaattaaagctttctcagcacaaaaaacagcatagactgtgagtgatggcggccatcttggttcatgtgtaaagactgaatttcagtgactaccaacggctatttcttagaatgtggcacttaccctgggttcaggctgtggtccttctactgcccatgaatgaattgctccatctgaacattcgggaacaggctcaaagccagctgcactacgaggagcacctccacaatcacaacagatcatcaaaaatgggaccactggtggtggagggatagtaatactagagttagcactgggtgcaaataaaaaacaaaacaacctgatt

SEQ ID NO: 287544 - DNA, 791 bp, Homo sapiens
tcctcatcgtctcttgccgctgccatgaaaggagtgctttttgcctcccaccatgattctgaggcctccccagccatgtagaattagccagcctgtttttgatgaagagcaactgtactggagagaaagcctgtattcatattcatcgtcatcaggcaaatcgaggagctgacttgcttaggatcatctgctggttgaatccatggatgcagaaccccagattcggagggctgaatgtactttcgataggttcctgagcagcagtgattatagtcacagcagactggacagtttggtgagcaagttcaggggctggcttagtgattcatagttctttcttcctcctcccccagcagttttgtttcagcagtgatttggtcaaatgtgaaccacaaaccagcagcaaaagcattttctaggaacttgttaaaactggaaggcccaaggttgcactcaggcttactgagtcagtcactccaagtggaccccatccctaaaccttgagactcactgctcctcttttgatctgggagagaaacagaaaaaagaaggaaaaaaaatccccaatgtgagtatgctggaaagtaaatttgaatagctttttatattgggtacttactgtgggtaatttacaaactattggaaggaaccacaaattcaaacacagccaaatttaaggtctctttagcagaaatcaatcttacatcatggcagttctcccattctccagtctttcacttgatagatcacttcctcattaggatgacctacagcaattctacatgaactgc

SEQ ID NO: 287545 - DNA, 684 bp, Homo sapiens
tgcgatgtaaatagttgttatactctattattttatttgtaatagttatcttttatttttttgtcttgaatattttcagtctgctggttgaatccatggatgcagaaccccagattcggagggctgaatgtactttcgataggttcctgagcagcagtgattatagtcacagcagactggacagtttggtgagcaagttcaggggctggcttagtgattcatagttctttcttcctcctcccccagcagttttgtttcagcagtgatttggtcaaatgtgaaccacaaaccagcagcaaaagcattttctaggaacttgttaaaactggaaggcccaaggttgcactcaggcttactgagtcagtcactccaagtggaccccatccctaaaccttgagactcactgctcctcttttgatctgggagagaaacagaaaaaagaaggaaaaaaaatccccaatgtgagtatgctggaaagtaaatttgaatagctttttatattgggtacttactgtgggtaatttacaaactattggaaggaaccacaaattcaaacacagccaaatttaaggtctctttagcagaaatcaatcttacatcatggcagttctcccattctccagtctttcacttgatagatcacttcctcattaggatgacctacagcaattctacatgaactgc

SEQ ID NO: 287546 - DNA, 1101 bp, Homo sapiens
tttctatgcctgacgtggagctaaatttgaaaagtcccaaagtcaaaggagacttagatattgcaggtcccaatttagaaggtgactttaaaggccccaaagtggatattaaggcaccagaagtcaatcttaatgcacctgatgtggatgttcatggtccagactggaatctgaaaatgcccaagatgaaaatgcccaaattcagtgtgtctggcttaaaagcagaagggccagatgtagctgtggatctaccaaaaggagacatcaacatagagggcccaagtatgaacattgagggcccagatctcaatgtggaaggtccggagggaggcttgaaaggtcccaaattcaagatgcctgacatgaatatcaaagctcccaagatctccatgcctgacattgacttaaacttgaaaggccccaaggtgaaaggtgatgtggatatttctcttcccaaacttgaaggggatctgaaagggccagaggttgatatcaaaggccctaaagtggacatcaatgccccagatgtggatgttcatggtccagactggcatctgaagatgcccaaagtgaaaatgcccaagttcagcatgcctggcttcaaaggagaaggccctgaagtcgatgttaccctccctaaagctgacattgacatttctggtcccaatgtagacgttgatgttccagacgtgaatattgaaggtccagatgcaaagctgaagggccccaagttcaagatgcctgagatgaacatcaaagcccccaagatctccatgcctgactttgacctgaacttgaagggacccaaaatgaagggtgatgtggttgtgtctttgcccaaagtggaaggtgatctaaaaggccctgaggtggacatcaagggccccaaagtggacattgacactcctgacattaacatcgaaggctcagagggtaaattcaagggacccaaatttaagataccagagatgcacctgaaggctcccaaaatatcgatgcctgacattgatttaaacctgaagggccccaaagtcaagggcgatgtggatgtttctctgcccaaaatggaaggtgacctcaagggtcctgaagttgacatca

SEQ ID NO: 287547 - DNA, 5819 bp, Homo sapiens
  misc_feature (485)..(485): n is a, c, g, or t
  misc_feature (494)..(494): n is a, c, g, or t
  misc_feature (497)..(497): n is a, c, g, or t
  misc_feature (499)..(499): n is a, c, g, or t
  misc_feature (877)..(877): n is a, c, g, or t
  misc_feature (1292)..(1292): n is a, c, g, or t
  misc_feature (3799)..(3799): n is a, c, g, or t
gagcggcgccctgctctggccgttgctcccgctcctgctcctgctgctgtcggcgcgggacggcgtgcgcgccgcgcagcctcaggccccgggttacttgattgcagctccctctgtttttcgcgcgggcgtggaggaagtcatcagcgtgaccatctttaactctccaagggaagtcacggtccaggctcagctggtggcccagggtgagccggtggtgcagagccagggagccatcctggataaagggacaatcaaactcaaggtgcccacgggcctccggggccaagcgcttctgaaagtgtggggccgcggctggcaggcggaggaggggcccctctttcacaaccagacctcggtgaccgtggacggccggggcgcttctgtattcatccagacggacaagcctgtgtacagaccccagcaccgagtgctcataagcatcttcaccgtctctccaaatctgaggcctgtcaacgagaagntggaagctncancnggacccccgaggctctcggatgatagagtggagacacttaaagccgttctgctgcggcatcaccaacatgagcttccccttgtccgaccagcctgtgttgggagaatggttcatttttgttgaaatgcaaggccacgcgtacaacaagtcttttgaagttcagaagtatgtgttgcccaagtttgagcttctgattgacccgccccggtatatccaagacctggacgcctgtgagacaggcactgtgcgggccaggtatacctttgggaaacctgtggctggtgccttaacgatcaacatgactgttaatggtgtagggtactacagccacgaggtgggacgccctgtcctcagaacaaccaagatcctcggctcccnggacttcgacatctgcgtgagggacatgatcccagcggacgtccctgagcacttccggggcagggtcagcatctgggccatggtgaccagtgtggacgggagccagcaggtcgcgttcgatgactccacccccgtgcagaggcagctggtggacatccggtactccaaggacacgaggaagcagttcaagccgggcctggcctacgtggggaaggtggagctatcctaccccgatggcagcccagctgagggggtgacggtccagattaaggcagagctgacaccaaaggataacatctacaccagtgaagttgtgtcccagcgtggactagtggggtttgaaatcccctccatccccacgtcagcccagcacgtgtggctggagaccaaggtgatggcactgaacgggaagccngtgggggctcagtacctgcccagctacctctccctcggcagctggtactcccccagccagtgctacctgcagctgcagccaccctcccacccactgcaggttggggaagaagcctatttttctgtgaagtccacatgtccctgcaactttaccctgtactacgaggtggctgcacggggcaatattgtgctatcgggccagcagcctgcccacaccacccagcagcgaagcaagcgggcggcccctgccctggagaaaccgattcgtttaacacacctttctgagacagagcccccaccagccccagaagctgaggtcgacgtgtgtgtgacctctcttcatctggccgtgacccccagcatggtcccccttggtcgcctgctggtcttctacgtcagggagaatggagaaggggtcgccgacagccttcagtttgcagtcgagaccttcttcgaaaaccaggtttcagtgacgtattcagcaaatgagacccaacctggggaggttgtcgacctgcggatcagggctgcaaggggcagctgtgtgtgcgtcgccgcagttgataagagtgtctacctgctcaggtctgggttccggctgactcctgcccaggttttccaggaactggaagattatgatgtttctgattcctttggcgtgtccagggaggatggtcctttttggtgggctgggctgacggcacaacgacgccggcgctcctctgtcttcccgtggccttggggcatcaccaaggactctgggtttgccttcaccgaaacgggactggtggtgatgaccgaccgagtgagcctgaaccaccggcaggacggtggcctctacaccgatgaggctgtccccgctttccagccccacacagggagcctggtggcagtggctccttccaggcacccccccagaacagagaagagaaaaaggactttcttccccgaaacatggatttggcattgtctcaacatcagtgacccatctggtgaggggacactcagtgtgaaggtcccggactccatcaccagctgggtgggtgaggccgtggccctgtccacctctcagggcttaggcatcgccgagccctccctgctgaagaccttcaagcccttcttcgtggacttcatgctccccgctctcatcatccgtggggagcaggtcaagatcccgctcagtgtctacaactacatgggcacctgcgctgaggtgtacatgaagctctcggttcccaagggcatccagtttgttgggcatcctggcaaacgccatgtgaccaagaagatgtgtgtggcccccggggaggctgagcccatctgggtcgttctgtccttcagcgacctgggactcaacaacatcacggccaaagcccttgcttacggagacacaaattgctgccgggatgggaggtccagcaaacaccctgaggagaatcacgccgacaggagggtccccatcggggtggatcacgtcaggcgcagtgtgatggttgaggcggaaggagtcccccgggcgtacacctacagcgcattcttctgtcccagtgagagagtccacatctccacccccaacaagtatgagttccagtatgtgcagcggccactgcgcctcacccgctttgatgtggctgtgcgagctcacaatgatgcccgtgtggccttgtcttctgggccccaggacacagcaggcatgatcgagatcgtcctgggggggcatcagaacaccaggtcatggatctccaccagcaagatgggagagcccgtggccagtgcacacacggccaagatcctctcctgggatgaattcagaacattctggatcagctggcgtggtggccttatccaggttggccatggtccagagccatccaatgagtctgtcattgtggcctggaccctcccgaggccaccagaggtccagttcattggcttttccaccggctggggctccatgggtgaattccgaatctggaggaagatggaggtggacgagagctacagcgaggccttcaccctgggggtcccacacggcgccatccctgggtctgagcgagccaccgcctccatcatcggggacgtcatggggccaaccctgaaccacctcaacaacctcctgcggctgccgtttggctgtggagagcagaacatgatccactttgcacccaacgtctttgtcttgaagtatcttcagaaaacccagcagctcagccctgaggtggagagagagaccaccgactacctagtacaaggctaccagcgccagctgacctacaagcgccaggatggctcctacagcgcgtttggggagcgggacgcatcggggagcatgtggctcacagcctttgtcctgaagtccttcgcacaggctcgcagctttatcttcgtggacccccgggagctggctgccgccaagagctggatcatccagcagcagcaggccgatggctccttcctggccgtgggcagggtcctgaacaaggacatccagggtgggatccacggcantgtcccgctgacagcctacgtggtggttgctctcctggaaacaggcacagcctcagaggaggagagaggctccactgacaaagcgaggcacttcctggagtctgctgcgcccctggccatggacccttatagctgtgccctgactacctacgcgctgaccctgctccgcagcccggcagcccctgaggcactgcgcaagctccgtagcctggccatcatgcgagatggggtcacccactggagcctgtcaaattcctgggacgtggacaagggcacattcttgagcttcagtgacagggtctctcagtcagtggtctcggccgaggtggaaatgacagcctacgcccttctgacctacactctgctgggtgacgtggctgccgccctgcctgtggtgaagtggctgtcccagcagcgaaatgcacttgggggcttctcctccactcaggacacctgcgtggctctgcaggccttggctgaatatgccatcttgtcctatgctggaggcatcaacctcactgtctccctggcctccaccaacctggactaccaggaaaccttcgagctgcacaggaccaaccagaaggttctgcagacagcagcgatccccagcctccccacggggctgtttgtgagtgccaagggggacggctgctgcctgatgcagattgatgtcacctacaatgtgcctgacccggtggccaagccagctttccagctgctcgtaagcctccaggagcctgaggcccagggacgcccgccccccatgcctgcctccgcagctgagggttcccgaggagactggcccccagctgacgatgatgacccagcggccgatcagcatcaccaggaatacaaggtgatgctggaggtgtgcaccaggtggctgcatgcagggtcttccaatatggctgtcctggaggtgcccctgctgtcaggcttccgggcagacatcgagagcctggagcagctgctccttgacaagcacatggggatgaagaggtatgaagtggctggacgccgagtgctcttctactttgatgagatccccagccggtgcctgacgtgcgtgcggttccgtgctctccgggagtgcgtggtgggcaggacgtcggcgctgccagtctccgtgtacgactactacgaacccgccttcgaggccactcgcttctacaacgtcagcacccacagcccactcgcccgggaactgtgcgccggacccgcgtgcaacgaagtggagcgcgcccctgcccggggcccgggctggttccccggcgagtcgggccctgccgtggcccctgaggagggggcggcgatcgcgcgatgcggctgcgaccacgactgcggcgcccaggggaacccggtgtgcggctccgacggggtggtctacgccagcgcctgccgcctgcgggaggccgcctgccgccaggccgcgcccctggagcccgcgcctcccagctgctgcgccctcgagcagcggctgccggcctcgtcgtcctccacctacggggatgacctggcttctgtggccccggggcctttacagcaggacgtgaagctgaatggagccggccttgaggtggaggactcagaccctgagcctgaaggggaggcggaggacagggtcacagccgggcctcggcctcctgtgagcagcgggaacctggaaagcagcacccagagcgccagcccgttccacagatggggccagactccggcccctcagagacatagtggccgggtggtgggggcccacaggccagggcttctgagccctgtcttcgtctacagcccagcctttcagagtggtggggaggagggtttatggatgtcaaacacctgcaccttgagataatcctacaaccacatgcagttgtgggaccgcagtttggtcctggggaccattcatacccacacacccagcttgtgcctgtggttaacatctcagaaaactctggtaaatgatcactccaggatattgacacgaatacacgttactgatcttactcacaaattctgg

SEQ ID NO: 287548 - DNA, 532 bp, Homo sapiens
tctgaggctgccctggccggtgggttccccacccctggcaccctacaagcgacaggccctgtggctccttcctcagcccgaggccccgtgcccacttgctgtagaggatgttgtaagataaaacctcatctccagggtcacagccgggcctcggcctcctgtgagcagcgggaacctggaaagcagcacccagagcgccagcccgttccacagatggggccagactccggcccctcagagacatagtggccgggtggtgggggcccacaggccagggcttctgagccctgtcttcgtctacagcccagcctttcagagtggtggggaggagggtttatggatgtcaaacacctgcaccttgagataatcctacaaccacatgcagttgtgggaccgcagtttggtcctggggaccattcatacccacacacccagcttgtgcctgtggttaacatctcagaaaactctggtaaatgatcactccaggatattgacacgaatacacgttactgatcttactcacaaattctgg

SEQ ID NO: 287549 - DNA, 1146 bp, Homo sapiens
cggcaggggacggggctgttgttgcagggcggcccagacaggacgccctgtctcctttctctcctacaaccgctttttaaaagtctgtttctgtttttgctggttccccggcgagtcgggccctgccgtggcccctgaggagggggcggcgatcgcgcgatgcggctgcgaccacgactgcggcgcccaggggaacccggtgtgcggctccgacggggtggtctacgccagcgcctgccgcctgcgggaggccgcctgccgccaggccgcgcccctggagcccgcgcctcccagctgctgcgccctcgcaggacgtgaagctgaatggagccggccttgaggtggaggactcagaccctgagcctgaaggggaggcggaggacagtcagagcggcttctcttcctaacggctgccctgctgagagcaggacgacaccatctggctgcatcctgtccctatcagcctgtgactctgtatggtgggtgggcagacctcagcccaggtgacacctgcctctaaatgaacccaaggaacagaatgacagagatctgcccgtccctaggatgagactcttgggacccaggtgtgggctcagcagtcaccggtgtggtgcaggggggacagctggaggtcccttgggagatcccccaccttcctagctacagctggagctccaagcaccccaaccccccagccttggagctgggcatcattttcctggggccacggcagctcccacagcctgacattctgttcccgggagaagaaacattcccagaaagcactcgtgtggccaaaagcctctttctgagcaaacacgatgtggactaaattagcaaaacatccagccggtgggcaacttcaaaacggaacaggctgcgtttctctgaaacacaaagccccggcctccctttggggcacccaggaccccaaattgccctaagactgtcccagctctcgcaccctctgccttcgccccccggggacctcgggctcacatcacaaggccctgcggggaagcagatggctctcagcaaatgcactttcagcttccggctgccggggctgggtgaccccggtgcttcctcaccgtgagttcctgatgtcctcgtgcccagaggaccagcccactcccagggccccca

SEQ ID NO: 287550 - DNA, 1010 bp, Homo sapiens
cggcaggggacggggctgttgttgcagggcggcccagacaggacgccctgtctcctttctctcctacaaccgctttttaaaagtctgtttctgtttttagcagcggctgccggcctcgtcgtcctccacctacggggatgacctggcttctgtggccccggggcctttacagcaggacgtgaagctgaatggagccggccttgaggtggaggactcagaccctgagcctgaaggggaggcggaggacagtcagagcggcttctcttcctaacggctgccctgctgagagcaggacgacaccatctggctgcatcctgtccctatcagcctgtgactctgtatggtgggtgggcagacctcagcccaggtgacacctgcctctaaatgaacccaaggaacagaatgacagagatctgcccgtccctaggatgagactcttgggacccaggtgtgggctcagcagtcaccggtgtggtgcaggggggacagctggaggtcccttgggagatcccccaccttcctagctacagctggagctccaagcaccccaaccccccagccttggagctgggcatcattttcctggggccacggcagctcccacagcctgacattctgttcccgggagaagaaacattcccagaaagcactcgtgtggccaaaagcctctttctgagcaaacacgatgtggactaaattagcaaaacatccagccggtgggcaacttcaaaacggaacaggctgcgtttctctgaaacacaaagccccggcctccctttggggcacccaggaccccaaattgccctaagactgtcccagctctcgcaccctctgccttcgccccccggggacctcgggctcacatcacaaggccctgcggggaagcagatggctctcagcaaatgcactttcagcttccggctgccggggctgggtgaccccggtgcttcctcaccgtgagttcctgatgtcctcgtgcccagaggaccagcccactcccagggccccca

SEQ ID NO: 287551 - DNA, 440 bp, Homo sapiens
gaaatagatgcagcccacaaaatccccagggctgctcagcagagtggtgtggatgggtacagtgtcaacctcggtggtggccaggtgctgtggtcctcagacaccttgcaccggtgtcagggctcctgaggccaccttagggacagaagccagcccctcctctctgcttgctttcttcagtgttgcccaagtttgagcttctgattgacccgccccggtatatccaagacctggacgcctgtgagacaggcactgtgcgggccaggtatacctttgggaaacctgtggctggtgccttaacgatcaacatgactgttaatggtgtagggtactacagccacgaggtgggacgccctgtcctcagaacaaccaaggtgagaaacagggaccccttctaccccctgacccaacccccaggttcacctccaccagcacacatt

SEQ ID NO: 287552 - DNA, 5284 bp, Homo sapiens
  misc_feature (416)..(416): n is a, c, g, or t
  misc_feature (831)..(831): n is a, c, g, or t
  misc_feature (3338)..(3338): n is a, c, g, or t
gcttaagagagaagagaaaaaggactttcttccccgaaacatggatttggcattgtctcaacatcaggtacattaagatttcttttctgctgcggcatcaccaacatgagcttccccttgtccgaccagcctgtgttgggagaatggttcatttttgttgaaatgcaaggccacgcgtacaacaagtcttttgaagttcagaagtatgtgttgcccaagtttgagcttctgattgacccgccccggtatatccaagacctggacgcctgtgagacaggcactgtgcgggccaggtatacctttgggaaacctgtggctggtgccttaacgatcaacatgactgttaatggtgtagggtactacagccacgaggtgggacgccctgtcctcagaacaaccaagatcctcggctcccnggacttcgacatctgcgtgagggacatgatcccagcggacgtccctgagcacttccggggcagggtcagcatctgggccatggtgaccagtgtggacgggagccagcaggtcgcgttcgatgactccacccccgtgcagaggcagctggtggacatccggtactccaaggacacgaggaagcagttcaagccgggcctggcctacgtggggaaggtggagctatcctaccccgatggcagcccagctgagggggtgacggtccagattaaggcagagctgacaccaaaggataacatctacaccagtgaagttgtgtcccagcgtggactagtggggtttgaaatcccctccatccccacgtcagcccagcacgtgtggctggagaccaaggtgatggcactgaacgggaagccngtgggggctcagtacctgcccagctacctctccctcggcagctggtactcccccagccagtgctacctgcagctgcagccaccctcccacccactgcaggttggggaagaagcctatttttctgtgaagtccacatgtccctgcaactttaccctgtactacgaggtggctgcacggggcaatattgtgctatcgggccagcagcctgcccacaccacccagcagcgaagcaagcgggcggcccctgccctggagaaaccgattcgtttaacacacctttctgagacagagcccccaccagccccagaagctgaggtcgacgtgtgtgtgacctctcttcatctggccgtgacccccagcatggtcccccttggtcgcctgctggtcttctacgtcagggagaatggagaaggggtcgccgacagccttcagtttgcagtcgagaccttcttcgaaaaccaggtttcagtgacgtattcagcaaatgagacccaacctggggaggttgtcgacctgcggatcagggctgcaaggggcagctgtgtgtgcgtcgccgcagttgataagagtgtctacctgctcaggtctgggttccggctgactcctgcccaggttttccaggaactggaagattatgatgtttctgattcctttggcgtgtccagggaggatggtcctttttggtgggctgggctgacggcacaacgacgccggcgctcctctgtcttcccgtggccttggggcatcaccaaggactctgggtttgccttcaccgaaacgggactggtggtgatgaccgaccgagtgagcctgaaccaccggcaggacggtggcctctacaccgatgaggctgtccccgctttccagccccacacagggagcctggtggcagtggctccttccaggcacccccccagaacagagaagagaaaaaggactttcttccccgaaacatggatttggcattgtctcaacatcagtgacccatctggtgaggggacactcagtgtgaaggtcccggactccatcaccagctgggtgggtgaggccgtggccctgtccacctctcagggcttaggcatcgccgagccctccctgctgaagaccttcaagcccttcttcgtggacttcatgctccccgctctcatcatccgtggggagcaggtcaagatcccgctcagtgtctacaactacatgggcacctgcgctgaggtgtacatgaagctctcggttcccaagggcatccagtttgttgggcatcctggcaaacgccatgtgaccaagaagatgtgtgtggcccccggggaggctgagcccatctgggtcgttctgtccttcagcgacctgggactcaacaacatcacggccaaagcccttgcttacggagacacaaattgctgccgggatgggaggtccagcaaacaccctgaggagaatcacgccgacaggagggtccccatcggggtggatcacgtcaggcgcagtgtgatggttgaggcggaaggagtcccccgggcgtacacctacagcgcattcttctgtcccagtgagagagtccacatctccacccccaacaagtatgagttccagtatgtgcagcggccactgcgcctcacccgctttgatgtggctgtgcgagctcacaatgatgcccgtgtggccttgtcttctgggccccaggacacagcaggcatgatcgagatcgtcctgggggggcatcagaacaccaggtcatggatctccaccagcaagatgggagagcccgtggccagtgcacacacggccaagatcctctcctgggatgaattcagaacattctggatcagctggcgtggtggccttatccaggttggccatggtccagagccatccaatgagtctgtcattgtggcctggaccctcccgaggccaccagaggtccagttcattggcttttccaccggctggggctccatgggtgaattccgaatctggaggaagatggaggtggacgagagctacagcgaggccttcaccctgggggtcccacacggcgccatccctgggtctgagcgagccaccgcctccatcatcggggacgtcatggggccaaccctgaaccacctcaacaacctcctgcggctgccgtttggctgtggagagcagaacatgatccactttgcacccaacgtctttgtcttgaagtatcttcagaaaacccagcagctcagccctgaggtggagagagagaccaccgactacctagtacaaggctaccagcgccagctgacctacaagcgccaggatggctcctacagcgcgtttggggagcgggacgcatcggggagcatgtggctcacagcctttgtcctgaagtccttcgcacaggctcgcagctttatcttcgtggacccccgggagctggctgccgccaagagctggatcatccagcagcagcaggccgatggctccttcctggccgtgggcagggtcctgaacaaggacatccagggtgggatccacggcantgtcccgctgacagcctacgtggtggttgctctcctggaaacaggcacagcctcagaggaggagagaggctccactgacaaagcgaggcacttcctggagtctgctgcgcccctggccatggacccttatagctgtgccctgactacctacgcgctgaccctgctccgcagcccggcagcccctgaggcactgcgcaagctccgtagcctggccatcatgcgagatggggtcacccactggagcctgtcaaattcctgggacgtggacaagggcacattcttgagcttcagtgacagggtctctcagtcagtggtctcggccgaggtggaaatgacagcctacgcccttctgacctacactctgctgggtgacgtggctgccgccctgcctgtggtgaagtggctgtcccagcagcgaaatgcacttgggggcttctcctccactcaggacacctgcgtggctctgcaggccttggctgaatatgccatcttgtcctatgctggaggcatcaacctcactgtctccctggcctccaccaacctggactaccaggaaaccttcgagctgcacaggaccaaccagaaggttctgcagacagcagcgatccccagcctccccacggggctgtttgtgagtgccaagggggacggctgctgcctgatgcagattgatgtcacctacaatgtgcctgacccggtggccaagccagctttccagctgctcgtaagcctccaggagcctgaggcccagggacgcccgccccccatgcctgcctccgcagctgagggttcccgaggagactggcccccagctgacgatgatgacccagcggccgatcagcatcaccaggaatacaaggtgatgctggaggtgtgcaccaggtggctgcatgcagggtcttccaatatggctgtcctggaggtgcccctgctgtcaggcttccgggcagacatcgagagcctggagcagctgctccttgacaagcacatggggatgaagaggtatgaagtggctggacgccgagtgctcttctactttgatgagatccccagccggtgcctgacgtgcgtgcggttccgtgctctccgggagtgcgtggtgggcaggacgtcggcgctgccagtctccgtgtacgactactacgaacccgccttcgaggccactcgcttctacaacgtcagcacccacagcccactcgcccgggaactgtgcgccggacccgcgtgcaacgaagtggagcgcgcccctgcccggggcccgggctggttccccggcgagtcgggccctgccgtggcccctgaggagggggcggcgatcgcgcgatgcggctgcgaccacgactgcggcgcccaggggaacccggtgtgcggctccgacggggtggtctacgccagcgcctgccgcctgcgggaggccgcctgccgccaggccgcgcccctggagcccgcgcctcccagctgctgcgccctcgcaggacgtgaagctgaatggagccggccttgaggtggaggactcagaccctgagcctgaaggggaggcggaggacagggtcacagccgggcctcggcctcctgtgagcagcgggaacctggaaagcagcacccagagcgccagcccgttccacagatggggccagactccggcccctcagagacatagtggccgggtggtgggggcccacaggccagggcttctgagccctgtcttcgtctacagcccagcctttcagagtggtggggaggagggtttatggatgtcaaacacctgcaccttgagataatcctacaaccacatgcagttgtgggaccgcagtttggtcctggggaccattcatacccacacacccagcttgtgcctgtggttaacatctcagaaaactctggtaaatgatcactccaggatattgacacgaatacacgttactgatcttactcacaaattctgg

SEQ ID NO: 287553 - DNA, 3771 bp, Homo sapiens
  misc_feature (1825)..(1825): n is a, c, g, or t
cagtggccacagggtgattcattcccttatgcttctgggggctgtcagcatccacttccccaccaatggtttgggtgttgtctgttgcctaggaaacgggactggtggtgatgaccgaccgagtgagcctgaaccaccggcaggacggtggcctctacaccgatgaggctgtccccgctttccagccccacacagggagcctggtggcagtggctccttccaggcacccccccagaacagagaagagaaaaaggactttcttccccgaaacatggatttggcattgtctcaacatcagtgacccatctggtgaggggacactcagtgtgaaggtcccggactccatcaccagctgggtgggtgaggccgtggccctgtccacctctcagggcttaggcatcgccgagccctccctgctgaagaccttcaagcccttcttcgtggacttcatgctccccgctctcatcatccgtggggagcaggtcaagatcccgctcagtgtctacaactacatgggcacctgcgctgaggtgtacatgaagctctcggttcccaagggcatccagtttgttgggcatcctggcaaacgccatgtgaccaagaagatgtgtgtggcccccggggaggctgagcccatctgggtcgttctgtccttcagcgacctgggactcaacaacatcacggccaaagcccttgcttacggagacacaaattgctgccgggatgggaggtccagcaaacaccctgaggagaatcacgccgacaggagggtccccatcggggtggatcacgtcaggcgcagtgtgatggttgaggcggaaggagtcccccgggcgtacacctacagcgcattcttctgtcccagtgagagagtccacatctccacccccaacaagtatgagttccagtatgtgcagcggccactgcgcctcacccgctttgatgtggctgtgcgagctcacaatgatgcccgtgtggccttgtcttctgggccccaggacacagcaggcatgatcgagatcgtcctgggggggcatcagaacaccaggtcatggatctccaccagcaagatgggagagcccgtggccagtgcacacacggccaagatcctctcctgggatgaattcagaacattctggatcagctggcgtggtggccttatccaggttggccatggtccagagccatccaatgagtctgtcattgtggcctggaccctcccgaggccaccagaggtccagttcattggcttttccaccggctggggctccatgggtgaattccgaatctggaggaagatggaggtggacgagagctacagcgaggccttcaccctgggggtcccacacggcgccatccctgggtctgagcgagccaccgcctccatcatcggggacgtcatggggccaaccctgaaccacctcaacaacctcctgcggctgccgtttggctgtggagagcagaacatgatccactttgcacccaacgtctttgtcttgaagtatcttcagaaaacccagcagctcagccctgaggtggagagagagaccaccgactacctagtacaaggctaccagcgccagctgacctacaagcgccaggatggctcctacagcgcgtttggggagcgggacgcatcggggagcatgtggctcacagcctttgtcctgaagtccttcgcacaggctcgcagctttatcttcgtggacccccgggagctggctgccgccaagagctggatcatccagcagcagcaggccgatggctccttcctggccgtgggcagggtcctgaacaaggacatccagggtgggatccacggcantgtcccgctgacagcctacgtggtggttgctctcctggaaacaggcacagcctcagaggaggagagaggctccactgacaaagcgaggcacttcctggagtctgctgcgcccctggccatggacccttatagctgtgccctgactacctacgcgctgaccctgctccgcagcccggcagcccctgaggcactgcgcaagctccgtagcctggccatcatgcgagatggggtcacccactggagcctgtcaaattcctgggacgtggacaagggcacattcttgagcttcagtgacagggtctctcagtcagtggtctcggccgaggtggaaatgacagcctacgcccttctgacctacactctgctgggtgacgtggctgccgccctgcctgtggtgaagtggctgtcccagcagcgaaatgcacttgggggcttctcctccactcaggacacctgcgtggctctgcaggccttggctgaatatgccatcttgtcctatgctggaggcatcaacctcactgtctccctggcctccaccaacctggactaccaggaaaccttcgagctgcacaggaccaaccagaaggttctgcagacagcagcgatccccagcctccccacggggctgtttgtgagtgccaagggggacggctgctgcctgatgcagattgatgtcacctacaatgtgcctgacccggtggccaagccagctttccagctgctcgtaagcctccaggagcctgaggcccagggacgcccgccccccatgcctgcctccgcagctgagggttcccgaggagactggcccccagctgacgatgatgacccagcggccgatcagcatcaccaggaatacaaggtgatgctggaggtgtgcaccaggtggctgcatgcagggtcttccaatatggctgtcctggaggtgcccctgctgtcaggcttccgggcagacatcgagagcctggagcagctgctccttgacaagcacatggggatgaagaggtatgaagtggctggacgccgagtgctcttctactttgatgagatccccagccggtgcctgacgtgcgtgcggttccgtgctctccgggagtgcgtggtgggcaggacgtcggcgctgccagtctccgtgtacgactactacgaacccgccttcgaggccactcgcttctacaacgtcagcacccacagcccactcgcccgggaactgtgcgccggacccgcgtgcaacgaagtggagcgcgcccctgcccggggcccgggctggttccccggcgagtcgggccctgccgtggcccctgaggagggggcggcgatcgcgcgatgcggctgcgaccacgactgcggcgcccaggggaacccggtgtgcggctccgacggggtggtctacgccagcgcctgccgcctgcgggaggccgcctgccgccaggccgcgcccctggagcccgcgcctcccagctgctgcgccctcgcaggacgtgaagctgaatggagccggccttgaggtggaggactcagaccctgagcctgaaggggaggcggaggacagggtcacagccgggcctcggcctcctgtgagcagcgggaacctggaaagcagcacccagagcgccagcccgttccacagatggggccagactccggcccctcagagacatagtggccgggtggtgggggcccacaggccagggcttctgagccctgtcttcgtctacagcccagcctttcagagtggtggggaggagggtttatggatgtcaaacacctgcaccttgagataatcctacaaccacatgcagttgtgggaccgcagtttggtcctggggaccattcatacccacacacccagcttgtgcctgtggttaacatctcagaaaactctggtaaatgatcactccaggatattgacacgaatacacgttactgatcttactcacaaattctgg

SEQ ID NO: 287554 - DNA, 5722 bp, Homo sapiens
  misc_feature (416)..(416): n is a, c, g, or t
  misc_feature (831)..(831): n is a, c, g, or t
  misc_feature (3338)..(3338): n is a, c, g, or t
gcttaagagagaagagaaaaaggactttcttccccgaaacatggatttggcattgtctcaacatcaggtacattaagatttcttttctgctgcggcatcaccaacatgagcttccccttgtccgaccagcctgtgttgggagaatggttcatttttgttgaaatgcaaggccacgcgtacaacaagtcttttgaagttcagaagtatgtgttgcccaagtttgagcttctgattgacccgccccggtatatccaagacctggacgcctgtgagacaggcactgtgcgggccaggtatacctttgggaaacctgtggctggtgccttaacgatcaacatgactgttaatggtgtagggtactacagccacgaggtgggacgccctgtcctcagaacaaccaagatcctcggctcccnggacttcgacatctgcgtgagggacatgatcccagcggacgtccctgagcacttccggggcagggtcagcatctgggccatggtgaccagtgtggacgggagccagcaggtcgcgttcgatgactccacccccgtgcagaggcagctggtggacatccggtactccaaggacacgaggaagcagttcaagccgggcctggcctacgtggggaaggtggagctatcctaccccgatggcagcccagctgagggggtgacggtccagattaaggcagagctgacaccaaaggataacatctacaccagtgaagttgtgtcccagcgtggactagtggggtttgaaatcccctccatccccacgtcagcccagcacgtgtggctggagaccaaggtgatggcactgaacgggaagccngtgggggctcagtacctgcccagctacctctccctcggcagctggtactcccccagccagtgctacctgcagctgcagccaccctcccacccactgcaggttggggaagaagcctatttttctgtgaagtccacatgtccctgcaactttaccctgtactacgaggtggctgcacggggcaatattgtgctatcgggccagcagcctgcccacaccacccagcagcgaagcaagcgggcggcccctgccctggagaaaccgattcgtttaacacacctttctgagacagagcccccaccagccccagaagctgaggtcgacgtgtgtgtgacctctcttcatctggccgtgacccccagcatggtcccccttggtcgcctgctggtcttctacgtcagggagaatggagaaggggtcgccgacagccttcagtttgcagtcgagaccttcttcgaaaaccaggtttcagtgacgtattcagcaaatgagacccaacctggggaggttgtcgacctgcggatcagggctgcaaggggcagctgtgtgtgcgtcgccgcagttgataagagtgtctacctgctcaggtctgggttccggctgactcctgcccaggttttccaggaactggaagattatgatgtttctgattcctttggcgtgtccagggaggatggtcctttttggtgggctgggctgacggcacaacgacgccggcgctcctctgtcttcccgtggccttggggcatcaccaaggactctgggtttgccttcaccgaaacgggactggtggtgatgaccgaccgagtgagcctgaaccaccggcaggacggtggcctctacaccgatgaggctgtccccgctttccagccccacacagggagcctggtggcagtggctccttccaggcacccccccagaacagagaagagaaaaaggactttcttccccgaaacatggatttggcattgtctcaacatcagtgacccatctggtgaggggacactcagtgtgaaggtcccggactccatcaccagctgggtgggtgaggccgtggccctgtccacctctcagggcttaggcatcgccgagccctccctgctgaagaccttcaagcccttcttcgtggacttcatgctccccgctctcatcatccgtggggagcaggtcaagatcccgctcagtgtctacaactacatgggcacctgcgctgaggtgtacatgaagctctcggttcccaagggcatccagtttgttgggcatcctggcaaacgccatgtgaccaagaagatgtgtgtggcccccggggaggctgagcccatctgggtcgttctgtccttcagcgacctgggactcaacaacatcacggccaaagcccttgcttacggagacacaaattgctgccgggatgggaggtccagcaaacaccctgaggagaatcacgccgacaggagggtccccatcggggtggatcacgtcaggcgcagtgtgatggttgaggcggaaggagtcccccgggcgtacacctacagcgcattcttctgtcccagtgagagagtccacatctccacccccaacaagtatgagttccagtatgtgcagcggccactgcgcctcacccgctttgatgtggctgtgcgagctcacaatgatgcccgtgtggccttgtcttctgggccccaggacacagcaggcatgatcgagatcgtcctgggggggcatcagaacaccaggtcatggatctccaccagcaagatgggagagcccgtggccagtgcacacacggccaagatcctctcctgggatgaattcagaacattctggatcagctggcgtggtggccttatccaggttggccatggtccagagccatccaatgagtctgtcattgtggcctggaccctcccgaggccaccagaggtccagttcattggcttttccaccggctggggctccatgggtgaattccgaatctggaggaagatggaggtggacgagagctacagcgaggccttcaccctgggggtcccacacggcgccatccctgggtctgagcgagccaccgcctccatcatcggggacgtcatggggccaaccctgaaccacctcaacaacctcctgcggctgccgtttggctgtggagagcagaacatgatccactttgcacccaacgtctttgtcttgaagtatcttcagaaaacccagcagctcagccctgaggtggagagagagaccaccgactacctagtacaaggctaccagcgccagctgacctacaagcgccaggatggctcctacagcgcgtttggggagcgggacgcatcggggagcatgtggctcacagcctttgtcctgaagtccttcgcacaggctcgcagctttatcttcgtggacccccgggagctggctgccgccaagagctggatcatccagcagcagcaggccgatggctccttcctggccgtgggcagggtcctgaacaaggacatccagggtgggatccacggcantgtcccgctgacagcctacgtggtggttgctctcctggaaacaggcacagcctcagaggaggagagaggctccactgacaaagcgaggcacttcctggagtctgctgcgcccctggccatggacccttatagctgtgccctgactacctacgcgctgaccctgctccgcagcccggcagcccctgaggcactgcgcaagctccgtagcctggccatcatgcgagatggggtcacccactggagcctgtcaaattcctgggacgtggacaagggcacattcttgagcttcagtgacagggtctctcagtcagtggtctcggccgaggtggaaatgacagcctacgcccttctgacctacactctgctgggtgacgtggctgccgccctgcctgtggtgaagtggctgtcccagcagcgaaatgcacttgggggcttctcctccactcaggacacctgcgtggctctgcaggccttggctgaatatgccatcttgtcctatgctggaggcatcaacctcactgtctccctggcctccaccaacctggactaccaggaaaccttcgagctgcacaggaccaaccagaaggttctgcagacagcagcgatccccagcctccccacggggctgtttgtgagtgccaagggggacggctgctgcctgatgcagattgatgtcacctacaatgtgcctgacccggtggccaagccagctttccagctgctcgtaagcctccaggagcctgaggcccagggacgcccgccccccatgcctgcctccgcagctgagggttcccgaggagactggcccccagctgacgatgatgacccagcggccgatcagcatcaccaggaatacaaggtgatgctggaggtgtgcaccaggtggctgcatgcagggtcttccaatatggctgtcctggaggtgcccctgctgtcaggcttccgggcagacatcgagagcctggagcagctgctccttgacaagcacatggggatgaagaggtatgaagtggctggacgccgagtgctcttctactttgatgagatccccagccggtgcctgacgtgcgtgcggttccgtgctctccgggagtgcgtggtgggcaggacgtcggcgctgccagtctccgtgtacgactactacgaacccgccttcgaggccactcgcttctacaacgtcagcacccacagcccactcgcccgggaactgtgcgccggacccgcgtgcaacgaagtggagcgcgcccctgcccggggcccgggctggttccccggcgagtcgggccctgccgtggcccctgaggagggggcggcgatcgcgcgatgcggctgcgaccacgactgcggcgcccaggggaacccggtgtgcggctccgacggggtggtctacgccagcgcctgccgcctgcgggaggccgcctgccgccaggccgcgcccctggagcccgcgcctcccagctgctgcgccctcgagcagcggctgccggcctcgtcgtcctccacctacggggatgacctggcttctgtggccccggggcctttacagcaggacgtgaagctgaatggagccggccttgaggtggaggactcagaccctgagcctgaaggggaggcggaggacagtcagagcggcttctcttcctaacggctgccctgctgagagcaggacgacaccatctggctgcatcctgtccctatcagcctgtgactctgtatggtgggtgggcagacctcagcccaggtgacacctgcctctaaatgaacccaaggaacagaatgacagagatctgcccgtccctaggatgagactcttgggacccaggtgtgggctcagcagtcaccggtgtggtgcaggggggacagctggaggtcccttgggagatcccccaccttcctagctacagctggagctccaagcaccccaaccccccagccttggagctgggcatcattttcctggggccacggcagctcccacagcctgacattctgttcccgggagaagaaacattcccagaaagcactcgtgtggccaaaagcctctttctgagcaaacacgatgtggactaaattagcaaaacatccagccggtgggcaacttcaaaacggaacaggctgcgtttctctgaaacacaaagccccggcctccctttggggcacccaggaccccaaattgccctaagactgtcccagctctcgcaccctctgccttcgccccccggggacctcgggctcacatcacaaggccctgcggggaagcagatggctctcagcaaatgcactttcagcttccggctgccggggctgggtgaccccggtgcttcctcaccgtgagttcctgatgtcctcgtgcccagaggaccagcccactcccagggccccca

SEQ ID NO: 287555 - DNA, 13816 bp, Homo sapiens
  misc_feature (13775)..(13775): n is a, c, g, or t
agcagaggagtgagtcctggccgcgtccccgtcgctagggaaaccgatgcagctggaggccgcgcgcgatgcggctcgcggaggagcgggccgcgctcgcggcggagaacgcggatggggaacccggcgccgaccgacgactgcgactcctggggacctacgtggccatgagcctgcggccggctgcgggcgcctgggagcgttgcgcggggagtgctgaggcggagcagctgctccaggccttcctgggccgcgatgctgccgaggggccgcggccgctgctggtggtgcggcccgggcccaggggcctggcaatacgccccgggctggaggtgggacctgagtcgggcctggctggcgctaaggcgctttttttccttcgcaccgggcccgagcctccagggcccgacagcttccgcggcgcagtggtctgcggggacctgcccgcggcacctctggagcacctagccgcgctgttctcggaggttgttctacccgtcctggccaatgagaagaatcgcctaaactggccccacatgatatgtgaggatgtcaggcggcacgcccacagcctccaatgtgacctctcagttatacttgagcaagtgaagggaaaaactttgctgcctcttccagcaggctcagaaaaaatggagtttgcggattccaaaagtgagacagtcttggattctatagataagtcagtcatctatgccattgagtctgcagtgatcaaatggagctaccaagtccaggtggtactcaagagagagtcttcccagccactcttacaaggggagaatcccacccctaaggtggagttggagttctggaagagcaggtatgaagatctgaaatacatctataatcaactgagaacaataacggtgaggggcatggccaagctcctggacaagcttcagagtagctactttccagctttcaaagccatgtacagagatgttgttgcagctctagcagaggcacaggacatccatgtgcacctgataccgctccagcgccacctggaagctctggagaatgcagaatttccggaggtgaagccccagctgcggcccctgctccacgtggtctgtctgatttgggccacatgcaagtcctaccgctccccgggaaggctgactgtgctgctccaggagatttgcaaccttctcatccagcaggcctctaattatctcagcccagaagacctgctgagaagtgaggtagaagaaagtcagagaaaactgcaagtggtctcagacactttgagcttcttcaagcaagagtttcaggacagaagggagaatctccacacttacttcaaagagaaccaggaagtcaaggaatgggatttccagtcttctttggtctttgtgcgattggatggcttcctgggacgactgcacgtggtggagggtcttctgaagacggccctggatttccacaaactgggaaaggtggagttcagcggcgtcagagggaatgctctgagtcagcaggtccagcaaatgcatgaagaatttcaagagatgtacaggcttctctcaggatcctcctccgactgcctgtacctccaaagcacggactttgaaaatgacgtctctgaatttaaccagaaagtagaagatcttgaccgaagattggggactatctttattcaagcttttgatgatgcacctggcttggagcatgcctttaagctgctagacatagcaggaaacctccttgaaagaccgctggtagcgagggatacatctgataaatacctggtcctcatccaaatgttcaacaaagatctggatgcagtgaggatgatctacagtcagcacgtccaggaggaagcagaacttgggttctccccggtgcacaagaacatgcccaccgtggctggcggcctccgctgggcacaggagctgaggcagcgcatccagggtcctttcagcaactttggacgcatcacacacccttgcatggaatctgcagaaggaaagcgaatgcaacaaaaatatgaagatatgctgtcattgctagaaaagtatgagacaagactttatgaggattggtgccggacagtatcagagaagtcacagtacaatctttcccaaccacttctaaaacgtgacccagagacgaaggagatcactatcaactttaacccacagctgatttcagtgctgaaagaaatgagctatcttgaacccagagagatgaaacacatgcctgagacagcagcagccatgttctcctccagggatttctatcggcagcttgtggctaatttagagttgatggcaaattggtacaacaaggttatgaaaactctgctggaggtggaatttccattagtggaggaagagctgcaaaatattgatctccgcctcagagcagcagaggagactttgaactggaaaacagaaggcatttgcgattatgtcactgaaatcaccagtagtattcatgatcttgaacaaagaattcagaaaactaaagacaatgtggaagagatccaaaacatcatgaaaacatgggtgactccaatatttaagacaaaagatggaaaaagggaatcccttctttctctggatgatcggcatgatcgaatggaaaaatattacaatctcatcaaggaatctggccttaagatccacgcccttgttcaggaaaacctgggtctattttcagcagacccaacctccaatatctggaagacttatgttaactctattgacaatttgttgctgaatggattctttcttgccattgagtgctccctcaagtatcttctggaaaatactgagtgtaaggcaggacttaccccaatatttgaagcacaactgagtctagccatcccagagctagttttctatccgtctctggagtctggagtgaaggggggtttctgtgacattgttgagggtctcatcaccagcatttttaggataccatctctggtgccacggctttccccacaaaatggctctcctcactatcaggtcgacctggacggtataccagatttggcaaacatgcggcgcacactcatggagagagtccagagaatgatgggcctctgctgtggctatcagagcaccttcagccagtattcgtacctctatgtggaggaccggaaggaggttctgggtcagtttctgctgtacgggcacatcctcactccggaagaaattgaagaccatgtggaagatggcatcccagagaaccctcccctcctttctcagtttaaagtgcaaatcgactcctatgaaacgctctatgaagaggtgtgcaggctggaacccatcaaggtgtttgacggctggatgaaaattgatattcgaccctttaaggcatctctgctgaatattattaagaggtggagcctcctgttcaaacagcatcttgtggaccacgtcactcacagcttggccaacctggacgcgtttataaagaagagtgagagcggcttactcaagaaagttgaaaaaggagatttccaaggcttggttgagatcatgggacaccttatggctgttaaagaacggcagagtaacactgatgagatgtttgagcccttaaagcagactattgaattgctgaagacctatgaacaagaattgccagaaacagtgtttaagcagctggaggagctgcctgagaaatggaacaacataaaaaaggtggccattactgtgaagcagcaggtggccccactgcaggcaaatgaagtgacactcctccgccagaggtgcacagccttcgatgcagaacagcagcaattctgggagcaattccacaaagaagccccgttcaggtttgatagcatccaccctcatcaaatgctggatgccaggcacatcgagatccagcagatggaatccactatggcctccatttctgagtctgccagcttatttgaagtcaatgtccctgactataagcagctgaggcagtgcaggaaggaggtctgccagctgaaggagctctgggacaccattggaatggtgacctccagcatccatgcctgggagaccacaccctggaggaatatcaacgtggaagccatggagttggagtgcaaacagtttgcccggcatatccgaaacctggacaaggaggtcagggcctgggatgcattcacaggcctggaaagcactgtgtggaacacgctgagctccctgagggcagtagctgagctgcagaatccagccatccgggagcggcactggaggcagctgatgcaggccaccggtgtgagcttcactatggaccaggacaccaccctagcgcacctgctgcagctccagctgcaccactatgaggatgaggtccggggcattgtggacaaagctgcaaaagagatgggtatggagaaaaccttaaaggagctgcagactacctgggctggcatggaattccagtatgagccccacccacggaccaatgtccccctcctgtgctctgatgaggacctcatagaggttctggaggataatcaagttcaacttcagaacctggtgatgtccaagtatgttgctttcttcttggaggaggtgtcgggctggcagaagaagctgtccacagtggacgctgtcatctctatctggtttgaagtgcagcgaacatggactcacctggaaagcatattcactggatctgaagatattcgggcacagctaccccaggattctaaaaggtttgaaggcatcgacattgactttaaagagctagcttatgatgcccagaaaattccaaatgtagtgcaaaccaccaacaagccaggcctgtatgaaaagctggaggatattcagggcagattgtgcctgtgtgagaaggccctggcagagtacctcgacaccaagaggcttgccttcccgcggttttactttctctcctcctccgatctgttagacatcctttccaacggcacagctccacaacaggttcaacgtcacctttccaaactctttgacaacatggccaagatgcgattccagctagatgccagtggggaaccaaccaagacaagcctcggcatgtacagcaaagaagaggagtatgtggctttcagtgagccctgtgactgcagcgggcaggtagaaatatggctgaaccatgtccttggtcacatgaaggccactgtgaggcatgagatgacagaaggtgtaactgcctatgaagaaaagccgagggagcagtggctttttgaccacccagctcaggtggccctgacctgtactcagatctggtggacaacagaagtgggcatggcatttgccaggctggaggaaggctatgagagtgccatgaaggactattataagaagcaagtggcccagctcaaaacccttatcaccatgctgattggccagctctccaagggagaccggcagaagattatgactatatgcaccatcgatgtgcatgcccgggatgtggtagccaagatgattgctcagaaggtagacaatgcccaggctttcctctggctgtctcagctgcgccatcgttgggatgacgaggtcaaacactgctttgccaacatctgtgatgcccagtttttgtattcctatgagtacctgggaaacacacctcgcttggtgatcacacctttgactgacaggtgctacatcaccctcacccagtccctgcacctgaccatgagtggggctcccgcaggacctgcaggcacaggcaagaccgagaccaccaaggacctgggccgcgcactgggcatcctggtctatgtgttcaactgctcggagcagatggattacaagtcttgtggcaacatctacaaaggccttgctcagactggtgcctggggctgctttgatgagtttaatcgaatctccgtggaggtcttgtcagtggtggcagtgcaggtaaaaagcattcaagatgcgattagagataagaagcagtggttcagcttccttggggaggagatcagcctgaatccttctgtcggtatcttcatcaccatgaacccaggctatgctggccgcacagagctgccagagaatctcaagtctctcttcaggccttgtgcaatggtggttccagactttgaattgatctgtgaaatcatgctggtggcagaaggattcattgaagcccagtcattagccagaaagttcatcactctttaccagttgtgcaaagagcttctctccaaacaggatcactacgactggggcctacgggccatcaagtccgtgctggtggtggcaggatccctgaagagaggagaccctgaccggcctgaggaccaggtcctgatgcgctccttgcgggatttcaacatccccaagattgtgactgatgacatgcccatcttcatgggcctgatcggggacctctttcccgccctggatgtcccccggaggagagaccccaacttcgaagctttggttaggaaggcgatagtggatctgaagctccaggctgaggacaactttgtgctcaaggtggtccagctggaggagctcctggctgtgcggcactctgtatttgtggtgggtggcgctggtaccggcaagtcacaggtgctgaggtccttgcacaagacctatcagatcatgaaacggcgccccgtctggactgacctcaatcccaaagcagtcacaaatgatgagctctttggcatcatcaatccagccacaggagaatggaaggatggattgttctcttccatcatgcgggagcttgccaacatcacccatgatgggcccaagtggattttactggatggcgacatagatccaatgtggattgaatccctgaatactgtcatggatgataacaaggtgctgacattggccagcaatgagaggattcctctgaaccccaccatgaagctcctctttgagatcagccacctgcgcacagccactccagcaactgtctctagagcagggatcttgtacatcaacccggcagacttgggatggaaccctccagtgagcagctggattgagaagagggaaatccagacagagagagccaacttaaccattttgttcgacaagtatcttccaacctgcctagacacactcagaaccaggtttaagaagatcattcccatcccagagcagagcatggttcagatggtgtgtcaccttctggaatgtctcctgaccacggaggacatccctgcagactgccctaaggaaatttatgagcattattttgtgtttgctgccatctgggctttcggcggagcaatggtccaagatcagcttgtggactaccgggcagagttcagcaaatggtggctgactgagttcaaaacagtcaagtttccttcccaaggaaccatctttgactattacatcgacccagagaccaagaaattcgagccttggtccaagctcgtcccccagttcgaatttgaccccgagatgcccttgcaggcgtgtttggtgcacacgagtgagaccatccgtgtgtgctacttcatggagcggttgatggcgcggcagcggcctgtcatgctggtgggcacggctggcactggcaagtcggtgctggtgggagctaagctggccagccttgaccccgaggcatacctggtgaaaaacgtgccattcaactactacaccacgtcagcaatgctgcaggctgtcctggagaagcctctggaaaagaaggctggcagaaactatggccctccagggaacaagaaactcatctatttcattgatgacatgaacatgcctgaggtggatgcctacgggacggtgcagccccacaccatcatccggcagcatctggactatggccactggtatgatcggagcaagctgtccctaaaggagatcacaaatgtacagtatgtttcctgtatgaaccccacggcaggcagcttcaccatcaacccccggcttcagcgtcacttcagcgtgtttgtcctctccttcccgggggcagatgccctgtcctctatctacagcatcatcctcactcagcatctgaagctcggaaacttcccggcgtccctgcagaaatccatccccccactgatcgatctggccctcgccttccaccagaaaattgctaccaccttcctacccacaggaatcaaattccactacatcttcaacctcagagattttgccaacattttccagggcattctcttctcctcagtggaatgtgtgaaatccacatgggatcttataaggctctatctgcatgaatcaaatcgagtttatcgggataagatggtagaagaaaaggactttgatctttttgataaaatccagacagaagtgctcaagaaaacttttgatgatattgaagaccctgtggagcagacccaaagcccgaacctgtattgtcactttgcaaatggtattggggagcccaaatacatgcctgtacagtcttgggaacttttgacccagactctggtggaggccttggagaaccacaatgaagtcaacacagtgatggacctagttctctttgaggatgccatgcgccatgtctgccatatcaatcgcatcttggagtccccgcggggaaatgctctgctggttggtgtaggtgggagcggcaagcagagcctgacaaggctggcagctttcatcagctccatggatgtcttccagatcacactgcgcaaaggctaccagatccaggacttcaagatggacctggccagcctgtgtctgaaagctggagtgaagaatctcaacacagtgtttctcatgactgatgcccaagtggctgatgagaggttccttgtgctcatcaatgatcttttggcatctggggagatcccagatctctactctgatgatgaagttgaaaacatcataagcaatgtgaggaatgaagtcaagagccagggtctggttgacaacagagagaactgttggaagttctttatagatcggatccggcgacagctgaaggtgactctctgtttctcccctgtgggaaacaagctaagagtccgcagcaggaagttcccagccattgtgaactgcacagccatccactggttccacgagtggcctcagcaagcattggagtctgtcagcctccgcttcttgcagaacacagagggcattgagcccacagtaaagcagtcgattagcaaattcatggcctttgtccacacaagtgtcaaccaaacatcccagtcttatctgagcaatgaacagcgctacaactatacaactcccaagtcctttctggagttcatcagactctaccagagcttgttgcacaggcacagaaaagagctcaagtgcaagacagagcggttggagaacgggctgctgaagctgcatagcacctctgcccaggtggatgatctgaaagcaaagctggctgcccaggaagtagagctgaagcagaaaaatgaagatgcagacaaactgattcaggtcgtgggtgtggagactgacaaagtgagcagagagaaagccatggcagatgaagaggagcagaaggtggccgtcatcatgctagaggtgaaacagaagcagaaggactgtgaggaggacctggcaaaggctgagccagcactcacagcagcgcaggcagctctcaacaccctgaacaagaccaacctgacagagctgaagtcatttggctctccgcctctggccgtcagcaatgtcagcgctgcggtgatggtactgatggctcccaggggtagggtgcccaaggaccggagctggaaggctgctaaggtcaccatggccaaagtggatggcttcctggactcgctaataaacttcaacaaagagaacattcacgagaactgcctcaaagccatcaggccgtatctgcaagacccggagttcaatcctgagtttgtggccaccaaatcctatgcggctgcaggcctctgctcctgggtcatcaatattgtgagattttatgaggtgttctgtgatgtggaacccaagcgccaggcactgaacaaagccaccgcggacctcacagctgcccaggagaagctggctgccatcaaagccaagatcgctcaccttaatgaaaacctggcaaagctcacagccaggtttgagaaagcaacagcagacaaactcaaatgtcagcaagaagccgaagtgaccgcagtcaccatctcccttgccaaccgcctggttggaggactcgcttctgaaaacgtgaggtgggcagatgccgtgcagaacttcaaacagcaggaaaggacgttatgtggagacattttacttataacggctttcatttcctaccttggcttcttcacaaagaaataccggcagagcctcctggacagaacttggaggccctacctgagccagctgaaaactcccattccagtcaccccagccctggatcccctgaggatgctgatggatgatgctgacgtggctgcctggcagaacgagggcctcccagccgaccgcatgtccgtggagaatgccaccattctcatcaactgtgagcgctggccactcatggttgaccctcagctacaaggcatcaaatggatcaagaataaatatggtgaagatctccgggtcacgcagattggtcagaaaggctaccttcaaatcatagagcaggccctggaagctggagctgtggtgctgattgaaaatctagaggagtccattgatcctgttctgggacccctgcttgggagagaagtcattaaaaaaggacgattcattaaaattggagacaaagaatgtgaatacaatcccaagttccggctcatcctccacaccaagctggctaatcctcactaccagcctgagctgcaggctcaggccaccctgatcaacttcaccgtgaccagggatggcctggaggaccagttgctggccgctgtggtcagcatggagaggccagacttggagcagctgaagtccgatctcacaaagcagcagaatggattcaaaattaccctgaaaacgttggaagacagtcttctctctcgcctctcctccgcctctgggaacttcctgggagaaacagtgctggtggaaaacctagagatcaccaagcagactgctgccgaagttgagaaaaaggtccaggaggccaaggtgactgaagtgaaaatcaacgaggcccgagagcactaccggccagcagctgccagggcctcactgctctacttcatcatgaacgacctcagcaagatccatccaatgtaccagttttctctcaaggccttcagtatcgtcttccagaaggctgtggagagggctgctcctgacgaaagcctcagggagcgggtggccaacctaatagacagcataaccttctctgtgtaccagtacaccatccgcgggctctttgagtgtgataagctgacctaccttgcccagctcacctttcagattctcctcatgaaccgagaagtcaatgcagtggagttggatttcctgcttcgatctccagtgcagacgggcaccgccagccccgtggagttcctctcccatcaggcgtggggagctgtcaaggtactttcatcaatggaagaattctctaatctggatcgggacatagagggatctgctaagagctggaaaaagtttgtggagtccgaatgtcctgagaaagagaagctcccacaggagtggaagaacaagacagccctgcagcgcctctgcatgctgagagccatgcggcccgaccggatgacctatgctttgcgagattttgttgaagagaagttaggaagcaaatacgtggtgggaagagccctagattttgcaacctcatttgaagaatcgggaccagccactcctatgtttttcatcctgtctccaggggtggacccactgaaggatgtagaaagtcaaggaagaaaacttggatacaccttcaacaatcagaactttcacaacgtgtctttggggcaaggacaggaagtggtggctgaggctgcgctggacctcgctgccaagaaaggtcactgggttattttgcagaacattcacctggtggccaagtggctcagcaccctggagaagaagctggaggagcacagtgagaacagccacccagagttcagggtcttcatgagtgcagagccagcaccctcccctgagggccacatcatcccccagggcatcctggagaactccattaagatcaccaatgagccccccacgggcatgcatgccaacctgcacaaggccctggacaacttcactcaggacactctggagatgtgttctcgggagacggagtttaagagcatcctctttgctctttgttacttccatgcggtggtggcagaaagacgaaaatttgggccccagggatggaatcgctcatacccctttaacactggagacctcactatctctgtgaatgtcctctacaacttcctggaggccaacgcaaaggtcccctatgatgatttgcgctacctgtttggagagatcatgtatggaggccatatcacagatgactgggacagaagactctgcagaacctacctgggggaattcattcgaccagaaatgttagaaggagaactgtctttggccccagggttcccactcccaggcaacatggactacaatggttatcatcagtacatcgatgctgagctgcccccagaatccccctacctctatggcctccacccgaacgcagagattggcttcctgacccaaacctcagaaaagctcttccgcactgtgctggagctgcagcctcgggacagccaggccagagacggagcgggcgccacaagagaagaaaaggtcaaggcacttctggaagaaatattggagcgggtgacagacgagtttaacatcccagaactgatggccaaagtggaggagcgcaccccttacattgtagttgccttccaggagtgtggccggatgaatatcctcaccagagagattcagcgctcactgagggagctggagctcggcttaaagggggagctgactatgaccagccacatggagaacttacagaatgccctgtacttcgatatggtgccagagtcctgggctagacgagcctacccttccacagcaggcctggcagcctggtttccagacctcctcaacagaatcaaggagctagaggcttggacgggtgactttacaatgccctccactgtgtggctgacaggcttcttcaacccccagtcgttcctgactgccatcatgcagtccacggctcgcaagaatgagtggccactggaccagatggccctgcaatgtgacatgacgaagaagaacagagaagagtttaggagtcctcctcgggaaggggcctacatccatggcctcttcatggaaggtgcctgctgggacacacaggctgggatcattacagaggcaaagctgaaggatctgacaccccctatgcctgtgatgttcatcaaggccattcctgcagataagcaggactgccgcagtgtctattcctgtcctgtgtacaagactagtcagcggggacccacctacgtgtggactttcaacctgaagactaaggaaaacccatccaagtgggttctggctggagtagccttgcttctccagatttagcatcctgcagagccaccgagaaaataaaaaagctgggcttggaggctgcctagagggacaggtgggtgaagggtcaccacagacacttagaacggtaagaaaccatgagcactcacaattctgtagaattcctctagggaacttggagaggtgtgcctaaggtgaggctgagctgaaggaatgtgggcccaggtttcttaataaaatgatttactcttcaactgtgtctggcccaggatttgaganctgctgaatcataaatgatcatgtagagaccaagagaaaca

SEQ ID NO: 287556 - DNA, 13748 bp, Homo sapiens
agcagaggagtgagtcctggccgcgtccccgtcgctagggaaaccgatgcagctggaggccgcgcgcgatgcggctcgcggaggagcgggccgcgctcgcggcggagaacgcggatggggaacccggcgccgaccgacgactgcgactcctggggacctacgtggccatgagcctgcggccggctgcgggcgcctgggagcgttgcgcggggagtgctgaggcggagcagctgctccaggccttcctgggccgcgatgctgccgaggggccgcggccgctgctggtggtgcggcccgggcccaggggcctggcaatacgccccgggctggaggtgggacctgagtcgggcctggctggcgctaaggcgctttttttccttcgcaccgggcccgagcctccagggcccgacagcttccgcggcgcagtggtctgcggggacctgcccgcggcacctctggagcacctagccgcgctgttctcggaggttgttctacccgtcctggccaatgagaagaatcgcctaaactggccccacatgatatgtgaggatgtcaggcggcacgcccacagcctccaatgtgacctctcagttatacttgagcaagtgaagggaaaaactttgctgcctcttccagcaggctcagaaaaaatggagtttgcggattccaaaagtgagacagtcttggattctatagataagtcagtcatctatgccattgagtctgcagtgatcaaatggagctaccaagtccaggtggtactcaagagagagtcttcccagccactcttacaaggggagaatcccacccctaaggtggagttggagttctggaagagcaggtatgaagatctgaaatacatctataatcaactgagaacaataacggtgaggggcatggccaagctcctggacaagcttcagagtagctactttccagctttcaaagccatgtacagagatgttgttgcagctctagcagaggcacaggacatccatgtgcacctgataccgctccagcgccacctggaagctctggagaatgcagaatttccggaggtgaagccccagctgcggcccctgctccacgtggtctgtctgatttgggccacatgcaagtcctaccgctccccgggaaggctgactgtgctgctccaggagatttgcaaccttctcatccagcaggcctctaattatctcagcccagaagacctgctgagaagtgaggtagaagaaagtcagagaaaactgcaagtggtctcagacactttgagcttcttcaagcaagagtttcaggacagaagggagaatctccacacttacttcaaagagaaccaggaagtcaaggaatgggatttccagtcttctttggtctttgtgcgattggatggcttcctgggacgactgcacgtggtggagggtcttctgaagacggccctggatttccacaaactgggaaaggtggagttcagcggcgtcagagggaatgctctgagtcagcaggtccagcaaatgcatgaagaatttcaagagatgtacaggcttctctcaggatcctcctccgactgcctgtacctccaaagcacggactttgaaaatgacgtctctgaatttaaccagaaagtagaagatcttgaccgaagattggggactatctttattcaagcttttgatgatgcacctggcttggagcatgcctttaagctgctagacatagcaggaaacctccttgaaagaccgctggtagcgagggatacatctgataaatacctggtcctcatccaaatgttcaacaaagatctggatgcagtgaggatgatctacagtcagcacgtccaggaggaagcagaacttgggttctccccggtgcacaagaacatgcccaccgtggctggcggcctccgctgggcacaggagctgaggcagcgcatccagggtcctttcagcaactttggacgcatcacacacccttgcatggaatctgcagaaggaaagcgaatgcaacaaaaatatgaagatatgctgtcattgctagaaaagtatgagacaagactttatgaggattggtgccggacagtatcagagaagtcacagtacaatctttcccaaccacttctaaaacgtgacccagagacgaaggagatcactatcaactttaacccacagctgatttcagtgctgaaagaaatgagctatcttgaacccagagagatgaaacacatgcctgagacagcagcagccatgttctcctccagggatttctatcggcagcttgtggctaatttagagttgatggcaaattggtacaacaaggttatgaaaactctgctggaggtggaatttccattagtggaggaagagctgcaaaatattgatctccgcctcagagcagcagaggagactttgaactggaaaacagaaggcatttgcgattatgtcactgaaatcaccagtagtattcatgatcttgaacaaagaattcagaaaactaaagacaatgtggaagagatccaaaacatcatgaaaacatgggtgactccaatatttaagacaaaagatggaaaaagggaatcccttctttctctggatgatcggcatgatcgaatggaaaaatattacaatctcatcaaggaatctggccttaagatccacgcccttgttcaggaaaacctgggtctattttcagcagacccaacctccaatatctggaagacttatgttaactctattgacaatttgttgctgaatggattctttcttgccattgagtgctccctcaagtatcttctggaaaatactgagtgtaaggcaggacttaccccaatatttgaagcacaactgagtctagccatcccagagctagttttctatccgtctctggagtctggagtgaaggggggtttctgtgacattgttgagggtctcatcaccagcatttttaggataccatctctggtgccacggctttccccacaaaatggctctcctcactatcaggtcgacctggacggtataccagatttggcaaacatgcggcgcacactcatggagagagtccagagaatgatgggcctctgctgtggctatcagagcaccttcagccagtattcgtacctctatgtggaggaccggaaggaggttctgggtcagtttctgctgtacgggcacatcctcactccggaagaaattgaagaccatgtggaagatggcatcccagagaaccctcccctcctttctcagtttaaagtgcaaatcgactcctatgaaacgctctatgaagaggtgtgcaggctggaacccatcaaggtgtttgacggctggatgaaaattgatattcgaccctttaaggcatctctgctgaatattattaagaggtggagcctcctgttcaaacagcatcttgtggaccacgtcactcacagcttggccaacctggacgcgtttataaagaagagtgagagcggcttactcaagaaagttgaaaaaggagatttccaaggcttggttgagatcatgggacaccttatggctgttaaagaacggcagagtaacactgatgagatgtttgagcccttaaagcagactattgaattgctgaagacctatgaacaagaattgccagaaacagtgtttaagcagctggaggagctgcctgagaaatggaacaacataaaaaaggtggccattactgtgaagcagcaggtggccccactgcaggcaaatgaagtgacactcctccgccagaggtgcacagccttcgatgcagaacagcagcaattctgggagcaattccacaaagaagccccgttcaggtttgatagcatccaccctcatcaaatgctggatgccaggcacatcgagatccagcagatggaatccactatggcctccatttctgagtctgccagcttatttgaagtcaatgtccctgactataagcagctgaggcagtgcaggaaggaggtctgccagctgaaggagctctgggacaccattggaatggtgacctccagcatccatgcctgggagaccacaccctggaggaatatcaacgtggaagccatggagttggagtgcaaacagtttgcccggcatatccgaaacctggacaaggaggtcagggcctgggatgcattcacaggcctggaaagcactgtgtggaacacgctgagctccctgagggcagtagctgagctgcagaatccagccatccgggagcggcactggaggcagctgatgcaggccaccggtgtgagcttcactatggaccaggacaccaccctagcgcacctgctgcagctccagctgcaccactatgaggatgaggtccggggcattgtggacaaagctgcaaaagagatgggtatggagaaaaccttaaaggagctgcagactacctgggctggcatggaattccagtatgagccccacccacggaccaatgtccccctcctgtgctctgatgaggacctcatagaggttctggaggataatcaagttcaacttcagaacctggtgatgtccaagtatgttgctttcttcttggaggaggtgtcgggctggcagaagaagctgtccacagtggacgctgtcatctctatctggtttgaagtgcagcgaacatggactcacctggaaagcatattcactggatctgaagatattcgggcacagctaccccaggattctaaaaggtttgaaggcatcgacattgactttaaagagctagcttatgatgcccagaaaattccaaatgtagtgcaaaccaccaacaagccaggcctgtatgaaaagctggaggatattcagggcagattgtgcctgtgtgagaaggccctggcagagtacctcgacaccaagaggcttgccttcccgcggttttactttctctcctcctccgatctgttagacatcctttccaacggcacagctccacaacaggttcaacgtcacctttccaaactctttgacaacatggccaagatgcgattccagctagatgccagtggggaaccaaccaagacaagcctcggcatgtacagcaaagaagaggagtatgtggctttcagtgagccctgtgactgcagcgggcaggtagaaatatggctgaaccatgtccttggtcacatgaaggccactgtgaggcatgagatgacagaaggtgtaactgcctatgaagaaaagccgagggagcagtggctttttgaccacccagctcaggtggccctgacctgtactcagatctggtggacaacagaagtgggcatggcatttgccaggctggaggaaggctatgagagtgccatgaaggactattataagaagcaagtggcccagctcaaaacccttatcaccatgctgattggccagctctccaagggagaccggcagaagattatgactatatgcaccatcgatgtgcatgcccgggatgtggtagccaagatgattgctcagaaggtagacaatgcccaggctttcctctggctgtctcagctgcgccatcgttgggatgacgaggtcaaacactgctttgccaacatctgtgatgcccagtttttgtattcctatgagtacctgggaaacacacctcgcttggtgatcacacctttgactgacaggtgctacatcaccctcacccagtccctgcacctgaccatgagtggggctcccgcaggacctgcaggcacaggcaagaccgagaccaccaaggacctgggccgcgcactgggcatcctggtctatgtgttcaactgctcggagcagatggattacaagtcttgtggcaacatctacaaaggccttgctcagactggtgcctggggctgctttgatgagtttaatcgaatctccgtggaggtcttgtcagtggtggcagtgcaggtaaaaagcattcaagatgcgattagagataagaagcagtggttcagcttccttggggaggagatcagcctgaatccttctgtcggtatcttcatcaccatgaacccaggctatgctggccgcacagagctgccagagaatctcaagtctctcttcaggccttgtgcaatggtggttccagactttgaattgatctgtgaaatcatgctggtggcagaaggattcattgaagcccagtcattagccagaaagttcatcactctttaccagttgtgcaaagagcttctctccaaacaggatcactacgactggggcctacgggccatcaagtccgtgctggtggtggcaggatccctgaagagaggagaccctgaccggcctgaggaccaggtcctgatgcgctccttgcgggatttcaacatccccaagattgtgactgatgacatgcccatcttcatgggcctgatcggggacctctttcccgccctggatgtcccccggaggagagaccccaacttcgaagctttggttaggaaggcgatagtggatctgaagctccaggctgaggacaactttgtgctcaaggtggtccagctggaggagctcctggctgtgcggcactctgtatttgtggtgggtggcgctggtaccggcaagtcacaggtgctgaggtccttgcacaagacctatcagatcatgaaacggcgccccgtctggactgacctcaatcccaaagcagtcacaaatgatgagctctttggcatcatcaatccagccacaggagaatggaaggatggattgttctcttccatcatgcgggagcttgccaacatcacccatgatgggcccaagtggattttactggatggcgacatagatccaatgtggattgaatccctgaatactgtcatggatgataacaaggtgctgacattggccagcaatgagaggattcctctgaaccccaccatgaagctcctctttgagatcagccacctgcgcacagccactccagcaactgtctctagagcagggatcttgtacatcaacccggcagacttgggatggaaccctccagtgagcagctggattgagaagagggaaatccagacagagagagccaacttaaccattttgttcgacaagtatcttccaacctgcctagacacactcagaaccaggtttaagaagatcattcccatcccagagcagagcatggttcagatggtgtgtcaccttctggaatgtctcctgaccacggaggacatccctgcagactgccctaaggaaatttatgagcattattttgtgtttgctgccatctgggctttcggcggagcaatggtccaagatcagcttgtggactaccgggcagagttcagcaaatggtggctgactgagttcaaaacagtcaagtttccttcccaaggaaccatctttgactattacatcgacccagagaccaagaaattcgagccttggtccaagctcgtcccccagttcgaatttgaccccgagatgcccttgcaggcgtgtttggtgcacacgagtgagaccatccgtgtgtgctacttcatggagcggttgatggcgcggcagcggcctgtcatgctggtgggcacggctggcactggcaagtcggtgctggtgggagctaagctggccagccttgaccccgaggcatacctggtgaaaaacgtgccattcaactactacaccacgtcagcaatgctgcaggctgtcctggagaagcctctggaaaagaaggctggcagaaactatggccctccagggaacaagaaactcatctatttcattgatgacatgaacatgcctgaggtggatgcctacgggacggtgcagccccacaccatcatccggcagcatctggactatggccactggtatgatcggagcaagctgtccctaaaggagatcacaaatgtacagtatgtttcctgtatgaaccccacggcaggcagcttcaccatcaacccccggcttcagcgtcacttcagcgtgtttgtcctctccttcccgggggcagatgccctgtcctctatctacagcatcatcctcactcagcatctgaagctcggaaacttcccggcgtccctgcagaaatccatccccccactgatcgatctggccctcgccttccaccagaaaattgctaccaccttcctacccacaggaatcaaattccactacatcttcaacctcagagattttgccaacattttccagggcattctcttctcctcagtggaatgtgtgaaatccacatgggatcttataaggctctatctgcatgaatcaaatcgagtttatcgggataagatggtagaagaaaaggactttgatctttttgataaaatccagacagaagtgctcaagaaaacttttgatgatattgaagaccctgtggagcagacccaaagcccgaacctgtattgtcactttgcaaatggtattggggagcccaaatacatgcctgtacagtcttgggaacttttgacccagactctggtggaggccttggagaaccacaatgaagtcaacacagtgatggacctagttctctttgaggatgccatgcgccatgtctgccatatcaatcgcatcttggagtccccgcggggaaatgctctgctggttggtgtaggtgggagcggcaagcagagcctgacaaggctggcagctttcatcagctccatggatgtcttccagatcacactgcgcaaaggctaccagatccaggacttcaagatggacctggccagcctgtgtctgaaagctggagtgaagaatctcaacacagtgtttctcatgactgatgcccaagtggctgatgagaggttccttgtgctcatcaatgatcttttggcatctggggagatcccagatctctactctgatgatgaagttgaaaacatcataagcaatgtgaggaatgaagtcaagagccagggtctggttgacaacagagagaactgttggaagttctttatagatcggatccggcgacagctgaaggtgactctctgtttctcccctgtgggaaacaagctaagagtccgcagcaggaagttcccagccattgtgaactgcacagccatccactggttccacgagtggcctcagcaagcattggagtctgtcagcctccgcttcttgcagaacacagagggcattgagcccacagtaaagcagtcgattagcaaattcatggcctttgtccacacaagtgtcaaccaaacatcccagtcttatctgagcaatgaacagcgctacaactatacaactcccaagtcctttctggagttcatcagactctaccagagcttgttgcacaggcacagaaaagagctcaagtgcaagacagagcggttggagaacgggctgctgaagctgcatagcacctctgcccaggtggatgatctgaaagcaaagctggctgcccaggaagtagagctgaagcagaaaaatgaagatgcagacaaactgattcaggtcgtgggtgtggagactgacaaagtgagcagagagaaagccatggcagatgaagaggagcagaaggtggccgtcatcatgctagaggtgaaacagaagcagaaggactgtgaggaggacctggcaaaggctgagccagcactcacagcagcgcaggcagctctcaacaccctgaacaagaccaacctgacagagctgaagtcatttggctctccgcctctggccgtcagcaatgtcagcgctgcggtgatggtactgatggctcccaggggtagggtgcccaaggaccggagctggaaggctgctaaggtcaccatggccaaagtggatggcttcctggactcgctaataaacttcaacaaagagaacattcacgagaactgcctcaaagccatcaggccgtatctgcaagacccggagttcaatcctgagtttgtggccaccaaatcctatgcggctgcaggcctctgctcctgggtcatcaatattgtgagattttatgaggtgttctgtgatgtggaacccaagcgccaggcactgaacaaagccaccgcggacctcacagctgcccaggagaagctggctgccatcaaagccaagatcgctcaccttaatgaaaacctggcaaagctcacagccaggtttgagaaagcaacagcagacaaactcaaatgtcagcaagaagccgaagtgaccgcagtcaccatctcccttgccaaccgcctggttggaggactcgcttctgaaaacgtgaggtgggcagatgccgtgcagaacttcaaacagcaggaaaggacgttatgtggagacattttacttataacggctttcatttcctaccttggcttcttcacaaagaaataccggcagagcctcctggacagaacttggaggccctacctgagccagctgaaaactcccattccagtcaccccagccctggatcccctgaggatgctgatggatgatgctgacgtggctgcctggcagaacgagggcctcccagccgaccgcatgtccgtggagaatgccaccattctcatcaactgtgagcgctggccactcatggttgaccctcagctacaaggcatcaaatggatcaagaataaatatggtgaagatctccgggtcacgcagattggtcagaaaggctaccttcaaatcatagagcaggccctggaagctggagctgtggtgctgattgaaaatctagaggagtccattgatcctgttctgggacccctgcttgggagagaagtcattaaaaaaggacgattcattaaaattggagacaaagaatgtgaatacaatcccaagttccggctcatcctccacaccaagctggctaatcctcactaccagcctgagctgcaggctcaggccaccctgatcaacttcaccgtgaccagggatggcctggaggaccagttgctggccgctgtggtcagcatggagaggccagacttggagcagctgaagtccgatctcacaaagcagcagaatggattcaaaattaccctgaaaacgttggaagacagtcttctctctcgcctctcctccgcctctgggaacttcctgggagaaacagtgctggtggaaaacctagagatcaccaagcagactgctgccgaagttgagaaaaaggtccaggaggccaaggtgactgaagtgaaaatcaacgaggcccgagagcactaccggccagcagctgccagggcctcactgctctacttcatcatgaacgacctcagcaagatccatccaatgtaccagttttctctcaaggccttcagtatcgtcttccagaaggctgtggagagggctgctcctgacgaaagcctcagggagcgggtggccaacctaatagacagcataaccttctctgtgtaccagtacaccatccgcgggctctttgagtgtgataagctgacctaccttgcccagctcacctttcagattctcctcatgaaccgagaagtcaatgcagtggagttggatttcctgcttcgatctccagtgcagacgggcaccgccagccccgtggagttcctctcccatcaggcgtggggagctgtcaaggtactttcatcaatggaagaattctctaatctggatcgggacatagagggatctgctaagagctggaaaaagtttgtggagtccgaatgtcctgagaaagagaagctcccacaggagtggaagaacaagacagccctgcagcgcctctgcatgctgagagccatgcggcccgaccggatgacctatgctttgcgagattttgttgaagagaagttaggaagcaaatacgtggtgggaagagccctagattttgcaacctcatttgaagaatcgggaccagccactcctatgtttttcatcctgtctccaggggtggacccactgaaggatgtagaaagtcaaggaagaaaacttggatacaccttcaacaatcagaactttcacaacgtgtctttggggcaaggacaggaagtggtggctgaggctgcgctggacctcgctgccaagaaaggtcactgggttattttgcagaacattcacctggtggccaagtggctcagcaccctggagaagaagctggaggagcacagtgagaacagccacccagagttcagggtcttcatgagtgcagagccagcaccctcccctgagggccacatcatcccccagggcatcctggagaactccattaagatcaccaatgagccccccacgggcatgcatgccaacctgcacaaggccctggacaacttcactcaggacactctggagatgtgttctcgggagacggagtttaagagcatcctctttgctctttgttacttccatgcggtggtggcagaaagacgaaaatttgggccccagggatggaatcgctcatacccctttaacactggagacctcactatctctgtgaatgtcctctacaacttcctggaggccaacgcaaaggtcccctatgatgatttgcgctacctgtttggagagatcatgtatggaggccatatcacagatgactgggacagaagactctgcagaacctacctgggggaattcattcgaccagaaatgttagaaggagaactgtctttggccccagggttcccactcccaggcaacatggactacaatggttatcatcagtacatcgatgctgagctgcccccagaatccccctacctctatggcctccacccgaacgcagagattggcttcctgacccaaacctcagaaaagctcttccgcactgtgctggagctgcagcctcgggacagccaggccagagacggagcgggcgccacaagagaagaaaaggtcaaggcacttctggaagaaatattggagcgggtgacagacgagtttaacatcccagaactgatggccaaagtggaggagcgcaccccttacattgtagttgccttccaggagtgtggccggatgaatatcctcaccagagagattcagcgctcactgagggagctggagctcggcttaaagggggagctgactatgaccagccacatggagaacttacagaatgccctgtacttcgatatggtgccagagtcctgggctagacgagcctacccttccacagcaggcctggcagcctggtttccagacctcctcaacagaatcaaggagctagaggcttggacgggtgactttacaatgccctccactgtgtggctgacaggcttcttcaacccccagtcgttcctgactgccatcatgcagtccacggctcgcaagaatgagtggccactggaccagatggccctgcaatgtgacatgacgaagaagaacagagaagagtttaggagtcctcctcgggaaggggcctacatccatggcctcttcatggaaggtgcctgctgggacacacaggctgggatcattacagaggcaaagctgaaggatctgacaccccctatgcctgtgatgttcatcaaggccattcctgcagataagcaggactgccgcagtgtctattcctgtcctgtgtacaagactagtcagcggggacccacctacgtgtggactttcaacctgaagactaaggaaaacccatccaagtgggttctggctggagtagccttgcttctccagatttagcatcctgcagagccaccgagaaaataaaaaagctgggcttggaggctgcctagagggacaggtgggtgaagggtcaccacagacacttagaacggtaagaaaccatgagcactcacaattctgtagaattcctctagggaacttggagaggtgtgcctaaggtgaggctgagctgaaggaatgtgggcccaggtttcttaataaaatgatttactcttc

SEQ ID NO: 287557 - DNA, 3145 bp, Homo sapiens
tcgtgttaagaaacaagaaaggtcagggtggctgtggttggaacctccaacaggaaggttattcttcccacggatccaaaggctgtacaagggcaaagacactacagctgcctgaagttagtgctttaggatatggagcataaagagaggaaaagatgagatccacttggataccagcaccccactccagcctcgaggaagcttttacacagtctgccatggttttacacagtttaaaactggaagacagattctgctgattttcttttaatccgatctcacaaagcagcagaatggattcaaaattaccctgaaaacgttggaagacagtcttctctctcgcctctcctccgcctctgggaacttcctgggagaaacagtgctggtggaaaacctagagatcaccaagcagactgctgccgaagttgagaaaaaggtccaggaggccaaggtgactgaagtgaaaatcaacgaggcccgagagcactaccggccagcagctgccagggcctcactgctctacttcatcatgaacgacctcagcaagatccatccaatgtaccagttttctctcaaggccttcagtatcgtcttccagaaggctgtggagagggctgctcctgacgaaagcctcagggagcgggtggccaacctaatagacagcataaccttctctgtgtaccagtacaccatccgcgggctctttgagtgtgataagctgacctaccttgcccagctcacctttcagattctcctcatgaaccgagaagtcaatgcagtggagttggatttcctgcttcgatctccagtgcagacgggcaccgccagccccgtggagttcctctcccatcaggcgtggggagctgtcaaggtactttcatcaatggaagaattctctaatctggatcgggacatagagggatctgctaagagctggaaaaagtttgtggagtccgaatgtcctgagaaagagaagctcccacaggagtggaagaacaagacagccctgcagcgcctctgcatgctgagagccatgcggcccgaccggatgacctatgctttgcgagattttgttgaagagaagttaggaagcaaatacgtggtgggaagagccctagattttgcaacctcatttgaagaatcgggaccagccactcctatgtttttcatcctgtctccaggggtggacccactgaaggatgtagaaagtcaaggaagaaaacttggatacaccttcaacaatcagaactttcacaacgtgtctttggggcaaggacaggaagtggtggctgaggctgcgctggacctcgctgccaagaaaggtcactgggttattttgcagaacattcacctggtggccaagtggctcagcaccctggagaagaagctggaggagcacagtgagaacagccacccagagttcagggtcttcatgagtgcagagccagcaccctcccctgagggccacatcatcccccagggcatcctggagaactccattaagatcaccaatgagccccccacgggcatgcatgccaacctgcacaaggccctggacaacttcactcaggacactctggagatgtgttctcgggagacggagtttaagagcatcctctttgctctttgttacttccatgcggtggtggcagaaagacgaaaatttgggccccagggatggaatcgctcatacccctttaacactggagacctcactatctctgtgaatgtcctctacaacttcctggaggccaacgcaaaggtcccctatgatgatttgcgctacctgtttggagagatcatgtatggaggccatatcacagatgactgggacagaagactctgcagaacctacctgggggaattcattcgaccagaaatgttagaaggagaactgtctttggccccagggttcccactcccaggcaacatggactacaatggttatcatcagtacatcgatgctgagctgcccccagaatccccctacctctatggcctccacccgaacgcagagattggcttcctgacccaaacctcagaaaagctcttccgcactgtgctggagctgcagcctcgggacagccaggccagagacggagcgggcgccacaagagaagaaaaggtcaaggcacttctggaagaaatattggagcgggtgacagacgagtttaacatcccagaactgatggccaaagtggaggagcgcaccccttacattgtagttgccttccaggagtgtggccggatgaatatcctcaccagagagattcagcgctcactgagggagctggagctcggcttaaagggggagctgactatgaccagccacatggagaacttacagaatgccctgtacttcgatatggtgccagagtcctgggctagacgagcctacccttccacagcaggcctggcagcctggtttccagacctcctcaacagaatcaaggagctagaggcttggacgggtgactttacaatgccctccactgtgtggctgacaggcttcttcaacccccagtcgttcctgactgccatcatgcagtccacggctcgcaagaatgagtggccactggaccagatggccctgcaatgtgacatgacgaagaagaacagagaagagtttaggagtcctcctcgggaaggggcctacatccatggcctcttcatggaaggtgcctgctgggacacacaggctgggatcattacagaggcaaagctgaaggatctgacaccccctatgcctgtgatgttcatcaaggccattcctgcagataagcaggactgccgcagtgtctattcctgtcctgtgtacaagactagtcagcggggacccacctacgtgtggactttcaacctgaagactaaggaaaacccatccaagtgggttctggctggagtagccttgcttctccagatttagcatcctgcagagccaccgagaaaataaaaaagctgggcttggaggctgcctagagggacaggtgggtgaagggtcaccacagacacttagaacggtaagaaaccatgagcactcacaattctgtagaattcctctagggaacttggagaggtgtgcctaaggtgaggctgagctgaaggaatgtgggcccaggtttcttaataaaatgatttactcttc

SEQ ID NO: 287558 - DNA, 13520 bp, Homo sapiens
agcagaggagtgagtcctggccgcgtccccgtcgctagggaaaccgatgcagctggaggccgcgcgcgatgcggctcgcggaggagcgggccgcgctcgcggcggagaacgcggatggggaacccggcgccgaccgacgactgcgactcctggggacctacgtggccatgagcctgcggccggctgcgggcgcctgggagcgttgcgcggggagtgctgaggcggagcagctgctccaggccttcctgggccgcgatgctgccgaggggccgcggccgctgctggtggtgcggcccgggcccaggggcctggcaatacgccccgggctggaggtgggacctgagtcgggcctggctggcgctaaggcgctttttttccttcgcaccgggcccgagcctccagggcccgacagcttccgcggcgcagtggtctgcggggacctgcccgcggcacctctggagcacctagccgcgctgttctcggaggttgttctacccgtcctggccaatgagaagaatcgcctaaactggccccacatgatatgtgaggatgtcaggcggcacgcccacagcctccaatgtgacctctcagttatacttgagcaagtgaagggaaaaactttgctgcctcttccagcaggctcagaaaaaatggagtttgcggattccaaaagtgagacagtcttggattctatagataagtcagtcatctatgccattgagtctgcagtgatcaaatggagctaccaagtccaggtggtactcaagagagagtcttcccagccactcttacaaggggagaatcccacccctaaggtggagttggagttctggaagagcaggtatgaagatctgaaatacatctataatcaactgagaacaataacggtgaggggcatggccaagctcctggacaagcttcagagtagctactttccagctttcaaagccatgtacagagatgttgttgcagctctagcagaggcacaggacatccatgtgcacctgataccgctccagcgccacctggaagctctggagaatgcagaatttccggaggtgaagccccagctgcggcccctgctccacgtggtctgtctgatttgggccacatgcaagtcctaccgctccccgggaaggctgactgtgctgctccaggagatttgcaaccttctcatccagcaggcctctaattatctcagcccagaagacctgctgagaagtgaggtagaagaaagtcagagaaaactgcaagtggtctcagacactttgagcttcttcaagcaagagtttcaggacagaagggagaatctccacacttacttcaaagagaaccaggaagtcaaggaatgggatttccagtcttctttggtctttgtgcgattggatggcttcctgggacgactgcacgtggtggagggtcttctgaagacggccctggatttccacaaactgggaaaggtggagttcagcggcgtcagagggaatgctctgagtcagcaggtccagcaaatgcatgaagaatttcaagagatgtacaggcttctctcaggatcctcctccgactgcctgtacctccaaagcacggactttgaaaatgacgtctctgaatttaaccagaaagtagaagatcttgaccgaagattggggactatctttattcaagcttttgatgatgcacctggcttggagcatgcctttaagctgctagacatagcaggaaacctccttgaaagaccgctggtagcgagggatacatctgataaatacctggtcctcatccaaatgttcaacaaagatctggatgcagtgaggatgatctacagtcagcacgtccaggaggaagcagaacttgggttctccccggtgcacaagaacatgcccaccgtggctggcggcctccgctgggcacaggagctgaggcagcgcatccagggtcctttcagcaactttggacgcatcacacacccttgcatggaatctgcagaaggaaagcgaatgcaacaaaaatatgaagatatgctgtcattgctagaaaagtatgagacaagactttatgaggattggtgccggacagtatcagagaagtcacagtacaatctttcccaaccacttctaaaacgtgacccagagacgaaggagatcactatcaactttaacccacagctgatttcagtgctgaaagaaatgagctatcttgaacccagagagatgaaacacatgcctgagacagcagcagccatgttctcctccagggatttctatcggcagcttgtggctaatttagagttgatggcaaattggtacaacaaggttatgaaaactctgctggaggtggaatttccattagtggaggaagagctgcaaaatattgatctccgcctcagagcagcagaggagactttgaactggaaaacagaaggcatttgcgattatgtcactgaaatcaccagtagtattcatgatcttgaacaaagaattcagaaaactaaagacaatgtggaagagatccaaaacatcatgaaaacatgggtgactccaatatttaagacaaaagatggaaaaagggaatcccttctttctctggatgatcggcatgatcgaatggaaaaatattacaatctcatcaaggaatctggccttaagatccacgcccttgttcaggaaaacctgggtctattttcagcagacccaacctccaatatctggaagacttatgttaactctattgacaatttgttgctgaatggattctttcttgccattgagtgctccctcaagtatcttctggaaaatactgagtgtaaggcaggacttaccccaatatttgaagcacaactgagtctagccatcccagagctagttttctatccgtctctggagtctggagtgaaggggggtttctgtgacattgttgagggtctcatcaccagcatttttaggataccatctctggtgccacggctttccccacaaaatggctctcctcactatcaggtcgacctggacggtataccagatttggcaaacatgcggcgcacactcatggagagagtccagagaatgatgggcctctgctgtggctatcagagcaccttcagccagtattcgtacctctatgtggaggaccggaaggaggttctgggtcagtttctgctgtacgggcacatcctcactccggaagaaattgaagaccatgtggaagatggcatcccagagaaccctcccctcctttctcagtttaaagtgcaaatcgactcctatgaaacgctctatgaagaggtgtgcaggctggaacccatcaaggtgtttgacggctggatgaaaattgatattcgaccctttaaggcatctctgctgaatattattaagaggtggagcctcctgttcaaacagcatcttgtggaccacgtcactcacagcttggccaacctggacgcgtttataaagaagagtgagagcggcttactcaagaaagttgaaaaaggagatttccaaggcttggttgagatcatgggacaccttatggctgttaaagaacggcagagtaacactgatgagatgtttgagcccttaaagcagactattgaattgctgaagacctatgaacaagaattgccagaaacagtgtttaagcagctggaggagctgcctgagaaatggaacaacataaaaaaggtggccattactgtgaagcagcaggtggccccactgcaggcaaatgaagtgacactcctccgccagaggtgcacagccttcgatgcagaacagcagcaattctgggagcaattccacaaagaagccccgttcaggtttgatagcatccaccctcatcaaatgctggatgccaggcacatcgagatccagcagatggaatccactatggcctccatttctgagtctgccagcttatttgaagtcaatgtccctgactataagcagctgaggcagtgcaggaaggaggtctgccagctgaaggagctctgggacaccattggaatggtgacctccagcatccatgcctgggagaccacaccctggaggaatatcaacgtggaagccatggagttggagtgcaaacagtttgcccggcatatccgaaacctggacaaggaggtcagggcctgggatgcattcacaggcctggaaagcactgtgtggaacacgctgagctccctgagggcagtagctgagctgcagaatccagccatccgggagcggcactggaggcagctgatgcaggccaccggtgtgagcttcactatggaccaggacaccaccctagcgcacctgctgcagctccagctgcaccactatgaggatgaggtccggggcattgtggacaaagctgcaaaagagatgggtatggagaaaaccttaaaggagctgcagactacctgggctggcatggaattccagtatgagccccacccacggaccaatgtccccctcctgtgctctgatgaggacctcatagaggttctggaggataatcaagttcaacttcagaacctggtgatgtccaagtatgttgctttcttcttggaggaggtgtcgggctggcagaagaagctgtccacagtggacgctgtcatctctatctggtttgaagtgcagcgaacatggactcacctggaaagcatattcactggatctgaagatattcgggcacagctaccccaggattctaaaaggtttgaaggcatcgacattgactttaaagagctagcttatgatgcccagaaaattccaaatgtagtgcaaaccaccaacaagccaggcctgtatgaaaagctggaggatattcagggcagattgtgcctgtgtgagaaggccctggcagagtacctcgacaccaagaggcttgccttcccgcggttttactttctctcctcctccgatctgttagacatcctttccaacggcacagctccacaacaggttcaacgtcacctttccaaactctttgacaacatggccaagatgcgattccagctagatgccagtggggaaccaaccaagacaagcctcggcatgtacagcaaagaagaggagtatgtggctttcagtgagccctgtgactgcagcgggcaggtagaaatatggctgaaccatgtccttggtcacatgaaggccactgtgaggcatgagatgacagaaggtgtaactgcctatgaagaaaagccgagggagcagtggctttttgaccacccagctcaggtggccctgacctgtactcagatctggtggacaacagaagtgggcatggcatttgccaggctggaggaaggctatgagagtgccatgaaggactattataagaagcaagtggcccagctcaaaacccttatcaccatgctgattggccagctctccaagggagaccggcagaagattatgactatatgcaccatcgatgtgcatgcccgggatgtggtagccaagatgattgctcagaaggtagacaatgcccaggctttcctctggctgtctcagctgcgccatcgttgggatgacgaggtcaaacactgctttgccaacatctgtgatgcccagtttttgtattcctatgagtacctgggaaacacacctcgcttggtgatcacacctttgactgacaggtgctacatcaccctcacccagtccctgcacctgaccatgagtggggctcccgcaggacctgcaggcacaggcaagaccgagaccaccaaggacctgggccgcgcactgggcatcctggtctatgtgttcaactgctcggagcagatggattacaagtcttgtggcaacatctacaaaggccttgctcagactggtgcctggggctgctttgatgagtttaatcgaatctccgtggaggtcttgtcagtggtggcagtgcaggtaaaaagcattcaagatgcgattagagataagaagcagtggttcagcttccttggggaggagatcagcctgaatccttctgtcggtatcttcatcaccatgaacccaggctatgctggccgcacagagctgccagagaatctcaagtctctcttcaggccttgtgcaatggtggttccagactttgaattgatctgtgaaatcatgctggtggcagaaggattcattgaagcccagtcattagccagaaagttcatcactctttaccagttgtgcaaagagcttctctccaaacaggatcactacgactggggcctacgggccatcaagtccgtgctggtggtggcaggatccctgaagagaggagaccctgaccggcctgaggaccaggtcctgatgcgctccttgcgggatttcaacatccccaagattgtgactgatgacatgcccatcttcatgggcctgatcggggacctctttcccgccctggatgtcccccggaggagagaccccaacttcgaagctttggttaggaaggcgatagtggatctgaagctccaggctgaggacaactttgtgctcaaggtggtccagctggaggagctcctggctgtgcggcactctgtatttgtggtgggtggcgctggtaccggcaagtcacaggtgctgaggtccttgcacaagacctatcagatcatgaaacggcgccccgtctggactgacctcaatcccaaagcagtcacaaatgatgagctctttggcatcatcaatccagccacaggagaatggaaggatggattgttctcttccatcatgcgggagcttgccaacatcacccatgatgggcccaagtggattttactggatggcgacatagatccaatgtggattgaatccctgaatactgtcatggatgataacaaggtgctgacattggccagcaatgagaggattcctctgaaccccaccatgaagctcctctttgagatcagccacctgcgcacagccactccagcaactgtctctagagcagggatcttgtacatcaacccggcagacttgggatggaaccctccagtgagcagctggattgagaagagggaaatccagacagagagagccaacttaaccattttgttcgacaagtatcttccaacctgcctagacacactcagaaccaggtttaagaagatcattcccatcccagagcagagcatggttcagatggtgtgtcaccttctggaatgtctcctgaccacggaggacatccctgcagactgccctaaggaaatttatgagcattattttgtgtttgctgccatctgggctttcggcggagcaatggtccaagatcagcttgtggactaccgggcagagttcagcaaatggtggctgactgagttcaaaacagtcaagtttccttcccaaggaaccatctttgactattacatcgacccagagaccaagaaattcgagccttggtccaagctcgtcccccagttcgaatttgaccccgagatgcccttgcaggcgtgtttggtgcacacgagtgagaccatccgtgtgtgctacttcatggagcggttgatggcgcggcagcggcctgtcatgctggtgggcacggctggcactggcaagtcggtgctggtgggagctaagctggccagccttgaccccgaggcatacctggtgaaaaacgtgccattcaactactacaccacgtcagcaatgctgcaggctgtcctggagaagcctctggaaaagaaggctggcagaaactatggccctccagggaacaagaaactcatctatttcattgatgacatgaacatgcctgaggtggatgcctacgggacggtgcagccccacaccatcatccggcagcatctggactatggccactggtatgatcggagcaagctgtccctaaaggagatcacaaatgtacagtatgtttcctgtatgaaccccacggcaggcagcttcaccatcaacccccggcttcagcgtcacttcagcgtgtttgtcctctccttcccgggggcagatgccctgtcctctatctacagcatcatcctcactcagcatctgaagctcggaaacttcccggcgtccctgcagaaatccatccccccactgatcgatctggccctcgccttccaccagaaaattgctaccaccttcctacccacaggaatcaaattccactacatcttcaacctcagagattttgccaacattttccagggcattctcttctcctcagtggaatgtgtgaaatccacatgggatcttataaggctctatctgcatgaatcaaatcgagtttatcgggataagatggtagaagaaaaggactttgatctttttgataaaatccagacagaagtgctcaagaaaacttttgatgatattgaagaccctgtggagcagacccaaagcccgaacctgtattgtcactttgcaaatggtattggggagcccaaatacatgcctgtacagtcttgggaacttttgacccagactctggtggaggccttggagaaccacaatgaagtcaacacagtgatggacctagttctctttgaggatgccatgcgccatgtctgccatatcaatcgcatcttggagtccccgcggggaaatgctctgctggttggtgtaggtgggagcggcaagcagagcctgacaaggctggcagctttcatcagctccatggatgtcttccagatcacactgcgcaaaggctaccagatccaggacttcaagatggacctggccagcctgtgtctgaaagctggagtgaagaatctcaacacagtgtttctcatgactgatgcccaagtggctgatgagaggttccttgtgctcatcaatgatcttttggcatctggggagatcccagatctctactctgatgatgaagttgaaaacatcataagcaatgtgaggaatgaagtcaagagccagggtctggttgacaacagagagaactgttggaagttctttatagatcggatccggcgacagctgaaggtgactctctgtttctcccctgtgggaaacaagctaagagtccgcagcaggaagttcccagccattgtgaactgcacagccatccactggttccacgagtggcctcagcaagcattggagtctgtcagcctccgcttcttgcagaacacagagggcattgagcccacagtaaagcagtcgattagcaaattcatggcctttgtccacacaagtgtcaaccaaacatcccagtcttatctgagcaatgaacagcgctacaactatacaactcccaagtcctttctggagttcatcagactctaccagagcttgttgcacaggcacagaaaagagctcaagtgcaagacagagcggttggagaacgggctgctgaagctgcatagcacctctgcccaggtggatgatctgaaagcaaagctggctgcccaggaagtagagctgaagcagaaaaatgaagatgcagacaaactgattcaggtcgtgggtgtggagactgacaaagtgagcagagagaaagccatggcagatgaagaggagcagaaggtggccgtcatcatgctagaggtgaaacagaagcagaaggactgtgaggaggacctggcaaaggctgagccagcactcacagcagcgcaggcagctctcaacaccctgaacaagaccaacctgacagagctgaagtcatttggctctccgcctctggccgtcagcaatgtcagcgctgcggtgatggtactgatggctcccaggggtagggtgcccaaggaccggagctggaaggctgctaaggtcaccatggccaaagtggatggcttcctggactcgctaataaacttcaacaaagagaacattcacgagaactgcctcaaagccatcaggccgtatctgcaagacccggagttcaatcctgagtttgtggccaccaaatcctatgcggctgcaggcctctgctcctgggtcatcaatattgtgagattttatgaggtgttctgtgatgtggaacccaagcgccaggcactgaacaaagccaccgcggacctcacagctgcccaggagaagctggctgccatcaaagccaagatcgctcaccttaatgaaaacctggcaaagctcacagccaggtttgagaaagcaacagcagacaaactcaaatgtcagcaagaagccgaagtgaccgcagtcaccatctcccttgccaaccgcctggttggaggactcgcttctgaaaacgtgaggtgggcagatgccgtgcagaacttcaaacagcaggaaaggacgttatgtggagacattttacttataacggctttcatttcctaccttggcttcttcacaaagaaataccggcagagcctcctggacagaacttggaggccctacctgagccagctgaaaactcccattccagtcaccccagccctggatcccctgaggatgctgatggatgatgctgacgtggctgcctggcagaacgagggcctcccagccgaccgcatgtccgtggagaatgccaccattctcatcaactgtgagcgctggccactcatggttgaccctcagctacaaggcatcaaatggatcaagaataaatatggtgaagatctccgggtcacgcagattggtcagaaaggctaccttcaaatcatagagcaggccctggaagctggagctgtggtgctgattgaaaatctagaggagtccattgatcctgttctgggacccctgcttgggagagaagtcattaaaaaaggacgattcattaaaattggagacaaagaatgtgaatacaatcccaagttccggctcatcctccacaccaagctggctaatcctcactaccagcctgagctgcaggctcaggccaccctgatcaacttcaccgtgaccagggatggcctggaggaccagttgctggccgctgtggtcagcatggagaggccagacttggagcagctgaagtccgatctcacaaagcagcagaatggattcaaaattaccctgaaaacgttggaagacagtcttctctctcgcctctcctccgcctctgggaacttcctgggagaaacagtgctggtggaaaacctagagatcaccaagcagactgctgccgaagttgagaaaaaggtccaggaggccaaggtgactgaagtgaaaatcaacgaggcccgagagcactaccggccagcagctgccagggcctcactgctctacttcatcatgaacgacctcagcaagatccatccaatgtaccagttttctctcaaggccttcagtatcgtcttccagaaggctgtggagagggctgctcctgacgaaagcctcagggagcgggtggccaacctaatagacagcataaccttctctgtgtaccagtacaccatccgcgggctctttgagtgtgataagctgacctaccttgcccagctcacctttcagattctcctcatgaaccgagaagtcaatgcagtggagttggatttcctgcttcgatctccagtgcagacgggcaccgccagccccgtggagttcctctcccatcaggcgtggggagctgtcaaggtactttcatcaatggaagaattctctaatctggatcgggacatagagggatctgctaagagctggaaaaagtttgtggagtccgaatgtcctgagaaagagaagctcccacaggagtggaagaacaagacagccctgcagcgcctctgcatgctgagagccatgcggcccgaccggatgacctatgctttgcgagattttgttgaagagaagttaggaagcaaatacgtggtgggaagagccctagattttgcaacctcatttgaagaatcgggaccagccactcctatgtttttcatcctgtctccaggggtggacccactgaaggatgtagaaagtcaaggaagaaaacttggatacaccttcaacaatcagaactttcacaacgtgtctttggggcaaggacaggaagtggtggctgaggctgcgctggacctcgctgccaagaaaggtcactgggttattttgcaggacactctggagatgtgttctcgggagacggagtttaagagcatcctctttgctctttgttacttccatgcggtggtggcagaaagacgaaaatttgggccccagggatggaatcgctcatacccctttaacactggagacctcactatctctgtgaatgtcctctacaacttcctggaggccaacgcaaaggtcccctatgatgatttgcgctacctgtttggagagatcatgtatggaggccatatcacagatgactgggacagaagactctgcagaacctacctgggggaattcattcgaccagaaatgttagaaggagaactgtctttggccccagggttcccactcccaggcaacatggactacaatggttatcatcagtacatcgatgctgagctgcccccagaatccccctacctctatggcctccacccgaacgcagagattggcttcctgacccaaacctcagaaaagctcttccgcactgtgctggagctgcagcctcgggacagccaggccagagacggagcgggcgccacaagagaagaaaaggtcaaggcacttctggaagaaatattggagcgggtgacagacgagtttaacatcccagaactgatggccaaagtggaggagcgcaccccttacattgtagttgccttccaggagtgtggccggatgaatatcctcaccagagagattcagcgctcactgagggagctggagctcggcttaaagggggagctgactatgaccagccacatggagaacttacagaatgccctgtacttcgatatggtgccagagtcctgggctagacgagcctacccttccacagcaggcctggcagcctggtttccagacctcctcaacagaatcaaggagctagaggcttggacgggtgactttacaatgccctccactgtgtggctgacaggcttcttcaacccccagtcgttcctgactgccatcatgcagtccacggctcgcaagaatgagtggccactggaccagatggccctgcaatgtgacatgacgaagaagaacagagaagagtttaggagtcctcctcgggaaggggcctacatccatggcctcttcatggaaggtgcctgctgggacacacaggctgggatcattacagaggcaaagctgaaggatctgacaccccctatgcctgtgatgttcatcaaggccattcctgcagataagcaggactgccgcagtgtctattcctgtcctgtgtacaagactagtcagcggggacccacctacgtgtggactttcaacctgaagactaaggaaaacccatccaagtgggttctggctggagtagccttgcttctccagatttagcatcctgcagagccaccgagaaaataaaaaagctgggcttggaggctgcctagagggacaggtgggtgaagggtcaccacagacacttagaacggtaagaaaccatgagcactcacaattctgtagaattcctctagggaacttggagaggtgtgcctaaggtgaggctgagctgaaggaatgtgggcccaggtttcttaataaaatgatttactcttc

SEQ ID NO: 287559 - DNA, 4748 bp, Homo sapiens
  misc_feature (4707)..(4707): n is a, c, g, or t
ttagaatattccagcacatttactatggtggagagaggacatccagagttcctgggaaagaaacccaggtcagggagcctggtcccatctgacagcgcagctttgtacctttgtatcaggagctgtcatctattctgctccacagagttgggtcctcaggtcatgcccaacaggccagtgactagtccagtgcccacagtccctccagtcacaactcctgataagtcccgtgcttctccaatgcaggtggatgatctgaaagcaaagctggctgcccaggaagtagagctgaagcagaaaaatgaagatgcagacaaactgattcaggtcgtgggtgtggagactgacaaagtgagcagagagaaagccatggcagatgaagaggagcagaaggtggccgtcatcatgctagaggtgaaacagaagcagaaggactgtgaggaggacctggcaaaggctgagccagcactcacagcagcgcaggcagctctcaacaccctgaacaagaccaacctgacagagctgaagtcatttggctctccgcctctggccgtcagcaatgtcagcgctgcggtgatggtactgatggctcccaggggtagggtgcccaaggaccggagctggaaggctgctaaggtcaccatggccaaagtggatggcttcctggactcgctaataaacttcaacaaagagaacattcacgagaactgcctcaaagccatcaggccgtatctgcaagacccggagttcaatcctgagtttgtggccaccaaatcctatgcggctgcaggcctctgctcctgggtcatcaatattgtgagattttatgaggtgttctgtgatgtggaacccaagcgccaggcactgaacaaagccaccgcggacctcacagctgcccaggagaagctggctgccatcaaagccaagatcgctcaccttaatgaaaacctggcaaagctcacagccaggtttgagaaagcaacagcagacaaactcaaatgtcagcaagaagccgaagtgaccgcagtcaccatctcccttgccaaccgcctggttggaggactcgcttctgaaaacgtgaggtgggcagatgccgtgcagaacttcaaacagcaggaaaggacgttatgtggagacattttacttataacggctttcatttcctaccttggcttcttcacaaagaaataccggcagagcctcctggacagaacttggaggccctacctgagccagctgaaaactcccattccagtcaccccagccctggatcccctgaggatgctgatggatgatgctgacgtggctgcctggcagaacgagggcctcccagccgaccgcatgtccgtggagaatgccaccattctcatcaactgtgagcgctggccactcatggttgaccctcagctacaaggcatcaaatggatcaagaataaatatggtgaagatctccgggtcacgcagattggtcagaaaggctaccttcaaatcatagagcaggccctggaagctggagctgtggtgctgattgaaaatctagaggagtccattgatcctgttctgggacccctgcttgggagagaagtcattaaaaaaggacgattcattaaaattggagacaaagaatgtgaatacaatcccaagttccggctcatcctccacaccaagctggctaatcctcactaccagcctgagctgcaggctcaggccaccctgatcaacttcaccgtgaccagggatggcctggaggaccagttgctggccgctgtggtcagcatggagaggccagacttggagcagctgaagtccgatctcacaaagcagcagaatggattcaaaattaccctgaaaacgttggaagacagtcttctctctcgcctctcctccgcctctgggaacttcctgggagaaacagtgctggtggaaaacctagagatcaccaagcagactgctgccgaagttgagaaaaaggtccaggaggccaaggtgactgaagtgaaaatcaacgaggcccgagagcactaccggccagcagctgccagggcctcactgctctacttcatcatgaacgacctcagcaagatccatccaatgtaccagttttctctcaaggccttcagtatcgtcttccagaaggctgtggagagggctgctcctgacgaaagcctcagggagcgggtggccaacctaatagacagcataaccttctctgtgtaccagtacaccatccgcgggctctttgagtgtgataagctgacctaccttgcccagctcacctttcagattctcctcatgaaccgagaagtcaatgcagtggagttggatttcctgcttcgatctccagtgcagacgggcaccgccagccccgtggagttcctctcccatcaggcgtggggagctgtcaaggtactttcatcaatggaagaattctctaatctggatcgggacatagagggatctgctaagagctggaaaaagtttgtggagtccgaatgtcctgagaaagagaagctcccacaggagtggaagaacaagacagccctgcagcgcctctgcatgctgagagccatgcggcccgaccggatgacctatgctttgcgagattttgttgaagagaagttaggaagcaaatacgtggtgggaagagccctagattttgcaacctcatttgaagaatcgggaccagccactcctatgtttttcatcctgtctccaggggtggacccactgaaggatgtagaaagtcaaggaagaaaacttggatacaccttcaacaatcagaactttcacaacgtgtctttggggcaaggacaggaagtggtggctgaggctgcgctggacctcgctgccaagaaaggtcactgggttattttgcagaacattcacctggtggccaagtggctcagcaccctggagaagaagctggaggagcacagtgagaacagccacccagagttcagggtcttcatgagtgcagagccagcaccctcccctgagggccacatcatcccccagggcatcctggagaactccattaagatcaccaatgagccccccacgggcatgcatgccaacctgcacaaggccctggacaacttcactcaggacactctggagatgtgttctcgggagacggagtttaagagcatcctctttgctctttgttacttccatgcggtggtggcagaaagacgaaaatttgggccccagggatggaatcgctcatacccctttaacactggagacctcactatctctgtgaatgtcctctacaacttcctggaggccaacgcaaaggtcccctatgatgatttgcgctacctgtttggagagatcatgtatggaggccatatcacagatgactgggacagaagactctgcagaacctacctgggggaattcattcgaccagaaatgttagaaggagaactgtctttggccccagggttcccactcccaggcaacatggactacaatggttatcatcagtacatcgatgctgagctgcccccagaatccccctacctctatggcctccacccgaacgcagagattggcttcctgacccaaacctcagaaaagctcttccgcactgtgctggagctgcagcctcgggacagccaggccagagacggagcgggcgccacaagagaagaaaaggtcaaggcacttctggaagaaatattggagcgggtgacagacgagtttaacatcccagaactgatggccaaagtggaggagcgcaccccttacattgtagttgccttccaggagtgtggccggatgaatatcctcaccagagagattcagcgctcactgagggagctggagctcggcttaaagggggagctgactatgaccagccacatggagaacttacagaatgccctgtacttcgatatggtgccagagtcctgggctagacgagcctacccttccacagcaggcctggcagcctggtttccagacctcctcaacagaatcaaggagctagaggcttggacgggtgactttacaatgccctccactgtgtggctgacaggcttcttcaacccccagtcgttcctgactgccatcatgcagtccacggctcgcaagaatgagtggccactggaccagatggccctgcaatgtgacatgacgaagaagaacagagaagagtttaggagtcctcctcgggaaggggcctacatccatggcctcttcatggaaggtgcctgctgggacacacaggctgggatcattacagaggcaaagctgaaggatctgacaccccctatgcctgtgatgttcatcaaggccattcctgcagataagcaggactgccgcagtgtctattcctgtcctgtgtacaagactagtcagcggggacccacctacgtgtggactttcaacctgaagactaaggaaaacccatccaagtgggttctggctggagtagccttgcttctccagatttagcatcctgcagagccaccgagaaaataaaaaagctgggcttggaggctgcctagagggacaggtgggtgaagggtcaccacagacacttagaacggtaagaaaccatgagcactcacaattctgtagaattcctctagggaacttggagaggtgtgcctaaggtgaggctgagctgaaggaatgtgggcccaggtttcttaataaaatgatttactcttcaactgtgtctggcccaggatttgaganctgctgaatcataaatgatcatgtagagaccaagagaaaca

SEQ ID NO: 287560 - DNA, 11035 bp, Homo sapiens
agcagaggagtgagtcctggccgcgtccccgtcgctagggaaaccgatgcagctggaggccgcgcgcgatgcggctcgcggaggagcgggccgcgctcgcggcggagaacgcggatggggaacccggcgccgaccgacgactgcgactcctggggacctacgtggccatgagcctgcggccggctgcgggcgcctgggagcgttgcgcggggagtgctgaggcggagcagctgctccaggccttcctgggccgcgatgctgccgaggggccgcggccgctgctggtggtgcggcccgggcccaggggcctggcaatacgccccgggctggaggtgggacctgagtcgggcctggctggcgctaaggcgctttttttccttcgcaccgggcccgagcctccagggcccgacagcttccgcggcgcagtggtctgcggggacctgcccgcggcacctctggagcacctagccgcgctgttctcggaggttgttctacccgtcctggccaatgagaagaatcgcctaaactggccccacatgatatgtgaggatgtcaggcggcacgcccacagcctccaatgtgacctctcagttatacttgagcaagtgaagggaaaaactttgctgcctcttccagcaggctcagaaaaaatggagtttgcggattccaaaagtgagacagtcttggattctatagataagtcagtcatctatgccattgagtctgcagtgatcaaatggagctaccaagtccaggtggtactcaagagagagtcttcccagccactcttacaaggggagaatcccacccctaaggtggagttggagttctggaagagcaggtatgaagatctgaaatacatctataatcaactgagaacaataacggtgaggggcatggccaagctcctggacaagcttcagagtagctactttccagctttcaaagccatgtacagagatgttgttgcagctctagcagaggcacaggacatccatgtgcacctgataccgctccagcgccacctggaagctctggagaatgcagaatttccggaggtgaagccccagctgcggcccctgctccacgtggtctgtctgatttgggccacatgcaagtcctaccgctccccgggaaggctgactgtgctgctccaggagatttgcaaccttctcatccagcaggcctctaattatctcagcccagaagacctgctgagaagtgaggtagaagaaagtcagagaaaactgcaagtggtctcagacactttgagcttcttcaagcaagagtttcaggacagaagggagaatctccacacttacttcaaagagaaccaggaagtcaaggaatgggatttccagtcttctttggtctttgtgcgattggatggcttcctgggacgactgcacgtggtggagggtcttctgaagacggccctggatttccacaaactgggaaaggtggagttcagcggcgtcagagggaatgctctgagtcagcaggtccagcaaatgcatgaagaatttcaagagatgtacaggcttctctcaggatcctcctccgactgcctgtacctccaaagcacggactttgaaaatgacgtctctgaatttaaccagaaagtagaagatcttgaccgaagattggggactatctttattcaagcttttgatgatgcacctggcttggagcatgcctttaagctgctagacatagcaggaaacctccttgaaagaccgctggtagcgagggatacatctgataaatacctggtcctcatccaaatgttcaacaaagatctggatgcagtgaggatgatctacagtcagcacgtccaggaggaagcagaacttgggttctccccggtgcacaagaacatgcccaccgtggctggcggcctccgctgggcacaggagctgaggcagcgcatccagggtcctttcagcaactttggacgcatcacacacccttgcatggaatctgcagaaggaaagcgaatgcaacaaaaatatgaagatatgctgtcattgctagaaaagtatgagacaagactttatgaggattggtgccggacagtatcagagaagtcacagtacaatctttcccaaccacttctaaaacgtgacccagagacgaaggagatcactatcaactttaacccacagctgatttcagtgctgaaagaaatgagctatcttgaacccagagagatgaaacacatgcctgagacagcagcagccatgttctcctccagggatttctatcggcagcttgtggctaatttagagttgatggcaaattggtacaacaaggttatgaaaactctgctggaggtggaatttccattagtggaggaagagctgcaaaatattgatctccgcctcagagcagcagaggagactttgaactggaaaacagaaggcatttgcgattatgtcactgaaatcaccagtagtattcatgatcttgaacaaagaattcagaaaactaaagacaatgtggaagagatccaaaacatcatgaaaacatgggtgactccaatatttaagacaaaagatggaaaaagggaatcccttctttctctggatgatcggcatgatcgaatggaaaaatattacaatctcatcaaggaatctggccttaagatccacgcccttgttcaggaaaacctgggtctattttcagcagacccaacctccaatatctggaagacttatgttaactctattgacaatttgttgctgaatggattctttcttgccattgagtgctccctcaagtatcttctggaaaatactgagtgtaaggcaggacttaccccaatatttgaagcacaactgagtctagccatcccagagctagttttctatccgtctctggagtctggagtgaaggggggtttctgtgacattgttgagggtctcatcaccagcatttttaggataccatctctggtgccacggctttccccacaaaatggctctcctcactatcaggtcgacctggacggtataccagatttggcaaacatgcggcgcacactcatggagagagtccagagaatgatgggcctctgctgtggctatcagagcaccttcagccagtattcgtacctctatgtggaggaccggaaggaggttctgggtcagtttctgctgtacgggcacatcctcactccggaagaaattgaagaccatgtggaagatggcatcccagagaaccctcccctcctttctcagtttaaagtgcaaatcgactcctatgaaacgctctatgaagaggtgtgcaggctggaacccatcaaggtgtttgacggctggatgaaaattgatattcgaccctttaaggcatctctgctgaatattattaagaggtggagcctcctgttcaaacagcatcttgtggaccacgtcactcacagcttggccaacctggacgcgtttataaagaagagtgagagcggcttactcaagaaagttgaaaaaggagatttccaaggcttggttgagatcatgggacaccttatggctgttaaagaacggcagagtaacactgatgagatgtttgagcccttaaagcagactattgaattgctgaagacctatgaacaagaattgccagaaacagtgtttaagcagctggaggagctgcctgagaaatggaacaacataaaaaaggtggccattactgtgaagcagcaggtggccccactgcaggcaaatgaagtgacactcctccgccagaggtgcacagccttcgatgcagaacagcagcaattctgggagcaattccacaaagaagccccgttcaggtttgatagcatccaccctcatcaaatgctggatgccaggcacatcgagatccagcagatggaatccactatggcctccatttctgagtctgccagcttatttgaagtcaatgtccctgactataagcagctgaggcagtgcaggaaggaggtctgccagctgaaggagctctgggacaccattggaatggtgacctccagcatccatgcctgggagaccacaccctggaggaatatcaacgtggaagccatggagttggagtgcaaacagtttgcccggcatatccgaaacctggacaaggaggtcagggcctgggatgcattcacaggcctggaaagcactgtgtggaacacgctgagctccctgagggcagtagctgagctgcagaatccagccatccgggagcggcactggaggcagctgatgcaggccaccggtgtgagcttcactatggaccaggacaccaccctagcgcacctgctgcagctccagctgcaccactatgaggatgaggtccggggcattgtggacaaagctgcaaaagagatgggtatggagaaaaccttaaaggagctgcagactacctgggctggcatggaattccagtatgagccccacccacggaccaatgtccccctcctgtgctctgatgaggacctcatagaggttctggaggataatcaagttcaacttcagaacctggtgatgtccaagtatgttgctttcttcttggaggaggtgtcgggctggcagaagaagctgtccacagtggacgctgtcatctctatctggtttgaagtgcagcgaacatggactcacctggaaagcatattcactggatctgaagatattcgggcacagctaccccaggattctaaaaggtttgaaggcatcgacattgactttaaagagctagcttatgatgcccagaaaattccaaatgtagtgcaaaccaccaacaagccaggcctgtatgaaaagctggaggatattcagggcagattgtgcctgtgtgagaaggccctggcagagtacctcgacaccaagaggcttgccttcccgcggttttactttctctcctcctccgatctgttagacatcctttccaacggcacagctccacaacaggttcaacgtcacctttccaaactctttgacaacatggccaagatgcgattccagctagatgccagtggggaaccaaccaagacaagcctcggcatgtacagcaaagaagaggagtatgtggctttcagtgagccctgtgactgcagcgggcaggtagaaatatggctgaaccatgtccttggtcacatgaaggccactgtgaggcatgagatgacagaaggtgtaactgcctatgaagaaaagccgagggagcagtggctttttgaccacccagctcaggtggccctgacctgtactcagatctggtggacaacagaagtgggcatggcatttgccaggctggaggaaggctatgagagtgccatgaaggactattataagaagcaagtggcccagctcaaaacccttatcaccatgctgattggccagctctccaagggagaccggcagaagattatgactatatgcaccatcgatgtgcatgcccgggatgtggtagccaagatgattgctcagaaggtagacaatgcccaggctttcctctggctgtctcagctgcgccatcgttgggatgacgaggtcaaacactgctttgccaacatctgtgatgcccagtttttgtattcctatgagtacctgggaaacacacctcgcttggtgatcacacctttgactgacaggtgctacatcaccctcacccagtccctgcacctgaccatgagtggggctcccgcaggacctgcaggcacaggcaagaccgagaccaccaaggacctgggccgcgcactgggcatcctggtctatgtgttcaactgctcggagcagatggattacaagtcttgtggcaacatctacaaaggccttgctcagactggtgcctggggctgctttgatgagtttaatcgaatctccgtggaggtcttgtcagtggtggcagtgcaggtaaaaagcattcaagatgcgattagagataagaagcagtggttcagcttccttggggaggagatcagcctgaatccttctgtcggtatcttcatcaccatgaacccaggctatgctggccgcacagagctgccagagaatctcaagtctctcttcaggccttgtgcaatggtggttccagactttgaattgatctgtgaaatcatgctggtggcagaaggattcattgaagcccagtcattagccagaaagttcatcactctttaccagttgtgcaaagagcttctctccaaacaggatcactacgactggggcctacgggccatcaagtccgtgctggtggtggcaggatccctgaagagaggagaccctgaccggcctgaggaccaggtcctgatgcgctccttgcgggatttcaacatccccaagattgtgactgatgacatgcccatcttcatgggcctgatcggggacctctttcccgccctggatgtcccccggaggagagaccccaacttcgaagctttggttaggaaggcgatagtggatctgaagctccaggctgaggacaactttgtgctcaaggtggtccagctggaggagctcctggctgtgcggcactctgtatttgtggtgggtggcgctggtaccggcaagtcacaggtgctgaggtccttgcacaagacctatcagatcatgaaacggcgccccgtctggactgacctcaatcccaaagcagtcacaaatgatgagctctttggcatcatcaatccagccacaggagaatggaaggatggattgttctcttccatcatgcgggagcttgccaacatcacccatgatgggcccaagtggattttactggatggcgacatagatccaatgtggattgaatccctgaatactgtcatggatgataacaaggtgctgacattggccagcaatgagaggattcctctgaaccccaccatgaagctcctctttgagatcagccacctgcgcacagccactccagcaactgtctctagagcagggatcttgtacatcaacccggcagacttgggatggaaccctccagtgagcagctggattgagaagagggaaatccagacagagagagccaacttaaccattttgttcgacaagtatcttccaacctgcctagacacactcagaaccaggtttaagaagatcattcccatcccagagcagagcatggttcagatggtgtgtcaccttctggaatgtctcctgaccacggaggacatccctgcagactgccctaaggaaatttatgagcattattttgtgtttgctgccatctgggctttcggcggagcaatggtccaagatcagcttgtggactaccgggcagagttcagcaaatggtggctgactgagttcaaaacagtcaagtttccttcccaaggaaccatctttgactattacatcgacccagagaccaagaaattcgagccttggtccaagctcgtcccccagttcgaatttgaccccgagatgcccttgcaggcgtgtttggtgcacacgagtgagaccatccgtgtgtgctacttcatggagcggttgatggcgcggcagcggcctgtcatgctggtgggcacggctggcactggcaagtcggtgctggtgggagctaagctggccagccttgaccccgaggcatacctggtgaaaaacgtgccattcaactactacaccacgtcagcaatgctgcaggctgtcctggagaagcctctggaaaagaaggctggcagaaactatggccctccagggaacaagaaactcatctatttcattgatgacatgaacatgcctgaggtggatgcctacgggacggtgcagccccacaccatcatccggcagcatctggactatggccactggtatgatcggagcaagctgtccctaaaggagatcacaaatgtacagtatgtttcctgtatgaaccccacggcaggcagcttcaccatcaacccccggcttcagcgtcacttcagcgtgtttgtcctctccttcccgggggcagatgccctgtcctctatctacagcatcatcctcactcagcatctgaagctcggaaacttcccggcgtccctgcagaaatccatccccccactgatcgatctggccctcgccttccaccagaaaattgctaccaccttcctacccacaggaatcaaattccactacatcttcaacctcagagattttgccaacattttccagggcattctcttctcctcagtggaatgtgtgaaatccacatgggatcttataaggctctatctgcatgaatcaaatcgagtttatcgggataagatggtagaagaaaaggactttgatctttttgataaaatccagacagaagtgctcaagaaaacttttgatgatattgaagaccctgtggagcagacccaaagcccgaacctgtattgtcactttgcaaatggtattggggagcccaaatacatgcctgtacagtcttgggaacttttgacccagactctggtggaggccttggagaaccacaatgaagtcaacacagtgatggacctagttctctttgaggatgccatgcgccatgtctgccatatcaatcgcatcttggagtccccgcggggaaatgctctgctggttggtgtaggtgggagcggcaagcagagcctgacaaggctggcagctttcatcagctccatggatgtcttccagatcacactgcgcaaaggctaccagatccaggacttcaagatggacctggccagcctgtgtctgaaagctggagtgaagaatctcaacacagtgtttctcatgactgatgcccaagtggctgatgagaggttccttgtgctcatcaatgatcttttggcatctggggagatcccagatctctactctgatgatgaagttgaaaacatcataagcaatgtgaggaatgaagtcaagagccagggtctggttgacaacagagagaactgttggaagttctttatagatcggatccggcgacagctgaaggtgactctctgtttctcccctgtgggaaacaagctaagagtccgcagcaggaagttcccagccattgtgaactgcacagccatccactggttccacgagtggcctcagcaagcattggagtctgtcagcctccgcttcttgcagaacacagagggcattgagcccacagtaaagcagtcgattagcaaattcatggcctttgtccacacaagtgtcaaccaaacatcccagtcttatctgagcaatgaacagcgctacaactatacaactcccaagtcctttctggagttcatcagactctaccagagcttgttgcacaggcacagaaaagagctcaagtgcaagacagagcggttggagaacgggctgctgaagctgcatagcacctctgcccaggtggatgatctgaaagcaaagctggctgcccaggaagtagagctgaagcagaaaaatgaagatgcagacaaactgattcaggtcgtgggtgtggagactgacaaagtgagcagagagaaagccatggcagatgaagaggagcagaaggtggccgtcatcatgctagaggtgaaacagaagcagaaggactgtgaggaggacctggcaaaggctgagccagcactcacagcagcgcaggcagctctcaacaccctgaacaagaccaacctgacagagctgaagtcatttggctctccgcctctggccgtcagcaatgtcagcgctgcggtgatggtactgatggctcccaggggtagggtgcccaaggaccggagctggaaggctgctaaggtcaccatggccaaagtggatggcttcctggactcgctaataaacttcaacaaagagaacattcacgagaactgcctcaaagccatcaggccgtatctgcaagacccggagttcaatcctgagtttgtggccaccaaatcctatgcggctgcaggcctctgctcctgggtcatcaatattgtgagattttatgaggtgttctgtgatgtggaacccaagcgccaggcactgaacaaagccaccgcggacctcacagctgcccaggagaagctggctgccatcaaagccaagatcgctcaccttaatgaaaacctggcaaagctcacagccaggtttgagaaagcaacagcagacaaactcaaatgtcagcaagaagccgaagtgaccgcagtcaccatctcccttgccaaccgcctggttggaggactcgcttctgaaaacgtgaggtgggcagatgccgtgcagaacttcaaacagcaggaaaggacgttatgtggagacattttacttataacggctttcatttcctaccttggcttcttcacaaagaaataccggcagagcctcctggacagaacttggaggccctacctgagccagctgaaaactcccattccagtcaccccagccctggatcccctgaggatgctgatggatgatgctgacgtggctgcctggcagaacgagggcctcccagccgaccgcatgtccgtggagaatgccaccattctcatcaactgtgagcgctggccactcatggttgaccctcagctacaaggcatcaaatggatcaagaataaatatggtgaagatctccgggtcacgcagattggtcagaaaggctaccttcaaatcatagagcaggccctggaagctggagctgtggtgctgattgaaaatctagaggagtccattgatcctgttctgggacccctgcttgggagagaagtcattaaaaaaggacgattcattaaaattggagacaaagaatgtgaatacaatcccaagttccggctcatcctccacaccaagctggctaatcctcactaccagcctgagctgcaggctcaggccaccctgatcaacttcaccgtgaccagggatggcctggaggaccagttgctggccgctgtggtcagcatggagaggccagacttggagcagctgaaggtgaggacagaagggagaaaatgttctgccactagagcctgcagtgtactccactctgggagaggttgcagaggggggctgtttttcctggattgagttaggtgggttctgctagactctggaagactgctgaccccatgtagcaacctgggaataccata

SEQ ID NO: 287561 - DNA, 1238 bp, Homo sapiens
agcagaggagtgagtcctggccgcgtccccgtcgctagggaaaccgatgcagctggaggccgcgcgcgatgcggctcgcggaggagcgggccgcgctcgcggcggagaacgcggatggggaacccggcgccgaccgacgactgcgactcctggggacctacgtggccatgagcctgcggccggctgcgggcgcctgggagcgttgcgcggggagtgctgaggcggagcagctgctccaggccttcctgggccgcgatgctgccgaggggccgcggccgctgctggtggtgcggcccgggcccaggggcctggcaatacgccccgggctggaggtgggacctgagtcgggcctggctggcgctaaggcgctttttttccttcgcaccgggcccgagcctccagggcccgacagcttccgcggcgcagtggtctgcggggacctgcccgcggcacctctggagcacctagccgcgctgttctcggaggttgttctacccgtcctggccaatgagaagaatcgcctaaactggccccacatgatatgtgaggatgtcaggcggcacgcccacagcctccaatgtgacctctcagttatacttgagcaagtgaagggaaaaactttgctgcctcttccagcaggctcagaaaaaatggagtttgcggattccaaaagtgagacagtcttggattctatagataagtcagtcatctatgccattgagtctgcagtgatcaaatggagctaccaagtccaggtggtactcaagagagagtcttcccagccactcttacaaggggagaatcccacccctaaggtggagttggagttctggaagagcaggtatgaagatctgaaatacatctataatcaactgagaacaataacggtgaggggcatggccaagctcctggacaagcttcagagtagctactttccagctttcaaagccatgtacagagatgttgttgcagatgggactgcaatttcctggccatttgagcaccagacaagatctacgcttatcaaaattgccaagccagcaaagtctatgattagaagtaggtaaatttttttaggactccctctccatttcttggagcactgtgcgtcttctccctttttcttgtaaaatctcctctttgctcttcagtaccataggtcaaaatgtgcttttaaaggtctttgtcatttcacatggtctaagcttaattaaagcagtgattttcaaacattaaaa

SEQ ID NO: 287562 - DNA, 565 bp, Homo sapiens
tatggtggagagaggacatccagagttcctgggaaagaaacccaggtcagggagcctggtcccatctgacagcgcagctttgtacctttgtatcaggagctgtcatctattctgctccacagagttgggtcctcaggtcatgcccaacaggccagtgactagtccagtgcccacagtccctccagtcacaactcctgataagtcccgtgcttctccaatgcaggtggatgatctgaaagcaaagctggctgcccaggaagtagagctgaagcagaaaaatgaagatgcagacaaactgattcaggtcgtgggtgtggagactgacaaagtgagcagagagaaagccatggcagatgaagaggagcagaaggtggccgtcatcatgctagaggtgaaacagaagcagaaggactgtgaggaggacctggcaaaggctgagccagcactcacagcagcgcaggcagctctcaacaccctgaacaaggtaggaggactgtctgccatacctgctcatccctcaggggctggtagacgcagagaccaccttggcattcccaagagatgc

SEQ ID NO: 287563 - DNA, 2488 bp, Homo sapiens
agacgtcggcaagctgcgccgccgcttcgggttgcttccggatctggtacttgggcagagctccccggggttcattgtcttcgcttcacaggatctgtttgagtcctgtccaccggatcctacggggggtaccttcgaaaaaaaacgggctatgctgctgttgcgtgtgggtaccctctcctgacgcctccgccgcccgggtcatgtggaccctcgtgggtcggggctgggggtgcgcacgcgctctcgcgccacgagccactggggccgcgcttctggtggccccggggccccggtccgcgccgacccttggggctgctccagagtcctgggctaccgacaggctctacagctccgcagaattcaaggaaaaacctgacatgtctaggtttcctgttgaaaatattagaaatttcagtattgttgcacacgtggatcatggcaaaagtactttagctgacaggctcctagaacttacagggacaattgataaaacaaagaataataagcaggttcttgataaattgcaagtggaacgagaaagaggaatcactgttaaagcacagacagcatctctcttttacaattgtgaaggaaagcagtaccttttaaatctcattgatacaccgggccatgttgattttagttatgaagtatccaggtcactttctgcttgccagggtgttttacttgtggttgatgcaaatgagggaattcaagcccaaactgtagcaaacttctttcttgccttcgaagcacagctatcggtaattccagttataaataagatagatctgaagaatgctgatcctgaaagggttgaaaaccaaattgagaaagtgtttgatattccaagtgatgaatgtattaagatttctgctaaacttggaacaaatgttgagagtgttcttcaggcaattattgaaagaatcccccctcctaaagtgcatcgcaaaaatcctctgagagctttggtatttgactccacctttgaccagtatagaggtgtgatagccaatgtagcattatttgacggagtggtttccaaaggagataaaattgtatctgcacatactcaaaagacatacgaagttaatgaagtaggagtcttgaatcctaatgagcagccaactcataaattatatgcaggacaggtgggctatctgattgctgggatgaaagatgtcactgaagcgcaaataggagatacattatgtttacataagcaaccagtggagcccttgcctgggtttaaatcagcgaaaccaatggtatttgcaggaatgtatcctctagaccaatctgaatataacaatctgaagagtgctatagaaaaactgactttaaatgattccagtgtgaccgttcatcgggatagtagccttgctctgggtgctggctggaggctaggatttcttggacttttgcacatggaagttttcaaccagcgactggagcaagaatataatgcttctgttattttaacaacccctactgttccatataaagctgtactgtcatcatcaaaattgataaaggaacatagagaaaaagaaattacaattatcaatcctgcacaattccccgataaatcaaaagtaacagaatatttggagccagttgttttgggcactattatcacaccagatgaatacactggaaaaataatgatgctttgcgaggctcgaagagcagttcagaagaatatgatatttattgatcaaaatagagttatgcttaaatatctctttcctttgaatgaaattgtggtagatttttatgactctttgaaatccctatcttctggatatgctagttttgattacgaagatgcaggctaccagactgcagaacttgtaaaaatggatattctactgaatggaaatactgtagaggagctagtaactgttgtacacaaagacaaagctcattcaattggcaaagccatatgtgaacggctgaaggattctcttcctaggcaactgtttgagatagcaattcaagctgctattggaagtaaaatcattgcaagagaaactgtgaaagcctataggaaaaacgttttggcaaaatgttatggtggtgatattacccgaaaaatgaagcttttgaagagacaagcagaagggaaaaaaaagctgaggaaaattggcaacgttgaagttccaaaagatgcttttataaaagttctgaaaacacaatcttctaaataattggtgggaaaacaaagaattttcattgcaatttgtaatatgctgacaacagaaagaaaattataaaatttgcttgttactttcagggtattcaggttcaaataacctactagtctttcgttgaaagggagtagttagtgggtaggcaagagcttagattttgaagccatgttgcctgttctcaaatatctgttccaaccactcactagtaaggtgaccgtggccagattaacctttgtttcctcttcagtaaaatcgagattatactactacct

SEQ ID NO: 287564 - DNA, 4211 bp, Homo sapiens
agacgtcggcaagctgcgccgccgcttcgggttgcttccggatctggtacttgggcagagctccccggggttcattgtcttcgcttcacaggatctgtttgagtcctgtccaccggatcctacggggggtaccttcgaaaaaaaacgggctatgctgctgttgcgtgtgggtaccctctcctgacgcctccgccgcccgggtcatgtggaccctcgtgggtcggggctgggggtgcgcacgcgctctcgcgccacgagccactggggccgcgcttctggtggccccggggccccggtccgcgccgacccttggggctgctccagagtcctgggctaccgacaggctctacagctccgcagaattcaaggaaaaacctgacatgtctaggtttcctgttgaaaatattagaaatttcagtattgttgcacacgtggatcatggcaaaagtactttagctgacaggctcctagaacttacagggacaattgataaaacaaagaataataagcaggttcttgataaattgcaagtggaacgagaaagaggaatcactgttaaagcacagacagcatctctcttttacaattgtgaaggaaagcagtaccttttaaatctcattgatacaccgggccatgttgattttagttatgaagtatccaggtcactttctgcttgccagggtgttttacttgtggttgatgcaaatgagggaattcaagcccaaactgtagcaaacttctttcttgccttcgaagcacagctatcggtaattccagttataaataagatagatctgaagaatgctgatcctgaaagggttgaaaaccaaattgagaaagtgtttgatattccaagtgatgaatgtattaagatttctgctaaacttggaacaaatgttgagagtgttcttcaggcaattattgaaagaatcccccctcctaaagtgcatcgcaaaaatcctctgagagctttggtatttgactccacctttgaccagtatagaggtgtgatagccaatgtagcattatttgacggagtggtttccaaaggagataaaattgtatctgcacatactcaaaagacatacgaagttaatgaagtaggagtcttgaatcctaatgagcagccaactcataaattatatgcaggacaggtgggctatctgattgctgggatgaaagatgtcactgaagcgcaaataggagatacattatgtttacataagcaaccagtggagcccttgcctgggtttaaatcagcgaaaccaatggtatttgcaggaatgtatcctctagaccaatctgaatataacaatctgaagagtgctatagaaaaactgactttaaatgattccagtgtgaccgttcatcgggatagtagccttgctctgggtgctggctggaggctaggatttcttggacttttgcacatggaagttttcaaccagcgactggagcaagaatataatgcttctgttattttaacaacccctactgttccatataaagctgtactgtcatcatcaaaattgataaaggaacatagagaaaaagaaattacaattatcaatcctgcacaattccccgataaatcaaaagtaacagaatatttggagccagttgttttgggcactattatcacaccagatgaatacactggaaaaataatgatgctttgcgaggctcgaagagcagttcagaagaatatgatatttattgatcaaaatagagttatgcttaaatatctctttcctttgaatgaaattgtggtagatttttatgactctttgaaatccctatcttctggatatgctagttttgattacgaagatgcaggctaccagactgcagaacttgtaaaaatggatattctactgaatggaaatactgtagaggagctagtaactgttgtacacaaagacaaagctcattcaattggcaaagccatatgtgaacggctgaaggattctcttcctaggcaactgtttgagatagcaattcaagctgctattggaagtaaaatcattgcaagagaaactgtgaaagcctataggaaaaacgttttggcaaaatgttatggtggtgatattacccgaaaaatgaagcttttgaagagacaagcagaagggaaaaaaaagctgaggaaaattggcaacgttgaagttccaaaagatgcttttataaaagttctgaaaacacaatcttctaaataattggtgggaaaacaaagaattttcattgcaatttgtaatatgctgacaacagaaagaaaattataaaatttgcttgttactttcagggtattcaggttcaaataacctactagtctttcgttgaaagggagtagttagtgggtaggcaagagcttagattttgaagccatgttgcctgttctcaaatatctgttccaaccactcactagtaaggtgaccgtggccagattaacctttgtttcctcttcagtaaaatcgagattatactactacctacataagttgttgttgtgaagattaaatgaggtaatacgttaaatattcagaggtgcaagacacatagtaagcactcaattgtaactacagttaagtccttaaatgccatcgaaaggttcttagaaactgactttaagcaaaatgacacgtagcacaatgttcttgaatgatgtcatttccttaagtggtttgtaacatcgatgaggaaaaaaaattggtttatgcgtcatttcattttatttttatttattttttgagacagagtcttgccctgtcgcccaggctggagtgcaatggcacaatctcgactcactgcaacctctgcctcctgggttcaagagattctcctgcctcagcctccattacaggcgtgcaccaccatgctcggctaattttttgtatctttagtagagtcggggtttcaccatgttggccaggctggtcttgaactcctgacctcgtgatccacccaccgtggcctcccaaagtgctgattacaggtgtgagccaccatgcccagccatgtcatttcatttaaagtcacaatttccatgaatctcaacaagtgaggacctgctatattttgttgcatgcagtttttctttacggacactaaaaggccccatacttaagattccatctactttaagtttaaaggattttcagaatcaccttaagtgtcaaatttgttagcaggattaattgatatgaattcacttattaaacagtaaactcaaataacatagacatcaaataacagacatctgctctagttaatgataaaatgtttatagattttatcaggtggttagtttgaaactaaatggtttacatctaaattaagggcaggagctgtctttcagacattcaaaacgcatttgtgtaaaatgacaggtgtttggtattaccaggaactcataatgacattttaataattattgtctaaatttcataatcgaagcgattttagagtagttaacttgagatttcacagccagtaaatggctgtatttctccagagctctcagctcccatgtttattcagccaacgaacaaaccagactgcagactgtattagagcaagacaacatcatttagccattgatttttatcttctaccttgaatgaattgaatgaagaaaatgtcttttagggataaacactatcaaggatgaattttatactaaggttatatgaaagaaaaatctcaaaaccactaagccaaagggaagtcaagctgggaactgattgaggcaaacctgcctcccattttattcctaaataagacagccacaaagataaaatttgctcacaagggaattccttatggacaaagaactcaaagtcttcacatgaaacaaatgcataaatgattgctttctctgtttcatgtttcactaagccagattaaggtataactgactattcctctactctcctctcacatgtaaattgtatattcagtgaaaggctaatcagaaactcaaaaaaatgcaaccctttctctcttacctgcctatgcttgaagcccccgcccctcttcaagttgtcctgcctttcaagaccaatgtacaccttacacatactgattgatgtctcatgtctctctaaaatgtgtaaaaccaagctgtgccccaaccaccttgggcacatgtggtgaggacctcctgaggctgtgtcatgggcacaccttaaccctgggaaaataaactttctaaactg

SEQ ID NO: 287565 - DNA, 4081 bp, Homo sapiens
agacgtcggcaagctgcgccgccgcttcgggttgcttccggatctggtacttgggcagagctccccggggttcattgtcttcgcttcacaggatctgtttgagtcctgtccaccggatcctacggggggtaccttcgaaaaaaaacgggctatgctgctgttgcgtgtgggtaccctctcctgacgcctccgccgcccgggtcatgtggaccctcgtgggtcggggctgggggtgcgcacgcgctctcgcgccacgagccactggggccgcgcttctggtggccccggggccccggtccgcgccgacccttggggctgctccagagtcctgggctaccgacaggctctacagctccgcagaattcaaggaaaaacctgacatgtctaggtttcctgttgaaaatattagaaatttcagtattgttgcacacgtggatcatggcaaaagtactttagctgacaggctcctagaacttacagggacaattgataaaacaaagaataataagcaggttcttgataaattgcaagtggaacgagaaagaggaatcactgttaaagcacagacagcatctctcttttacaattgtgaaggaaagcagtaccttttaaatctcattgatacaccgggccatgttgattttagttatgaagtatccaggtcactttctgcttgccagggtgttttacttgtggttgatgcaaatgagggaattcaagcccaaactgtagcaaacttctttcttgccttcgaagcacagctatcggtaattccagttataaataagatagatctgaagaatgctgatcctgaaagggttgaaaaccaaattgagaaagtgtttgatattccaagtgatgaatgtattaagatttctgctaaacttggaacaaatgttgagagtgttcttcaggcaattattgaaagaatcccccctcctaaagtgcatcgcaaaaatcctctgagagctttggtatttgactccacctttgaccagtatagaggtgtgatagccaatgtagcattatttgacggagtggtttccaaaggagataaaattgtatctgcacatactcaaaagacatacgaagttaatgaagtaggagtcttgaatcctaatgagcagccaactcataaattatatgcaggacaggtgggctatctgattgctgggatgaaagatgtcactgaagcgcaaataggagatacattatgtttacataagcaaccagtggagcccttgcctgggtttaaatcagcgaaaccaatggtatttgcaggaatgtatcctctagaccaatctgaatataacaatctgaagagtgctatagaaaaactgactttaaatgattccagtgtgaccgttcatcgggatagtagccttgctctgggtgctggctggaggctaggatttcttggacttttgcacatggaagttttcaaccagcgactggagcaagaatataatgcttctgttattttaacaacccctactgttccatataaagctgtactgtcatcatcaaaattgataaaggaacatagagaaaaagaaattacaattatcaatcctgcacaattccccgataaatcaaaagtaacagaatatttggagccagttgttttgggcactattatcacaccagatgaatacactggaaaaataatgatgctttgcgaggctcgaagagcagttcagaagaatatgatatttattgatcaaaatagagttatgcttaaatatctctttcctttgaatgaaattgtggtagatttttatgactctttgaaatccctatcttctggatatgctagttttgattacgaagatgcaggctaccagactgcagaacttgtaaaaatggatattctactgaatggaaatactgtagaggagctagtaactgttgtacacaaagacaaagctcattcaattggcaaagccatatgtgaacggctgaaggattctcttcctaggcaactgtttgagatagcaattcaagctgctattggaagtaaaatcattgcaagagaaactgtgaaagcctataggaaaaacgttttggcaaaatgttatggtggtgatattacccgaaaaatgaagcttttgaagagacaagcagaagggaaaaaaaagctgaggaaaattggcaacgttgaagttccaaaagatgcttttataaaagttctgaaaacacaatcttctaaataattggtgggaaaacaaagaattttcattgcaatttgtaatatgctgacaacagaaagaaaattataaaatttgcttgttactttcagggtattcaggttcaaataacctactagtctttcgttgaaagggagtagttagtgggtaggcaagagcttagattttgaagccatgttgcctgttctcaaatatctgttccaaccactcactagtaaggtgaccgtggccagattaacctttgtttcctcttcagtaaaatcgagattatactactacctacataagttgttgttgtgaagattaaatgaggtaatacgttaaatattcagaggtgcaagacacatagtaagcactcaattgtaactacagttaagtccttaaatgccatcgaaaggttcttagaaactgactttaagcaaaatgacacgtagcacaatgttcttgaatgatgtcatttccttaagtggtttgtaacatcgatgaggaaaaaaaattggtttatgcgtcatttcattttatttttatttattttttgagacagagtcttgccctgtcgcccaggctggagtgcaatggcacaatctcgactcactgcaacctctgcctcctgggttcaagagattctcctgcctcagcctccattacaggcgtgtgagccaccatgcccagccatgtcatttcatttaaagtcacaatttccatgaatctcaacaagtgaggacctgctatattttgttgcatgcagtttttctttacggacactaaaaggccccatacttaagattccatctactttaagtttaaaggattttcagaatcaccttaagtgtcaaatttgttagcaggattaattgatatgaattcacttattaaacagtaaactcaaataacatagacatcaaataacagacatctgctctagttaatgataaaatgtttatagattttatcaggtggttagtttgaaactaaatggtttacatctaaattaagggcaggagctgtctttcagacattcaaaacgcatttgtgtaaaatgacaggtgtttggtattaccaggaactcataatgacattttaataattattgtctaaatttcataatcgaagcgattttagagtagttaacttgagatttcacagccagtaaatggctgtatttctccagagctctcagctcccatgtttattcagccaacgaacaaaccagactgcagactgtattagagcaagacaacatcatttagccattgatttttatcttctaccttgaatgaattgaatgaagaaaatgtcttttagggataaacactatcaaggatgaattttatactaaggttatatgaaagaaaaatctcaaaaccactaagccaaagggaagtcaagctgggaactgattgaggcaaacctgcctcccattttattcctaaataagacagccacaaagataaaatttgctcacaagggaattccttatggacaaagaactcaaagtcttcacatgaaacaaatgcataaatgattgctttctctgtttcatgtttcactaagccagattaaggtataactgactattcctctactctcctctcacatgtaaattgtatattcagtgaaaggctaatcagaaactcaaaaaaatgcaaccctttctctcttacctgcctatgcttgaagcccccgcccctcttcaagttgtcctgcctttcaagaccaatgtacaccttacacatactgattgatgtctcatgtctctctaaaatgtgtaaaaccaagctgtgccccaaccaccttgggcacatgtggtgaggacctcctgaggctgtgtcatgggcacaccttaaccctgggaaaataaactttctaaactg

SEQ ID NO: 287566 - DNA, 4377 bp, Homo sapiens
agacgtcggcaagctgcgccgccgcttcgggttgcttccggatctggtacttgggcagagctccccggggttcattgtcttcgcttcacaggatctgtttgagtcctgtccaccggatcctacggggggtaccttcgaaaaaaaacgggctatgctgctgttgcgtgtgggtaccctctcctgacgcctccgccgcccgggtcatgtggaccctcgtgggtcggggctgggggtgcgcacgcgctctcgcgccacgagccactggggccgcgcttctggtggccccggggccccggtccgcgccgacccttggggctgctccagagtcctgggctaccgacaggctctacagctccgcagaattcaaggaaaaacctgacatgtctaggtttcctgttgaaaatattagaaatttcagtattgttgcacacgtggatcatggcaaaagtactttagctgacaggctcctagaacttacagggacaattgataaaacaaagaataataagcaggttcttgataaattgcaagtggaacgagaaagaggaatcactgttaaagcacagacagcatctctcttttacaattgtgaaggaaagcagtaccttttaaatctcattgatacaccgggccatgttgattttagttatgaagtatccaggtcactttctgcttgccagggtgttttacttgtggttgatgcaaatgagggaattcaagcccaaactgtagcaaacttctttcttgccttcgaagcacagctatcggtaattccagttataaataagatagatctgaagaatgctgatcctgaaagggttgaaaaccaaattgagaaagtgtttgatattccaagtgatgaatgtattaagatttctgctaaacttggaacaaatgttgagagtgttcttcaggcaattattgaaagaatcccccctcctaaagtgcatcgcaaaaatcctctgagagctttggtatttgactccacctttgaccagtatagaggtgtgatagccaatgtagcattatttgacggagtggtttccaaaggagataaaattgtatctgcacatactcaaaagacatacgaagttaatgaagtaggagtcttgaatcctaatgagcagccaactcataaattatatgcaggacaggtgggctatctgattgctgggatgaaagatgtcactgaagcgcaaataggagatacattatgtttacataagcaaccagtggagcccttgcctgggtttaaatcagcgaaaccaatggtatttgcaggaatgtatcctctagaccaatctgaatataacaatctgaagagtgctatagaaaaactgactttaaatgattccagtgtgaccgttcatcgggatagtagccttgctctgggtgctggctggaggctaggatttcttggacttttgcacatggaagttttcaaccagcgactggagcaagaatataatgcttctgttattttaacaacccctactgttccatataaagctgtactgtcatcatcaaaattgataaaggaacatagagaaaaagaaattacaattatcaatcctgcacaattccccgataaatcaaaagtaacagaatatttggagccagttgttttgggcactattatcacaccagatgaatacactggaaaaataatgatgctttgcgaggctcgaagagcagttcagaagaatatgatatttattgatcaaaatagagttatgcttaaatatctctttcctttgaatgaaattgtggtagatttttatgactctttgaaatccctatcttctggatatgctagttttgattacgaagatgcaggctaccagactgcagaacttgtaaaaatggatattctactgaatggaaatactgtagaggagctagtaactgttgtacacaaagacaaagctcattcaattggcaaagccatatgtgaacggctgaaggattctcttcctaggcaactgtttgagatagcaattcaagctgctattggaagtaaaatcattgcaagagaaactgtgaaagcctataggaaaaacgttttggcaaaatgttatggtggtgatattacccgaaaaatgaagcttttgaagagacaagcagaagggaaaaaaaagctgaggaaaattggcaacgttgaagttccaaaagatgcttttataaaagttctgaaaacacaatcttctaaataattggtgggaaaacaaagaattttcattgcaatttgtaatatgctgacaacagaaagaaaattataaaatttgcttgttactttcagggtattcaggttcaaataacctactagtctttcgttgaaagggagtagttagtgggtaggcaagagcttagattttgaagccatgttgcctgttctcaaatatctgttccaaccactcactagtaaggtgaccgtggccagattaacctttgtttcctcttcagtaaaatcgagattatactactacctacataagttgttgttgtgaagattaaatgaggtaatacgttaaatattcagaggtgcaagacacatagtaagcactcaattgtaactacagttaagtccttaaatgccatcgaaaggttcttagaaactgactttaagcaaaatgacacgtagcacaatgttcttgaatgatgtcatttccttaagtggtttgtaacatcgatgaggaaaaaaaattggtttatgcgtcatttcattttatttttatttattttttgagacagagtcttgccctgtcgcccaggctggagtgcaatggcacaatctcgactcactgcaacctctgcctcctgggttcaagagattctcctgcctcagcctccattacaggcgtgcaccaccatgctcggctaattttttgtatctttagtagagtcggggtttcaccatgttggccaggctggtcttgaactcctgacctcgtgatccacccaccgtggcctcccaaagtgctgattacaggtgtgagccaccatgcccagccatgtcatttcatttaaagtcacaatttccatgaatctcaacaagtgaggacctgctatattttgttgcatgcagtttttctttacggacactaaaaggccccatacttaagattccatctactttaagtttaaaggattttcagaatcaccttaagtgtcaaatttgttagcaggattaattgatatgaattcacttattaaacagtaaactcaaataacatagacatcaaataacagacatctgctctagttaatgataaaatgtttatagattttatcaggtggttagtttgaaactaaatggtttacatctaaattaagggcaggagctgtctttcagacattcaaaacgcatttgtgtaaaatgacaggtgtttggtattaccaggaactcataatgacattttaataattattgtctaaatttcataatcgaagcgattttagagtagttaacttgagatttcacagccagtaaatggctgtatttctccagagctctcagctcccatgtttattcagccaacgaacaaaccagactgcagactgtattagagcaagacaacatcatttagccattgatttttatcttctaccttgaatgaattgaatgaagaaaatgtcttttagggataaacactatcaaggatgaattttatactaaggttatatgaaagaaaaatctcaaaaccactaagccaaagggaagtcaagctgggaactgattgaggcaaacctgcctcccattttattcctaaataagacagccacaaagataaaatttgctcacaagggaattccttatggacaaagaactcaaagtcttcacatgaaacaaatgcataaatgattgctttctctgtttcatgtttcactaagccagattaaggtataactgactattcctctactctcctctcacatgtaaattgtatattcagtgaaaggctaatcagaaactcaaaaaaatgcaaccctttctctcttacctgcctatgcttgaagcccccgcccctcttcaagttgtcctgcctttcaagaccaatgtacaccttacacatactgattgatgtctcatgtctctctaaaatgtgtaaaaccaagctgtgccccaaccaccttgggcacatgtggtgaggacctcctgaggctgtgtcatgggcacaccttaaccctgggaaaataaactttctaaactggaaaaaaaaaaggggggtttaaattcctcggagggccaagttagtcccgctttttcaagggctatggggcgttatagagcggcggttaaactggtggaaagtttggtttggagactctttgggggtatggccagataccggataattgagtaattggatggtaaat

SEQ ID NO: 287567 - DNA, 4466 bp, Homo sapiens
agacgtcggcaagctgcgccgccgcttcgggttgcttccggatctggtacttgggcagagctccccggggttcattgtcttcgcttcacaggatctgtttgagtcctgtccaccggatcctacggggggtaccttcgaaaaaaaacgggctatgctgctgttgcgtgtgggtaccctctcctgacgcctccgccgcccgggtcatgtggaccctcgtgggtcggggctgggggtgcgcacgcgctctcgcgccacgagccactggggccgcgcttctggtggccccggggccccggtccgcgccgacccttggggctgctccagagtcctgggctaccgacaggctctacagctccgcagaattcaaggaaaaacctgacatgtctaggtttcctgttgaaaatattagaaatttcagtattgttgcacacgtggatcatggcaaaagtactttagctgacaggctcctagaacttacagggacaattgataaaacaaagaataataagcaggttcttgataaattgcaagtggaacgagaaagaggaatcactgttaaagcacagacagcatctctcttttacaattgtgaaggaaagcagtaccttttaaatctcattgatacaccgggccatgttgattttagttatgaagtatccaggtcactttctgcttgccagggtgttttacttgtggttgatgcaaatgagggaattcaagcccaaactgtagcaaacttctttcttgccttcgaagcacagctatcggtaattccagttataaataagatagatctgaagaatgctgatcctgaaagggttgaaaaccaaattgagaaagtgtttgatattccaagtgatgaatgtattaagatttctgctaaacttggaacaaatgttgagagtgttcttcaggcaattattgaaagaatcccccctcctaaagtgcatcgcaaaaatcctctgagagctttggtatttgactccacctttgaccagtatagaggtgtgatagccaatgtagcattatttgacggagtggtttccaaaggagataaaattgtatctgcacatactcaaaagacatacgaagttaatgaagtaggagtcttgaatcctaatgagcagccaactcataaattatatgcaggacaggtgggctatctgattgctgggatgaaagatgtcactgaagcgcaaataggagatacattatgtttacataagcaaccagtggagcccttgcctgggtttaaatcagcgaaaccaatggtatttgcaggaatgtatcctctagaccaatctgaatataacaatctgaagagtgctatagaaaaactgactttaaatgattccagtgtgaccgttcatcgggatagtagccttgctctgggtgctggctggaggctaggatttcttggacttttgcacatggaagttttcaaccagcgactggagcaagaatataatgcttctgttattttaacaacccctactgttccatataaagctgtactgtcatcatcaaaattgataaaggaacatagagaaaaagaaattacaattatcaatcctgcacaattccccgataaatcaaaagtaacagaatatttggagccagttgttttgggcactattatcacaccagatgaatacactggaaaaataatgatgctttgcgaggctcgaagagcagttcagaagaatatgatatttattgatcaaaatagagttatgcttaaatatctctttcctttgaatgaaattgtggtagatttttatgactctttgaaatccctatcttctggatatgctagttttgattacgaagatgcaggctaccagactgcagaacttgtaaaaatggatattctactgaatggaaatactgtagaggagctagtaactgttgtacacaaagacaaagctcattcaattggcaaagccatatgtgaacggctgaaggattctcttcctaggcaactgtttgagatagcaattcaagctgctattggaagtaaaatcattgcaagagaaactgtgaaagcctataggaaaaacgttttggcaaaatgttatggtggtgatattacccgaaaaatgaagcttttgaagagacaagcagaagggaaaaaaaagctgaggaaaattggcaacgttgaagttccaaaagatgcttttataaaagttctgaaaacacaatcttctaaataattggtgggaaaacaaagaattttcattgcaatttgtaatatgctgacaacagaaagaaaattataaaatttgcttgttactttcagggtattcaggttcaaataacctactagtctttcgttgaaagggagtagttagtgggtaggcaagagcttagattttgaagccatgttgcctgttctcaaatatctgttccaaccactcactagtaaggtgaccgtggccagattaacctttgtttcctcttcagtaaaatcgagattatactactacctacataagttgttgttgtgaagattaaatgaggtaatacgttaaatattcagaggtgcaagacacatagtaagcactcaattgtaactacagttaagtccttaaatgccatcgaaaggttcttagaaactgactttaagcaaaatgacacgtagcacaatgttcttgaatgatgtcatttccttaagtggtttgtaacatcgatgaggaaaaaaaattggtttatgcgtcatttcattttatttttatttattttttgagacagagtcttgccctgtcgcccaggctggagtgcaatggcacaatctcgactcactgcaacctctgcctcctgggttcaagagattctcctgcctcagcctccattacaggcgtgcaccaccatgctcggctaattttttgtatctttagtagagtcggggtttcaccatgttggccaggctggtcttgaactcctgacctcgtgatccacccaccgtggcctcccaaagtgctgattacaggtgtgagccaccatgcccagccatgtcatttcatttaaagtcacaatttccatgaatctcaacaagtgaggacctgctatattttgttgcatgcagtttttctttacggacactaaaaggccccatacttaagattccatctactttaagtttaaaggattttcagaatcaccttaagtgtcaaatttgttagcaggattaattgatatgaattcacttattaaacagtaaactcaaataacatagacatcaaataacagacatctgctctagttaatgataaaatgtttatagattttatcaggtggttagtttgaaactaaatggtttacatctaaattaagggcaggagctgtctttcagacattcaaaacgcatttgtgtaaaatgacaggtgtttggtattaccaggaactcataatgacattttaataattattgtctaaatttcataatcgaagcgattttagagtagttaacttgagatttcacagccagtaaatggctgtatttctccagagctctcagctcccatgtttattcagccaacgaacaaaccagactgcagactgtattagagcaagacaacatcatttagccattgatttttatcttctaccttgaatgaattgaatgaagaaaatgtcttttagggataaacactatcaaggatgaattttatactaaggttatatgaaagaaaaatctcaaaaccactaagccaaagggaagtcaagctgggaactgattgaggcaaacctgcctcccattttattcctaaataagacagccacaaagataaaatttgctcacaagggaattccttatggacaaagaactcaaagtcttcacatgaaacaaatgcataaatgattgctttctctgtttcatgtttcactaagccagattaaggtataactgactattcctctactctcctctcacatgtaaattgtatattcagtgaaaggctaatcagaaactcaaaaaaatgcaaccctttctctcttacctgcctatgcttgaagcccccgcccctcttcaagttgtcctgcctttcaagaccaatgtacaccttacacatactgattgatgtctcatgtctctctaaaatgtgtaaaaccaagctgtgccccaaccaccttgggcacatgtggtgaggacctcctgaggctgtgtcatgggcacaccttaaccctgggaaaataaactttctaaactgacttgagagctgtctcagatattttgagcttacagttattgtgaaatcattttaattataaattaagtggagatttacttaaaatcatgtgtagaagtagcctgtgatatagtcctagatacatacattatcatcttatgtatcttccctccctcttccaggttctgataaaaacagatgaaatctgaaagaccatgacagtagtattttgaaaatgacagtatttgaaattaaaaaattgtaaaagtgttctgt

SEQ ID NO: 287568 - DNA, 4009 bp, Homo sapiens
agacgtcggcaagctgcgccgccgcttcgggttgcttccggatctggtacttgggcagagctccccggggttcattgtcttcgcttcacaggatctgtttgagtcctgtccaccggatcctacggggggtaccttcgaaaaaaaacgggctatgctgctgttgcgtgaaaaacctgacatgtctaggtttcctgttgaaaatattagaaatttcagtattgttgcacacgtggatcatggcaaaagtactttagctgacaggctcctagaacttacagggacaattgataaaacaaagaataataagcaggttcttgataaattgcaagtggaacgagaaagaggaatcactgttaaagcacagacagcatctctcttttacaattgtgaaggaaagcagtaccttttaaatctcattgatacaccgggccatgttgattttagttatgaagtatccaggtcactttctgcttgccagggtgttttacttgtggttgatgcaaatgagggaattcaagcccaaactgtagcaaacttctttcttgccttcgaagcacagctatcggtaattccagttataaataagatagatctgaagaatgctgatcctgaaagggttgaaaaccaaattgagaaagtgtttgatattccaagtgatgaatgtattaagatttctgctaaacttggaacaaatgttgagagtgttcttcaggcaattattgaaagaatcccccctcctaaagtgcatcgcaaaaatcctctgagagctttggtatttgactccacctttgaccagtatagaggtgtgatagccaatgtagcattatttgacggagtggtttccaaaggagataaaattgtatctgcacatactcaaaagacatacgaagttaatgaagtaggagtcttgaatcctaatgagcagccaactcataaattatatgcaggacaggtgggctatctgattgctgggatgaaagatgtcactgaagcgcaaataggagatacattatgtttacataagcaaccagtggagcccttgcctgggtttaaatcagcgaaaccaatggtatttgcaggaatgtatcctctagaccaatctgaatataacaatctgaagagtgctatagaaaaactgactttaaatgattccagtgtgaccgttcatcgggatagtagccttgctctgggtgctggctggaggctaggatttcttggacttttgcacatggaagttttcaaccagcgactggagcaagaatataatgcttctgttattttaacaacccctactgttccatataaagctgtactgtcatcatcaaaattgataaaggaacatagagaaaaagaaattacaattatcaatcctgcacaattccccgataaatcaaaagtaacagaatatttggagccagttgttttgggcactattatcacaccagatgaatacactggaaaaataatgatgctttgcgaggctcgaagagcagttcagaagaatatgatatttattgatcaaaatagagttatgcttaaatatctctttcctttgaatgaaattgtggtagatttttatgactctttgaaatccctatcttctggatatgctagttttgattacgaagatgcaggctaccagactgcagaacttgtaaaaatggatattctactgaatggaaatactgtagaggagctagtaactgttgtacacaaagacaaagctcattcaattggcaaagccatatgtgaacggctgaaggattctcttcctaggcaactgtttgagatagcaattcaagctgctattggaagtaaaatcattgcaagagaaactgtgaaagcctataggaaaaacgttttggcaaaatgttatggtggtgatattacccgaaaaatgaagcttttgaagagacaagcagaagggaaaaaaaagctgaggaaaattggcaacgttgaagttccaaaagatgcttttataaaagttctgaaaacacaatcttctaaataattggtgggaaaacaaagaattttcattgcaatttgtaatatgctgacaacagaaagaaaattataaaatttgcttgttactttcagggtattcaggttcaaataacctactagtctttcgttgaaagggagtagttagtgggtaggcaagagcttagattttgaagccatgttgcctgttctcaaatatctgttccaaccactcactagtaaggtgaccgtggccagattaacctttgtttcctcttcagtaaaatcgagattatactactacctacataagttgttgttgtgaagattaaatgaggtaatacgttaaatattcagaggtgcaagacacatagtaagcactcaattgtaactacagttaagtccttaaatgccatcgaaaggttcttagaaactgactttaagcaaaatgacacgtagcacaatgttcttgaatgatgtcatttccttaagtggtttgtaacatcgatgaggaaaaaaaattggtttatgcgtcatttcattttatttttatttattttttgagacagagtcttgccctgtcgcccaggctggagtgcaatggcacaatctcgactcactgcaacctctgcctcctgggttcaagagattctcctgcctcagcctccattacaggcgtgcaccaccatgctcggctaattttttgtatctttagtagagtcggggtttcaccatgttggccaggctggtcttgaactcctgacctcgtgatccacccaccgtggcctcccaaagtgctgattacaggtgtgagccaccatgcccagccatgtcatttcatttaaagtcacaatttccatgaatctcaacaagtgaggacctgctatattttgttgcatgcagtttttctttacggacactaaaaggccccatacttaagattccatctactttaagtttaaaggattttcagaatcaccttaagtgtcaaatttgttagcaggattaattgatatgaattcacttattaaacagtaaactcaaataacatagacatcaaataacagacatctgctctagttaatgataaaatgtttatagattttatcaggtggttagtttgaaactaaatggtttacatctaaattaagggcaggagctgtctttcagacattcaaaacgcatttgtgtaaaatgacaggtgtttggtattaccaggaactcataatgacattttaataattattgtctaaatttcataatcgaagcgattttagagtagttaacttgagatttcacagccagtaaatggctgtatttctccagagctctcagctcccatgtttattcagccaacgaacaaaccagactgcagactgtattagagcaagacaacatcatttagccattgatttttatcttctaccttgaatgaattgaatgaagaaaatgtcttttagggataaacactatcaaggatgaattttatactaaggttatatgaaagaaaaatctcaaaaccactaagccaaagggaagtcaagctgggaactgattgaggcaaacctgcctcccattttattcctaaataagacagccacaaagataaaatttgctcacaagggaattccttatggacaaagaactcaaagtcttcacatgaaacaaatgcataaatgattgctttctctgtttcatgtttcactaagccagattaaggtataactgactattcctctactctcctctcacatgtaaattgtatattcagtgaaaggctaatcagaaactcaaaaaaatgcaaccctttctctcttacctgcctatgcttgaagcccccgcccctcttcaagttgtcctgcctttcaagaccaatgtacaccttacacatactgattgatgtctcatgtctctctaaaatgtgtaaaaccaagctgtgccccaaccaccttgggcacatgtggtgaggacctcctgaggctgtgtcatgggcacaccttaaccctgggaaaataaactttctaaactg

SEQ ID NO: 287569 - DNA, 3952 bp, Homo sapiens
agacgtcggcaagctgcgccgccgcttcgggttgcttccggatctggtacttgggcagagctccccggggttcattgtcttcgcttcacaggatctgtttgagtcctgtccaccggatcctacggggggtaccttcgaaaaaaaacgggctatgctgctgttgcgtgaaaaacctgacatgtctaggtttcctgttgaaaatattagaaatttcagtattgttgcacacgtggatcatggcaaaagtactttagctgacaggctcctagaacttacaggagaaagaggaatcactgttaaagcacagacagcatctctcttttacaattgtgaaggaaagcagtaccttttaaatctcattgatacaccgggccatgttgattttagttatgaagtatccaggtcactttctgcttgccagggtgttttacttgtggttgatgcaaatgagggaattcaagcccaaactgtagcaaacttctttcttgccttcgaagcacagctatcggtaattccagttataaataagatagatctgaagaatgctgatcctgaaagggttgaaaaccaaattgagaaagtgtttgatattccaagtgatgaatgtattaagatttctgctaaacttggaacaaatgttgagagtgttcttcaggcaattattgaaagaatcccccctcctaaagtgcatcgcaaaaatcctctgagagctttggtatttgactccacctttgaccagtatagaggtgtgatagccaatgtagcattatttgacggagtggtttccaaaggagataaaattgtatctgcacatactcaaaagacatacgaagttaatgaagtaggagtcttgaatcctaatgagcagccaactcataaattatatgcaggacaggtgggctatctgattgctgggatgaaagatgtcactgaagcgcaaataggagatacattatgtttacataagcaaccagtggagcccttgcctgggtttaaatcagcgaaaccaatggtatttgcaggaatgtatcctctagaccaatctgaatataacaatctgaagagtgctatagaaaaactgactttaaatgattccagtgtgaccgttcatcgggatagtagccttgctctgggtgctggctggaggctaggatttcttggacttttgcacatggaagttttcaaccagcgactggagcaagaatataatgcttctgttattttaacaacccctactgttccatataaagctgtactgtcatcatcaaaattgataaaggaacatagagaaaaagaaattacaattatcaatcctgcacaattccccgataaatcaaaagtaacagaatatttggagccagttgttttgggcactattatcacaccagatgaatacactggaaaaataatgatgctttgcgaggctcgaagagcagttcagaagaatatgatatttattgatcaaaatagagttatgcttaaatatctctttcctttgaatgaaattgtggtagatttttatgactctttgaaatccctatcttctggatatgctagttttgattacgaagatgcaggctaccagactgcagaacttgtaaaaatggatattctactgaatggaaatactgtagaggagctagtaactgttgtacacaaagacaaagctcattcaattggcaaagccatatgtgaacggctgaaggattctcttcctaggcaactgtttgagatagcaattcaagctgctattggaagtaaaatcattgcaagagaaactgtgaaagcctataggaaaaacgttttggcaaaatgttatggtggtgatattacccgaaaaatgaagcttttgaagagacaagcagaagggaaaaaaaagctgaggaaaattggcaacgttgaagttccaaaagatgcttttataaaagttctgaaaacacaatcttctaaataattggtgggaaaacaaagaattttcattgcaatttgtaatatgctgacaacagaaagaaaattataaaatttgcttgttactttcagggtattcaggttcaaataacctactagtctttcgttgaaagggagtagttagtgggtaggcaagagcttagattttgaagccatgttgcctgttctcaaatatctgttccaaccactcactagtaaggtgaccgtggccagattaacctttgtttcctcttcagtaaaatcgagattatactactacctacataagttgttgttgtgaagattaaatgaggtaatacgttaaatattcagaggtgcaagacacatagtaagcactcaattgtaactacagttaagtccttaaatgccatcgaaaggttcttagaaactgactttaagcaaaatgacacgtagcacaatgttcttgaatgatgtcatttccttaagtggtttgtaacatcgatgaggaaaaaaaattggtttatgcgtcatttcattttatttttatttattttttgagacagagtcttgccctgtcgcccaggctggagtgcaatggcacaatctcgactcactgcaacctctgcctcctgggttcaagagattctcctgcctcagcctccattacaggcgtgcaccaccatgctcggctaattttttgtatctttagtagagtcggggtttcaccatgttggccaggctggtcttgaactcctgacctcgtgatccacccaccgtggcctcccaaagtgctgattacaggtgtgagccaccatgcccagccatgtcatttcatttaaagtcacaatttccatgaatctcaacaagtgaggacctgctatattttgttgcatgcagtttttctttacggacactaaaaggccccatacttaagattccatctactttaagtttaaaggattttcagaatcaccttaagtgtcaaatttgttagcaggattaattgatatgaattcacttattaaacagtaaactcaaataacatagacatcaaataacagacatctgctctagttaatgataaaatgtttatagattttatcaggtggttagtttgaaactaaatggtttacatctaaattaagggcaggagctgtctttcagacattcaaaacgcatttgtgtaaaatgacaggtgtttggtattaccaggaactcataatgacattttaataattattgtctaaatttcataatcgaagcgattttagagtagttaacttgagatttcacagccagtaaatggctgtatttctccagagctctcagctcccatgtttattcagccaacgaacaaaccagactgcagactgtattagagcaagacaacatcatttagccattgatttttatcttctaccttgaatgaattgaatgaagaaaatgtcttttagggataaacactatcaaggatgaattttatactaaggttatatgaaagaaaaatctcaaaaccactaagccaaagggaagtcaagctgggaactgattgaggcaaacctgcctcccattttattcctaaataagacagccacaaagataaaatttgctcacaagggaattccttatggacaaagaactcaaagtcttcacatgaaacaaatgcataaatgattgctttctctgtttcatgtttcactaagccagattaaggtataactgactattcctctactctcctctcacatgtaaattgtatattcagtgaaaggctaatcagaaactcaaaaaaatgcaaccctttctctcttacctgcctatgcttgaagcccccgcccctcttcaagttgtcctgcctttcaagaccaatgtacaccttacacatactgattgatgtctcatgtctctctaaaatgtgtaaaaccaagctgtgccccaaccaccttgggcacatgtggtgaggacctcctgaggctgtgtcatgggcacaccttaaccctgggaaaataaactttctaaactg

SEQ ID NO: 287570 - DNA, 4154 bp, Homo sapiens
agacgtcggcaagctgcgccgccgcttcgggttgcttccggatctggtacttgggcagagctccccggggttcattgtcttcgcttcacaggatctgtttgagtcctgtccaccggatcctacggggggtaccttcgaaaaaaaacgggctatgctgctgttgcgtgtgggtaccctctcctgacgcctccgccgcccgggtcatgtggaccctcgtgggtcggggctgggggtgcgcacgcgctctcgcgccacgagccactggggccgcgcttctggtggccccggggccccggtccgcgccgacccttggggctgctccagagtcctgggctaccgacaggctctacagctccgcagaattcaaggaaaaacctgacatgtctaggtttcctgttgaaaatattagaaatttcagtattgttgcacacgtggatcatggcaaaagtactttagctgacaggctcctagaacttacaggagaaagaggaatcactgttaaagcacagacagcatctctcttttacaattgtgaaggaaagcagtaccttttaaatctcattgatacaccgggccatgttgattttagttatgaagtatccaggtcactttctgcttgccagggtgttttacttgtggttgatgcaaatgagggaattcaagcccaaactgtagcaaacttctttcttgccttcgaagcacagctatcggtaattccagttataaataagatagatctgaagaatgctgatcctgaaagggttgaaaaccaaattgagaaagtgtttgatattccaagtgatgaatgtattaagatttctgctaaacttggaacaaatgttgagagtgttcttcaggcaattattgaaagaatcccccctcctaaagtgcatcgcaaaaatcctctgagagctttggtatttgactccacctttgaccagtatagaggtgtgatagccaatgtagcattatttgacggagtggtttccaaaggagataaaattgtatctgcacatactcaaaagacatacgaagttaatgaagtaggagtcttgaatcctaatgagcagccaactcataaattatatgcaggacaggtgggctatctgattgctgggatgaaagatgtcactgaagcgcaaataggagatacattatgtttacataagcaaccagtggagcccttgcctgggtttaaatcagcgaaaccaatggtatttgcaggaatgtatcctctagaccaatctgaatataacaatctgaagagtgctatagaaaaactgactttaaatgattccagtgtgaccgttcatcgggatagtagccttgctctgggtgctggctggaggctaggatttcttggacttttgcacatggaagttttcaaccagcgactggagcaagaatataatgcttctgttattttaacaacccctactgttccatataaagctgtactgtcatcatcaaaattgataaaggaacatagagaaaaagaaattacaattatcaatcctgcacaattccccgataaatcaaaagtaacagaatatttggagccagttgttttgggcactattatcacaccagatgaatacactggaaaaataatgatgctttgcgaggctcgaagagcagttcagaagaatatgatatttattgatcaaaatagagttatgcttaaatatctctttcctttgaatgaaattgtggtagatttttatgactctttgaaatccctatcttctggatatgctagttttgattacgaagatgcaggctaccagactgcagaacttgtaaaaatggatattctactgaatggaaatactgtagaggagctagtaactgttgtacacaaagacaaagctcattcaattggcaaagccatatgtgaacggctgaaggattctcttcctaggcaactgtttgagatagcaattcaagctgctattggaagtaaaatcattgcaagagaaactgtgaaagcctataggaaaaacgttttggcaaaatgttatggtggtgatattacccgaaaaatgaagcttttgaagagacaagcagaagggaaaaaaaagctgaggaaaattggcaacgttgaagttccaaaagatgcttttataaaagttctgaaaacacaatcttctaaataattggtgggaaaacaaagaattttcattgcaatttgtaatatgctgacaacagaaagaaaattataaaatttgcttgttactttcagggtattcaggttcaaataacctactagtctttcgttgaaagggagtagttagtgggtaggcaagagcttagattttgaagccatgttgcctgttctcaaatatctgttccaaccactcactagtaaggtgaccgtggccagattaacctttgtttcctcttcagtaaaatcgagattatactactacctacataagttgttgttgtgaagattaaatgaggtaatacgttaaatattcagaggtgcaagacacatagtaagcactcaattgtaactacagttaagtccttaaatgccatcgaaaggttcttagaaactgactttaagcaaaatgacacgtagcacaatgttcttgaatgatgtcatttccttaagtggtttgtaacatcgatgaggaaaaaaaattggtttatgcgtcatttcattttatttttatttattttttgagacagagtcttgccctgtcgcccaggctggagtgcaatggcacaatctcgactcactgcaacctctgcctcctgggttcaagagattctcctgcctcagcctccattacaggcgtgcaccaccatgctcggctaattttttgtatctttagtagagtcggggtttcaccatgttggccaggctggtcttgaactcctgacctcgtgatccacccaccgtggcctcccaaagtgctgattacaggtgtgagccaccatgcccagccatgtcatttcatttaaagtcacaatttccatgaatctcaacaagtgaggacctgctatattttgttgcatgcagtttttctttacggacactaaaaggccccatacttaagattccatctactttaagtttaaaggattttcagaatcaccttaagtgtcaaatttgttagcaggattaattgatatgaattcacttattaaacagtaaactcaaataacatagacatcaaataacagacatctgctctagttaatgataaaatgtttatagattttatcaggtggttagtttgaaactaaatggtttacatctaaattaagggcaggagctgtctttcagacattcaaaacgcatttgtgtaaaatgacaggtgtttggtattaccaggaactcataatgacattttaataattattgtctaaatttcataatcgaagcgattttagagtagttaacttgagatttcacagccagtaaatggctgtatttctccagagctctcagctcccatgtttattcagccaacgaacaaaccagactgcagactgtattagagcaagacaacatcatttagccattgatttttatcttctaccttgaatgaattgaatgaagaaaatgtcttttagggataaacactatcaaggatgaattttatactaaggttatatgaaagaaaaatctcaaaaccactaagccaaagggaagtcaagctgggaactgattgaggcaaacctgcctcccattttattcctaaataagacagccacaaagataaaatttgctcacaagggaattccttatggacaaagaactcaaagtcttcacatgaaacaaatgcataaatgattgctttctctgtttcatgtttcactaagccagattaaggtataactgactattcctctactctcctctcacatgtaaattgtatattcagtgaaaggctaatcagaaactcaaaaaaatgcaaccctttctctcttacctgcctatgcttgaagcccccgcccctcttcaagttgtcctgcctttcaagaccaatgtacaccttacacatactgattgatgtctcatgtctctctaaaatgtgtaaaaccaagctgtgccccaaccaccttgggcacatgtggtgaggacctcctgaggctgtgtcatgggcacaccttaaccctgggaaaataaactttctaaactg

SEQ ID NO: 287571 - DNA, 3610 bp, Homo sapiens
gcttcttgttgttgctgctcattgtgtatccaagtcattgtgcatgctctgcaaggatgctgtgcccctgtgtagagtctggttcggatagaggcgagattcaccgacgccatacattgataagtaatatatacgtctactgtcgtttcagacgcggagcatatcggtaattccagttataaataagatagatctgaagaatgctgatcctgaaagggttgaaaaccaaattgagaaagtgtttgatattccaagtgatgaatgtattaagatttctgctaaacttggaacaaatgttgagagtgttcttcaggcaattattgaaagaatcccccctcctaaagtgcatcgcaaaaatcctctgagagctttggtatttgactccacctttgaccagtatagaggtgtgatagccaatgtagcattatttgacggagtggtttccaaaggagataaaattgtatctgcacatactcaaaagacatacgaagttaatgaagtaggagtcttgaatcctaatgagcagccaactcataaattatatgcaggacaggtgggctatctgattgctgggatgaaagatgtcactgaagcgcaaataggagatacattatgtttacataagcaaccagtggagcccttgcctgggtttaaatcagcgaaaccaatggtatttgcaggaatgtatcctctagaccaatctgaatataacaatctgaagagtgctatagaaaaactgactttaaatgattccagtgtgaccgttcatcgggatagtagccttgctctgggtgctggctggaggctaggatttcttggacttttgcacatggaagttttcaaccagcgactggagcaagaatataatgcttctgttattttaacaacccctactgttccatataaagctgtactgtcatcatcaaaattgataaaggaacatagagaaaaagaaattacaattatcaatcctgcacaattccccgataaatcaaaagtaacagaatatttggagccagttgttttgggcactattatcacaccagatgaatacactggaaaaataatgatgctttgcgaggctcgaagagcagttcagaagaatatgatatttattgatcaaaatagagttatgcttaaatatctctttcctttgaatgaaattgtggtagatttttatgactctttgaaatccctatcttctggatatgctagttttgattacgaagatgcaggctaccagactgcagaacttgtaaaaatggatattctactgaatggaaatactgtagaggagctagtaactgttgtacacaaagacaaagctcattcaattggcaaagccatatgtgaacggctgaaggattctcttcctaggcaactgtttgagatagcaattcaagctgctattggaagtaaaatcattgcaagagaaactgtgaaagcctataggaaaaacgttttggcaaaatgttatggtggtgatattacccgaaaaatgaagcttttgaagagacaagcagaagggaaaaaaaagctgaggaaaattggcaacgttgaagttccaaaagatgcttttataaaagttctgaaaacacaatcttctaaataattggtgggaaaacaaagaattttcattgcaatttgtaatatgctgacaacagaaagaaaattataaaatttgcttgttactttcagggtattcaggttcaaataacctactagtctttcgttgaaagggagtagttagtgggtaggcaagagcttagattttgaagccatgttgcctgttctcaaatatctgttccaaccactcactagtaaggtgaccgtggccagattaacctttgtttcctcttcagtaaaatcgagattatactactacctacataagttgttgttgtgaagattaaatgaggtaatacgttaaatattcagaggtgcaagacacatagtaagcactcaattgtaactacagttaagtccttaaatgccatcgaaaggttcttagaaactgactttaagcaaaatgacacgtagcacaatgttcttgaatgatgtcatttccttaagtggtttgtaacatcgatgaggaaaaaaaattggtttatgcgtcatttcattttatttttatttattttttgagacagagtcttgccctgtcgcccaggctggagtgcaatggcacaatctcgactcactgcaacctctgcctcctgggttcaagagattctcctgcctcagcctccattacaggcgtgcaccaccatgctcggctaattttttgtatctttagtagagtcggggtttcaccatgttggccaggctggtcttgaactcctgacctcgtgatccacccaccgtggcctcccaaagtgctgattacaggtgtgagccaccatgcccagccatgtcatttcatttaaagtcacaatttccatgaatctcaacaagtgaggacctgctatattttgttgcatgcagtttttctttacggacactaaaaggccccatacttaagattccatctactttaagtttaaaggattttcagaatcaccttaagtgtcaaatttgttagcaggattaattgatatgaattcacttattaaacagtaaactcaaataacatagacatcaaataacagacatctgctctagttaatgataaaatgtttatagattttatcaggtggttagtttgaaactaaatggtttacatctaaattaagggcaggagctgtctttcagacattcaaaacgcatttgtgtaaaatgacaggtgtttggtattaccaggaactcataatgacattttaataattattgtctaaatttcataatcgaagcgattttagagtagttaacttgagatttcacagccagtaaatggctgtatttctccagagctctcagctcccatgtttattcagccaacgaacaaaccagactgcagactgtattagagcaagacaacatcatttagccattgatttttatcttctaccttgaatgaattgaatgaagaaaatgtcttttagggataaacactatcaaggatgaattttatactaaggttatatgaaagaaaaatctcaaaaccactaagccaaagggaagtcaagctgggaactgattgaggcaaacctgcctcccattttattcctaaataagacagccacaaagataaaatttgctcacaagggaattccttatggacaaagaactcaaagtcttcacatgaaacaaatgcataaatgattgctttctctgtttcatgtttcactaagccagattaaggtataactgactattcctctactctcctctcacatgtaaattgtatattcagtgaaaggctaatcagaaactcaaaaaaatgcaaccctttctctcttacctgcctatgcttgaagcccccgcccctcttcaagttgtcctgcctttcaagaccaatgtacaccttacacatactgattgatgtctcatgtctctctaaaatgtgtaaaaccaagctgtgccccaaccaccttgggcacatgtggtgaggacctcctgaggctgtgtcatgggcacaccttaaccctgggaaaataaactttctaaactg

SEQ ID NO: 287572 - DNA, 3951 bp, Homo sapiens
agacgtcggcaagctgcgccgccgcttcgggttgcttccggatctggtacttgggcagagctccccggggttcattgtcttcgcttcacaggatctgtttgagtcctgtccaccggatcctacggggggtaccttcgaaaaaaaacgggctatgctgctgttgcgtgtgggtaccctctcctgacgcctccgccgcccgggtcatgtggaccctcgtgggtcggggctgggggtgcgcacgcgctctcgcgccacgagccactggggccgcgcttctggtggccccggggccccggtccgcgccgacccttggggctgctccagagtcctgggctaccgacaggctctacagctccgcagaattcaaggaaaaacctgacatgtctaggtttcctgttgaaaatattagaaatttcagtattgttgcacacgtggatcatggcaaaagtactttagctgacaggctcctagaacttacagggacaattgataaaacaaagaataataagcaggttcttgataaattgcaagtggaacgagaaagaggaatcactgttaaagcacagacagcatctctcttttacaattgtgaaggaaagcagtaccttttaaatctcattgatacaccgggccatgttgattttagttatgaagtatccaggtcactttctgcttgccagggtgttttacttgtggttgatgcaaatgagggaattcaagcccaaactgtagcaaacttctttcttgccttcgaagcacagctatcggtaattccagttataaataagatagatctgaagaatgctgatcctgaaagggttgaaaaccaaattgagaaagtgtttgatattccaagtgatgaatgtattaagatttctgctaaacttggaacaaatgttgagagtgttcttcaggcaattattgaaagaatcccccctcctaaagtgcatcgcaaaaatcctctgagagctttggtatttgactccacctttgaccagtatagaggtgtgatagccaatgtagcattatttgacggagtggtttccaaaggagataaaattgtatctgcacatactcaaaagacatacgaagttaatgaagtaggagtcttgaatcctaatgagcagccaactcataaattgaatgtatcctctagaccaatctgaatataacaatctgaagagtgctatagaaaaactgactttaaatgattccagtgtgaccgttcatcgggatagtagccttgctctgggtgctggctggaggctaggatttcttggacttttgcacatggaagttttcaaccagcgactggagcaagaatataatgcttctgttattttaacaacccctactgttccatataaagctgtactgtcatcatcaaaattgataaaggaacatagagaaaaagaaattacaattatcaatcctgcacaattccccgataaatcaaaagtaacagaatatttggagccagttgttttgggcactattatcacaccagatgaatacactggaaaaataatgatgctttgcgaggctcgaagagcagttcagaagaatatgatatttattgatcaaaatagagttatgcttaaatatctctttcctttgaatgaaattgtggtagatttttatgactctttgaaatccctatcttctggatatgctagttttgattacgaagatgcaggctaccagactgcagaacttgtaaaaatggatattctactgaatggaaatactgtagaggagctagtaactgttgtacacaatgtgaaagcctataggaaaaacgttttggcaaaatgttatggtggtgatattacccgaaaaatgaagcttttgaagagacaagcagaagggaaaaaaaagctgaggaaaattggcaacgttgaagttccaaaagatgcttttataaaagttctgaaaacacaatcttctaaataattggtgggaaaacaaagaattttcattgcaatttgtaatatgctgacaacagaaagaaaattataaaatttgcttgttactttcagggtattcaggttcaaataacctactagtctttcgttgaaagggagtagttagtgggtaggcaagagcttagattttgaagccatgttgcctgttctcaaatatctgttccaaccactcactagtaaggtgaccgtggccagattaacctttgtttcctcttcagtaaaatcgagattatactactacctacataagttgttgttgtgaagattaaatgaggtaatacgttaaatattcagaggtgcaagacacatagtaagcactcaattgtaactacagttaagtccttaaatgccatcgaaaggttcttagaaactgactttaagcaaaatgacacgtagcacaatgttcttgaatgatgtcatttccttaagtggtttgtaacatcgatgaggaaaaaaaattggtttatgcgtcatttcattttatttttatttattttttgagacagagtcttgccctgtcgcccaggctggagtgcaatggcacaatctcgactcactgcaacctctgcctcctgggttcaagagattctcctgcctcagcctccattacaggcgtgcaccaccatgctcggctaattttttgtatctttagtagagtcggggtttcaccatgttggccaggctggtcttgaactcctgacctcgtgatccacccaccgtggcctcccaaagtgctgattacaggtgtgagccaccatgcccagccatgtcatttcatttaaagtcacaatttccatgaatctcaacaagtgaggacctgctatattttgttgcatgcagtttttctttacggacactaaaaggccccatacttaagattccatctactttaagtttaaaggattttcagaatcaccttaagtgtcaaatttgttagcaggattaattgatatgaattcacttattaaacagtaaactcaaataacatagacatcaaataacagacatctgctctagttaatgataaaatgtttatagattttatcaggtggttagtttgaaactaaatggtttacatctaaattaagggcaggagctgtctttcagacattcaaaacgcatttgtgtaaaatgacaggtgtttggtattaccaggaactcataatgacattttaataattattgtctaaatttcataatcgaagcgattttagagtagttaacttgagatttcacagccagtaaatggctgtatttctccagagctctcagctcccatgtttattcagccaacgaacaaaccagactgcagactgtattagagcaagacaacatcatttagccattgatttttatcttctaccttgaatgaattgaatgaagaaaatgtcttttagggataaacactatcaaggatgaattttatactaaggttatatgaaagaaaaatctcaaaaccactaagccaaagggaagtcaagctgggaactgattgaggcaaacctgcctcccattttattcctaaataagacagccacaaagataaaatttgctcacaagggaattccttatggacaaagaactcaaagtcttcacatgaaacaaatgcataaatgattgctttctctgtttcatgtttcactaagccagattaaggtataactgactattcctctactctcctctcacatgtaaattgtatattcagtgaaaggctaatcagaaactcaaaaaaatgcaaccctttctctcttacctgcctatgcttgaagcccccgcccctcttcaagttgtcctgcctttcaagaccaatgtacaccttacacatactgattgatgtctcatgtctctctaaaatgtgtaaaaccaagctgtgccccaaccaccttgggcacatgtggtgaggacctcctgaggctgtgtcatgggcacaccttaaccctgggaaaataaactttctaaactg

SEQ ID NO: 287573 - DNA, 2748 bp, Homo sapiens
ccaaataggaaatccaaaggtctcatttattaatggcattttatgagtgtcatagcatttatttaaacatagagttgtcattggtaatagaaagttaaacagaaacccaactcatgaatctgaaaatgatccattaataatatatagtattgtccgaagcctcccagctgctgggaacattgggaaggcatgatatttgtcttcaataaaccattttctttgtcaggttcaccagcttattttcctttcccctataaacatattccccttgcttttgcccttgatttaataaacataaaaagataacatttagatccattcacaagaaactgtatatgtaatattttgatggaaacatatctctttggggagtgtaatgcggtagaaagtagacatttagtaaagagtaaagagtaataaaggtaatctctcaggaagtgtaatatttatcacttggacttttttccttttagttttgattacgaagatgcaggctaccagactgcagaacttgtaaaaatggatattctactgaatggaaatactgtagaggagctagtaactgttgtacacaatgtgaaagcctataggaaaaacgttttggcaaaatgttatggtggtgatattacccgaaaaatgaagcttttgaagagacaagcagaagggaaaaaaaagctgaggaaaattggcaacgttgaagttccaaaagatgcttttataaaagttctgaaaacacaatcttctaaataattggtgggaaaacaaagaattttcattgcaatttgtaatatgctgacaacagaaagaaaattataaaatttgcttgttactttcagggtattcaggttcaaataacctactagtctttcgttgaaagggagtagttagtgggtaggcaagagcttagattttgaagccatgttgcctgttctcaaatatctgttccaaccactcactagtaaggtgaccgtggccagattaacctttgtttcctcttcagtaaaatcgagattatactactacctacataagttgttgttgtgaagattaaatgaggtaatacgttaaatattcagaggtgcaagacacatagtaagcactcaattgtaactacagttaagtccttaaatgccatcgaaaggttcttagaaactgactttaagcaaaatgacacgtagcacaatgttcttgaatgatgtcatttccttaagtggtttgtaacatcgatgaggaaaaaaaattggtttatgcgtcatttcattttatttttatttattttttgagacagagtcttgccctgtcgcccaggctggagtgcaatggcacaatctcgactcactgcaacctctgcctcctgggttcaagagattctcctgcctcagcctccattacaggcgtgcaccaccatgctcggctaattttttgtatctttagtagagtcggggtttcaccatgttggccaggctggtcttgaactcctgacctcgtgatccacccaccgtggcctcccaaagtgctgattacaggtgtgagccaccatgcccagccatgtcatttcatttaaagtcacaatttccatgaatctcaacaagtgaggacctgctatattttgttgcatgcagtttttctttacggacactaaaaggccccatacttaagattccatctactttaagtttaaaggattttcagaatcaccttaagtgtcaaatttgttagcaggattaattgatatgaattcacttattaaacagtaaactcaaataacatagacatcaaataacagacatctgctctagttaatgataaaatgtttatagattttatcaggtggttagtttgaaactaaatggtttacatctaaattaagggcaggagctgtctttcagacattcaaaacgcatttgtgtaaaatgacaggtgtttggtattaccaggaactcataatgacattttaataattattgtctaaatttcataatcgaagcgattttagagtagttaacttgagatttcacagccagtaaatggctgtatttctccagagctctcagctcccatgtttattcagccaacgaacaaaccagactgcagactgtattagagcaagacaacatcatttagccattgatttttatcttctaccttgaatgaattgaatgaagaaaatgtcttttagggataaacactatcaaggatgaattttatactaaggttatatgaaagaaaaatctcaaaaccactaagccaaagggaagtcaagctgggaactgattgaggcaaacctgcctcccattttattcctaaataagacagccacaaagataaaatttgctcacaagggaattccttatggacaaagaactcaaagtcttcacatgaaacaaatgcataaatgattgctttctctgtttcatgtttcactaagccagattaaggtataactgactattcctctactctcctctcacatgtaaattgtatattcagtgaaaggctaatcagaaactcaaaaaaatgcaaccctttctctcttacctgcctatgcttgaagcccccgcccctcttcaagttgtcctgcctttcaagaccaatgtacaccttacacatactgattgatgtctcatgtctctctaaaatgtgtaaaaccaagctgtgccccaaccaccttgggcacatgtggtgaggacctcctgaggctgtgtcatgggcacaccttaaccctgggaaaataaactttctaaactg

SEQ ID NO: 287574 - DNA, 3536 bp, Homo sapiens
agacgtcggcaagctgcgccgccgcttcgggttgcttccggatctggtacttgggcagagctccccggggttcattgtcttcgcttcacaggatctgtttgagtcctgtccaccggatcctacggggggtaccttcgaaaaaaaacgggctatgctgctgttgcgtgtgggtaccctctcctgacgcctccgccgcccgggtcatgtggaccctcgtgggtcggggctgggggtgcgcacgcgctctcgcgccacgagccactggggccgcgcttctggtggccccggggccccggtccgcgccgacccttggggctgctccagagtcctgggctaccgacaggctctacagctccgcagaattcaaggaaaaacctgacatgtctaggtttcctgttgaaaatattagaaatttcagtattgttgcacacgtggatcatggcaaaagtactttagctgacaggctcctagaacttacagggacaattgataaaacaaagaataataagcaggttcttgataaattgcaagtggaacgagaaagaggaatcactgttaaagcacagacagcatctctcttttacaattgtgaaggaaagcagtaccttttaaatctcattgatacaccgggccatgttgattttagttatgaagtatccaggtcactttctgcttgccagggtgttttacttgtggttgatgcaaatgagggaattcaagcccaaactgtagcaaacttctttcttgccttcgaagcacagctatcggtaattccagttataaataagatagatctgaagaatgctgatcctgaaagggttgaaaaccaaattgagaaagtgtttgatattccaagtgatgaatgtattaagatttctgctaaacttggaacaaatgttgagagtgttcttcaggcaattattgaaagaatcccccctcctaaagtgcatcgcaaaaatcctctgagagctttggtatttgactccacctttgaccagtatagaggtgtgatagccaatgtagcattatttgacggagtggtttccaaaggagataaaattgtatctgcacatactcaaaagacatacgaagttaatgaagtaggagtcttgaatcctaatgagcagccaactcataaattgaatgtatcctctagaccaatctgaatataacaatctgaagagtgctatagaaaaactgactttaaatgattccagtgtgaccgttcatcgggatagtagccttgctctgggtgctggctggaggctaggatttcttggacttttgcacatggaagttttcaaccagcgactggagcaagaatataatgcttctgttattttaacaacccctactgttccatataaagctgtactgtcatcatcaaaattgataaaggaacatagagaaaaagaaattacaattatcaatcctgcacaattccccgataaatcaaaagtaacagaatatttggagccagttgttttgggcactattatcacaccagatgaatacactggaaaaataatgatgctttgcgaggctcgaagagcagttcagaagaatatgatatttattgatcaaaatagagttatgcttaaatatctctttcctttgaatgaaattgtggtagatttttatgactctttgaaatccctatcttctggatatgctagttttgattacgaagatgcaggctaccagactgcagaacttgtaaaaatggatattctactgaatggaaatactgtagaggagctagtaactgttgtacacaaagacaaagctcattcaattggcaaagccatatgtgaacggctgaaggattctcttcctaggcaactgtttgagatagcaattcaagctgctattggaagtaaaatcattgcaagagaaactgtgaaagcctataggaaaaacgttttggcaaaatgttatggtggtgatattacccgaaaaatgaagcttttgaagagacaagcagaagggaaaaaaaagctgaggaaaattggcaacgttgaagttccaaaagatgcttttataaaagttctgaaaacacaatcttctaaataattgagtcttgccctgtcgcccaggctggagtgcaatggcacaatctcgactcactgcaacctctgcctcctgggttcaagagattctcctgcctcagcctccattacaggcgtgcaccaccatgctcggctaattttttgtatctttagtagagtcggggtttcaccatgttggccaggctggtcttgaactcctgacctcgtgatccacccaccgtggcctcccaaagtgctgattacaggtgtgagccaccatgcccagccatgtcatttcatttaaagtcacaatttccatgaatctcaacaagtgaggacctgctatattttgttgcatgcagtttttctttacggacactaaaaggccccatacttaagattccatctactttaagtttaaaggattttcagaatcaccttaagtgtcaaatttgttagcaggattaattgatatgaattcacttattaaacagtaaactcaaataacatagacatcaaataacagacatctgctctagttaatgataaaatgtttatagattttatcaggtggttagtttgaaactaaatggtttacatctaaattaagggcaggagctgtctttcagacattcaaaacgcatttgtgtaaaatgacaggtgtttggtattaccaggaactcataatgacattttaataattattgtctaaatttcataatcgaagcgattttagagtagttaacttgagatttcacagccagtaaatggctgtatttctccagagctctcagctcccatgtttattcagccaacgaacaaaccagactgcagactgtattagagcaagacaacatcatttagccattgatttttatcttctaccttgaatgaattgaatgaagaaaatgtcttttagggataaacactatcaaggatgaattttatactaaggttatatgaaagaaaaatctcaaaaccactaagccaaagggaagtcaagctgggaactgattgaggcaaacctgcctcccattttattcctaaataagacagccacaaagataaaatttgctcacaagggaattccttatggacaaagaactcaaagtcttcacatgaaacaaatgcataaatgattgctttctctgtttcatgtttcactaagccagattaaggtataactgactattcctctactctcctctcacatgtaaattgtatattcagtgaaaggctaatcagaaactcaaaaaaatgcaaccctttctctcttacctgcctatgcttgaagcccccgcccctcttcaagttgtcctgcctttcaagaccaatgtacaccttacacatactgattgatgtctcatgtctctctaaaatgtgtaaaaccaagctgtgccccaaccaccttgggcacatgtggtgaggacctcctgaggctgtgtcatgggcacaccttaaccctgggaaaataaactttctaaactg

SEQ ID NO: 287575 - DNA, 2868 bp, Homo sapiens
ccaaataggaaatccaaaggtctcatttattaatggcattttatgagtgtcatagcatttatttaaacatagagttgtcattggtaatagaaagttaaacagaaacccaactcatgaatctgaaaatgatccattaataatatatagtattgtccgaagcctcccagctgctgggaacattgggaaggcatgatatttgtcttcaataaaccattttctttgtcaggttcaccagcttattttcctttcccctataaacatattccccttgcttttgcccttgatttaataaacataaaaagataacatttagatccattcacaagaaactgtatatgtaatattttgatggaaacatatctctttggggagtgtaatgcggtagaaagtagacatttagtaaagagtaaagagtaataaaggtaatctctcaggaagtgtaatatttatcacttggacttttttccttttagttttgattacgaagatgcaggctaccagactgcagaacttgtaaaaatggatattctactgaatggaaatactgtagaggagctagtaactgttgtacacaaagacaaagctcattcaattggcaaagccatatgtgaacggctgaaggattctcttcctaggcaactgtttgagatagcaattcaagctgctattggaagtaaaatcattgcaagagaaactgtgaaagcctataggaaaaacgttttggcaaaatgttatggtggtgatattacccgaaaaatgaagcttttgaagagacaagcagaagggaaaaaaaagctgaggaaaattggcaacgttgaagttccaaaagatgcttttataaaagttctgaaaacacaatcttctaaataattggtgggaaaacaaagaattttcattgcaatttgtaatatgctgacaacagaaagaaaattataaaatttgcttgttactttcagggtattcaggttcaaataacctactagtctttcgttgaaagggagtagttagtgggtaggcaagagcttagattttgaagccatgttgcctgttctcaaatatctgttccaaccactcactagtaaggtgaccgtggccagattaacctttgtttcctcttcagtaaaatcgagattatactactacctacataagttgttgttgtgaagattaaatgaggtaatacgttaaatattcagaggtgcaagacacatagtaagcactcaattgtaactacagttaagtccttaaatgccatcgaaaggttcttagaaactgactttaagcaaaatgacacgtagcacaatgttcttgaatgatgtcatttccttaagtggtttgtaacatcgatgaggaaaaaaaattggtttatgcgtcatttcattttatttttatttattttttgagacagagtcttgccctgtcgcccaggctggagtgcaatggcacaatctcgactcactgcaacctctgcctcctgggttcaagagattctcctgcctcagcctccattacaggcgtgcaccaccatgctcggctaattttttgtatctttagtagagtcggggtttcaccatgttggccaggctggtcttgaactcctgacctcgtgatccacccaccgtggcctcccaaagtgctgattacaggtgtgagccaccatgcccagccatgtcatttcatttaaagtcacaatttccatgaatctcaacaagtgaggacctgctatattttgttgcatgcagtttttctttacggacactaaaaggccccatacttaagattccatctactttaagtttaaaggattttcagaatcaccttaagtgtcaaatttgttagcaggattaattgatatgaattcacttattaaacagtaaactcaaataacatagacatcaaataacagacatctgctctagttaatgataaaatgtttatagattttatcaggtggttagtttgaaactaaatggtttacatctaaattaagggcaggagctgtctttcagacattcaaaacgcatttgtgtaaaatgacaggtgtttggtattaccaggaactcataatgacattttaataattattgtctaaatttcataatcgaagcgattttagagtagttaacttgagatttcacagccagtaaatggctgtatttctccagagctctcagctcccatgtttattcagccaacgaacaaaccagactgcagactgtattagagcaagacaacatcatttagccattgatttttatcttctaccttgaatgaattgaatgaagaaaatgtcttttagggataaacactatcaaggatgaattttatactaaggttatatgaaagaaaaatctcaaaaccactaagccaaagggaagtcaagctgggaactgattgaggcaaacctgcctcccattttattcctaaataagacagccacaaagataaaatttgctcacaagggaattccttatggacaaagaactcaaagtcttcacatgaaacaaatgcataaatgattgctttctctgtttcatgtttcactaagccagattaaggtataactgactattcctctactctcctctcacatgtaaattgtatattcagtgaaaggctaatcagaaactcaaaaaaatgcaaccctttctctcttacctgcctatgcttgaagcccccgcccctcttcaagttgtcctgcctttcaagaccaatgtacaccttacacatactgattgatgtctcatgtctctctaaaatgtgtaaaaccaagctgtgccccaaccaccttgggcacatgtggtgaggacctcctgaggctgtgtcatgggcacaccttaaccctgggaaaataaactttctaaactg

SEQ ID NO: 287576 - DNA, 2212 bp, Homo sapiens
  misc_feature (48)..(48): n is a, c, g, or t
  misc_feature (56)..(56): n is a, c, g, or t
acatatttactaattccacccccatttgatttacgactttatgtgaancctatagnaaatcgttttggcaaaatgttatggtggtgatattacccgaaaaatgaagcttttgaagagacaagcagaagggaaaaaaaagctgaggaaaattggcaacgttgaagttccaaaagatgcttttataaaagttctgaaaacacaatcttctaaataattggtgggaaaacaaagaattttcattgcaatttgtaatatgctgacaacagaaagaaaattataaaatttgcttgttactttcagggtattcaggttcaaataacctactagtctttcgttgaaagggagtagttagtgggtaggcaagagcttagattttgaagccatgttgcctgttctcaaatatctgttccaaccactcactagtaaggtgaccgtggccagattaacctttgtttcctcttcagtaaaatcgagattatactactacctacataagttgttgttgtgaagattaaatgaggtaatacgttaaatattcagaggtgcaagacacatagtaagcactcaattgtaactacagttaagtccttaaatgccatcgaaaggttcttagaaactgactttaagcaaaatgacacgtagcacaatgttcttgaatgatgtcatttccttaagtggtttgtaacatcgatgaggaaaaaaaattggtttatgcgtcatttcattttatttttatttattttttgagacagagtcttgccctgtcgcccaggctggagtgcaatggcacaatctcgactcactgcaacctctgcctcctgggttcaagagattctcctgcctcagcctccattacaggcgtgcaccaccatgctcggctaattttttgtatctttagtagagtcggggtttcaccatgttggccaggctggtcttgaactcctgacctcgtgatccacccaccgtggcctcccaaagtgctgattacaggtgtgagccaccatgcccagccatgtcatttcatttaaagtcacaatttccatgaatctcaacaagtgaggacctgctatattttgttgcatgcagtttttctttacggacactaaaaggccccatacttaagattccatctactttaagtttaaaggattttcagaatcaccttaagtgtcaaatttgttagcaggattaattgatatgaattcacttattaaacagtaaactcaaataacatagacatcaaataacagacatctgctctagttaatgataaaatgtttatagattttatcaggtggttagtttgaaactaaatggtttacatctaaattaagggcaggagctgtctttcagacattcaaaacgcatttgtgtaaaatgacaggtgtttggtattaccaggaactcataatgacattttaataattattgtctaaatttcataatcgaagcgattttagagtagttaacttgagatttcacagccagtaaatggctgtatttctccagagctctcagctcccatgtttattcagccaacgaacaaaccagactgcagactgtattagagcaagacaacatcatttagccattgatttttatcttctaccttgaatgaattgaatgaagaaaatgtcttttagggataaacactatcaaggatgaattttatactaaggttatatgaaagaaaaatctcaaaaccactaagccaaagggaagtcaagctgggaactgattgaggcaaacctgcctcccattttattcctaaataagacagccacaaagataaaatttgctcacaagggaattccttatggacaaagaactcaaagtcttcacatgaaacaaatgcataaatgattgctttctctgtttcatgtttcactaagccagattaaggtataactgactattcctctactctcctctcacatgtaaattgtatattcagtgaaaggctaatcagaaactcaaaaaaatgcaaccctttctctcttacctgcctatgcttgaagcccccgcccctcttcaagttgtcctgcctttcaagaccaatgtacaccttacacatactgattgatgtctcatgtctctctaaaatgtgtaaaaccaagctgtgccccaaccaccttgggcacatgtggtgaggacctcctgaggctgtgtcatgggcacaccttaaccctgggaaaataaactttctaaactg

SEQ ID NO: 287577 - DNA, 2211 bp, Homo sapiens
  misc_feature (47)..(47): n is a, c, g, or t
  misc_feature (55)..(55): n is a, c, g, or t
gtattgaattcctgtagtgaacatggactaatacaagttatgtgaancctatagnaaatcgttttggcaaaatgttatggtggtgatattacccgaaaaatgaagcttttgaagagacaagcagaagggaaaaaaaagctgaggaaaattggcaacgttgaagttccaaaagatgcttttataaaagttctgaaaacacaatcttctaaataattggtgggaaaacaaagaattttcattgcaatttgtaatatgctgacaacagaaagaaaattataaaatttgcttgttactttcagggtattcaggttcaaataacctactagtctttcgttgaaagggagtagttagtgggtaggcaagagcttagattttgaagccatgttgcctgttctcaaatatctgttccaaccactcactagtaaggtgaccgtggccagattaacctttgtttcctcttcagtaaaatcgagattatactactacctacataagttgttgttgtgaagattaaatgaggtaatacgttaaatattcagaggtgcaagacacatagtaagcactcaattgtaactacagttaagtccttaaatgccatcgaaaggttcttagaaactgactttaagcaaaatgacacgtagcacaatgttcttgaatgatgtcatttccttaagtggtttgtaacatcgatgaggaaaaaaaattggtttatgcgtcatttcattttatttttatttattttttgagacagagtcttgccctgtcgcccaggctggagtgcaatggcacaatctcgactcactgcaacctctgcctcctgggttcaagagattctcctgcctcagcctccattacaggcgtgcaccaccatgctcggctaattttttgtatctttagtagagtcggggtttcaccatgttggccaggctggtcttgaactcctgacctcgtgatccacccaccgtggcctcccaaagtgctgattacaggtgtgagccaccatgcccagccatgtcatttcatttaaagtcacaatttccatgaatctcaacaagtgaggacctgctatattttgttgcatgcagtttttctttacggacactaaaaggccccatacttaagattccatctactttaagtttaaaggattttcagaatcaccttaagtgtcaaatttgttagcaggattaattgatatgaattcacttattaaacagtaaactcaaataacatagacatcaaataacagacatctgctctagttaatgataaaatgtttatagattttatcaggtggttagtttgaaactaaatggtttacatctaaattaagggcaggagctgtctttcagacattcaaaacgcatttgtgtaaaatgacaggtgtttggtattaccaggaactcataatgacattttaataattattgtctaaatttcataatcgaagcgattttagagtagttaacttgagatttcacagccagtaaatggctgtatttctccagagctctcagctcccatgtttattcagccaacgaacaaaccagactgcagactgtattagagcaagacaacatcatttagccattgatttttatcttctaccttgaatgaattgaatgaagaaaatgtcttttagggataaacactatcaaggatgaattttatactaaggttatatgaaagaaaaatctcaaaaccactaagccaaagggaagtcaagctgggaactgattgaggcaaacctgcctcccattttattcctaaataagacagccacaaagataaaatttgctcacaagggaattccttatggacaaagaactcaaagtcttcacatgaaacaaatgcataaatgattgctttctctgtttcatgtttcactaagccagattaaggtataactgactattcctctactctcctctcacatgtaaattgtatattcagtgaaaggctaatcagaaactcaaaaaaatgcaaccctttctctcttacctgcctatgcttgaagcccccgcccctcttcaagttgtcctgcctttcaagaccaatgtacaccttacacatactgattgatgtctcatgtctctctaaaatgtgtaaaaccaagctgtgccccaaccaccttgggcacatgtggtgaggacctcctgaggctgtgtcatgggcacaccttaaccctgggaaaataaactttctaaactg

SEQ ID NO: 287578 - DNA, 2218 bp, Homo sapiens
  misc_feature (54)..(54): n is a, c, g, or t
  misc_feature (62)..(62): n is a, c, g, or t
tatgatcttctataattattttctcactttttttgttatcccccctgtgtgaancctatagnaaatcgttttggcaaaatgttatggtggtgatattacccgaaaaatgaagcttttgaagagacaagcagaagggaaaaaaaagctgaggaaaattggcaacgttgaagttccaaaagatgcttttataaaagttctgaaaacacaatcttctaaataattggtgggaaaacaaagaattttcattgcaatttgtaatatgctgacaacagaaagaaaattataaaatttgcttgttactttcagggtattcaggttcaaataacctactagtctttcgttgaaagggagtagttagtgggtaggcaagagcttagattttgaagccatgttgcctgttctcaaatatctgttccaaccactcactagtaaggtgaccgtggccagattaacctttgtttcctcttcagtaaaatcgagattatactactacctacataagttgttgttgtgaagattaaatgaggtaatacgttaaatattcagaggtgcaagacacatagtaagcactcaattgtaactacagttaagtccttaaatgccatcgaaaggttcttagaaactgactttaagcaaaatgacacgtagcacaatgttcttgaatgatgtcatttccttaagtggtttgtaacatcgatgaggaaaaaaaattggtttatgcgtcatttcattttatttttatttattttttgagacagagtcttgccctgtcgcccaggctggagtgcaatggcacaatctcgactcactgcaacctctgcctcctgggttcaagagattctcctgcctcagcctccattacaggcgtgcaccaccatgctcggctaattttttgtatctttagtagagtcggggtttcaccatgttggccaggctggtcttgaactcctgacctcgtgatccacccaccgtggcctcccaaagtgctgattacaggtgtgagccaccatgcccagccatgtcatttcatttaaagtcacaatttccatgaatctcaacaagtgaggacctgctatattttgttgcatgcagtttttctttacggacactaaaaggccccatacttaagattccatctactttaagtttaaaggattttcagaatcaccttaagtgtcaaatttgttagcaggattaattgatatgaattcacttattaaacagtaaactcaaataacatagacatcaaataacagacatctgctctagttaatgataaaatgtttatagattttatcaggtggttagtttgaaactaaatggtttacatctaaattaagggcaggagctgtctttcagacattcaaaacgcatttgtgtaaaatgacaggtgtttggtattaccaggaactcataatgacattttaataattattgtctaaatttcataatcgaagcgattttagagtagttaacttgagatttcacagccagtaaatggctgtatttctccagagctctcagctcccatgtttattcagccaacgaacaaaccagactgcagactgtattagagcaagacaacatcatttagccattgatttttatcttctaccttgaatgaattgaatgaagaaaatgtcttttagggataaacactatcaaggatgaattttatactaaggttatatgaaagaaaaatctcaaaaccactaagccaaagggaagtcaagctgggaactgattgaggcaaacctgcctcccattttattcctaaataagacagccacaaagataaaatttgctcacaagggaattccttatggacaaagaactcaaagtcttcacatgaaacaaatgcataaatgattgctttctctgtttcatgtttcactaagccagattaaggtataactgactattcctctactctcctctcacatgtaaattgtatattcagtgaaaggctaatcagaaactcaaaaaaatgcaaccctttctctcttacctgcctatgcttgaagcccccgcccctcttcaagttgtcctgcctttcaagaccaatgtacaccttacacatactgattgatgtctcatgtctctctaaaatgtgtaaaaccaagctgtgccccaaccaccttgggcacatgtggtgaggacctcctgaggctgtgtcatgggcacaccttaaccctgggaaaataaactttctaaactg

SEQ ID NO: 287579 - DNA, 2170 bp, Homo sapiens
agacgtcggcaagctgcgccgccgcttcgggttgcttccggatctggtacttgggcagagctccccggggttcattgtcttcgcttcacaggatctgtttgagtcctgtccaccggatcctacggggggtaccttcgaaaaaaaacgggctatgctgctgttgcgtgtgggtaccctctcctgacgcctccgccgcccgggtcatgtggaccctcgtgggtcggggctgggggtgcgcacgcgctctcgcgccacgagccactggggccgcgcttctggtggccccggggccccggtccgcgccgacccttggggctgctccagagtcctgggctaccgacaggctctacagctccgcagaattcaaggaaaaacctgacatgtctaggtttcctgttgaaaatattagaaatttcagtattgttgcacacgtggatcatggcaaaagtactttagctgacaggctcctagaacttacagggacaattgataaaacaaagaataataagcaggttcttgataaattgcaagtggaacgagaaagaggaatcactgttaaagcacagacagcatctctcttttacaattgtgaaggaaagcagtaccttttaaatctcattgatacaccgggccatgttgattttagttatgaagtatccaggtcactttctgcttgccagggtgttttacttgtggttgatgcaaatgagggaattcaagcccaaactgtagcaaacttctttcttgccttcgaagcacagctatcggtaattccagttataaataagatagatctgaagaatgctgatcctgaaagggttgaaaaccaaattgagaaagtgtttgatattccaagtgatgaatgtattaagatttctgctaaacttggaacaaatgttgagagtgttcttcaggcaattattgaaagaatcccccctcctaaagtgcatcgcaaaaatcctctgagagctttggtatttgactccacctttgaccagtatagaggtgtgatagccaatgtagcattatttgacggagtggtttccaaaggagataaaattgtatctgcacatactcaaaagacatacgaagttaatgaagtaggagtcttgaatcctaatgagcagccaactcataaattgaatgtatcctctagaccaatctgaatataacaatctgaagagtgctatagaaaaactgactttaaatgattccagtgtgaccgttcatcgggatagtagccttgctctgggtgctggctggaggctaggatttcttggacttttgcacatggaagttttcaaccagcgactggagcaagaatataatgcttctgttattttaacaacccctactgttccatataaagctgtactgtcatcatcaaaattgataaaggaacatagagaaaaagaaattacaattatcaatcctgcacaattccccgataaatcaaaagtaacagaatatttggagccagttgttttgggcactattatcacaccagatgaatacactggaaaaataatgatgctttgcgaggctcgaagagcagttcagaagaatatgatatttattgatcaaaatagagttatgcttaaatatctctttcctttgaatgaaattgtggtagatttttatgactctttgaaatccctatcttctggatatgctagttttgattacgaagatgcaggctaccagactgcagaacttgtaaaaatggatattctactgaatggaaatactgtagaggagctagtaactgttgtacacaaagacaaagctcattcaattggcaaagccatatgtgaacggctgaaggattctcttcctaggcaactgtttgagatagcaattcaagctgctattggaagtaaaatcattgcaagagaaactgtgaaagcctataggaaaaacgttttggcaaaatgttatggtggtgatattacccgaaaaatgaagcttttgaagagacaagcagaagggaaaaaaaagctgaggaaaattggcaacgttgaagttccaaaagatgcttttataaaagttctgaaaacacaatcttctaaataattggttctgataaaaacagatgaaatctgaaagaccatgacagtagtattttgaaaatgacagtatttgaaattaaaaaattgtaaaagtgttctgt

SEQ ID NO: 287580 - DNA, 2029 bp, Homo sapiens
agacgtcggcaagctgcgccgccgcttcgggttgcttccggatctggtacttgggcagagctccccggggttcattgtcttcgcttcacaggatctgtttgagtcctgtccaccggatcctacggggggtaccttcgaaaaaaaacgggctatgctgctgttgcgtgtgggtaccctctcctgacgcctccgccgcccgggtcatgtggaccctcgtgggtcggggctgggggtgcgcacgcgctctcgcgccacgagccactggggccgcgcttctggtggccccggggccccggtccgcgccgacccttggggctgctccagagtcctgggctaccgacaggctctacagctccgcagaattcaaggaaaaacctgacatgtctaggtttcctgttgaaaatattagaaatttcagtattgttgcacacgtggatcatggcaaaagtactttagctgacaggctcctagaacttacagggacaattgataaaacaaagaataataagcaggttcttgataaattgcaagtggaacgagaaagaggaatcactgttaaagcacagacagcatctctcttttacaattgtgaaggaaagcagtaccttttaaatctcattgatacaccgggccatgttgattttagttatgaagtatccaggtcactttctgcttgccagggtgttttacttgtggttgatgcaaatgagggaattcaagcccaaactgtagcaaacttctttcttgccttcgaagcacagctatcggtaattccagttataaataagatagatctgaagaatgctgatcctgaaagggttgaaaaccaaattgagaaagtgtttgatattccaagtgatgaatgtattaagatttctgctaaacttggaacaaatgttgagagtgttcttcaggcaattattgaaagaatcccccctcctaaagtgcatcgcaaaaatcctctgagagctttggtatttgactccacctttgaccagtatagaggtgtgatagccaatgtagcattatttgacggagtggtttccaaaggagataaaattgtatctgcacatactcaaaagacatacgaagttaatgaagtaggagtcttgaatcctaatgagcagccaactcataaattgaatgtatcctctagaccaatctgaatataacaatctgaagagtgctatagaaaaactgactttaaatgattccagtgtgaccgttcatcgggatagtagccttgctctgggtgctggctggaggctaggatttcttggacttttgcacatggaagttttcaaccagcgactggagcaagaatataatgcttctgttattttaacaacccctactgttccatataaagctgtactgtcatcatcaaaattgataaaggaacatagagaaaaagaaattacaattatcaatcctgcacaattccccgataaatcaaaagtaacagaatatttggagccagttgttttgggcactattatcacaccagatgaatacactggaaaaataatgatgctttgcgaggctcgaagagcagttcagaagaatatgatatttattgatcaaaatagagttatgcttaaatatctctttcctttgaatgaaattgtggtagatttttatgactctttgaaatccctatcttctggatatgctagttttgattacgaagatgcaggctaccagactgcagaacttgtaaaaatggatattctactgaatggaaatactgtagaggagctagtaactgttgtacacaaagacaaagctcattcaattggcaaagccatatgtgaacggctgaaggattctcttcctaggcaactgtttgagatagcaattcaagctgctattggaagtaaaatcattgcaagagaaactgtgaaagcctataggaaaaacgttttggcaaaatgtgttctgataaaaacagatgaaatctgaaagaccatgacagtagtattttgaaaatgacagtatttgaaattaaaaaattgtaaaagtgttctgt

SEQ ID NO: 287581 - DNA, 1484 bp, Homo sapiens
agacgtcggcaagctgcgccgccgcttcgggttgcttccggatctggtacttgggcagagctccccggggttcattgtcttcgcttcacaggatctgtttgagtcctgtccaccggatcctacggggggtaccttcgaaaaaaaacgggctatgctgctgttgcgtgtgggtaccctctcctgacgcctccgccgcccgggtcatgtggaccctcgtgggtcggggctgggggtgcgcacgcgctctcgcgccacgagccactggggccgcgcttctggtggccccggggccccggtccgcgccgacccttggggctgctccagagtcctgggctaccgacaggctctacagctccgcagaattcaaggaaaaacctgacatgtctaggtttcctgttgaaaatattagaaatttcagtattgttgcacacgtggatcatggcaaaagtactttagctgacaggctcctagaacttacagggacaattgataaaacaaagaataataagcaggttcttgataaattgcaagtggaacgagaaagaggaatcactgttaaagcacagacagcatctctcttttacaattgtgaaggaaagcagtaccttttaaatctcattgatacaccgggccatgttgattttagttatgaagtatccaggtcactttctgcttgccagggtgttttacttgtggttgatgcaaatgagggaattcaagcccaaactgtagcaaacttctttcttgccttcgaagcacagctatcggtaattccagttataaataagatagatctgaagaatgctgatcctgaaagggttgaaaaccaaattgagaaagtgtttgatattccaagtgatgaatgtattaagatttctgctaaacttggaacaaatgttgagagtgttcttcaggcaattattgaaagaatcccccctcctaaagtgcatcgcaaaaatcctctgagagctttggtatttgactccacctttgaccagtatagaggtgtgatagccaatgtagcattatttgacggagtggtttccaaaggagataaaattgtatctgcacatactcaaaagacatacgaagttaatgaagtaggagtcttgaatcctaatgagcagccaactcataaattgtaagtaatctgcattagtaaaattaaaatgcatttgtatgtggttctatttctgcatttttctcaacttggtatgcttagaatgatcctcatttggtaacttaaaaaagacaatagaaacgtcagttgatactttttttattctaaatgactagttataactagatttatgatcaagggtagattggatcctatatcgatgtatttgatgagacaatgaaagagttagttccctccacccatatccatattaggtatcatttttgacatttcttcataactagattttccaatgtaaaggtggtataatagaaaccttaataaatctttagtgtggaattca

SEQ ID NO: 287582 - DNA, 814 bp, Homo sapiens
agaaattgatttatacatgtaaactcaaaagactttttacaaagatgctaaggtaactcagtgggaaaggacagtcttttcaacaaatggtccgggactattagatacctgtatccacagcgttgaccttgaccctttgcaccatacacaaaagtaacttggaatgcatcacagtcgttcatggctaatatgcagaaatacaactgatttttcttattgaccttatataacttcaaacttgctaaactcacttattctagtagctttctatagctttctcaaaattgtcaacataggcaaccaggttgtctatagagttttacttcctttttaatctacatgcccttcatttccttttaatgctttacggcactgaaaaggaccctccagtacaatgcttactggaaggtgtgagactagacatcttaccctgttcctgatcttagatggaaacctgaatctaagagctgaaactataaaacatatagaagaatatgctggagaaaatcttaatgaccttgggtaaagatttttttagataggacatagaaaatatgaatcagaaaggaaagaaagagataaattagacttcaaattacaaattctgctctttaaaaggtactttttataaaatgaaaaggcaagtcatacactaaaatattgataaaacatgcatctgacccatcatgaggtataatatataatcaagttcaaaatatatagagaattctcatataacatatgtatgtatatatatataaaataataggctgggtatggtggttcacacctgtaatcccagcactttgggtgg

SEQ ID NO: 287583 - DNA, 1230 bp, Homo sapiens
  misc_feature (1229)..(1229): n is a, c, g, or t
ggcaaaggacgaaggtcagataaactttgagtatcattttattatatagttttttaaaaaatctgaagttcatgttacaagagaccactgcaaaattcaaacttgtttagatttccttagccttcaaaggatgtttaagaacatttccttatctctatcctctcccacccctacagttatcgaatcagctcctctaggtttttctagctctactacagctcagaataattttgataccttactctttttttttgtttgtttgtttgagatggagtctcgcactgttgcctgggctggagcgcagtggcgcaatcttggcttactgcaacctctgccttcctggttcaagcgattctcctggtcagcctcccgagtagctgggactataggtgcccgccaccatgcctggctaattttttgtatttttagtagagacagagacgaggtttcactatgttggccaggctggtcttgaatgcgtgacctgcttcggcctcccaaactgctgggattataggtgtgagccactgtgcccagccaataccttactctctattagtgctaaagttatttccgttttccctcctgatgtattttaccctctatgttttaatttttattcccagaactaccctgtagttcaggcccctcatatcacactcctggacacttagaatcttgtttccatgttgtgcaacactactgtagaagaatctcccttgaactacccacatttagtgtatcattcattgaccaagagcataatggtgtcttccttctggctccaagctgcctttcctgccttatcttccattattttcctcataaagcattgctccagctaatcttatctatttttctccagaatctccatccccttcccgtcagatacatctaaaactttttttgtatctttgtttttcctcgtgttgtatcatcttcctaaaacatgttctacttgtgaaaaccctaagaaattctctctgtcttattgaaattctatctccactgtgaagcattatcatggtgtggccatatatgatctatccctatctgaagtcactgcatttattccctgatcctcatttgcaggtccagtaccttgtacaagtttctttttgtgccatattagactgtaagctccaagagggcagggcccaagtcttatgaatttgtgtctgcatagtgtctagtacttgtctgaggcccacaataaaattcttttgaang

SEQ ID NO: 287584 - DNA, 1081 bp, Homo sapiens
aagtatatgtataaacccgatttaatttccaaaaagtcaaattggaatttgccgggtgtattccaatcaagcccccttaaaacggggtctaataaaccaattcccaagagccctttcttaaagttaagaaccgaacgggccattaaaaaataccatggctgaacaaaacacacccacagccactgacccatccaggactccagagagtcaggtcaaccccgaggaccccttgggcccttctggggtactcctttcggcccccctggtagagtctcgggagttcacacagggtggcaaacaccccctagagctcctctgcctgaatcctgccccctagcctttgaccactgtcagccacctgtgtcccttgagccttcgggtcttcacttcccacttggacatcactgctggacattcccatcgagatgacacctgggttccaatcccagctctgcctttgaagcacttgcggccaccgtcaagtccctttgctctcggaccctgggtttctcatcctttaatgaggtgggttcagaagctctcccatcttcacagcaaccctggcactggcttctcaatgggagggaagcagcagagaaactgaagtgttagacactatgtgtcccaccaccccattacagagacatatgacaatgttcagcaggtcatctttaatgcagaggaggagatgggatgtcactcgctgtctggaggcacgtgggtggtgtgcgggccctcactggccagcctctgggtggccccgcctatcccagtatgaacgtagccaactcaagccctctactgtgtctcctgcagggagagggaggcctcggcacctcagcccacaaggagaaaacagcccctgtccgggtccctccagagctcccttccccagggccacgcctcacctcgaggctgatactcacagcccacgaagcctttgtagccttcatcttccagcagttgaaacagataggggaaattcagctctccggggctgctgggctcccctcggcctgggacctgtgccacctgcacatgccctggggacagatgtggacaaatgtggggtccaggctcc

SEQ ID NO: 287585 - DNA, 496 bp, Homo sapiens
  misc_feature (16)..(16): n is a, c, g, or t
  misc_feature (21)..(23): n is a, c, g, or t
  misc_feature (27)..(27): n is a, c, g, or t
agcgcagggccgaatnccaannnggcnggctgtcaactcacagctgtccatgctgttcacagaggagtgtgacaaggtgcgggacctgatgcacgtgcactcgttcagctatgacttccatctgcgcctcgtgcatcagcacgtgctaggtgcccatctggtgctgcggcacggctaccacctcaccacctttctgcgacacttcctggcccaccaccctgacggaccccactttggccgcaatcacatttaccaagggacattggagctccccacaccactcattgctgcccaccagctatacaactacgtggcttccggaagcggcgcatgtcagcagtgagcctggggaagagctctcgctggctggtgagcaccacgaagaactgtagccgcagaacgtgccgttcagcctctccttgctcctcaaagggtgcagcacagtgacagacaagcagagacacatcaaagtcatcctggtgtcgaagtccctcag

SEQ ID NO: 287586 - DNA, 470 bp, Homo sapiens
gtggtgggtgtgtggggccctatacctcagtcctgacttcctattcctcagaccctgacagccagcccccaagcacctgggtccccagaggattctgagggtgtccccctcatcagcctgccccgcgtgccacagggagggagtcagcctgggcccagccggggattaagtctcatgtccagtcagggcagtgtggactcagaccacctaggttatgatggtggcagcagtggctcagacagtgagggtcccaatgacacccttggtgagaaggcccccttcacattgcggactccacctgggccagcacctccacagagagagcgtcacagctcccagatgatcagtaacccccccacagagagagcgtcacagctcccagatgatcagtaacccccccacagagagagcgtcacagctcccagatgatcgacccccccacagagagagctcgggatcctcagatcaac

SEQ ID NO: 287587 - DNA, 7696 bp, Homo sapiens
  misc_feature (1090)..(1090): n is a, c, g, or t
  misc_feature (1106)..(1106): n is a, c, g, or t
  misc_feature (3651)..(3651): n is a, c, g, or t
aggcagctaaccactgtgccctgctgcaggagcatgcacagcggtgctatgtccgtgggctattccgcagcttgcagcaagcacagagtgtgacctcccaggatttgctgacagcggtagatgcctgtgaggagctactacaagaaatagacatcaccccatttctccttgcattgtgtggccacacttggggtttgcctcatgcacccccaagtcctggtcctctcagccctgggcccttcagcagcagcatggaggagggtgctgaacctcgggaacgagctatcctagcttctgaatccagcatagagaccgaggacctaagcgagcctgagtttcagagcacccgtgtccctggcattccagaccctgggccagagatctctctgacagatgtctgccagctcagaggagaggcccatggtgcccttcatagcgtcatccaggtgggaagcttgggtgagggtagaagaggtgttagagtcctgcctgtgcagagggacaggattctctcctgggcggggggtatgcatgtgtcctgctctagggtagggagtagtatcctgttgaggggtgactgacattctaacctccttctaaaccccacaacaggagaagttcctagagatcagtcgtctccacttccgcacagtgccttccaatccccactacttcttctattgccctccatccagcaggcgagaagatgaggggcctcgggacacagtagacagaaaaatcagtgacctggagttttcagaggctgagcttatgggagaagaaggagacacatctgcctgctgtgtggtcactgagagtgacccagagctagaggtagaataccgggagagccgtgaatcagacctggggcctgctgggctagactctgcctcgctgtcagacgtagacactgtgaatcctgatgaagactccttcagtatcttggggggcgactcacccactgggcctgagagcttccttcatgacctgccaccgctcttcctgcacctcacgtgctccgtgcggctacgtgggcagcacagctcagtacctgtgtgcagcctgcctacctgcctggtttccagtctgnagggccccccagttgnaggccgagttcccttgagggacctcagtgtgactctggatgtcttcatgctgactttgcccctggaagtggagctccccacggcctcggaccctcagcaccaccggtcaacatctgaaagcagtgcttcatttccacgatccccagggcagccatcatctttaaggtcagatgatggcctcgggcccccactgccacccccagaagaggagaggcacccaggactatccaatttggccacgccccacagactggctattgagaccaccatgaatgagatccgctggttgttggaagatgagatggtgggggcactccgaagagggggcatcccacagagtcctgccctgcaccgcgcagctgcccatatccatagttctcctggacgctccacctgccttcgccaaactctgccactgagttttgtatttgggccagagcgttccctcacacaattcaaggaggagttccgccgcctccatctccctggccatgttcttcttgaagaccctgacagtggcttcttctttgtggcagctggccaacagccaggtgggtcccatggggagccttcttcagcggcctgggcttggcacagtcatgaggacagggctgaaggcatcgaaggggagaccctgacagccagcccccaagcacctgggtccccagaggattctgagggtgtccccctcatcagcctgccccgcgtgccacagggagggagtcagcctgggcccagccggggattaagtctcatgtccagtcagggcagtgtggactcagaccacctaggttatgatggtggcagcagtggctcagacagtgagggtcccaatgacacccttggtgagaaggcccccttcacattgcggactccacctgggccagcacctccacagccttcactctcaggcctccctgggccctgcctgcctgacttctggctcattgtccgggtcctgcaggaccgtgtggaagtgtatgcacatgcacggagcctgattcgggaggatggggggccgggcactgagtgtcgccacctgcagcagctcctggtgaggcgagttggggagatctgcagggaggtcaaccagcgactgcttcttcaagaccttcatgacagccacgtgtgtaactctcttctggtggccgagagtgaagaagatctgtggcgcagtgagactcccttccactcccgtcagcgggcaccactgcccagtgatgattatgctgctgatgagagctgtgcgccccgtgggtacctggcagccacaatgcagtttgtccctggccatttctcctgtgacgttgtgtggggaactgtgatccgagtccattcacgcctcaaaatggggcccagcatgggggtctctcgggccatccaggccctgcgctctgtgctcaatgccttctctgtggtgaaccggaaaaacatgtttgtttaccaggagcgagcaacaaaggctgtgtactatcttcggctcctagagacatcctgcagtgaccggccatggaaaggggatgcgctgcccccttccctcgctctgtcccgaagccaagagcccatctactctgaggaagcctcgggtcctcgttctcccttagacatggtctctagccgcagttcagatgctgctcgtcctgtgggccaagtggacagacatatccagctgctggtccatggtgttgggcaggcaggtcctgagatcacggatgagctcgtgcgagttctatgtcggcgcctggatgaggccacgctggacgtcatcacagttatgcttgttcggaactgcaagctgacaccagctgatgtggagttcatccagccccctggaagtctcccctcagaggtgctgcatctggccctacccacctcctgcaggccctggcttccagccctggcatggtacctacggcagaacttgctcatcttcctgcactctcccaagtacacagatagcaacagccggaaccacttccaacatccactcccaccacagggtggcctccctgacttggacatctacttgtataacaagcctggtggacagggcactgggggcaaaggggttgcctgcatcactctagcctttgtggatgaaggaggggcccccttgtcactggcgttgtggcccccctcctctccggggcccccagacccactgcgagaggaggaatttgagcaactgacccaggtcatccgctgcccggttgttgtggacagttcttcagctcagaatggggccccacggcttcgattggatgtgtgggaaaaggggaacattagtattgtgcagctggaggagaaactccgaggagcagctcgccaggccctggccgatgccatcatcgagcttcagctgctgccagcttcactatgtacagaggacacacccacaggaagtctcaggaacggatcgttggaaactaagagctctgcaggccgagctagcacctttccccctgcccctgtccctggggagcctgtgactccacccagcaaagcgggccggcgtagcttctgggatatgctgagtaaaacagantgtggggatttgggttcccccaaaacaactgatgacattgtcctggatcggccagaagacactcggggccggaggcgtcacaaaaccgagagtgttcggactcctggtggagctgagcgggcgccaggctcagattctggagcccagagacaaaagcgccggacaacacagctagaagagggtgaggtggggacccttcatcctgtgtttgcccgtgttgctcagcgctggatggagtttatggttcagattggttgtgcctcagtgtccagaagctctgcccacatggtgtcccggttcctccttccatccatcctgtctgagttcaccgcactggtcacctcaatggctggagacaccagtgtccgcatctttgagcagcatttgggttcagagccagagatcttcggcccttgttcccctgggcaactgggcccctctccccgccctgcagctgagcggcatctgctgcttctgggaaggaacttcttgcagtggaggagaccaacacagcaggctgccaaagccatgcagcgcttcgagccaggaggtgatgggagctcagggcgaaatgctccccggcagaggctcttgctactagaggttgtggacaagaagctacagctgctgacctacaactgggctccagacctgggggcagcattgggccgagcgctggttcgcctggtgcagtggcagaatgcacgagcccatctcatcttctgcctactcagccagaagcttggcctcttccatcattatggccagttggacttccccgtgcgagatgaaaaggagccaaacccattcctgctgccgaccatggaagtggagaccctcatccggagtgcaagtcccccgctgagccgtgagcagggccgactgagtgggtcctctcgtggtgggggtcctcttcccctggacacattcccctttgacgaggccctaagggatatcacggctgcccgccccagctccgtacttggtcctgtgcccagacctcctgatcctgtcacctaccatggacaacagttcctagagatcaagatggcagagcgcagagagctggagcgccagatgaagatggaaaacctgtttgtaacctggcagcagcgttctaccccagccaccatgcccatcagtgctggagagctggagaccctgaagcagtcatcccgcctggtgcattactgtgcaacagccatgctcttcgacccagctgcctggctgcatgggcccccagagacctctggaccccctgacgggcagcggcgccatcgccctgagtcagggtctgggagccgagaggcccccacaagctgtgaatccttggatgtgtcgcccccgggagcccgtgaggagccttggctgaaggagctgagcttggctttcctgcagcaatatgtgcagtatctgcagagcataggttttgtgctggtaccactgcggcccccctcacccgcccgcagcaccagccggccacgggccatggctatccttggaacagagggtcgaggctccttctcctgccctaaaaccaagactgatgggagccccaagagcactagctctccggtaaccacctaccacctgcagcgggcactgcctgggggcatcatcctcatggaactggcattccagggctgttacttctgtgtcaaacagtttgccctggaatgttcccgaatcccaatggggcaggctgtcaactcacagctgtccatgctgttcacagaggagtgtgacaaggtgcgggacctgatgcacgtgcactcgttcagctatgacttccatctgcgcctcgtgcatcagcacgtgctaggtgcccatctggtgctgcggcacggctaccacctcaccacctttctgcgacacttcctggcccaccaccctgacggaccccactttggccgcaatcacatttaccaagggacattggagctccccacaccactcattgctgcccaccagctatacaactacgtggctgatcacgccagctcttaccacatgaagccattgcgaatggcccggccagggggcccagaacacaacgagtatgccctggtgtcggcatggcacagttctggctcctacctggactctgagggacttcgacaccaggatgactttgatgtgtctctgcttgtctgtcactgtgctgcaccctttgaggagcaaggagaggctgagcggcacgttctgcggctacagttcttcgtggtgctcaccagccagcgagagctcttccccaggctcactgctgacatgcgccgcttccggaagccacccagactgccccctgagccagaggctcctgggagttcagctggcagccctggggaggcctcagggcttattctagcgcctggaccggctcctctgttcccaccactggctgcagaggtgggcatggcacgagcacggctggctcagctggtgcggctggctggagggcactgccgtcgggacaccctttggaagcgcctcttcttgctggagccaccggggcctgatcgactgcggctaggggggcgcctggccctggcagagctggaggaactcctagaagcagtccatgccaaatccattggggacatcgacccccagctggactgcttcctatccatgacggtctcctggtaccagagcctgatcaaagttctcctaagccgcttcccccagagctgtcgccatttccaaagcccagacttgggaactcagtacctggttgtgctgaatcagaagttcactgactgctttgtgctagtgtttctggactcccacttaggaaagacgtctctgacagtggttttccgagagcccttcccagtacagccccaggacagcgagagcccccctgcccaactggtctccacctaccaccacctggagtctgtcatcaacacagcctgtttcaccctctggacccgcctcctctgagggagtggactggaccactgaatgtcactgttccttgaatcatgggcctaccagattgcctgccagaggcaggactgaccagcccttctgggccccagggcaagccagacactgagtgacaccaaaggctttgtaactatgtcttgagggtctgctgccccagcctggcagcaggaaccgccctccccaaacacccacagccactgacccatccaggactccagagagtcaggtcaaccccgaggaccccttgggcccttctggggtactcctttcggcccccctggtagagtctcgggagttcacacagggtggcaaacaccccctagagctcctctgcctgaatcctgccccctagcctttgaccactgtcagccacctgtgtcccttgagccttcgggtcttcacttcccacttggacatcactgctggacattcccatcgagatgacacctgggttccaatcccagctctgcctttgaagcacttgcggccaccgtcaagtccctttgctctcggaccctgggtttctcatcctttaatgaggtgggttcagaagctctcccatcttcacagcaaccctggcactggcttctcaatgggagggaagcagcagagaaactgaagtgttagacactatgtgtcccaccaccccattacagagacatatgacaatgttcagcaggtcatctttaatgcagaggaggagatgggatgtcactcgctgtctggaggcacgtgggtggtgtgcgggccctcactggccagcctctgggtggccccgcctatcccagtatgaacgtagccaactcaagccctctactgtgtctcctgcagggagagggaggcctcggcacctcagcccacaaggagaaaacagcccctgtccgggtccctccagagctcccttccccagggccacgcctcacctcgaggctgatactcacagcccacgaagcctttgtagccttcatcttccagcagttgaaacagataggggaaattcagctctccggggctgctgggctcccctcggcctgggacctgtgccacctgcacatgccctggggacagatgtggacaaatgtggggtccaggctcc

SEQ ID NO: 287588 - DNA, 7530 bp, Homo sapiens
  misc_feature (924)..(924): n is a, c, g, or t
  misc_feature (940)..(940): n is a, c, g, or t
  misc_feature (3485)..(3485): n is a, c, g, or t
aggcagctaaccactgtgccctgctgcaggagcatgcacagcggtgctatgtccgtgggctattccgcagcttgcagcaagcacagagtgtgacctcccaggatttgctgacagcggtagatgcctgtgaggagctactacaagaaatagacatcaccccatttctccttgcattgtgtggccacacttggggtttgcctcatgcacccccaagtcctggtcctctcagccctgggcccttcagcagcagcatggaggagggtgctgaacctcgggaacgagctatcctagcttctgaatccagcatagagaccgaggacctaagcgagcctgagtttcagagcacccgtgtccctggcattccagaccctgggccagagatctctctgacagatgtctgccagctcagaggagaggcccatggtgcccttcatagcgtcatccaggagaagttcctagagatcagtcgtctccacttccgcacagtgccttccaatccccactacttcttctattgccctccatccagcaggcgagaagatgaggggcctcgggacacagtagacagaaaaatcagtgacctggagttttcagaggctgagcttatgggagaagaaggagacacatctgcctgctgtgtggtcactgagagtgacccagagctagaggtagaataccgggagagccgtgaatcagacctggggcctgctgggctagactctgcctcgctgtcagacgtagacactgtgaatcctgatgaagactccttcagtatcttggggggcgactcacccactgggcctgagagcttccttcatgacctgccaccgctcttcctgcacctcacgtgctccgtgcggctacgtgggcagcacagctcagtacctgtgtgcagcctgcctacctgcctggtttccagtctgnagggccccccagttgnaggccgagttcccttgagggacctcagtgtgactctggatgtcttcatgctgactttgcccctggaagtggagctccccacggcctcggaccctcagcaccaccggtcaacatctgaaagcagtgcttcatttccacgatccccagggcagccatcatctttaaggtcagatgatggcctcgggcccccactgccacccccagaagaggagaggcacccaggactatccaatttggccacgccccacagactggctattgagaccaccatgaatgagatccgctggttgttggaagatgagatggtgggggcactccgaagagggggcatcccacagagtcctgccctgcaccgcgcagctgcccatatccatagttctcctggacgctccacctgccttcgccaaactctgccactgagttttgtatttgggccagagcgttccctcacacaattcaaggaggagttccgccgcctccatctccctggccatgttcttcttgaagaccctgacagtggcttcttctttgtggcagctggccaacagccaggtgggtcccatggggagccttcttcagcggcctgggcttggcacagtcatgaggacagggctgaaggcatcgaaggggagaccctgacagccagcccccaagcacctgggtccccagaggattctgagggtgtccccctcatcagcctgccccgcgtgccacagggagggagtcagcctgggcccagccggggattaagtctcatgtccagtcagggcagtgtggactcagaccacctaggttatgatggtggcagcagtggctcagacagtgagggtcccaatgacacccttggtgagaaggcccccttcacattgcggactccacctgggccagcacctccacagccttcactctcaggcctccctgggccctgcctgcctgacttctggctcattgtccgggtcctgcaggaccgtgtggaagtgtatgcacatgcacggagcctgattcgggaggatggggggccgggcactgagtgtcgccacctgcagcagctcctggtgaggcgagttggggagatctgcagggaggtcaaccagcgactgcttcttcaagaccttcatgacagccacgtgtgtaactctcttctggtggccgagagtgaagaagatctgtggcgcagtgagactcccttccactcccgtcagcgggcaccactgcccagtgatgattatgctgctgatgagagctgtgcgccccgtgggtacctggcagccacaatgcagtttgtccctggccatttctcctgtgacgttgtgtggggaactgtgatccgagtccattcacgcctcaaaatggggcccagcatgggggtctctcgggccatccaggccctgcgctctgtgctcaatgccttctctgtggtgaaccggaaaaacatgtttgtttaccaggagcgagcaacaaaggctgtgtactatcttcggctcctagagacatcctgcagtgaccggccatggaaaggggatgcgctgcccccttccctcgctctgtcccgaagccaagagcccatctactctgaggaagcctcgggtcctcgttctcccttagacatggtctctagccgcagttcagatgctgctcgtcctgtgggccaagtggacagacatatccagctgctggtccatggtgttgggcaggcaggtcctgagatcacggatgagctcgtgcgagttctatgtcggcgcctggatgaggccacgctggacgtcatcacagttatgcttgttcggaactgcaagctgacaccagctgatgtggagttcatccagccccctggaagtctcccctcagaggtgctgcatctggccctacccacctcctgcaggccctggcttccagccctggcatggtacctacggcagaacttgctcatcttcctgcactctcccaagtacacagatagcaacagccggaaccacttccaacatccactcccaccacagggtggcctccctgacttggacatctacttgtataacaagcctggtggacagggcactgggggcaaaggggttgcctgcatcactctagcctttgtggatgaaggaggggcccccttgtcactggcgttgtggcccccctcctctccggggcccccagacccactgcgagaggaggaatttgagcaactgacccaggtcatccgctgcccggttgttgtggacagttcttcagctcagaatggggccccacggcttcgattggatgtgtgggaaaaggggaacattagtattgtgcagctggaggagaaactccgaggagcagctcgccaggccctggccgatgccatcatcgagcttcagctgctgccagcttcactatgtacagaggacacacccacaggaagtctcaggaacggatcgttggaaactaagagctctgcaggccgagctagcacctttccccctgcccctgtccctggggagcctgtgactccacccagcaaagcgggccggcgtagcttctgggatatgctgagtaaaacagantgtggggatttgggttcccccaaaacaactgatgacattgtcctggatcggccagaagacactcggggccggaggcgtcacaaaaccgagagtgttcggactcctggtggagctgagcgggcgccaggctcagattctggagcccagagacaaaagcgccggacaacacagctagaagagggtgaggtggggacccttcatcctgtgtttgcccgtgttgctcagcgctggatggagtttatggttcagattggttgtgcctcagtgtccagaagctctgcccacatggtgtcccggttcctccttccatccatcctgtctgagttcaccgcactggtcacctcaatggctggagacaccagtgtccgcatctttgagcagcatttgggttcagagccagagatcttcggcccttgttcccctgggcaactgggcccctctccccgccctgcagctgagcggcatctgctgcttctgggaaggaacttcttgcagtggaggagaccaacacagcaggctgccaaagccatgcagcgcttcgagccaggaggtgatgggagctcagggcgaaatgctccccggcagaggctcttgctactagaggttgtggacaagaagctacagctgctgacctacaactgggctccagacctgggggcagcattgggccgagcgctggttcgcctggtgcagtggcagaatgcacgagcccatctcatcttctgcctactcagccagaagcttggcctcttccatcattatggccagttggacttccccgtgcgagatgaaaaggagccaaacccattcctgctgccgaccatggaagtggagaccctcatccggagtgcaagtcccccgctgagccgtgagcagggccgactgagtgggtcctctcgtggtgggggtcctcttcccctggacacattcccctttgacgaggccctaagggatatcacggctgcccgccccagctccgtacttggtcctgtgcccagacctcctgatcctgtcacctaccatggacaacagttcctagagatcaagatggcagagcgcagagagctggagcgccagatgaagatggaaaacctgtttgtaacctggcagcagcgttctaccccagccaccatgcccatcagtgctggagagctggagaccctgaagcagtcatcccgcctggtgcattactgtgcaacagccatgctcttcgacccagctgcctggctgcatgggcccccagagacctctggaccccctgacgggcagcggcgccatcgccctgagtcagggtctgggagccgagaggcccccacaagctgtgaatccttggatgtgtcgcccccgggagcccgtgaggagccttggctgaaggagctgagcttggctttcctgcagcaatatgtgcagtatctgcagagcataggttttgtgctggtaccactgcggcccccctcacccgcccgcagcaccagccggccacgggccatggctatccttggaacagagggtcgaggctccttctcctgccctaaaaccaagactgatgggagccccaagagcactagctctccggtaaccacctaccacctgcagcgggcactgcctgggggcatcatcctcatggaactggcattccagggctgttacttctgtgtcaaacagtttgccctggaatgttcccgaatcccaatggggcaggctgtcaactcacagctgtccatgctgttcacagaggagtgtgacaaggtgcgggacctgatgcacgtgcactcgttcagctatgacttccatctgcgcctcgtgcatcagcacgtgctaggtgcccatctggtgctgcggcacggctaccacctcaccacctttctgcgacacttcctggcccaccaccctgacggaccccactttggccgcaatcacatttaccaagggacattggagctccccacaccactcattgctgcccaccagctatacaactacgtggctgatcacgccagctcttaccacatgaagccattgcgaatggcccggccagggggcccagaacacaacgagtatgccctggtgtcggcatggcacagttctggctcctacctggactctgagggacttcgacaccaggatgactttgatgtgtctctgcttgtctgtcactgtgctgcaccctttgaggagcaaggagaggctgagcggcacgttctgcggctacagttcttcgtggtgctcaccagccagcgagagctcttccccaggctcactgctgacatgcgccgcttccggaagccacccagactgccccctgagccagaggctcctgggagttcagctggcagccctggggaggcctcagggcttattctagcgcctggaccggctcctctgttcccaccactggctgcagaggtgggcatggcacgagcacggctggctcagctggtgcggctggctggagggcactgccgtcgggacaccctttggaagcgcctcttcttgctggagccaccggggcctgatcgactgcggctaggggggcgcctggccctggcagagctggaggaactcctagaagcagtccatgccaaatccattggggacatcgacccccagctggactgcttcctatccatgacggtctcctggtaccagagcctgatcaaagttctcctaagccgcttcccccagagctgtcgccatttccaaagcccagacttgggaactcagtacctggttgtgctgaatcagaagttcactgactgctttgtgctagtgtttctggactcccacttaggaaagacgtctctgacagtggttttccgagagcccttcccagtacagccccaggacagcgagagcccccctgcccaactggtctccacctaccaccacctggagtctgtcatcaacacagcctgtttcaccctctggacccgcctcctctgagggagtggactggaccactgaatgtcactgttccttgaatcatgggcctaccagattgcctgccagaggcaggactgaccagcccttctgggccccagggcaagccagacactgagtgacaccaaaggctttgtaactatgtcttgagggtctgctgccccagcctggcagcaggaaccgccctccccaaacacccacagccactgacccatccaggactccagagagtcaggtcaaccccgaggaccccttgggcccttctggggtactcctttcggcccccctggtagagtctcgggagttcacacagggtggcaaacaccccctagagctcctctgcctgaatcctgccccctagcctttgaccactgtcagccacctgtgtcccttgagccttcgggtcttcacttcccacttggacatcactgctggacattcccatcgagatgacacctgggttccaatcccagctctgcctttgaagcacttgcggccaccgtcaagtccctttgctctcggaccctgggtttctcatcctttaatgaggtgggttcagaagctctcccatcttcacagcaaccctggcactggcttctcaatgggagggaagcagcagagaaactgaagtgttagacactatgtgtcccaccaccccattacagagacatatgacaatgttcagcaggtcatctttaatgcagaggaggagatgggatgtcactcgctgtctggaggcacgtgggtggtgtgcgggccctcactggccagcctctgggtggccccgcctatcccagtatgaacgtagccaactcaagccctctactgtgtctcctgcagggagagggaggcctcggcacctcagcccacaaggagaaaacagcccctgtccgggtccctccagagctcccttccccagggccacgcctcacctcgaggctgatactcacagcccacgaagcctttgtagccttcatcttccagcagttgaaacagataggggaaattcagctctccggggctgctgggctcccctcggcctgggacctgtgccacctgcacatgccctggggacagatgtggacaaatgtggggtccaggctcc

SEQ ID NO: 287589 - DNA, 6629 bp, Homo sapiens
  misc_feature (2584)..(2584): n is a, c, g, or t
gacctttttagggtagggggaccactaagcgaatctagagcacttggggactaaggagaccttgaggagtccaagaatgaagtaaggaggaggccctggtaggatagtaactcctgacctttgacttgttcccaccctgttcaggtcaacatctgaaagcagtgcttcatttccacgatccccagggcagccatcatctttaaggtcagatgatggcctcgggcccccactgccacccccagaagaggagaggcacccaggactatccaatttggccacgccccacagactggctattgagaccaccatgaatgagatccgctggttgttggaagatgagatggtgggggcactccgaagagggggcatcccacagagtcctgccctgcaccgcgcagctgcccatatccatagttctcctggacgctccacctgccttcgccaaactctgccactgagttttgtatttgggccagagcgttccctcacacaattcaaggaggagttccgccgcctccatctccctggccatgttcttcttgaagaccctgacagtggcttcttctttgtggcagctggccaacagccaggtgggtcccatggggagccttcttcagcggcctgggcttggcacagtcatgaggacagggctgaaggcatcgaaggggagaccctgacagccagcccccaagcacctgggtccccagaggattctgagggtgtccccctcatcagcctgccccgcgtgccacagggagggagtcagcctgggcccagccggggattaagtctcatgtccagtcagggcagtgtggactcagaccacctaggttatgatggtggcagcagtggctcagacagtgagggtcccaatgacacccttggtgagaaggcccccttcacattgcggactccacctgggccagcacctccacagccttcactctcaggcctccctgggccctgcctgcctgacttctggctcattgtccgggtcctgcaggaccgtgtggaagtgtatgcacatgcacggagcctgattcgggaggatggggggccgggcactgagtgtcgccacctgcagcagctcctggtgaggcgagttggggagatctgcagggaggtcaaccagcgactgcttcttcaagaccttcatgacagccacgtgtgtaactctcttctggtggccgagagtgaagaagatctgtggcgcagtgagactcccttccactcccgtcagcgggcaccactgcccagtgatgattatgctgctgatgagagctgtgcgccccgtgggtacctggcagccacaatgcagtttgtccctggccatttctcctgtgacgttgtgtggggaactgtgatccgagtccattcacgcctcaaaatggggcccagcatgggggtctctcgggccatccaggccctgcgctctgtgctcaatgccttctctgtggtgaaccggaaaaacatgtttgtttaccaggagcgagcaacaaaggctgtgtactatcttcggctcctagagacatcctgcagtgaccggccatggaaaggggatgcgctgcccccttccctcgctctgtcccgaagccaagagcccatctactctgaggaagcctcgggtcctcgttctcccttagacatggtctctagccgcagttcagatgctgctcgtcctgtgggccaagtggacagacatatccagctgctggtccatggtgttgggcaggcaggtcctgagatcacggatgagctcgtgcgagttctatgtcggcgcctggatgaggccacgctggacgtcatcacagttatgcttgttcggaactgcaagctgacaccagctgatgtggagttcatccagccccctggaagtctcccctcagaggtgctgcatctggccctacccacctcctgcaggccctggcttccagccctggcatggtacctacggcagaacttgctcatcttcctgcactctcccaagtacacagatagcaacagccggaaccacttccaacatccactcccaccacagggtggcctccctgacttggacatctacttgtataacaagcctggtggacagggcactgggggcaaaggggttgcctgcatcactctagcctttgtggatgaaggaggggcccccttgtcactggcgttgtggcccccctcctctccggggcccccagacccactgcgagaggaggaatttgagcaactgacccaggtcatccgctgcccggttgttgtggacagttcttcagctcagaatggggccccacggcttcgattggatgtgtgggaaaaggggaacattagtattgtgcagctggaggagaaactccgaggagcagctcgccaggccctggccgatgccatcatcgagcttcagctgctgccagcttcactatgtacagaggacacacccacaggaagtctcaggaacggatcgttggaaactaagagctctgcaggccgagctagcacctttccccctgcccctgtccctggggagcctgtgactccacccagcaaagcgggccggcgtagcttctgggatatgctgagtaaaacagantgtggggatttgggttcccccaaaacaactgatgacattgtcctggatcggccagaagacactcggggccggaggcgtcacaaaaccgagagtgttcggactcctggtggagctgagcgggcgccaggctcagattctggagcccagagacaaaagcgccggacaacacagctagaagagggtgaggtggggacccttcatcctgtgtttgcccgtgttgctcagcgctggatggagtttatggttcagattggttgtgcctcagtgtccagaagctctgcccacatggtgtcccggttcctccttccatccatcctgtctgagttcaccgcactggtcacctcaatggctggagacaccagtgtccgcatctttgagcagcatttgggttcagagccagagatcttcggcccttgttcccctgggcaactgggcccctctccccgccctgcagctgagcggcatctgctgcttctgggaaggaacttcttgcagtggaggagaccaacacagcaggctgccaaagccatgcagcgcttcgagccaggaggtgatgggagctcagggcgaaatgctccccggcagaggctcttgctactagaggttgtggacaagaagctacagctgctgacctacaactgggctccagacctgggggcagcattgggccgagcgctggttcgcctggtgcagtggcagaatgcacgagcccatctcatcttctgcctactcagccagaagcttggcctcttccatcattatggccagttggacttccccgtgcgagatgaaaaggagccaaacccattcctgctgccgaccatggaagtggagaccctcatccggagtgcaagtcccccgctgagccgtgagcagggccgactgagtgggtcctctcgtggtgggggtcctcttcccctggacacattcccctttgacgaggccctaagggatatcacggctgcccgccccagctccgtacttggtcctgtgcccagacctcctgatcctgtcacctaccatggacaacagttcctagagatcaagatggcagagcgcagagagctggagcgccagatgaagatggaaaacctgtttgtaacctggcagcagcgttctaccccagccaccatgcccatcagtgctggagagctggagaccctgaagcagtcatcccgcctggtgcattactgtgcaacagccatgctcttcgacccagctgcctggctgcatgggcccccagagacctctggaccccctgacgggcagcggcgccatcgccctgagtcagggtctgggagccgagaggcccccacaagctgtgaatccttggatgtgtcgcccccgggagcccgtgaggagccttggctgaaggagctgagcttggctttcctgcagcaatatgtgcagtatctgcagagcataggttttgtgctggtaccactgcggcccccctcacccgcccgcagcaccagccggccacgggccatggctatccttggaacagagggtcgaggctccttctcctgccctaaaaccaagactgatgggagccccaagagcactagctctccggtaaccacctaccacctgcagcgggcactgcctgggggcatcatcctcatggaactggcattccagggctgttacttctgtgtcaaacagtttgccctggaatgttcccgaatcccaatggggcaggctgtcaactcacagctgtccatgctgttcacagaggagtgtgacaaggtgcgggacctgatgcacgtgcactcgttcagctatgacttccatctgcgcctcgtgcatcagcacgtgctaggtgcccatctggtgctgcggcacggctaccacctcaccacctttctgcgacacttcctggcccaccaccctgacggaccccactttggccgcaatcacatttaccaagggacattggagctccccacaccactcattgctgcccaccagctatacaactacgtggctgatcacgccagctcttaccacatgaagccattgcgaatggcccggccagggggcccagaacacaacgagtatgccctggtgtcggcatggcacagttctggctcctacctggactctgagggacttcgacaccaggatgactttgatgtgtctctgcttgtctgtcactgtgctgcaccctttgaggagcaaggagaggctgagcggcacgttctgcggctacagttcttcgtggtgctcaccagccagcgagagctcttccccaggctcactgctgacatgcgccgcttccggaagccacccagactgccccctgagccagaggctcctgggagttcagctggcagccctggggaggcctcagggcttattctagcgcctggaccggctcctctgttcccaccactggctgcagaggtgggcatggcacgagcacggctggctcagctggtgcggctggctggagggcactgccgtcgggacaccctttggaagcgcctcttcttgctggagccaccggggcctgatcgactgcggctaggggggcgcctggccctggcagagctggaggaactcctagaagcagtccatgccaaatccattggggacatcgacccccagctggactgcttcctatccatgacggtctcctggtaccagagcctgatcaaagttctcctaagccgcttcccccagagctgtcgccatttccaaagcccagacttgggaactcagtacctggttgtgctgaatcagaagttcactgactgctttgtgctagtgtttctggactcccacttaggaaagacgtctctgacagtggttttccgagagcccttcccagtacagccccaggacagcgagagcccccctgcccaactggtctccacctaccaccacctggagtctgtcatcaacacagcctgtttcaccctctggacccgcctcctctgagggagtggactggaccactgaatgtcactgttccttgaatcatgggcctaccagattgcctgccagaggcaggactgaccagcccttctgggccccagggcaagccagacactgagtgacaccaaaggctttgtaactatgtcttgagggtctgctgccccagcctggcagcaggaaccgccctccccaaacacccacagccactgacccatccaggactccagagagtcaggtcaaccccgaggaccccttgggcccttctggggtactcctttcggcccccctggtagagtctcgggagttcacacagggtggcaaacaccccctagagctcctctgcctgaatcctgccccctagcctttgaccactgtcagccacctgtgtcccttgagccttcgggtcttcacttcccacttggacatcactgctggacattcccatcgagatgacacctgggttccaatcccagctctgcctttgaagcacttgcggccaccgtcaagtccctttgctctcggaccctgggtttctcatcctttaatgaggtgggttcagaagctctcccatcttcacagcaaccctggcactggcttctcaatgggagggaagcagcagagaaactgaagtgttagacactatgtgtcccaccaccccattacagagacatatgacaatgttcagcaggtcatctttaatgcagaggaggagatgggatgtcactcgctgtctggaggcacgtgggtggtgtgcgggccctcactggccagcctctgggtggccccgcctatcccagtatgaacgtagccaactcaagccctctactgtgtctcctgcagggagagggaggcctcggcacctcagcccacaaggagaaaacagcccctgtccgggtccctccagagctcccttccccagggccacgcctcacctcgaggctgatactcacagcccacgaagcctttgtagccttcatcttccagcagttgaaacagataggggaaattcagctctccggggctgctgggctcccctcggcctgggacctgtgccacctgcacatgccctggggacagatgtggacaaatgtggggtccaggctcc

SEQ ID NO: 287590 - DNA, 5475 bp, Homo sapiens
  misc_feature (52)..(52): n is a, c, g, or t
  misc_feature (75)..(75): n is a, c, g, or t
  misc_feature (1430)..(1430): n is a, c, g, or t
ttattgaacatgttataaaagaggtttagtcaaaaagaccaaagcccatgtnatcatcagactcctcggattctnctttctttgcttccactttcttctcctcagctgattatgctgctgatgagagctgtgcgccccgtgggtacctggcagccacaatgcagtttgtccctggccatttctcctgtgacgttgtgtggggaactgtgatccgagtccattcacgcctcaaaatggggcccagcatgggggtctctcgggccatccaggccctgcgctctgtgctcaatgccttctctgtggtgaaccggaaaaacatgtttgtttaccaggagcgagcaacaaaggctgtgtactatcttcggctcctagagacatcctgcagtgaccggccatggaaaggggatgcgctgcccccttccctcgctctgtcccgaagccaagagcccatctactctgaggaagcctcgggtcctcgttctcccttagacatggtctctagccgcagttcagatgctgctcgtcctgtgggccaagtggacagacatatccagctgctggtccatggtgttgggcaggcaggtcctgagatcacggatgagctcgtgcgagttctatgtcggcgcctggatgaggccacgctggacgtcatcacagttatgcttgttcggaactgcaagctgacaccagctgatgtggagttcatccagccccctggaagtctcccctcagaggtgctgcatctggccctacccacctcctgcaggccctggcttccagccctggcatggtacctacggcagaacttgctcatcttcctgcactctcccaagtacacagatagcaacagccggaaccacttccaacatccactcccaccacagggtggcctccctgacttggacatctacttgtataacaagcctggtggacagggcactgggggcaaaggggttgcctgcatcactctagcctttgtggatgaaggaggggcccccttgtcactggcgttgtggcccccctcctctccggggcccccagacccactgcgagaggaggaatttgagcaactgacccaggtcatccgctgcccggttgttgtggacagttcttcagctcagaatggggccccacggcttcgattggatgtgtgggaaaaggggaacattagtattgtgcagctggaggagaaactccgaggagcagctcgccaggccctggccgatgccatcatcgagcttcagctgctgccagcttcactatgtacagaggacacacccacaggaagtctcaggaacggatcgttggaaactaagagctctgcaggccgagctagcacctttccccctgcccctgtccctggggagcctgtgactccacccagcaaagcgggccggcgtagcttctgggatatgctgagtaaaacagantgtggggatttgggttcccccaaaacaactgatgacattgtcctggatcggccagaagacactcggggccggaggcgtcacaaaaccgagagtgttcggactcctggtggagctgagcgggcgccaggctcagattctggagcccagagacaaaagcgccggacaacacagctagaagagggtgaggtggggacccttcatcctgtgtttgcccgtgttgctcagcgctggatggagtttatggttcagattggttgtgcctcagtgtccagaagctctgcccacatggtgtcccggttcctccttccatccatcctgtctgagttcaccgcactggtcacctcaatggctggagacaccagtgtccgcatctttgagcagcatttgggttcagagccagagatcttcggcccttgttcccctgggcaactgggcccctctccccgccctgcagctgagcggcatctgctgcttctgggaaggaacttcttgcagtggaggagaccaacacagcaggctgccaaagccatgcagcgcttcgagccaggaggtgatgggagctcagggcgaaatgctccccggcagaggctcttgctactagaggttgtggacaagaagctacagctgctgacctacaactgggctccagacctgggggcagcattgggccgagcgctggttcgcctggtgcagtggcagaatgcacgagcccatctcatcttctgcctactcagccagaagcttggcctcttccatcattatggccagttggacttccccgtgcgagatgaaaaggagccaaacccattcctgctgccgaccatggaagtggagaccctcatccggagtgcaagtcccccgctgagccgtgagcagggccgactgagtgggtcctctcgtggtgggggtcctcttcccctggacacattcccctttgacgaggccctaagggatatcacggctgcccgccccagctccgtacttggtcctgtgcccagacctcctgatcctgtcacctaccatggacaacagttcctagagatcaagatggcagagcgcagagagctggagcgccagatgaagatggaaaacctgtttgtaacctggcagcagcgttctaccccagccaccatgcccatcagtgctggagagctggagaccctgaagcagtcatcccgcctggtgcattactgtgcaacagccatgctcttcgacccagctgcctggctgcatgggcccccagagacctctggaccccctgacgggcagcggcgccatcgccctgagtcagggtctgggagccgagaggcccccacaagctgtgaatccttggatgtgtcgcccccgggagcccgtgaggagccttggctgaaggagctgagcttggctttcctgcagcaatatgtgcagtatctgcagagcataggttttgtgctggtaccactgcggcccccctcacccgcccgcagcaccagccggccacgggccatggctatccttggaacagagggtcgaggctccttctcctgccctaaaaccaagactgatgggagccccaagagcactagctctccggtaaccacctaccacctgcagcgggcactgcctgggggcatcatcctcatggaactggcattccagggctgttacttctgtgtcaaacagtttgccctggaatgttcccgaatcccaatggggcaggctgtcaactcacagctgtccatgctgttcacagaggagtgtgacaaggtgcgggacctgatgcacgtgcactcgttcagctatgacttccatctgcgcctcgtgcatcagcacgtgctaggtgcccatctggtgctgcggcacggctaccacctcaccacctttctgcgacacttcctggcccaccaccctgacggaccccactttggccgcaatcacatttaccaagggacattggagctccccacaccactcattgctgcccaccagctatacaactacgtggctgatcacgccagctcttaccacatgaagccattgcgaatggcccggccagggggcccagaacacaacgagtatgccctggtgtcggcatggcacagttctggctcctacctggactctgagggacttcgacaccaggatgactttgatgtgtctctgcttgtctgtcactgtgctgcaccctttgaggagcaaggagaggctgagcggcacgttctgcggctacagttcttcgtggtgctcaccagccagcgagagctcttccccaggctcactgctgacatgcgccgcttccggaagccacccagactgccccctgagccagaggctcctgggagttcagctggcagccctggggaggcctcagggcttattctagcgcctggaccggctcctctgttcccaccactggctgcagaggtgggcatggcacgagcacggctggctcagctggtgcggctggctggagggcactgccgtcgggacaccctttggaagcgcctcttcttgctggagccaccggggcctgatcgactgcggctaggggggcgcctggccctggcagagctggaggaactcctagaagcagtccatgccaaatccattggggacatcgacccccagctggactgcttcctatccatgacggtctcctggtaccagagcctgatcaaagttctcctaagccgcttcccccagagctgtcgccatttccaaagcccagacttgggaactcagtacctggttgtgctgaatcagaagttcactgactgctttgtgctagtgtttctggactcccacttaggaaagacgtctctgacagtggttttccgagagcccttcccagtacagccccaggacagcgagagcccccctgcccaactggtctccacctaccaccacctggagtctgtcatcaacacagcctgtttcaccctctggacccgcctcctctgagggagtggactggaccactgaatgtcactgttccttgaatcatgggcctaccagattgcctgccagaggcaggactgaccagcccttctgggccccagggcaagccagacactgagtgacaccaaaggctttgtaactatgtcttgagggtctgctgccccagcctggcagcaggaaccgccctccccaaacacccacagccactgacccatccaggactccagagagtcaggtcaaccccgaggaccccttgggcccttctggggtactcctttcggcccccctggtagagtctcgggagttcacacagggtggcaaacaccccctagagctcctctgcctgaatcctgccccctagcctttgaccactgtcagccacctgtgtcccttgagccttcgggtcttcacttcccacttggacatcactgctggacattcccatcgagatgacacctgggttccaatcccagctctgcctttgaagcacttgcggccaccgtcaagtccctttgctctcggaccctgggtttctcatcctttaatgaggtgggttcagaagctctcccatcttcacagcaaccctggcactggcttctcaatgggagggaagcagcagagaaactgaagtgttagacactatgtgtcccaccaccccattacagagacatatgacaatgttcagcaggtcatctttaatgcagaggaggagatgggatgtcactcgctgtctggaggcacgtgggtggtgtgcgggccctcactggccagcctctgggtggccccgcctatcccagtatgaacgtagccaactcaagccctctactgtgtctcctgcagggagagggaggcctcggcacctcagcccacaaggagaaaacagcccctgtccgggtccctccagagctcccttccccagggccacgcctcacctcgaggctgatactcacagcccacgaagcctttgtagccttcatcttccagcagttgaaacagataggggaaattcagctctccggggctgctgggctcccctcggcctgggacctgtgccacctgcacatgccctggggacagatgtggacaaatgtggggtccaggctcc

SEQ ID NO: 287591 - DNA, 3498 bp, Homo sapiens
gcggttcagaggaccccacctgcttaatgtccctgcagaggctctgtactaagggggttgtgcgcaagaagctacagctgctgacctacaactgggctccagacctgggggcagcattgggccgagcgctggttcgcctggtgcagtggcagaatgcacgagcccatctcatcttctgcctactcagccagaagcttggcctcttccatcattatggccagttggacttccccgtgcgagatgaaaaggagccaaacccattcctgctgccgaccatggaagtggagaccctcatccggagtgcaagtcccccgctgagccgtgagcagggccgactgagtgggtcctctcgtggtgggggtcctcttcccctggacacattcccctttgacgaggccctaagggatatcacggctgcccgccccagctccgtacttggtcctgtgcccagacctcctgatcctgtcacctaccatggacaacagttcctagagatcaagatggcagagcgcagagagctggagcgccagatgaagatggaaaacctgtttgtaacctggcagcagcgttctaccccagccaccatgcccatcagtgctggagagctggagaccctgaagcagtcatcccgcctggtgcattactgtgcaacagccatgctcttcgacccagctgcctggctgcatgggcccccagagacctctggaccccctgacgggcagcggcgccatcgccctgagtcagggtctgggagccgagaggcccccacaagctgtgaatccttggatgtgtcgcccccgggagcccgtgaggagccttggctgaaggagctgagcttggctttcctgcagcaatatgtgcagtatctgcagagcataggttttgtgctggtaccactgcggcccccctcacccgcccgcagcaccagccggccacgggccatggctatccttggaacagagggtcgaggctccttctcctgccctaaaaccaagactgatgggagccccaagagcactagctctccggtaaccacctaccacctgcagcgggcactgcctgggggcatcatcctcatggaactggcattccagggctgttacttctgtgtcaaacagtttgccctggaatgttcccgaatcccaatggggcaggctgtcaactcacagctgtccatgctgttcacagaggagtgtgacaaggtgcgggacctgatgcacgtgcactcgttcagctatgacttccatctgcgcctcgtgcatcagcacgtgctaggtgcccatctggtgctgcggcacggctaccacctcaccacctttctgcgacacttcctggcccaccaccctgacggaccccactttggccgcaatcacatttaccaagggacattggagctccccacaccactcattgctgcccaccagctatacaactacgtggctgatcacgccagctcttaccacatgaagccattgcgaatggcccggccagggggcccagaacacaacgagtatgccctggtgtcggcatggcacagttctggctcctacctggactctgagggacttcgacaccaggatgactttgatgtgtctctgcttgtctgtcactgtgctgcaccctttgaggagcaaggagaggctgagcggcacgttctgcggctacagttcttcgtggtgctcaccagccagcgagagctcttccccaggctcactgctgacatgcgccgcttccggaagccacccagactgccccctgagccagaggctcctgggagttcagctggcagccctggggaggcctcagggcttattctagcgcctggaccggctcctctgttcccaccactggctgcagaggtgggcatggcacgagcacggctggctcagctggtgcggctggctggagggcactgccgtcgggacaccctttggaagcgcctcttcttgctggagccaccggggcctgatcgactgcggctaggggggcgcctggccctggcagagctggaggaactcctagaagcagtccatgccaaatccattggggacatcgacccccagctggactgcttcctatccatgacggtctcctggtaccagagcctgatcaaagttctcctaagccgcttcccccagagctgtcgccatttccaaagcccagacttgggaactcagtacctggttgtgctgaatcagaagttcactgactgctttgtgctagtgtttctggactcccacttaggaaagacgtctctgacagtggttttccgagagcccttcccagtacagccccaggacagcgagagcccccctgcccaactggtctccacctaccaccacctggagtctgtcatcaacacagcctgtttcaccctctggacccgcctcctctgagggagtggactggaccactgaatgtcactgttccttgaatcatgggcctaccagattgcctgccagaggcaggactgaccagcccttctgggccccagggcaagccagacactgagtgacaccaaaggctttgtaactatgtcttgagggtctgctgccccagcctggcagcaggaaccgccctccccaaacacccacagccactgacccatccaggactccagagagtcaggtcaaccccgaggaccccttgggcccttctggggtactcctttcggcccccctggtagagtctcgggagttcacacagggtggcaaacaccccctagagctcctctgcctgaatcctgccccctagcctttgaccactgtcagccacctgtgtcccttgagccttcgggtcttcacttcccacttggacatcactgctggacattcccatcgagatgacacctgggttccaatcccagctctgcctttgaagcacttgcggccaccgtcaagtccctttgctctcggaccctgggtttctcatcctttaatgaggtgggttcagaagctctcccatcttcacagcaaccctggcactggcttctcaatgggagggaagcagcagagaaactgaagtgttagacactatgtgtcccaccaccccattacagagacatatgacaatgttcagcaggtcatctttaatgcagaggaggagatgggatgtcactcgctgtctggaggcacgtgggtggtgtgcgggccctcactggccagcctctgggtggccccgcctatcccagtatgaacgtagccaactcaagccctctactgtgtctcctgcagggagagggaggcctcggcacctcagcccacaaggagaaaacagcccctgtccgggtccctccagagctcccttccccagggccacgcctcacctcgaggctgatactcacagcccacgaagcctttgtagccttcatcttccagcagttgaaacagataggggaaattcagctctccggggctgctgggctcccctcggcctgggacctgtgccacctgcacatgccctggggacagatgtggacaaatgtggggtccaggctcc

SEQ ID NO: 287592 - DNA, 1456 bp, Homo sapiens
cccaggttgtgctgggtcagtggctgtgggtgtttggggagggcggtctcctggtaccagagcctgatcaaagttctcctaagccgcttcccccagagctgtcgccatttccaaagcccagacttgggaactcagtacctggttgtgctgaatcagaagttcactgactgctttgtgctagtgtttctggactcccacttaggaaagacgtctctgacagtggttttccgagagcccttcccagtacagccccaggacagcgagagcccccctgcccaactggtctccacctaccaccacctggagtctgtcatcaacacagcctgtttcaccctctggacccgcctcctctgagggagtggactggaccactgaatgtcactgttccttgaatcatgggcctaccagattgcctgccagaggcaggactgaccagcccttctgggccccagggcaagccagacactgagtgacaccaaaggctttgtaactatgtcttgagggtctgctgccccagcctggcagcaggaaccgccctccccaaacacccacagccactgacccatccaggactccagagagtcaggtcaaccccgaggaccccttgggcccttctggggtactcctttcggcccccctggtagagtctcgggagttcacacagggtggcaaacaccccctagagctcctctgcctgaatcctgccccctagcctttgaccactgtcagccacctgtgtcccttgagccttcgggtcttcacttcccacttggacatcactgctggacattcccatcgagatgacacctgggttccaatcccagctctgcctttgaagcacttgcggccaccgtcaagtccctttgctctcggaccctgggtttctcatcctttaatgaggtgggttcagaagctctcccatcttcacagcaaccctggcactggcttctcaatgggagggaagcagcagagaaactgaagtgttagacactatgtgtcccaccaccccattacagagacatatgacaatgttcagcaggtcatctttaatgcagaggaggagatgggatgtcactcgctgtctggaggcacgtgggtggtgtgcgggccctcactggccagcctctgggtggccccgcctatcccagtatgaacgtagccaactcaagccctctactgtgtctcctgcagggagagggaggcctcggcacctcagcccacaaggagaaaacagcccctgtccgggtccctccagagctcccttccccagggccacgcctcacctcgaggctgatactcacagcccacgaagcctttgtagccttcatcttccagcagttgaaacagataggggaaattcagctctccggggctgctgggctcccctcggcctgggacctgtgccacctgcacatgccctggggacagatgtggacaaatgtggggtccaggctcc

SEQ ID NO: 287593 - DNA, 7028 bp, Homo sapiens
  misc_feature (924)..(924): n is a, c, g, or t
  misc_feature (940)..(940): n is a, c, g, or t
  misc_feature (3485)..(3485): n is a, c, g, or t
aggcagctaaccactgtgccctgctgcaggagcatgcacagcggtgctatgtccgtgggctattccgcagcttgcagcaagcacagagtgtgacctcccaggatttgctgacagcggtagatgcctgtgaggagctactacaagaaatagacatcaccccatttctccttgcattgtgtggccacacttggggtttgcctcatgcacccccaagtcctggtcctctcagccctgggcccttcagcagcagcatggaggagggtgctgaacctcgggaacgagctatcctagcttctgaatccagcatagagaccgaggacctaagcgagcctgagtttcagagcacccgtgtccctggcattccagaccctgggccagagatctctctgacagatgtctgccagctcagaggagaggcccatggtgcccttcatagcgtcatccaggagaagttcctagagatcagtcgtctccacttccgcacagtgccttccaatccccactacttcttctattgccctccatccagcaggcgagaagatgaggggcctcgggacacagtagacagaaaaatcagtgacctggagttttcagaggctgagcttatgggagaagaaggagacacatctgcctgctgtgtggtcactgagagtgacccagagctagaggtagaataccgggagagccgtgaatcagacctggggcctgctgggctagactctgcctcgctgtcagacgtagacactgtgaatcctgatgaagactccttcagtatcttggggggcgactcacccactgggcctgagagcttccttcatgacctgccaccgctcttcctgcacctcacgtgctccgtgcggctacgtgggcagcacagctcagtacctgtgtgcagcctgcctacctgcctggtttccagtctgnagggccccccagttgnaggccgagttcccttgagggacctcagtgtgactctggatgtcttcatgctgactttgcccctggaagtggagctccccacggcctcggaccctcagcaccaccggtcaacatctgaaagcagtgcttcatttccacgatccccagggcagccatcatctttaaggtcagatgatggcctcgggcccccactgccacccccagaagaggagaggcacccaggactatccaatttggccacgccccacagactggctattgagaccaccatgaatgagatccgctggttgttggaagatgagatggtgggggcactccgaagagggggcatcccacagagtcctgccctgcaccgcgcagctgcccatatccatagttctcctggacgctccacctgccttcgccaaactctgccactgagttttgtatttgggccagagcgttccctcacacaattcaaggaggagttccgccgcctccatctccctggccatgttcttcttgaagaccctgacagtggcttcttctttgtggcagctggccaacagccaggtgggtcccatggggagccttcttcagcggcctgggcttggcacagtcatgaggacagggctgaaggcatcgaaggggagaccctgacagccagcccccaagcacctgggtccccagaggattctgagggtgtccccctcatcagcctgccccgcgtgccacagggagggagtcagcctgggcccagccggggattaagtctcatgtccagtcagggcagtgtggactcagaccacctaggttatgatggtggcagcagtggctcagacagtgagggtcccaatgacacccttggtgagaaggcccccttcacattgcggactccacctgggccagcacctccacagccttcactctcaggcctccctgggccctgcctgcctgacttctggctcattgtccgggtcctgcaggaccgtgtggaagtgtatgcacatgcacggagcctgattcgggaggatggggggccgggcactgagtgtcgccacctgcagcagctcctggtgaggcgagttggggagatctgcagggaggtcaaccagcgactgcttcttcaagaccttcatgacagccacgtgtgtaactctcttctggtggccgagagtgaagaagatctgtggcgcagtgagactcccttccactcccgtcagcgggcaccactgcccagtgatgattatgctgctgatgagagctgtgcgccccgtgggtacctggcagccacaatgcagtttgtccctggccatttctcctgtgacgttgtgtggggaactgtgatccgagtccattcacgcctcaaaatggggcccagcatgggggtctctcgggccatccaggccctgcgctctgtgctcaatgccttctctgtggtgaaccggaaaaacatgtttgtttaccaggagcgagcaacaaaggctgtgtactatcttcggctcctagagacatcctgcagtgaccggccatggaaaggggatgcgctgcccccttccctcgctctgtcccgaagccaagagcccatctactctgaggaagcctcgggtcctcgttctcccttagacatggtctctagccgcagttcagatgctgctcgtcctgtgggccaagtggacagacatatccagctgctggtccatggtgttgggcaggcaggtcctgagatcacggatgagctcgtgcgagttctatgtcggcgcctggatgaggccacgctggacgtcatcacagttatgcttgttcggaactgcaagctgacaccagctgatgtggagttcatccagccccctggaagtctcccctcagaggtgctgcatctggccctacccacctcctgcaggccctggcttccagccctggcatggtacctacggcagaacttgctcatcttcctgcactctcccaagtacacagatagcaacagccggaaccacttccaacatccactcccaccacagggtggcctccctgacttggacatctacttgtataacaagcctggtggacagggcactgggggcaaaggggttgcctgcatcactctagcctttgtggatgaaggaggggcccccttgtcactggcgttgtggcccccctcctctccggggcccccagacccactgcgagaggaggaatttgagcaactgacccaggtcatccgctgcccggttgttgtggacagttcttcagctcagaatggggccccacggcttcgattggatgtgtgggaaaaggggaacattagtattgtgcagctggaggagaaactccgaggagcagctcgccaggccctggccgatgccatcatcgagcttcagctgctgccagcttcactatgtacagaggacacacccacaggaagtctcaggaacggatcgttggaaactaagagctctgcaggccgagctagcacctttccccctgcccctgtccctggggagcctgtgactccacccagcaaagcgggccggcgtagcttctgggatatgctgagtaaaacagantgtggggatttgggttcccccaaaacaactgatgacattgtcctggatcggccagaagacactcggggccggaggcgtcacaaaaccgagagtgttcggactcctggtggagctgagcgggcgccaggctcagattctggagcccagagacaaaagcgccggacaacacagctagaagagggtgaggtggggacccttcatcctgtgtttgcccgtgttgctcagcgctggatggagtttatggttcagattggttgtgcctcagtgtccagaagctctgcccacatggtgtcccggttcctccttccatccatcctgtctgagttcaccgcactggtcacctcaatggctggagacaccagtgtccgcatctttgagcagcatttgggttcagagccagagatcttcggcccttgttcccctgggcaactgggcccctctccccgccctgcagctgagcggcatctgctgcttctgggaaggaacttcttgcagtggaggagaccaacacagcaggctgccaaagccatgcagcgcttcgagccaggaggtgatgggagctcagggcgaaatgctccccggcagaggctcttgctactagaggttgtggacaagaagctacagctgctgacctacaactgggctccagacctgggggcagcattgggccgagcgctggttcgcctggtgcagtggcagaatgcacgagcccatctcatcttctgcctactcagccagaagcttggcctcttccatcattatggccagttggacttccccgtgcgagatgaaaaggagccaaacccattcctgctgccgaccatggaagtggagaccctcatccggagtgcaagtcccccgctgagccgtgagcagggccgactgagtgggtcctctcgtggtgggggtcctcttcccctggacacattcccctttgacgaggccctaagggatatcacggctgcccgccccagctccgtacttggtcctgtgcccagacctcctgatcctgtcacctaccatggacaacagttcctagagatcaagatggcagagcgcagagagctggagcgccagatgaagatggaaaacctgtttgtaacctggcagcagcgttctaccccagccaccatgcccatcagtgctggagagctggagaccctgaagcagtcatcccgcctggtgcattactgtgcaacagccatgctcttcgacccagctgcctggctgcatgggcccccagagacctctggaccccctgacgggcagcggcgccatcgccctgagtcagggtctgggagccgagaggcccccacaagctgtgaatccttggatgtgtcgcccccgggagcccgtgaggagccttggctgaaggagctgagcttggctttcctgcagcaatatgtgcagtatctgcagagcataggttttgtgctggtaccactgcggcccccctcacccgcccgcagcaccagccggccacgggccatggctatccttggaacagagggtcgaggctccttctcctgccctaaaaccaagactgatgggagccccaagagcactagctctccggtaaccacctaccacctgcagcgggcactgcctgggggcatcatcctcatggaactggcattccagggctgttacttctgtgtcaaacagtttgccctggaatgttcccgaatcccaatggggcaggctgtcaactcacagctgtccatgctgttcacagaggagtgtgacaaggtgcgggacctgatgcacgtgcactcgttcagctatgacttccatctgcgcctcgtgcatcagcacgtgctaggtgcccatctggtgctgcggcacggctaccacctcaccacctttctgcgacacttcctggcccaccaccctgacggaccccactttggccgcaatcacatttaccaagggacattggagctccccacaccactcattgctgcccaccagctatacaactacgtggctgatcacgccagctcttaccacatgaagccattgcgaatggcccggccagggggcccagaacacaacgagtatgccctggtgtcggcatggcacagttctggctcctacctggactctgagggacttcgacaccaggatgactttgatgtgtctctgcttgtctgtcactgtgctgcaccctttgaggagcaaggagaggctgagcggcacgttctgcggctacagttcttcgtggtgctcaccagccagcgagagctcttccccaggctcactgctgacatgcgccgcttccggaagccacccagactgccccctgagccagaggctcctgggagttcagctggcagccctggggaggcctcagggcttattctagcgcctggaccggctcctctgttcccaccactggctgcagaggtgggcatggcacgagcacggctggctcagctggtgcggctggctggagggcactgccgtcgggacaccctttggaagcgcctcttcttgctggagccaccggggcctgatcgactgcggctaggggggcgcctggccctggcagagctggaggaactcctagaagcagtccatgccaaatccattggggacatcgacccccagctggactgcttcctatccatgacggtctcctggtaccagagcctgatcaaagttctcctaagccgcttcccccagagctgtcgccatttccaaagcccagacttgggaactcagtacctggttgtgctgaatcagaagttcactgactgctttgtgctagtgtttctggactcccacttaggaaagacgcctttgaccactgtcagccacctgtgtcccttgagccttcgggtcttcacttcccacttggacatcactgctggacattcccatcgagatgacacctgggttccaatcccagctctgcctttgaagcacttgcggccaccgtcaagtccctttgctctcggaccctgggtttctcatcctttaatgaggtgggttcagaagctctcccatcttcacagcaaccctggcactggcttctcaatgggagggaagcagcagagaaactgaagtgttagacactatgtgtcccaccaccccattacagagacatatgacaatgttcagcaggtcatctttaatgcagaggaggagatgggatgtcactcgctgtctggaggcacgtgggtggtgtgcgggccctcactggccagcctctgggtggccccgcctatcccagtatgaacgtagccaactcaagccctctactgtgtctcctgcagggagagggaggcctcggcacctcagcccacaaggagaaaacagcccctgtccgggtccctccagagctcccttccccagggccacgcctcacctcgaggctgatactcacagcccacgaagcctttgtagccttcatcttccagcagttgaaacagataggggaaattcagctctccggggctgctgggctcccctcggcctgggacctgtgccacctgcacatgccctggggacagatgtggacaaatgtggggtccaggctcc

SEQ ID NO: 287594 - DNA, 6834 bp, Homo sapiens
  misc_feature (1090)..(1090): n is a, c, g, or t
  misc_feature (1106)..(1106): n is a, c, g, or t
  misc_feature (3651)..(3651): n is a, c, g, or t
aggcagctaaccactgtgccctgctgcaggagcatgcacagcggtgctatgtccgtgggctattccgcagcttgcagcaagcacagagtgtgacctcccaggatttgctgacagcggtagatgcctgtgaggagctactacaagaaatagacatcaccccatttctccttgcattgtgtggccacacttggggtttgcctcatgcacccccaagtcctggtcctctcagccctgggcccttcagcagcagcatggaggagggtgctgaacctcgggaacgagctatcctagcttctgaatccagcatagagaccgaggacctaagcgagcctgagtttcagagcacccgtgtccctggcattccagaccctgggccagagatctctctgacagatgtctgccagctcagaggagaggcccatggtgcccttcatagcgtcatccaggtgggaagcttgggtgagggtagaagaggtgttagagtcctgcctgtgcagagggacaggattctctcctgggcggggggtatgcatgtgtcctgctctagggtagggagtagtatcctgttgaggggtgactgacattctaacctccttctaaaccccacaacaggagaagttcctagagatcagtcgtctccacttccgcacagtgccttccaatccccactacttcttctattgccctccatccagcaggcgagaagatgaggggcctcgggacacagtagacagaaaaatcagtgacctggagttttcagaggctgagcttatgggagaagaaggagacacatctgcctgctgtgtggtcactgagagtgacccagagctagaggtagaataccgggagagccgtgaatcagacctggggcctgctgggctagactctgcctcgctgtcagacgtagacactgtgaatcctgatgaagactccttcagtatcttggggggcgactcacccactgggcctgagagcttccttcatgacctgccaccgctcttcctgcacctcacgtgctccgtgcggctacgtgggcagcacagctcagtacctgtgtgcagcctgcctacctgcctggtttccagtctgnagggccccccagttgnaggccgagttcccttgagggacctcagtgtgactctggatgtcttcatgctgactttgcccctggaagtggagctccccacggcctcggaccctcagcaccaccggtcaacatctgaaagcagtgcttcatttccacgatccccagggcagccatcatctttaaggtcagatgatggcctcgggcccccactgccacccccagaagaggagaggcacccaggactatccaatttggccacgccccacagactggctattgagaccaccatgaatgagatccgctggttgttggaagatgagatggtgggggcactccgaagagggggcatcccacagagtcctgccctgcaccgcgcagctgcccatatccatagttctcctggacgctccacctgccttcgccaaactctgccactgagttttgtatttgggccagagcgttccctcacacaattcaaggaggagttccgccgcctccatctccctggccatgttcttcttgaagaccctgacagtggcttcttctttgtggcagctggccaacagccaggtgggtcccatggggagccttcttcagcggcctgggcttggcacagtcatgaggacagggctgaaggcatcgaaggggagaccctgacagccagcccccaagcacctgggtccccagaggattctgagggtgtccccctcatcagcctgccccgcgtgccacagggagggagtcagcctgggcccagccggggattaagtctcatgtccagtcagggcagtgtggactcagaccacctaggttatgatggtggcagcagtggctcagacagtgagggtcccaatgacacccttggtgagaaggcccccttcacattgcggactccacctgggccagcacctccacagccttcactctcaggcctccctgggccctgcctgcctgacttctggctcattgtccgggtcctgcaggaccgtgtggaagtgtatgcacatgcacggagcctgattcgggaggatggggggccgggcactgagtgtcgccacctgcagcagctcctggtgaggcgagttggggagatctgcagggaggtcaaccagcgactgcttcttcaagaccttcatgacagccacgtgtgtaactctcttctggtggccgagagtgaagaagatctgtggcgcagtgagactcccttccactcccgtcagcgggcaccactgcccagtgatgattatgctgctgatgagagctgtgcgccccgtgggtacctggcagccacaatgcagtttgtccctggccatttctcctgtgacgttgtgtggggaactgtgatccgagtccattcacgcctcaaaatggggcccagcatgggggtctctcgggccatccaggccctgcgctctgtgctcaatgccttctctgtggtgaaccggaaaaacatgtttgtttaccaggagcgagcaacaaaggctgtgtactatcttcggctcctagagacatcctgcagtgaccggccatggaaaggggatgcgctgcccccttccctcgctctgtcccgaagccaagagcccatctactctgaggaagcctcgggtcctcgttctcccttagacatggtctctagccgcagttcagatgctgctcgtcctgtgggccaagtggacagacatatccagctgctggtccatggtgttgggcaggcaggtcctgagatcacggatgagctcgtgcgagttctatgtcggcgcctggatgaggccacgctggacgtcatcacagttatgcttgttcggaactgcaagctgacaccagctgatgtggagttcatccagccccctggaagtctcccctcagaggtgctgcatctggccctacccacctcctgcaggccctggcttccagccctggcatggtacctacggcagaacttgctcatcttcctgcactctcccaagtacacagatagcaacagccggaaccacttccaacatccactcccaccacagggtggcctccctgacttggacatctacttgtataacaagcctggtggacagggcactgggggcaaaggggttgcctgcatcactctagcctttgtggatgaaggaggggcccccttgtcactggcgttgtggcccccctcctctccggggcccccagacccactgcgagaggaggaatttgagcaactgacccaggtcatccgctgcccggttgttgtggacagttcttcagctcagaatggggccccacggcttcgattggatgtgtgggaaaaggggaacattagtattgtgcagctggaggagaaactccgaggagcagctcgccaggccctggccgatgccatcatcgagcttcagctgctgccagcttcactatgtacagaggacacacccacaggaagtctcaggaacggatcgttggaaactaagagctctgcaggccgagctagcacctttccccctgcccctgtccctggggagcctgtgactccacccagcaaagcgggccggcgtagcttctgggatatgctgagtaaaacagantgtggggatttgggttcccccaaaacaactgatgacattgtcctggatcggccagaagacactcggggccggaggcgtcacaaaaccgagagtgttcggactcctggtggagctgagcgggcgccaggctcagattctggagcccagagacaaaagcgccggacaacacagctagaagagggtgaggtggggacccttcatcctgtgtttgcccgtgttgctcagcgctggatggagtttatggttcagattggttgtgcctcagtgtccagaagctctgcccacatggtgtcccggttcctccttccatccatcctgtctgagttcaccgcactggtcacctcaatggctggagacaccagtgtccgcatctttgagcagcatttgggttcagagccagagatcttcggcccttgttcccctgggcaactgggcccctctccccgccctgcagctgagcggcatctgctgcttctgggaaggaacttcttgcagtggaggagaccaacacagcaggctgccaaagccatgcagcgcttcgagccaggaggtgatgggagctcagggcgaaatgctccccggcagaggctcttgctactagaggttgtggacaagaagctacagctgctgacctacaactgggctccagacctgggggcagcattgggccgagcgctggttcgcctggtgcagtggcagaatgcacgagcccatctcatcttctgcctactcagccagaagcttggcctcttccatcattatggccagttggacttccccgtgcgagatgaaaaggagccaaacccattcctgctgccgaccatggaagtggagaccctcatccggagtgcaagtcccccgctgagccgtgagcagggccgactgagtgggtcctctcgtggtgggggtcctcttcccctggacacattcccctttgacgaggccctaagggatatcacggctgcccgccccagctccgtacttggtcctgtgcccagacctcctgatcctgtcacctaccatggacaacagttcctagagatcaagatggcagagcgcagagagctggagcgccagatgaagatggaaaacctgtttgtaacctggcagcagcgttctaccccagccaccatgcccatcagtgctggagagctggagaccctgaagcagtcatcccgcctggtgcattactgtgcaacagccatgctcttcgacccagctgcctggctgcatgggcccccagagacctctggaccccctgacgggcagcggcgccatcgccctgagtcagggtctgggagccgagaggcccccacaagctgtgaatccttggatgtgtcgcccccgggagcccgtgaggagccttggctgaaggagctgagcttggctttcctgcagcaatatgtgcagtatctgcagagcataggttttgtgctggtaccactgcggcccccctcacccgcccgcagcaccagccggccacgggccatggctatccttggaacagagggtcgaggctccttctcctgccctaaaaccaagactgatgggagccccaagagcactagctctccggtaaccacctaccacctgcagcgggcactgcctgggggcatcatcctcatggaactggcattccagggctgttacttctgtgtcaaacagtttgccctggaatgttcccgaatcccaatggggcaggctgtcaactcacagctgtccatgctgttcacagaggagtgtgacaaggtgcgggacctgatgcacgtgcactcgttcagctatgacttccatctgcgcctcgtgcatcagcacgtgctaggtgcccatctggtgctgcggcacggctaccacctcaccacctttctgcgacacttcctggcccaccaccctgacggaccccactttggccgcaatcacatttaccaagggacattggagctccccacaccactcattgctgcccaccagctatacaactacgtggctgatcacgccagctcttaccacatgaagccattgcgaatggcccggccagggggcccagaacacaacgagtatgccctggtgtcggcatggcacagttctggctcctacctggactctgagggacttcgacaccaggatgactttgatgtgtctctgcttgtctgtcactgtgctgcaccctttgaggagcaaggagaggctgagcggcacgttctgcggctacagttcttcgtggtgctcaccagccagcgagagctcttccccaggctcactgctgacatgcgccgcttccggaagccacccagactgccccctgagccagaggctcctgggagttcagctggcagccctggggaggcctcagggcttattctagcgcctggaccggctcctctgttcccaccactggctgcagaggtgggcatggcacgagcacggctggctcagctggtgcggctggctggagggcactgccgtcgggacaccctttggaagcgcctcttcttgctggagccaccggggcctgatcgactgcggctaggggggcgcctggccctggcagagctggaggaactcctagaagcagtccatgccaaatccattggggacatcgacccccagctggactgcttcctatccatgacggtctcctggtaccagagcctgatcaaagttctcctaagccgcttcccccagagctgtcgccatttccaaagcccagacttgggaactcagtacctggttgtgctgaatcagaagttcactgactgctttgtgctagtgtttctggactcccacttaggaaagacgtctctgacagtggttttccgagagcccttcccagtacagccccaggacagcgagagcccccctgcccaactggtctccacctaccaccacctggagtctgtcatcaacacagcctgtttcaccctctggacccgcctcctctgagggagtggactggaccactgaatgtcactgttccttgaatcatgggcctaccagattgcctgccagaggcaggactgaccagcccttctgggccccagggcaagccagacactgagtgacaccaaaggctttgtaactatgtcttgagggtctgctgccccagcctggcagcaggaaccgccctccccaacaccccccagaaacactacatccagagcacaatcaggcccaaaactcctg

SEQ ID NO: 287595 - DNA, 7197 bp, Homo sapiens
  misc_feature (1090)..(1090): n is a, c, g, or t
  misc_feature (1106)..(1106): n is a, c, g, or t
  misc_feature (3651)..(3651): n is a, c, g, or t
aggcagctaaccactgtgccctgctgcaggagcatgcacagcggtgctatgtccgtgggctattccgcagcttgcagcaagcacagagtgtgacctcccaggatttgctgacagcggtagatgcctgtgaggagctactacaagaaatagacatcaccccatttctccttgcattgtgtggccacacttggggtttgcctcatgcacccccaagtcctggtcctctcagccctgggcccttcagcagcagcatggaggagggtgctgaacctcgggaacgagctatcctagcttctgaatccagcatagagaccgaggacctaagcgagcctgagtttcagagcacccgtgtccctggcattccagaccctgggccagagatctctctgacagatgtctgccagctcagaggagaggcccatggtgcccttcatagcgtcatccaggtgggaagcttgggtgagggtagaagaggtgttagagtcctgcctgtgcagagggacaggattctctcctgggcggggggtatgcatgtgtcctgctctagggtagggagtagtatcctgttgaggggtgactgacattctaacctccttctaaaccccacaacaggagaagttcctagagatcagtcgtctccacttccgcacagtgccttccaatccccactacttcttctattgccctccatccagcaggcgagaagatgaggggcctcgggacacagtagacagaaaaatcagtgacctggagttttcagaggctgagcttatgggagaagaaggagacacatctgcctgctgtgtggtcactgagagtgacccagagctagaggtagaataccgggagagccgtgaatcagacctggggcctgctgggctagactctgcctcgctgtcagacgtagacactgtgaatcctgatgaagactccttcagtatcttggggggcgactcacccactgggcctgagagcttccttcatgacctgccaccgctcttcctgcacctcacgtgctccgtgcggctacgtgggcagcacagctcagtacctgtgtgcagcctgcctacctgcctggtttccagtctgnagggccccccagttgnaggccgagttcccttgagggacctcagtgtgactctggatgtcttcatgctgactttgcccctggaagtggagctccccacggcctcggaccctcagcaccaccggtcaacatctgaaagcagtgcttcatttccacgatccccagggcagccatcatctttaaggtcagatgatggcctcgggcccccactgccacccccagaagaggagaggcacccaggactatccaatttggccacgccccacagactggctattgagaccaccatgaatgagatccgctggttgttggaagatgagatggtgggggcactccgaagagggggcatcccacagagtcctgccctgcaccgcgcagctgcccatatccatagttctcctggacgctccacctgccttcgccaaactctgccactgagttttgtatttgggccagagcgttccctcacacaattcaaggaggagttccgccgcctccatctccctggccatgttcttcttgaagaccctgacagtggcttcttctttgtggcagctggccaacagccaggtgggtcccatggggagccttcttcagcggcctgggcttggcacagtcatgaggacagggctgaaggcatcgaaggggagaccctgacagccagcccccaagcacctgggtccccagaggattctgagggtgtccccctcatcagcctgccccgcgtgccacagggagggagtcagcctgggcccagccggggattaagtctcatgtccagtcagggcagtgtggactcagaccacctaggttatgatggtggcagcagtggctcagacagtgagggtcccaatgacacccttggtgagaaggcccccttcacattgcggactccacctgggccagcacctccacagccttcactctcaggcctccctgggccctgcctgcctgacttctggctcattgtccgggtcctgcaggaccgtgtggaagtgtatgcacatgcacggagcctgattcgggaggatggggggccgggcactgagtgtcgccacctgcagcagctcctggtgaggcgagttggggagatctgcagggaggtcaaccagcgactgcttcttcaagaccttcatgacagccacgtgtgtaactctcttctggtggccgagagtgaagaagatctgtggcgcagtgagactcccttccactcccgtcagcgggcaccactgcccagtgatgattatgctgctgatgagagctgtgcgccccgtgggtacctggcagccacaatgcagtttgtccctggccatttctcctgtgacgttgtgtggggaactgtgatccgagtccattcacgcctcaaaatggggcccagcatgggggtctctcgggccatccaggccctgcgctctgtgctcaatgccttctctgtggtgaaccggaaaaacatgtttgtttaccaggagcgagcaacaaaggctgtgtactatcttcggctcctagagacatcctgcagtgaccggccatggaaaggggatgcgctgcccccttccctcgctctgtcccgaagccaagagcccatctactctgaggaagcctcgggtcctcgttctcccttagacatggtctctagccgcagttcagatgctgctcgtcctgtgggccaagtggacagacatatccagctgctggtccatggtgttgggcaggcaggtcctgagatcacggatgagctcgtgcgagttctatgtcggcgcctggatgaggccacgctggacgtcatcacagttatgcttgttcggaactgcaagctgacaccagctgatgtggagttcatccagccccctggaagtctcccctcagaggtgctgcatctggccctacccacctcctgcaggccctggcttccagccctggcatggtacctacggcagaacttgctcatcttcctgcactctcccaagtacacagatagcaacagccggaaccacttccaacatccactcccaccacagggtggcctccctgacttggacatctacttgtataacaagcctggtggacagggcactgggggcaaaggggttgcctgcatcactctagcctttgtggatgaaggaggggcccccttgtcactggcgttgtggcccccctcctctccggggcccccagacccactgcgagaggaggaatttgagcaactgacccaggtcatccgctgcccggttgttgtggacagttcttcagctcagaatggggccccacggcttcgattggatgtgtgggaaaaggggaacattagtattgtgcagctggaggagaaactccgaggagcagctcgccaggccctggccgatgccatcatcgagcttcagctgctgccagcttcactatgtacagaggacacacccacaggaagtctcaggaacggatcgttggaaactaagagctctgcaggccgagctagcacctttccccctgcccctgtccctggggagcctgtgactccacccagcaaagcgggccggcgtagcttctgggatatgctgagtaaaacagantgtggggatttgggttcccccaaaacaactgatgacattgtcctggatcggccagaagacactcggggccggaggcgtcacaaaaccgagagtgttcggactcctggtggagctgagcgggcgccaggctcagattctggagcccagagacaaaagcgccggacaacacagctagaagagggtgaggtggggacccttcatcctgtgtttgcccgtgttgctcagcgctggatggagtttatggttcagattggttgtgcctcagtgtccagaagctctgcccacatggtgtcccggttcctccttccatccatcctgtctgagttcaccgcactggtcacctcaatggctggagacaccagtgtccgcatctttgagcagcatttgggttcagagccagagatcttcggcccttgttcccctgggcaactgggcccctctccccgccctgcagctgagcggcatctgctgcttctgggaaggaacttcttgcagtggaggagaccaacacagcaggctgccaaagccatgcagcgcttcgagccaggaggtgatgggagctcagggcgaaatgctccccggcagaggctcttgctactagaggttgtggacaagaagctacagctgctgacctacaactgggctccagacctgggggcagcattgggccgagcgctggttcgcctggtgcagtggcagaatgcacgagcccatctcatcttctgcctactcagccagaagcttggcctcttccatcattatggccagttggacttccccgtgcgagatgaaaaggagccaaacccattcctgctgccgaccatggaagtggagaccctcatccggagtgcaagtcccccgctgagccgtgagcagggccgactgagtgggtcctctcgtggtgggggtcctcttcccctggacacattcccctttgacgaggccctaagggatatcacggctgcccgccccagctccgtacttggtcctgtgcccagacctcctgatcctgtcacctaccatggacaacagttcctagagatcaagatggcagagcgcagagagctggagcgccagatgaagatggaaaacctgtttgtaacctggcagcagcgttctaccccagccaccatgcccatcagtgctggagagctggagaccctgaagcagtcatcccgcctggtgcattactgtgcaacagccatgctcttcgacccagctgcctggctgcatgggcccccagagacctctggaccccctgacgggcagcggcgccatcgccctgagtcagggtctgggagccgagaggcccccacaagctgtgaatccttggatgtgtcgcccccgggagcccgtgaggagccttggctgaaggagctgagcttggctttcctgcagcaatatgtgcagtatctgcagagcataggttttgtgctggtaccactgcggcccccctcacccgcccgcagcaccagccggccacgggccatggctatccttggaacagagggtcgaggctccttctcctgccctaaaaccaagactgatgggagccccaagagcactagctctccggtaaccacctaccacctgcagcgggcactgcctgggggcatcatcctcatggaactggcattccagggctgttacttctgtgtcaaacagtttgccctggaatgttcccgaatcccaatggggcaggctgtcaactcacagctgtccatgctgttcacagaggagtgtgacaaggtgcgggacctgatgcacgtgcactcgttcagctatgacttccatctgcgcctcgtgcatcagcacgtgctaggtgcccatctggtgctgcggcacggctaccacctcaccacctttctgcgacacttcctggcccaccaccctgacggaccccactttggccgcaatcacatttaccaagggacattggagctccccacaccactcattgctgcccaccagctatacaactacgtggctgatcacgccagctcttaccacatgaagccattgcgaatggcccggccagggggcccagaacacaacgagtatgccctggtgtcggcatggcacagttctggctcctacctggactctgagggacttcgacaccaggatgactttgatgtgtctctgcttgtctgtcactgtgctgcaccctttgaggagcaaggagaggctgagcggcacgttctgcggctacagttcttcgtggtgctcaccagccagcgagagctcttccccaggctcactgctgacatgcgccgcttccggaagccacccagactgccccctgagccagaggctcctgggagttcagctggcagccctggggaggcctcagggcttattctagcgcctggaccggctcctctgttcccaccactggctgcagaggtgggcatggcacgagcacggctggctcagctggtgcggctggctggagggcactgccgtcgggacaccctttggaagcgcctcttcttgctggagccaccggggcctgatcgactgcggctaggggggcgcctggccctggcagagctggaggaactcctagaagcagtccatgccaaatccattggggacatcgacccccagctggactgcttcctatccatgacggtctcctggtaccagagcctgatcaaagttctcctaagccgcttcccccagagctgtcgccatttccaaagcccagacttgggaactcagtacctggttgtgctgaatcagaagttcactgactgctttgtgctagtgtttctggactcccacttaggaaagacgtctctgacagtggttttccgagagcccttcccagtacagccccaggacagcgagagcccccctgcccaactggtctccacctaccaccacctggagtctgtcatcaacacagcctgtttcaccctctggacccgcctcctctgagggagtggactggaccactgaatgtcactgttccttgaatcatgggcctaccagattgcctgccagaggcaggactgaccagcccttctgggccccagggcaagccagacactgagtgacaccaaaggctttgtaaactatgtgtcccaccaccccattacagagacatatgacaatgttcagcaggtcatctttaatgcagaggaggagatgggatgtcactcgctgtctggaggcacgtgggtggtgtgcgggccctcactggccagcctctgggtggccccgcctatcccagtatgaacgtagccaactcaagccctctactgtgtctcctgcagggagagggaggcctcggcacctcagcccacaaggagaaaacagcccctgtccgggtccctccagagctcccttccccagggccacgcctcacctcgaggctgatactcacagcccacgaagcctttgtagccttcatcttccagcagttgaaacagataggggaaattcagctctccggggctgctgggctcccctcggcctgggacctgtgccacctgcacatgccctggggacagatgtggacaaatgtggggtccaggctcc

SEQ ID NO: 287596 - DNA, 6937 bp, Homo sapiens
  misc_feature (1090)..(1090): n is a, c, g, or t
  misc_feature (1106)..(1106): n is a, c, g, or t
  misc_feature (3651)..(3651): n is a, c, g, or t
aggcagctaaccactgtgccctgctgcaggagcatgcacagcggtgctatgtccgtgggctattccgcagcttgcagcaagcacagagtgtgacctcccaggatttgctgacagcggtagatgcctgtgaggagctactacaagaaatagacatcaccccatttctccttgcattgtgtggccacacttggggtttgcctcatgcacccccaagtcctggtcctctcagccctgggcccttcagcagcagcatggaggagggtgctgaacctcgggaacgagctatcctagcttctgaatccagcatagagaccgaggacctaagcgagcctgagtttcagagcacccgtgtccctggcattccagaccctgggccagagatctctctgacagatgtctgccagctcagaggagaggcccatggtgcccttcatagcgtcatccaggtgggaagcttgggtgagggtagaagaggtgttagagtcctgcctgtgcagagggacaggattctctcctgggcggggggtatgcatgtgtcctgctctagggtagggagtagtatcctgttgaggggtgactgacattctaacctccttctaaaccccacaacaggagaagttcctagagatcagtcgtctccacttccgcacagtgccttccaatccccactacttcttctattgccctccatccagcaggcgagaagatgaggggcctcgggacacagtagacagaaaaatcagtgacctggagttttcagaggctgagcttatgggagaagaaggagacacatctgcctgctgtgtggtcactgagagtgacccagagctagaggtagaataccgggagagccgtgaatcagacctggggcctgctgggctagactctgcctcgctgtcagacgtagacactgtgaatcctgatgaagactccttcagtatcttggggggcgactcacccactgggcctgagagcttccttcatgacctgccaccgctcttcctgcacctcacgtgctccgtgcggctacgtgggcagcacagctcagtacctgtgtgcagcctgcctacctgcctggtttccagtctgnagggccccccagttgnaggccgagttcccttgagggacctcagtgtgactctggatgtcttcatgctgactttgcccctggaagtggagctccccacggcctcggaccctcagcaccaccggtcaacatctgaaagcagtgcttcatttccacgatccccagggcagccatcatctttaaggtcagatgatggcctcgggcccccactgccacccccagaagaggagaggcacccaggactatccaatttggccacgccccacagactggctattgagaccaccatgaatgagatccgctggttgttggaagatgagatggtgggggcactccgaagagggggcatcccacagagtcctgccctgcaccgcgcagctgcccatatccatagttctcctggacgctccacctgccttcgccaaactctgccactgagttttgtatttgggccagagcgttccctcacacaattcaaggaggagttccgccgcctccatctccctggccatgttcttcttgaagaccctgacagtggcttcttctttgtggcagctggccaacagccaggtgggtcccatggggagccttcttcagcggcctgggcttggcacagtcatgaggacagggctgaaggcatcgaaggggagaccctgacagccagcccccaagcacctgggtccccagaggattctgagggtgtccccctcatcagcctgccccgcgtgccacagggagggagtcagcctgggcccagccggggattaagtctcatgtccagtcagggcagtgtggactcagaccacctaggttatgatggtggcagcagtggctcagacagtgagggtcccaatgacacccttggtgagaaggcccccttcacattgcggactccacctgggccagcacctccacagccttcactctcaggcctccctgggccctgcctgcctgacttctggctcattgtccgggtcctgcaggaccgtgtggaagtgtatgcacatgcacggagcctgattcgggaggatggggggccgggcactgagtgtcgccacctgcagcagctcctggtgaggcgagttggggagatctgcagggaggtcaaccagcgactgcttcttcaagaccttcatgacagccacgtgtgtaactctcttctggtggccgagagtgaagaagatctgtggcgcagtgagactcccttccactcccgtcagcgggcaccactgcccagtgatgattatgctgctgatgagagctgtgcgccccgtgggtacctggcagccacaatgcagtttgtccctggccatttctcctgtgacgttgtgtggggaactgtgatccgagtccattcacgcctcaaaatggggcccagcatgggggtctctcgggccatccaggccctgcgctctgtgctcaatgccttctctgtggtgaaccggaaaaacatgtttgtttaccaggagcgagcaacaaaggctgtgtactatcttcggctcctagagacatcctgcagtgaccggccatggaaaggggatgcgctgcccccttccctcgctctgtcccgaagccaagagcccatctactctgaggaagcctcgggtcctcgttctcccttagacatggtctctagccgcagttcagatgctgctcgtcctgtgggccaagtggacagacatatccagctgctggtccatggtgttgggcaggcaggtcctgagatcacggatgagctcgtgcgagttctatgtcggcgcctggatgaggccacgctggacgtcatcacagttatgcttgttcggaactgcaagctgacaccagctgatgtggagttcatccagccccctggaagtctcccctcagaggtgctgcatctggccctacccacctcctgcaggccctggcttccagccctggcatggtacctacggcagaacttgctcatcttcctgcactctcccaagtacacagatagcaacagccggaaccacttccaacatccactcccaccacagggtggcctccctgacttggacatctacttgtataacaagcctggtggacagggcactgggggcaaaggggttgcctgcatcactctagcctttgtggatgaaggaggggcccccttgtcactggcgttgtggcccccctcctctccggggcccccagacccactgcgagaggaggaatttgagcaactgacccaggtcatccgctgcccggttgttgtggacagttcttcagctcagaatggggccccacggcttcgattggatgtgtgggaaaaggggaacattagtattgtgcagctggaggagaaactccgaggagcagctcgccaggccctggccgatgccatcatcgagcttcagctgctgccagcttcactatgtacagaggacacacccacaggaagtctcaggaacggatcgttggaaactaagagctctgcaggccgagctagcacctttccccctgcccctgtccctggggagcctgtgactccacccagcaaagcgggccggcgtagcttctgggatatgctgagtaaaacagantgtggggatttgggttcccccaaaacaactgatgacattgtcctggatcggccagaagacactcggggccggaggcgtcacaaaaccgagagtgttcggactcctggtggagctgagcgggcgccaggctcagattctggagcccagagacaaaagcgccggacaacacagctagaagagggtgaggtggggacccttcatcctgtgtttgcccgtgttgctcagcgctggatggagtttatggttcagattggttgtgcctcagtgtccagaagctctgcccacatggtgtcccggttcctccttccatccatcctgtctgagttcaccgcactggtcacctcaatggctggagacaccagtgtccgcatctttgagcagcatttgggttcagagccagagatcttcggcccttgttcccctgggcaactgggcccctctccccgccctgcagctgagcggcatctgctgcttctgggaaggaacttcttgcagtggaggagaccaacacagcaggctgccaaagccatgcagcgcttcgagccaggaggtgatgggagctcagggcgaaatgctccccggcagaggctcttgctactagaggttgtggacaagaagctacagctgctgacctacaactgggctccagacctgggggcagcattgggccgagcgctggttcgcctggtgcagtggcagaatgcacgagcccatctcatcttctgcctactcagccagaagcttggcctcttccatcattatggccagttggacttccccgtgcgagatgaaaaggagccaaacccattcctgctgccgaccatggaagtggagaccctcatccggagtgcaagtcccccgctgagccgtgagcagggccgactgagtgggtcctctcgtggtgggggtcctcttcccctggacacattcccctttgacgaggccctaagggatatcacggctgcccgccccagctccgtacttggtcctgtgcccagacctcctgatcctgtcacctaccatggacaacagttcctagagatcaagatggcagagcgcagagagctggagcgccagatgaagatggaaaacctgtttgtaacctggcagcagcgttctaccccagccaccatgcccatcagtgctggagagctggagaccctgaagcagtcatcccgcctggtgcattactgtgcaacagccatgctcttcgacccagctgcctggctgcatgggcccccagagacctctggaccccctgacgggcagcggcgccatcgccctgagtcagggtctgggagccgagaggcccccacaagctgtgaatccttggatgtgtcgcccccgggagcccgtgaggagccttggctgaaggagctgagcttggctttcctgcagcaatatgtgcagtatctgcagagcataggttttgtgctggtaccactgcggcccccctcacccgcccgcagcaccagccggccacgggccatggctatccttggaacagagggtcgaggctccttctcctgccctaaaaccaagactgatgggagccccaagagcactagctctccggtaaccacctaccacctgcagcgggcactgcctgggggcatcatcctcatggaactggcattccagggctgttacttctgtgtcaaacagtttgccctggaatgttcccgaatcccaatggggcaggctgtcaactcacagctgtccatgctgttcacagaggagtgtgacaaggtgcgggacctgatgcacgtgcactcgttcagctatgacttccatctgcgcctcgtgcatcagcacgtgctaggtgcccatctggtgctgcggcacggctaccacctcaccacctttctgcgacacttcctggcccaccaccctgacggaccccactttggccgcaatcacatttaccaagggacattggagctccccacaccactcattgctgcccaccagctatacaactacgtggctgatcacgccagctcttaccacatgaagccattgcgaatggcccggccagggggcccagaacacaacgagtatgccctggtgtcggcatggcacagttctggctcctacctggactctgagggacttcgacaccaggatgactttgatgtgtctctgcttgtctgtcactgtgctgcaccctttgaggagcaaggagaggctgagcggcacgttctgcggctacagttcttcgtggtgctcaccagccagcgagagctcttccccaggctcactgctgacatgcgccgcttccggaagccacccagactgccccctgagccagaggctcctgggagttcagctggcagccctggggaggcctcagggcttattctagcgcctggaccggctcctctgttcccaccactggctgcagaggtgggcatggcacgagcacggctggctcagctggtgcggctggctggagggcactgccgtcgggacaccctttggaagcgcctcttcttgctggagccaccggggcctgatcgactgcggctaggggggcgcctggccctggcagagctggaggaactcctagaagcagtccatgccaaatccattggggacatcgacccccagctggactgcttcctatccatgacggtctcctggtaccagagcctgatcaaagttctcctaagccgcttcccccagagctgtcgccatttccaaagcccagacttgggaactcagtacctggtgggttcagaagctctcccatcttcacagcaaccctggcactggcttctcaatgggagggaagcagcagagaaactgaagtgttagacactatgtgtcccaccaccccattacagagacatatgacaatgttcagcaggtcatctttaatgcagaggaggagatgggatgtcactcgctgtctggaggcacgtgggtggtgtgcgggccctcactggccagcctctgggtggccccgcctatcccagtatgaacgtagccaactcaagccctctactgtgtctcctgcagggagagggaggcctcggcacctcagcccacaaggagaaaacagcccctgtccgggtccctccagagctcccttccccagggccacgcctcacctcgaggctgatactcacagcccacgaagcctttgtagccttcatcttccagcagttgaaacagataggggaaattcagctctccggggctgctgggctcccctcggcctgggacctgtgccacctgcacatgccctggggacagatgtggacaaatgtggggtccaggctcc

SEQ ID NO: 287597 - DNA, 6418 bp, Homo sapiens
  misc_feature (1090)..(1090): n is a, c, g, or t
  misc_feature (1106)..(1106): n is a, c, g, or t
  misc_feature (3651)..(3651): n is a, c, g, or t
  misc_feature (6412)..(6412): n is a, c, g, or t
aggcagctaaccactgtgccctgctgcaggagcatgcacagcggtgctatgtccgtgggctattccgcagcttgcagcaagcacagagtgtgacctcccaggatttgctgacagcggtagatgcctgtgaggagctactacaagaaatagacatcaccccatttctccttgcattgtgtggccacacttggggtttgcctcatgcacccccaagtcctggtcctctcagccctgggcccttcagcagcagcatggaggagggtgctgaacctcgggaacgagctatcctagcttctgaatccagcatagagaccgaggacctaagcgagcctgagtttcagagcacccgtgtccctggcattccagaccctgggccagagatctctctgacagatgtctgccagctcagaggagaggcccatggtgcccttcatagcgtcatccaggtgggaagcttgggtgagggtagaagaggtgttagagtcctgcctgtgcagagggacaggattctctcctgggcggggggtatgcatgtgtcctgctctagggtagggagtagtatcctgttgaggggtgactgacattctaacctccttctaaaccccacaacaggagaagttcctagagatcagtcgtctccacttccgcacagtgccttccaatccccactacttcttctattgccctccatccagcaggcgagaagatgaggggcctcgggacacagtagacagaaaaatcagtgacctggagttttcagaggctgagcttatgggagaagaaggagacacatctgcctgctgtgtggtcactgagagtgacccagagctagaggtagaataccgggagagccgtgaatcagacctggggcctgctgggctagactctgcctcgctgtcagacgtagacactgtgaatcctgatgaagactccttcagtatcttggggggcgactcacccactgggcctgagagcttccttcatgacctgccaccgctcttcctgcacctcacgtgctccgtgcggctacgtgggcagcacagctcagtacctgtgtgcagcctgcctacctgcctggtttccagtctgnagggccccccagttgnaggccgagttcccttgagggacctcagtgtgactctggatgtcttcatgctgactttgcccctggaagtggagctccccacggcctcggaccctcagcaccaccggtcaacatctgaaagcagtgcttcatttccacgatccccagggcagccatcatctttaaggtcagatgatggcctcgggcccccactgccacccccagaagaggagaggcacccaggactatccaatttggccacgccccacagactggctattgagaccaccatgaatgagatccgctggttgttggaagatgagatggtgggggcactccgaagagggggcatcccacagagtcctgccctgcaccgcgcagctgcccatatccatagttctcctggacgctccacctgccttcgccaaactctgccactgagttttgtatttgggccagagcgttccctcacacaattcaaggaggagttccgccgcctccatctccctggccatgttcttcttgaagaccctgacagtggcttcttctttgtggcagctggccaacagccaggtgggtcccatggggagccttcttcagcggcctgggcttggcacagtcatgaggacagggctgaaggcatcgaaggggagaccctgacagccagcccccaagcacctgggtccccagaggattctgagggtgtccccctcatcagcctgccccgcgtgccacagggagggagtcagcctgggcccagccggggattaagtctcatgtccagtcagggcagtgtggactcagaccacctaggttatgatggtggcagcagtggctcagacagtgagggtcccaatgacacccttggtgagaaggcccccttcacattgcggactccacctgggccagcacctccacagccttcactctcaggcctccctgggccctgcctgcctgacttctggctcattgtccgggtcctgcaggaccgtgtggaagtgtatgcacatgcacggagcctgattcgggaggatggggggccgggcactgagtgtcgccacctgcagcagctcctggtgaggcgagttggggagatctgcagggaggtcaaccagcgactgcttcttcaagaccttcatgacagccacgtgtgtaactctcttctggtggccgagagtgaagaagatctgtggcgcagtgagactcccttccactcccgtcagcgggcaccactgcccagtgatgattatgctgctgatgagagctgtgcgccccgtgggtacctggcagccacaatgcagtttgtccctggccatttctcctgtgacgttgtgtggggaactgtgatccgagtccattcacgcctcaaaatggggcccagcatgggggtctctcgggccatccaggccctgcgctctgtgctcaatgccttctctgtggtgaaccggaaaaacatgtttgtttaccaggagcgagcaacaaaggctgtgtactatcttcggctcctagagacatcctgcagtgaccggccatggaaaggggatgcgctgcccccttccctcgctctgtcccgaagccaagagcccatctactctgaggaagcctcgggtcctcgttctcccttagacatggtctctagccgcagttcagatgctgctcgtcctgtgggccaagtggacagacatatccagctgctggtccatggtgttgggcaggcaggtcctgagatcacggatgagctcgtgcgagttctatgtcggcgcctggatgaggccacgctggacgtcatcacagttatgcttgttcggaactgcaagctgacaccagctgatgtggagttcatccagccccctggaagtctcccctcagaggtgctgcatctggccctacccacctcctgcaggccctggcttccagccctggcatggtacctacggcagaacttgctcatcttcctgcactctcccaagtacacagatagcaacagccggaaccacttccaacatccactcccaccacagggtggcctccctgacttggacatctacttgtataacaagcctggtggacagggcactgggggcaaaggggttgcctgcatcactctagcctttgtggatgaaggaggggcccccttgtcactggcgttgtggcccccctcctctccggggcccccagacccactgcgagaggaggaatttgagcaactgacccaggtcatccgctgcccggttgttgtggacagttcttcagctcagaatggggccccacggcttcgattggatgtgtgggaaaaggggaacattagtattgtgcagctggaggagaaactccgaggagcagctcgccaggccctggccgatgccatcatcgagcttcagctgctgccagcttcactatgtacagaggacacacccacaggaagtctcaggaacggatcgttggaaactaagagctctgcaggccgagctagcacctttccccctgcccctgtccctggggagcctgtgactccacccagcaaagcgggccggcgtagcttctgggatatgctgagtaaaacagantgtggggatttgggttcccccaaaacaactgatgacattgtcctggatcggccagaagacactcggggccggaggcgtcacaaaaccgagagtgttcggactcctggtggagctgagcgggcgccaggctcagattctggagcccagagacaaaagcgccggacaacacagctagaagagggtgaggtggggacccttcatcctgtgtttgcccgtgttgctcagcgctggatggagtttatggttcagattggttgtgcctcagtgtccagaagctctgcccacatggtgtcccggttcctccttccatccatcctgtctgagttcaccgcactggtcacctcaatggctggagacaccagtgtccgcatctttgagcagcatttgggttcagagccagagatcttcggcccttgttcccctgggcaactgggcccctctccccgccctgcagctgagcggcatctgctgcttctgggaaggaacttcttgcagtggaggagaccaacacagcaggctgccaaagccatgcagcgcttcgagccaggaggtgatgggagctcagggcgaaatgctccccggcagaggctcttgctactagaggttgtggacaagaagctacagctgctgacctacaactgggctccagacctgggggcagcattgggccgagcgctggttcgcctggtgcagtggcagaatgcacgagcccatctcatcttctgcctactcagccagaagcttggcctcttccatcattatggccagttggacttccccgtgcgagatgaaaaggagccaaacccattcctgctgccgaccatggaagtggagaccctcatccggagtgcaagtcccccgctgagccgtgagcagggccgactgagtgggtcctctcgtggtgggggtcctcttcccctggacacattcccctttgacgaggccctaagggatatcacggctgcccgccccagctccgtacttggtcctgtgcccagacctcctgatcctgtcacctaccatggacaacagttcctagagatcaagatggcagagcgcagagagctggagcgccagatgaagatggaaaacctgtttgtaacctggcagcagcgttctaccccagccaccatgcccatcagtgctggagagctggagaccctgaagcagtcatcccgcctggtgcattactgtgcaacagccatgctcttcgacccagctgcctggctgcatgggcccccagagacctctggaccccctgacgggcagcggcgccatcgccctgagtcagggtctgggagccgagaggcccccacaagctgtgaatccttggatgtgtcgcccccgggagcccgtgaggagccttggctgaaggagctgagcttggctttcctgcagcaatatgtgcagtatctgcagagcataggttttgtgctggtaccactgcggcccccctcacccgcccgcagcaccagccggccacgggccatggctatccttggaacagagggtcgaggctccttctcctgccctaaaaccaagactgatgggagccccaagagcactagctctccggtaaccacctaccacctgcagcgggcactgcctgggggcatcatcctcatggaactggcattccagggctgttacttctgtgtcaaacagtttgccctggaatgttcccgaatcccaatggggcaggctgtcaactcacagctgtccatgctgttcacagaggagtgtgacaaggtgcgggacctgatgcacgtgcactcgttcagctatgacttccatctgcgcctcgtgcatcagcacgtgctaggtgcccatctggtgctgcggcacggctaccacctcaccacctttctgcgacacttcctggcccaccaccctgacggaccccactttggccgcaatcacatttaccaagggacattggagctccccacaccactcattgctgcccaccagctatacaactacgtggctgatcacgccagctcttaccacatgaagccattgcgaatggcccggccagggggcccagaacacaacgagtatgccctggtgtcggcatggcacagttctggctcctacctggactctgagggacttcgacaccaggatgactttgatgtgtctctgcttgtctgtcactgtgctgcaccctttgaggagcaaggagaggctgagcggcacgttctgcggctacagttcttcgtggtgctcaccagccagcgagagctcttccccaggctcactgctgacatgcgccgcttccggaagccacccagactgccccctgagccagaggctcctgggagttcagctggcagccctggggaggcctcagggcttattctagcgcctggaccggctcctctgttcccaccactggctgcagaggtgggcatggcacgagcacggctggctcagctggtgcggctggctggagggcactgccgtcgggacaccctttggaagcgcctcttcttgctggagccaccggggcctgatcgactgcggctaggggggcgcctggccctggcagagctggaggaactcctagaagcagtccatgccaaatccattggggacatcgacccccagctggactgcttcctatccatgacggtctcctggtaccagagcctgatcaaagttctcctaagccgcttcccccagagctgtcgccatttccaaagcccagacttgggaactcagtacctgtaagttaccctgggttggggcttgaattcanaaagtt

SEQ ID NO: 287598 - DNA, 6430 bp, Homo sapiens
  misc_feature (1090)..(1090): n is a, c, g, or t
  misc_feature (1106)..(1106): n is a, c, g, or t
  misc_feature (3651)..(3651): n is a, c, g, or t
aggcagctaaccactgtgccctgctgcaggagcatgcacagcggtgctatgtccgtgggctattccgcagcttgcagcaagcacagagtgtgacctcccaggatttgctgacagcggtagatgcctgtgaggagctactacaagaaatagacatcaccccatttctccttgcattgtgtggccacacttggggtttgcctcatgcacccccaagtcctggtcctctcagccctgggcccttcagcagcagcatggaggagggtgctgaacctcgggaacgagctatcctagcttctgaatccagcatagagaccgaggacctaagcgagcctgagtttcagagcacccgtgtccctggcattccagaccctgggccagagatctctctgacagatgtctgccagctcagaggagaggcccatggtgcccttcatagcgtcatccaggtgggaagcttgggtgagggtagaagaggtgttagagtcctgcctgtgcagagggacaggattctctcctgggcggggggtatgcatgtgtcctgctctagggtagggagtagtatcctgttgaggggtgactgacattctaacctccttctaaaccccacaacaggagaagttcctagagatcagtcgtctccacttccgcacagtgccttccaatccccactacttcttctattgccctccatccagcaggcgagaagatgaggggcctcgggacacagtagacagaaaaatcagtgacctggagttttcagaggctgagcttatgggagaagaaggagacacatctgcctgctgtgtggtcactgagagtgacccagagctagaggtagaataccgggagagccgtgaatcagacctggggcctgctgggctagactctgcctcgctgtcagacgtagacactgtgaatcctgatgaagactccttcagtatcttggggggcgactcacccactgggcctgagagcttccttcatgacctgccaccgctcttcctgcacctcacgtgctccgtgcggctacgtgggcagcacagctcagtacctgtgtgcagcctgcctacctgcctggtttccagtctgnagggccccccagttgnaggccgagttcccttgagggacctcagtgtgactctggatgtcttcatgctgactttgcccctggaagtggagctccccacggcctcggaccctcagcaccaccggtcaacatctgaaagcagtgcttcatttccacgatccccagggcagccatcatctttaaggtcagatgatggcctcgggcccccactgccacccccagaagaggagaggcacccaggactatccaatttggccacgccccacagactggctattgagaccaccatgaatgagatccgctggttgttggaagatgagatggtgggggcactccgaagagggggcatcccacagagtcctgccctgcaccgcgcagctgcccatatccatagttctcctggacgctccacctgccttcgccaaactctgccactgagttttgtatttgggccagagcgttccctcacacaattcaaggaggagttccgccgcctccatctccctggccatgttcttcttgaagaccctgacagtggcttcttctttgtggcagctggccaacagccaggtgggtcccatggggagccttcttcagcggcctgggcttggcacagtcatgaggacagggctgaaggcatcgaaggggagaccctgacagccagcccccaagcacctgggtccccagaggattctgagggtgtccccctcatcagcctgccccgcgtgccacagggagggagtcagcctgggcccagccggggattaagtctcatgtccagtcagggcagtgtggactcagaccacctaggttatgatggtggcagcagtggctcagacagtgagggtcccaatgacacccttggtgagaaggcccccttcacattgcggactccacctgggccagcacctccacagccttcactctcaggcctccctgggccctgcctgcctgacttctggctcattgtccgggtcctgcaggaccgtgtggaagtgtatgcacatgcacggagcctgattcgggaggatggggggccgggcactgagtgtcgccacctgcagcagctcctggtgaggcgagttggggagatctgcagggaggtcaaccagcgactgcttcttcaagaccttcatgacagccacgtgtgtaactctcttctggtggccgagagtgaagaagatctgtggcgcagtgagactcccttccactcccgtcagcgggcaccactgcccagtgatgattatgctgctgatgagagctgtgcgccccgtgggtacctggcagccacaatgcagtttgtccctggccatttctcctgtgacgttgtgtggggaactgtgatccgagtccattcacgcctcaaaatggggcccagcatgggggtctctcgggccatccaggccctgcgctctgtgctcaatgccttctctgtggtgaaccggaaaaacatgtttgtttaccaggagcgagcaacaaaggctgtgtactatcttcggctcctagagacatcctgcagtgaccggccatggaaaggggatgcgctgcccccttccctcgctctgtcccgaagccaagagcccatctactctgaggaagcctcgggtcctcgttctcccttagacatggtctctagccgcagttcagatgctgctcgtcctgtgggccaagtggacagacatatccagctgctggtccatggtgttgggcaggcaggtcctgagatcacggatgagctcgtgcgagttctatgtcggcgcctggatgaggccacgctggacgtcatcacagttatgcttgttcggaactgcaagctgacaccagctgatgtggagttcatccagccccctggaagtctcccctcagaggtgctgcatctggccctacccacctcctgcaggccctggcttccagccctggcatggtacctacggcagaacttgctcatcttcctgcactctcccaagtacacagatagcaacagccggaaccacttccaacatccactcccaccacagggtggcctccctgacttggacatctacttgtataacaagcctggtggacagggcactgggggcaaaggggttgcctgcatcactctagcctttgtggatgaaggaggggcccccttgtcactggcgttgtggcccccctcctctccggggcccccagacccactgcgagaggaggaatttgagcaactgacccaggtcatccgctgcccggttgttgtggacagttcttcagctcagaatggggccccacggcttcgattggatgtgtgggaaaaggggaacattagtattgtgcagctggaggagaaactccgaggagcagctcgccaggccctggccgatgccatcatcgagcttcagctgctgccagcttcactatgtacagaggacacacccacaggaagtctcaggaacggatcgttggaaactaagagctctgcaggccgagctagcacctttccccctgcccctgtccctggggagcctgtgactccacccagcaaagcgggccggcgtagcttctgggatatgctgagtaaaacagantgtggggatttgggttcccccaaaacaactgatgacattgtcctggatcggccagaagacactcggggccggaggcgtcacaaaaccgagagtgttcggactcctggtggagctgagcgggcgccaggctcagattctggagcccagagacaaaagcgccggacaacacagctagaagagggtgaggtggggacccttcatcctgtgtttgcccgtgttgctcagcgctggatggagtttatggttcagattggttgtgcctcagtgtccagaagctctgcccacatggtgtcccggttcctccttccatccatcctgtctgagttcaccgcactggtcacctcaatggctggagacaccagtgtccgcatctttgagcagcatttgggttcagagccagagatcttcggcccttgttcccctgggcaactgggcccctctccccgccctgcagctgagcggcatctgctgcttctgggaaggaacttcttgcagtggaggagaccaacacagcaggctgccaaagccatgcagcgcttcgagccaggaggtgatgggagctcagggcgaaatgctccccggcagaggctcttgctactagaggttgtggacaagaagctacagctgctgacctacaactgggctccagacctgggggcagcattgggccgagcgctggttcgcctggtgcagtggcagaatgcacgagcccatctcatcttctgcctactcagccagaagcttggcctcttccatcattatggccagttggacttccccgtgcgagatgaaaaggagccaaacccattcctgctgccgaccatggaagtggagaccctcatccggagtgcaagtcccccgctgagccgtgagcagggccgactgagtgggtcctctcgtggtgggggtcctcttcccctggacacattcccctttgacgaggccctaagggatatcacggctgcccgccccagctccgtacttggtcctgtgcccagacctcctgatcctgtcacctaccatggacaacagttcctagagatcaagatggcagagcgcagagagctggagcgccagatgaagatggaaaacctgtttgtaacctggcagcagcgttctaccccagccaccatgcccatcagtgctggagagctggagaccctgaagcagtcatcccgcctggtgcattactgtgcaacagccatgctcttcgacccagctgcctggctgcatgggcccccagagacctctggaccccctgacgggcagcggcgccatcgccctgagtcagggtctgggagccgagaggcccccacaagctgtgaatccttggatgtgtcgcccccgggagcccgtgaggagccttggctgaaggagctgagcttggctttcctgcagcaatatgtgcagtatctgcagagcataggttttgtgctggtaccactgcggcccccctcacccgcccgcagcaccagccggccacgggccatggctatccttggaacagagggtcgaggctccttctcctgccctaaaaccaagactgatgggagccccaagagcactagctctccggtaaccacctaccacctgcagcgggcactgcctgggggcatcatcctcatggaactggcattccagggctgttacttctgtgtcaaacagtttgccctggaatgttcccgaatcccaatggggcaggctgtcaactcacagctgtccatgctgttcacagaggagtgtgacaaggtgcgggacctgatgcacgtgcactcgttcagctatgacttccatctgcgcctcgtgcatcagcacgtgctaggtgcccatctggtgctgcggcacggctaccacctcaccacctttctgcgacacttcctggcccaccaccctgacggaccccactttggccgcaatcacatttaccaagggacattggagctccccacaccactcattgctgcccaccagctatacaactacgtggctgatcacgccagctcttaccacatgaagccattgcgaatggcccggccagggggcccagaacacaacgagtatgccctggtgtcggcatggcacagttctggctcctacctggactctgagggacttcgacaccaggatgactttgatgtgtctctgcttgtctgtcactgtgctgcaccctttgaggagcaaggagaggctgagcggcacgttctgcggctacagttcttcgtggtgctcaccagccagcgagagctcttccccaggctcactgctgacatgcgccgcttccggaagccacccagactgccccctgagccagaggctcctgggagttcagctggcagccctggggaggcctcagggcttattctagcgcctggaccggctcctctgttcccaccactggctgcagaggtgggcatggcacgagcacggctggctcagctggtgcggctggctggagggcactgccgtcgggacaccctttggaagcgcctcttcttgctggagccaccggggcctgatcgactgcggctaggggggcgcctggccctggcagagctggaggaactcctagaagcagtccatgccaaatccattggggacatcgacccccagctggactgcttcctatccatgacggtctcctggtaccagagcctgatcaaagttctcctaagccgcttcccccagagctgtcgccatttccaaagcccagacttgggaactcagtacctgagggcgctcgtcacgctcttgctccagagtcccgtcatagatacgcaac

SEQ ID NO: 287599 - DNA, 4098 bp, Homo sapiens
  misc_feature (1090)..(1090): n is a, c, g, or t
  misc_feature (1106)..(1106): n is a, c, g, or t
aggcagctaaccactgtgccctgctgcaggagcatgcacagcggtgctatgtccgtgggctattccgcagcttgcagcaagcacagagtgtgacctcccaggatttgctgacagcggtagatgcctgtgaggagctactacaagaaatagacatcaccccatttctccttgcattgtgtggccacacttggggtttgcctcatgcacccccaagtcctggtcctctcagccctgggcccttcagcagcagcatggaggagggtgctgaacctcgggaacgagctatcctagcttctgaatccagcatagagaccgaggacctaagcgagcctgagtttcagagcacccgtgtccctggcattccagaccctgggccagagatctctctgacagatgtctgccagctcagaggagaggcccatggtgcccttcatagcgtcatccaggtgggaagcttgggtgagggtagaagaggtgttagagtcctgcctgtgcagagggacaggattctctcctgggcggggggtatgcatgtgtcctgctctagggtagggagtagtatcctgttgaggggtgactgacattctaacctccttctaaaccccacaacaggagaagttcctagagatcagtcgtctccacttccgcacagtgccttccaatccccactacttcttctattgccctccatccagcaggcgagaagatgaggggcctcgggacacagtagacagaaaaatcagtgacctggagttttcagaggctgagcttatgggagaagaaggagacacatctgcctgctgtgtggtcactgagagtgacccagagctagaggtagaataccgggagagccgtgaatcagacctggggcctgctgggctagactctgcctcgctgtcagacgtagacactgtgaatcctgatgaagactccttcagtatcttggggggcgactcacccactgggcctgagagcttccttcatgacctgccaccgctcttcctgcacctcacgtgctccgtgcggctacgtgggcagcacagctcagtacctgtgtgcagcctgcctacctgcctggtttccagtctgnagggccccccagttgnaggccgagttcccttgagggacctcagtgtgactctggatgtcttcatgctgactttgcccctggaagtggagctccccacggcctcggaccctcagcaccaccggtcaacatctgaaagcagtgcttcatttccacgatccccagggcagccatcatctttaaggtcagatgatggcctcgggcccccactgccacccccagaagaggagaggcacccaggactatccaatttggccacgccccacagactggctattgagaccaccatgaatgagatccgctggttgttggaagatgagatggtgggggcactccgaagagggggcatcccacagagtcctgccctgcaccgcgcagctgcccatatccatagttctcctggacgctccacctgccttcgccaaactctgccactgagttttgtatttgggccagagcgttccctcacacaattcaaggaggagttccgccgcctccatctccctggccatgttcttcttgaagaccctgacagtggcttcttctttgtggcagctggccaacagccaggtgggtcccatggggagccttcttcagcggcctgggcttggcacagtcatgaggacagggctgaaggcatcgaaggggagaccctgacagccagcccccaagcacctgggtccccagaggattctgagggtgtccccctcatcagcctgccccgcgtgccacagggagggagtcagcctgggcccagccggggattaagtctcatgtccagtcagggcagtgtggactcagaccacctaggttatgatggtggcagcagtggctcagacagtgagggtcccaatgacacccttggtgagaaggcccccttcacattgcggactccacctgggccagcacctccacagccttcactctcaggcctccctgggccctgcctgcctgacttctggctcattgtccgggtcctgcaggaccgtgtggaagtgtatgcacatgcacggagcctgattcgggaggatggggggccgggcactgagtgtcgccacctgcagcagctcctggtgaggcgagttggggagatctgcagggaggtcaaccagcgactgcttcttcaagaccttcatgacagccacgtgtgtaactctcttctggtggccgagagtgaagaagatctgtggcgcagtgagactcccttccactcccgtcagcgggcaccactgcccagtgatgattatgctgctgatgagagctgtgcgccccgtgggtacctggcagccacaatgcagtttgtccctggccatttctcctgtgacgttgtgtggggaactgtgatccgagtccattcacgcctcaaaatggggcccagcatgggggtctctcgggccatccaggccctgcgctctgtgctcaatgccttctctgtggtgaaccggaaaaacatgtttgtttaccaggagcgagcaacaaaggctgtgtactatcttcggctcctagagacatcctgcagtgaccggccatggaaaggggatgcgctgcccccttccctcgctctgtcccgaagccaagagcccatctactctgaggaagcctcgggtcctcgttctcccttagacatggtctctagccgcagttcagatgctgctcgtcctgtgggccaagtggacagacatatccagctgctggtccatggtgttgggcaggcaggtcctgagatcacggatgagctcgtgcgagttctatgtcggcgcctggatgaggccacgctggacgtcatcacagttatgcttgttcggaactgcaagctgacaccagctgatgtggagttcatccagccccctggaagtctcccctcagaggtgctgcatctggccctacccacctcctgcaggccctggcttccagccctggcatggtacctacggcagaacttgctcatcttcctgcactctcccaagtacacagatagcaacagccggaaccacttccaacatccactcccaccacagggtggcctccctgacttggacatctacttgtataacaagcctggtggacagggcactgggggcaaaggggttgcctgcatcactctagcctttgtggatgaaggaggggcccccttgtcactggcgttgtggcccccctcctctccggggcccccagacccactgcgagaggaggaatttgagcaactgacccaggtcatccgctgcccggttgttgtggacagttcttcagctcagaatggggccccacggcttcgattggatgtgtgggaaaaggggaacattagtattgtgcagctggaggagaaactccgaggagcagctcgccaggccctggccgatgccatcatcgagcttcagctgctgccagcttcactatgtacagaggacacacccacaggaagtctcaggaacggatcgttggaaactaagagctctgcaggccgagctagcacctttccccctgcccctgtccctggggagcctgtgactccacccagcaaagcgggccggcgtagcttctgggatatgctggtaatggaagaagtggtgaagtgggcatctacctttctgcctgcctcctagctcctcccacactccctcctgcttcccagtcccccataggccttgccacagtgtcctttcatataaaactgctctgtcctgccagacaccatggcgtgtacctttagtcccagctcctcaggaggatgaaatgggaggattttgcttcaggccaagagttcaaggctgtagtatgttgtgatcatgcctgttaatgcactccagcctgggcaacacacaaacactctgtctcaaaaaagcaaaacaaaaactgctctgtcttttggactggagtttgtagaatgtggcagttctcactgatgtagagggagccttaacttactatgtgccttcacttccatttttcttgtcggatcctcacaacagcttgcaagataagtagagcttttacagtgaggaaggtgaggc

SEQ ID NO: 287600 - DNA, 415 bp, Homo sapiens
agtggagacagccagacccacctgtctctcgccttcctgatctcatcttcaccttccctccagggctgttacttctgtgtcaaacagtttgccctggaatgttcccgaatcccaatggggcaggctgtcaactcacaggtatgtgaatgagctgcgggcacagtcagtgcaccccagtgtgctgtgggcagcatggctccatgtcccatttgctgggcagtagagtaatgcagtaggcgggctggcccagtgattgattcactgctatggcctggctaggtcagtgctcattctggtgccatgactgcactcactacaaggctgaccccatcggtcatccaaagcgtgttcagctgtagccctgaggcagcacagtgcctggtctggcctgtagtcatctagagtctgtggcaga

SEQ ID NO: 287601 - DNA, 548 bp, Homo sapiens
tgtgacctcagggtgcaggcggggtgaggtgtggagatggaagtaggcctctcctcatcctcccttcacctcaggatgccctgtgggagggtctgtagggtctgtgtcccctcctcatctttcactgcaggttgtgctgaatcagaagttcactgactgctttgtgctagtgtttctggactcccacttaggaaagacggtaagaacgagtggggggctttgtgtcagcctcatgggaggccgtaccccaaatgctccacctcggagcctgctgaggttggggtgcccaccctttctgagccctgcctcctatccccacccatgccctcctctcaccagtgcatccccaccgtgttccccacagtctctgacagtggttttccgagagcccttcccagtacagccccaggacagcgagagcccccctgcccaactggtctccacctaccaccacctggagtctgtcatcaacacagcctgtttcaccctctggacccgcctcctctgagggagtggactggaccactgaatgtcactgttccttgaat

SEQ ID NO: 287602 - DNA, 793 bp, Homo sapiens
gacagacatgcttctcaaagtacagaatgctattggagaactgtatcttgaaactggaatgactcaggaagggttccagtatttccagaaagcatggtcaagcatgctgcatctttcactcagtgacttagaagacagccgggacttggtgaagcagaaagtcagagttttggacaatctggcaaagtcagcatctgaagaatacttaaaagaaaaccacattttggaatatgcaactgaaatttccaacttactggataacaatccccgtgatcaagctaccatgaaatacatcgaaggtgttctaatgttcgttgctggaaatacctctcttgcaaaaatgaaacttcgagagtgcttaaatatcaggaaaagcttgtttggcaagaaaaacatgctggttggagaagttatggaatttttagtggatttgctattttttccccagagagatagtaaaaaatcccaaaggaagcaagtacttaaatattataaacaagtgataaaaataaaggaaaatgcagaaactctggccaagtcctcactcctcaggaagcaactgagcatcagcctcagcgatacgttgtgtaaattagccttctgagagaaattgagtggatccggagccggagatattggcctcaaggtatgagccagcaacattctgagggttctaggaatggcttctcattatgggagcacttggttaaattaaactaccacagtgctcagagttctaatacagtgagctctgcaatgtgcatgaatgcagataaattacacagggctagaa

SEQ ID NO: 287603 - DNA, 686 bp, Homo sapiens
aagaggaagtgaacagctctgtcaaacgctgctgctgggtggagctccctgaagacagagagtgaacccttggttttcgccatgtagaggtctgctgtgctgagactcatggcaaaccccaggagccacctatgatgtgccagacacataagcccctccctcacaggcgtgggtgcagccggggccgaccgcattccaaggagcatttcctctgaaagccaggccaagtgcccgctctccagcgattttggtctaggcaacatcagatgaaaacgaacactaagggcaatcctgaagaaccaaaagaaactggcaatggacaggggtgaattgcatcctgtactgtttacagccttatctccaacttttgcagagtcaagaatttaaaagcagcagggcttggtggcccatgcctgtaatcccaatattttgggaggccgcagcgggaggatcacttgaggccaggagttccagacctccctgggcaacatgatgagaccacatctctacagaaaaattagctgggcatgctggcatgtgcctgtagtcccagctcctcaagaggctgaggtgggaggatcacttgagcccaggaggtcaaggctgcagtgagctatgatcacaccaatgcactctagcctggggacacagtgagaccctgtctcaaaaaaaaaaaaaagaggaat

SEQ ID NO: 287604 - DNA, 436 bp, Homo sapiens
aagaggaagtgaacagctctgtcaaacgctgctgctgggtggagctccctgaagacagagagtgaacccttggttttcgccatgtagaggtctgctgtgctgagactcatggcaaaccccaggagccacctatgatgtgccagacacataagcccctccctcacaggcgtgggtgcagccggggccgaccgcattccaaggagcatttcctctgaaagccaggccaagtgcccgctctccagcgtgagtcaagcagtgccatgcctcccacaccccttgcatcacatctctgggaatgcacagaccttgctgttacgctctctcttcccaccctttatgggtgttttctttaagtggcagaaggaagtgggcatgggttgggagaggaccatgaattctagtttctgccatactgcaggtggatttggggaagaag

SEQ ID NO: 287605 - DNA, 5155 bp, Homo sapiens
gggatgccgaggagccggggcggccgcgccgcgccggggccgccgccgccgccgccgccgccgggccaggccccgcgctggagccgctggcgggtccctgggcggctgctgctgctgctgctgcccgcgctctgctgcctcccgggcgccgcgcgggcggcggcggcggcggcgggggcagggaaccgggcagcggtggcggtggcggtggcgcgggcggacgaggcggaggcgcccttcgccgggcagaactggttaaagtcctatggctatctgcttccctatgactcacgggcatctgcgctgcactcagcgaaggccttgcagtcggcagtctccactatgcagcagttttacgggatcccggtcaccggtgtgttggatcagacaacgatcgagtggatgaagaaaccccgatgtggtgtccctgatcacccccacttaagccgtaggcggagaaacaagcgctatgccctgactggacagaagtggaggcaaaaacacatcacctacagcattcacaactataccccaaaagtgggtgagctagacacgcggaaagctattcgccaggctttcgatgtgtggcagaaggtgaccccactgacctttgaagaggtgccataccatgagatcaaaagtgaccggaaggaggcagacatcatgatcttttttgcttctggtttccatggcgacagctccccatttgatggagaagggggattcctggcccatgcctacttccctggcccagggattggaggagacacccactttgactccgatgagccatggacgctaggaaatgccaaccatgacgggaacgacctcttcctggtggctgtgcatgagctgggccacgcgctgggactggagcactccagcgaccccagcgccatcatggcgcccttctaccagtacatggagacgcacaacttcaagctgccccaggacgatctccagggcatccagaagatctatggacccccagccgagcctctggagcccacaaggccactccctacactccccgtccgcaggatccactcaccatcggagaggaaacacgagcgccagcccaggccccctcggccgcccctcggggaccggccatccacaccaggcaccaaacccaacatctgtgacggcaacttcaacacagtggccctcttccggggcgagatgtttgtctttaaggatcgctggttctggcgtctgcgcaataaccgagtgcaggagggctaccccatgcagatcgagcagttctggaagggcctgcctgcccgcatcgacgcagcctatgaaagggccgatgggagatttgtcttcttcaaaggtgacaagtattgggtgtttaaggaggtgacggtggagcctgggtacccccacagcctgggggagctgggcagctgtttgccccgtgaaggcattgacacagctctgcgctgggaacctgtgggcaagacctactttttcaaaggcgagcggtactggcgctacagcgaggagcggcgggccacggaccctggctaccctaagcccatcaccgtgtggaagggcatcccacaggctccccaaggagccttcatcagcaaggaaggatattacacctatttctacaagggccgggactactggaagtttgacaaccagaaactgagcgtggagccaggctacccgcgcaacatcctgcgtgactggatgggctgcaaccagaaggaggtggagcggcggaaggagcggcggctgccccaggacgacgtggacatcatggtgaccatcaacgatgtgccgggctccgtgaacgccgtggccgtggtcatcccctgcatcctgtccctctgcatcctggtgctggtctacaccatcttccagttcaagaacaagacaggccctcagcctgtcacctactataagcggccagtccaggaatgggtgtgagcagcccagagccctctctatccacttggtctggccagccaggcccttcctcaccagggtctgaggggcagctctggccagtgctcaccagggccagcagggccctaggctggggtcgtacagctgaagtggtgggtgcattggcctaggctgagcgtggggcagggaattatgggggctgtgccccagggtgggtgtctggcacccagctgccagccttctgtcctgggcaaactactccctacttaagggaataggccaggctccatccggaggcagggaccatgccaggaggagcccctgtggtcacggcatcctgtggtgtccatgaggtaccacagctccactcctggctggaacccagcaccctctgtgggaagccagcactagctctcatcccccatccgggagataccaccagtcctggtccccttttgccaacacctgctggtcagatgtccccctacccccaccccactgtcctccaaggctacaggacccctgcttctgacacagtgagcaacaagcctgggtttccctgctggcagacggcagatccctcaggaaacctgctccacttgtcagggtctcttcggagacccaggatttagggtcacatgctgcaggcagggctgtggcccagctgggtctgacaaggacccagctgtcacatcgtgaatatttaaatgtcctgtcactactgtcccattttgcaaaggctgcttgaggctttaggtgaactagaggtgactgtcttggtgatgaggccagcatagcggccctcccccaggcgacaaggaccaaggtgctgctaaggccactctagcgcccagacaccccagtagctgagctctgctcctatggctacagagctggggcagaagctgaccccatttctggaggaagatccgagtttgtgaccgtcctccactcccctctattgtcactgtccccagctttgctccagtctgtcacttgcagcctggagctcagcctcaccagttaggtgaggcagagatggctgcagggccaacactggcagagcctgggagtccttcggaaggggaccagggcgtctgaagtgctcagtgcccccactactctgaggccgactccagctactctgaggccgactcaatctctcggctggaagcagtgttttcccagagcttggcccttgctgacctcgctcactgggcccatcttcccacactgctcttagaaggacacccctaccggtagcagccccaagctgagggggctccctttttgaccttcactggcccgcccttcactgtctccagcaggagttcctagggcttggcctgccttgctccacagtacggcggaggcagccctgcttgtcactgaggagccctagacaaggccaatgggttcatcaatgcccactggctctctgccaaagccaaaaaggtgtcaggcagtctccagcgtgctggccgggtctcggatgccacccctgctcactgagcctgcatgggccttgcccccgaccctgtggtctctgggattggggtcggcttaccctgtagcacagacagggactcctgctgccctgggagctgtctcaagcaaaatctcttgtcccagaggtgcccatgtgggtccgctgtgtcccctgtcatcatccttgttttttctcattttggccaagggcaggctccctgggacaggcagggaacaactgcggagatattagtgattcataggtttgtacagtgttttatactttgcaaagcactttattagctcacacctgtccactcacatgaaactcgtgttaggccctgggaggccgacggtaactctcaccgtgccctcagatgaagcacagagaggttgttacttgcccgggccatccagtgggctggctgggtcttgtgtccccatctgtggacccctctagggtctgagatgagatgagaagtgtctcctgtatccacctcttcctggcctcccttcccccacttcctggtccctgtccactcctcaggttggtgctctcacttcttgaaagctctaggcacccccgcctcccgccaggctccccattggctcctggcaggccagctgagaatgaacaggagatggaggcaggcagcccaggctgcagaggtgagggatgtggggccaggcccagagggctcagcctagaggcttccaatctcagattctcctgcctgtggtcatctgtttgtccatcaccccaggacagggcagacagaggggcaaagcactgggggccccagagcctagcttcccctcagcctgggggacatcacagcatttcagtgtcagtcacattttaaactgatcagcctttgtataatgttttttaaatcatttctaaataaaacagaaatacagagtgagtgtgtcatttccctgggatgagggaacaaagatcaggttccaagagtaaccttaggacgctctgggaagagaaccgggtcctttggggtgtctgggagctgcccacccatctcctctgccagaccggcggtcagatagcctccctctacaacaggctggccctgggggcccagggttattggggttccaggaacacagcctgatgatgcctccttacgatccaggatggagagcagcccccccaggagtatggggagggtcactgtggcacgggcttctccatgacctgggacatgaccaggaggcctgtcctgcctctggaagccagcgacagagagggatgcccccgacccagccagccggagaaagggatggggtggtcacgaaggtctgagctgggtctgggtgtaggctgggaagcaggctggggtgtagactgcgaaggcggccctgccgggacttctttccagtccccggcgacctcttcgaattctctgctatctctggggagcctcgggtgggagggggtgtaagagacgcagggacgtggggagaggagacaaggcaggcaagaaccacaggggacggcggacagacgggcgacatcctgcggaggacgccgtcagtaccaggaagtgcaggcgatgaggaagcgcacgtcgtccagcggcccccacgggctgggctcgggctggggctggggctggggctggggctggggctggggcggatgccggggctgttccgggccctccggcgccgcaggctggggctggggctggggctgggtttgcgcaggctccggggcgccgcggccgct

SEQ ID NO: 287606 - DNA, 5247 bp, Homo sapiens
gggatgccgaggagccggggcggccgcgccgcgccggggccgccgccgccgccgccgccgccgggccaggccccgcgctggagccgctggcgggtccctgggcggctgctgctgctgctgctgcccgcgctctgctgcctcccgggcgccgcgcgggcggcggcggcggcggcgggggcagggaaccgggcagcggtggcggtggcggtggcgcgggcggacgaggcggaggcgcccttcgccgggcagaactggttaaagtcctatggctatctgcttccctatgactcacgggcatctgcgctgcactcagcgaaggccttgcagtcggcagtctccactatgcagcagttttacgggatcccggtcaccggtgtgttggatcagacaacgatcgagtggatgaagaaaccccgatgtggtgtccctgatcacccccacttaagccgtaggcggagaaacaagcgctatgccctgactggacagaagtggaggcaaaaacacatcacctacagcattcacaactataccccaaaagtgggtgagctagacacgcggaaagctattcgccaggctttcgatgtgtggcagaaggtgaccccactgacctttgaagaggtgccataccatgagatcaaaagtgaccggaaggaggcagacatcatgatcttttttgcttctggtttccatggcgacagctccccatttgatggagaagggggattcctggcccatgcctacttccctggcccagggattggaggagacacccactttgactccgatgagccatggacgctaggaaatgccaaccatgacgggaacgacctcttcctggtggctgtgcatgagctgggccacgcgctgggactggagcactccagcgaccccagcgccatcatggcgcccttctaccagtacatggagacgcacaacttcaagctgccccaggacgatctccagggcatccagaagatctatggacccccagccgagcctctggagcccacaaggccactccctacactccccgtccgcaggatccactcaccatcggagaggaaacacgagcgccagcccaggccccctcggccgcccctcggggaccggccatccacaccaggcaccaaacccaacatctgtgacggcaacttcaacacagtggccctcttccggggcgagatgtttgtctttaaggatcgctggttctggcgtctgcgcaataaccgagtgcaggagggctaccccatgcagatcgagcagttctggaagggcctgcctgcccgcatcgacgcagcctatgaaagggccgatgggagatttgtcttcttcaaaggtgacaagtattgggtgtttaaggaggtgacggtggagcctgggtacccccacagcctgggggagctgggcagctgtttgccccgtgaaggcattgacacagctctgcgctgggaacctgtgggcaagacctactttttcaaaggcgagcggtactggcgctacagcgaggagcggcgggccacggaccctggctaccctaagcccatcaccgtgtggaagggcatcccacaggctccccaaggagccttcatcagcaaggaaggatattacacctatttctacaagggccgggactactggaagtttgacaaccagaaactgagcgtggagccaggctacccgcgcaacatcctgcgtgactggatgggctgcaaccagaaggaggtggagcggcggaaggagcggcggctgccccaggacgacgtggacatcatggtgaccatcaacgatgtgccgggctccgtgaacgccgtggccgtggtcatcccctgcatcctgtccctctgcatcctggtgctggtctacaccatcttccagttcaagaacaagacaggccctcagcctgtcacctactataagcggccagtccaggaatgggtgtgagcagcccagagccctctctatccacttggtctggccagccaggcccttcctcaccagggtctgaggggcagctctggccagtgctcaccagggccagcagggccctaggctggggtcgtacagctgaagtggtgggtgcattggcctaggctgagcgtggggcagggaattatgggggctgtgccccagggtgggtgtctggcacccagctgccagccttctgtcctgggcaaactactccctacttaagggaataggccaggctccatccggaggcagggaccatgccaggaggagcccctgtggtcacggcatcctgtggtgtccatgaggtaccacagctccactcctggctggaacccagcaccctctgtgggaagccagcactagctctcatcccccatccgggagataccaccagtcctggtccccttttgccaacacctgctggtcagatgtccccctacccccaccccactgtcctccaaggctacaggacccctgcttctgacacagtgagcaacaagcctgggtttccctgctggcagacggcagatccctcaggaaacctgctccacttgtcagggtctcttcggagacccaggatttagggtcacatgctgcaggcagggctgtggcccagctgggtctgacaaggacccagctgtcacatcgtgaatatttaaatgtcctgtcactactgtcccattttgcaaaggctgcttgaggctttaggtgaactagaggtgactgtcttggtgatgaggccagcatagcggccctcccccaggcgacaaggaccaaggtgctgctaaggccactctagcgcccagacaccccagtagctgagctctgctcctatggctacagagctggggcagaagctgaccccatttctggaggaagatccgagtttgtgaccgtcctccactcccctctattgtcactgtccccagctttgctccagtctgtcacttgcagcctggagctcagcctcaccagttaggtgaggcagagatggctgcagggccaacactggcagagcctgggagtccttcggaaggggaccagggcgtctgaagtgctcagtgcccccactactctgaggccgactccagctactctgaggccgactcaatctctcggctggaagcagtgttttcccagagcttggcccttgctgacctcgctcactgggcccatcttcccacactgctcttagaaggacacccctaccggtagcagccccaagctgagggggctccctttttgaccttcactggcccgcccttcactgtctccagcaggagttcctagggcttggcctgccttgctccacagtacggcggaggcagccctgcttgtcactgaggagccctagacaaggccaatgggttcatcaatgcccactggctctctgccaaagccaaaaaggtgtcaggcagtctccagcgtgctggccgggtctcggatgccacccctgctcactgagcctgcatgggccttgcccccgaccctgtggtctctgggattggggtcggcttaccctgtagcacagacagggactcctgctgccctgggagctgtctcaagcaaaatctcttgtcccagaggtgcccatgtgggtccgctgtgtcccctgtcatcatccttgttttttctcattttggccaagggcaggctccctgggacaggcagggaacaactgcggagatattagtgattcataggtttgtacagtgttttatactttgcaaagcactttattagctcacacctgtccactcacatgaaactcgtgttaggccctgggaggccgacggtaactctcaccgtgccctcagatgaagcacagagaggttgttacttgcccgggccatccagtgggctggctgggtcttgtgtccccatctgtggacccctctagggtctgagatgagatgagaagtgtctcctgtatccacctcttcctggcctcccttcccccacttcctggtccctgtccactcctcaggttggtgctctcacttcttgaaagctctaggcacccccgcctcccgccaggctccccattggctcctggcaggccagctgagaatgaacaggagatggaggcaggcagcccaggctgcagaggtgagggatgtggggccaggcccagagggctcagcctagaggcttccaatctcagattctcctgcctgtggtcatctgtttgtccatcaccccaggacagggcagacagaggggcaaagcactgggggccccagagcctagcttcccctcagcctgggggacatcacagcatttcagtgtcagtcacattttaaactgatcagcctttgtataatgttttttaaatcatttctaaataaaacagaaatacagagtgagtgtgtcatttccctgggatgagggaacaaagatcaggttccaagagtaaccttaggacgctctgggaagagaaccgggtcctttggggtgtctgggagctgcccacccatctcctctgccagaccggcggtcagatagcctccctctacaacaggctggccctgggggcccagggttattggggttccaggaacacagcctgatgatgcctccttacgatccaggatggagagcagcccccccaggagtatggggagggtcactgtggcacgggcttctccatgacctgggacatgacctgggacacatagtcaagagcacggttatcagcaatacagatattaataaaaggcagacgaagtcaggaggtcagcaactttgcgggcttaccaggaggcctgtcctgcctctggaagccagcgacagagagggatgcccccgacccagccagccggagaaagggatggggtggtcacgaaggtctgagctgggtctgggtgtaggctgggaagcaggctggggtgtagactgcgaaggcggccctgccgggacttctttccagtccccggcgacctcttcgaattctctgctatctctggggagcctcgggtgggagggggtgtaagagacgcagggacgtggggagaggagacaaggcaggcaagaaccacaggggacggcggacagacgggcgacatcctgcggaggacgccgtcagtaccaggaagtgcaggcgatgaggaagcgcacgtcgtccagcggcccccacgggctgggctcgggctggggctggggctggggctggggctggggctggggcggatgccggggctgttccgggccctccggcgccgcaggctggggctggggctggggctgggtttgcgcaggctccggggcgccgcggccgct

SEQ ID NO: 287607 - DNA, 4330 bp, Homo sapiens
gggatgccgaggagccggggcggccgcgccgcgccggggccgccgccgccgccgccgccgccgggccaggccccgcgctggagccgctggcgggtccctgggcggctgctgctgctgctgctgcccgcgctctgctgcctcccgggcgccgcgcgggcggcggcggcggcggcgggggcagggaaccgggcagcggtggcggtggcggtggcgcgggcggacgaggcggaggcgcccttcgccgggcagaactggttaaagtcctatggctatctgcttccctatgactcacgggcatctgcgctgcactcagcgaaggccttgcagtcggcagtctccactatgcagcagttttacgggatcccggtcaccggtgtgttggatcagacaacgatcgagtggatgaagaaaccccgatgtggtgtccctgatcacccccacttaagccgtaggcggagaaacaagcgctatgccctgactggacagaagtggaggcaaaaacacatcacctacagcattcacaactataccccaaaagtgggtgagctagacacgcggaaagctattcgccaggctttcgatgtgtggcagaaggtgaccccactgacctttgaagaggtgccataccatgagatcaaaagtgaccggaaggaggcagacatcatgatcttttttgcttctggtttccatggcgacagctccccatttgatggagaagggggattcctggcccatgcctacttccctggcccagggattggaggagacacccactttgactccgatgagccatggacgctaggaaatgccaaccatgacgggaacgacctcttcctggtggctgtgcatgagctgggccacgcgctgggactggagcactccagcgaccccagcgccatcatggcgcccttctaccagtacatggagacgcacaacttcaagctgccccaggacgatctccagggcatccagaagatctatggacccccagccgagcctctggagcccacaaggccactccctacactccccgtccgcaggatccactcaccatcggagaggaaacacgagcgccagcccaggccccctcggccgcccctcggggaccggccatccacaccaggcaccaaacccaacatctgtgacggcaacttcaacacagtggccctcttccggggcgagatgtttgtctttaaggatcgctggttctggcgtctgcgcaataaccgagtgcaggagggctaccccatgcagatcgagcagttctggaagggcctgcctgcccgcatcgacgcagcctatgaaagggccgatgggagatttgtcttcttcaaaggtgacaagtattgggtgtttaaggaggtgacggtggagcctgggtacccccacagcctgggggagctgggcagctgtttgccccgtgaaggcattgacacagctctgcgctgggaacctgtgggcaagacctactttttcaaaggcgagcggtactggcgctacagcgaggagcggcgggccacggaccctggctaccctaagcccatcaccgtgtggaagggcatcccacaggctccccaaggagccttcatcagcaaggaaggatattacacctatttctacaagggccgggactactggaagtttgacaaccagaaactgagcgtggagccaggctacccgcgcaacatcctgcgtgactggatgggctgcaaccagaaggaggtggagcggcggaaggagcggcggctgccccaggacgacgtggacatcatggtgaccatcaacgatgtgccgggctccgtgaacgccgtggccgtggtcatcccctgcatcctgtccctctgcatcctggtgctggtctacaccatcttccagttcaagaacaagacaggccctcagcctgtcacctactataagcggccagtccaggaatgggtgtgagcagcccagagccctctctatccacttggtctggccagccaggcccttcctcaccagggtctgaggggcagctctggccagtgctcaccagggccagcagggccctaggctggggtcgtacagctgaagtggtgggtgcattggcctaggctgagcgtggggcagggaattatgggggctgtgccccagggtgggtgtctggcacccagctgccagccttctgtcctgggcaaactactccctacttaagggaataggccaggctccatccggaggcagggaccatgccaggaggagcccctgtggtcacggcatcctgtggtgtccatgaggtaccacagctccactcctggctggaacccagcaccctctgtgggaagccagcactagctctcatcccccatccgggagataccaccagtcctggtccccttttgccaacacctgctggtcagatgtccccctacccccaccccactgtcctccaaggctacaggacccctgcttctgacacagtgagcaacaagcctgggtttccctgctggcagacggcagatccctcaggaaacctgctccacttgtcagggtctcttcggagacccaggatttagggtcacatgctgcaggcagggctgtggcccagctgggtctgacaaggacccagctgtcacatcgtgaatatttaaatgtcctgtcactactgtcccattttgcaaaggctgcttgaggctttaggtgaactagaggtgactgtcttggtgatgaggccagcatagcggccctcccccaggcgacaaggaccaaggtgctgctaaggccactctagcgcccagacaccccagtagctgagctctgctcctatggctacagagctggggcagaagctgaccccatttctggaggaagatccgagtttgtgaccgtcctccactcccctctattgtcactgtccccagctttgctccagtctgtcacttgcagcctggagctcagcctcaccagttaggtgaggcagagatggctgcagggccaacactggcagagcctgggagtccttcggaaggggaccagggcgtctgaagtgctcagtgcccccactactctgaggccgactccagctactctgaggccgactcaatctctcggctggaagcagtgttttcccagagcttggcccttgctgacctcgctcactgggcccatcttcccacactgctcttagaaggacacccctaccggtagcagccccaagctgagggggctccctttttgaccttcactggcccgcccttcactgtctccagcaggagttcctagggcttggcctgccttgctccacagtacggcggaggcagccctgcttgtcactgaggagccctagacaaggccaatgggttcatcaatgcccactggctctctgccaaagccaaaaaggtgtcaggcagtctccagcgtgctggccgggtctcggatgccacccctgctcactgagcctgcatgggccttgcccccgaccctgtggtctctgggattggggtcggcttaccctgtagcacagacagggactcctgctgccctgggagctgtctcaagcaaaatctcttgtcccagaggtgcccatgtgggtccgctgtgtcccctgtcatcatccttgttttttctcattttggccaagggcaggctccctgggacaggcagggaacaactgcggagatattagtgattcataggtttgtacagtgttttatactttgcaaagcactttattagctcacacctgtccactcacatgaaactcgtgttaggccctgggaggccgacggtaactctcaccgtgccctcagatgaagcacagagaggttgttacttgcccgggccatccagtgggctggctgggtcttgtgtccccatctgtggacccctctagggtctgagatgagatgagaagtgtctcctgtatccacctcttcctggcctcccttcccccacttcctggtccctgtccactcctcaggttggtgctctcacttcttgaaagctctaggcacccccgcctcccgccaggctccccattggctcctggcaggccagctgagaatgaacaggagatggaggcaggcagcccaggctgcagaggtgagggatgtggggccaggcccagagggctcagcctagaggcttccaatctcagattctcctgcctgtggtcatctgtttgtccatcaccccaggacagggcagacagaggggcaaagcactgggggccccagagcctagcttcccctcagcctgggggacatcacagcatttcagtgtcagtcacattttaaactgatcagcctttgtataatgttttttaaatcatttctaaataaaacagaaatacaga

SEQ ID NO: 287608 - DNA, 5190 bp, Homo sapiens
gggatgccgaggagccggggcggccgcgccgcgccggggccgccgccgccgccgccgccgccgggccaggccccgcgctggagccgctggcgggtccctgggcggctgctgctgctgctgctgcccgcgctctgctgcctcccgggcgccgcgcgggcggcggcggcggcggcgggggcagggaaccgggcagcggtggcggtggcggtggcgcgggcggacgaggcggaggcgcccttcgccgggcagaactggttaaagtcctatggctatctgcttccctatgactcacgggcatctgcgctgcactcagcgaaggccttgcagtcggcagtctccactatgcagcagttttacgggatcccggtcaccggtgtgttggatcagacaacgatcgagtggatgaagaaaccccgatgtggtgtccctgatcacccccacttaagccgtaggcggagaaacaagcgctatgccctgactggacagaagtggaggcaaaaacacatcacctacagcattcacaactataccccaaaagtgggtgagctagacacgcggaaagctattcgccaggctttcgatgtgtggcagaaggtgaccccactgacctttgaagaggtgccataccatgagatcaaaagtgaccggaaggaggcagacatcatgatcttttttgcttctggtttccatggcgacagctccccatttgatggagaagggggattcctggcccatgcctacttccctggcccagggattggaggagacacccactttgactccgatgagccatggacgctaggaaatgccaaccatgacgggaacgacctcttcctggtggctgtgcatgagctgggccacgcgctgggactggagcactccagcgaccccagcgccatcatggcgcccttctaccagtacatggagacgcacaacttcaagctgccccaggacgatctccagggcatccagaagatctatggacccccagccgagcctctggagcccacaaggccactccctacactccccgtccgcaggatccactcaccatcggagaggaaacacgagcgccagcccaggccccctcggccgcccctcggggaccggccatccacaccaggcaccaaacccaacatctgtgacggcaacttcaacacagtggccctcttccggggcgagatgtttgtctttaaggatcgctggttctggcgtctgcgcaataaccgagtgcaggagggctaccccatgcagatcgagcagttctggaagggcctgcctgcccgcatcgacgcagcctatgaaagggccgatgggagatttgtcttcttcaaaggtgacaagtattgggtgtttaaggaggtgacggtggagcctgggtacccccacagcctgggggagctgggcagctgtttgccccgtgaaggcattgacacagctctgcgctgggaacctgtgggcaagacctactttttcaaaggcgagcggtactggcgctacagcgaggagcggcgggccacggaccctggctaccctaagcccatcaccgtgtggaagggcatcccacaggctccccaaggagccttcatcagcaaggaaggatattacacctatttctacaagggccgggactactggaagtttgacaaccagaaactgagcgtggagccaggctacccgcgcaacatcctgcgtgactggatgggctgcaaccagaaggaggtggagcggcggaaggagcggcggctgccccaggacgacgtggacatcatggtgaccatcaacgatgtgccgggctccgtgaacgccgtggccgtggtcatcccctgcatcctgtccctctgcatcctggtgctggtctacaccatcttccagttcaagaacaagacaggccctcagcctgtcacctactataagcggccagtccaggaatgggtgtgagcagcccagagccctctctatccacttggtctggccagccaggcccttcctcaccagggtctgaggggcagctctggccagtgctcaccagggccagcagggccctaggctggggtcgtacagctgaagtggtgggtgcattggcctaggctgagcgtggggcagggaattatgggggctgtgccccagggtgggtgtctggcacccagctgccagccttctgtcctgggcaaactactccctacttaagggaataggccaggctccatccggaggcagggaccatgccaggaggagcccctgtggtcacggcatcctgtggtgtccatgaggtaccacagctccactcctggctggaacccagcaccctctgtgggaagccagcactagctctcatcccccatccgggagataccaccagtcctggtccccttttgccaacacctgctggtcagatgtccccctacccccaccccactgtcctccaaggctacaggacccctgcttctgacacagtgagcaacaagcctgggtttccctgctggcagacggcagatccctcaggaaacctgctccacttgtcagggtctcttcggagacccaggatttagggtcacatgctgcaggcagggctgtggcccagctgggtctgacaaggacccagctgtcacatcgtgaatatttaaatgtcctgtcactactgtcccattttgcaaaggctgcttgaggctttaggtgaactagaggtgactgtcttggtgatgaggccagcatagcggccctcccccaggcgacaaggaccaaggtgctgctaaggccactctagcgcccagacaccccagtagctgagctctgctcctatggctacagagctggggcagaagctgaccccatttctggaggaagatccgagtttgtgaccgtcctccactcccctctattgtcactgtccccagctttgctccagtctgtcacttgcagcctggagctcagcctcaccagttaggtgaggcagagatggctgcagggccaacactggcagagcctgggagtccttcggaaggggaccagggcgtctgaagtgctcagtgcccccactactctgaggccgactccagctactctgaggccgactcaatctctcggctggaagcagtgttttcccagagcttggcccttgctgacctcgctcactgggcccatcttcccacactgctcttagaaggacacccctaccggtagcagccccaagctgagggggctccctttttgaccttcactggcccgcccttcactgtctccagcaggagttcctagggcttggcctgccttgctccacagtacggcggaggcagccctgcttgtcactgaggagccctagacaaggccaatgggttcatcaatgcccactggctctctgccaaagccaaaaaggtgtcaggcagtctccagcgtgctggccgggtctcggatgccacccctgctcactgagcctgcatgggccttgcccccgaccctgtggtctctgggattggggtcggcttaccctgtagcacagacagggactcctgctgccctgggagctgtctcaagcaaaatctcttgtcccagaggtgcccatgtgggtccgctgtgtcccctgtcatcatccttgttttttctcattttggccaagggcaggctccctgggacaggcagggaacaactgcggagatattagtgattcataggtttgtacagtgttttatactttgcaaagcactttattagctcacacctgtccactcacatgaaactcgtgttaggccctgggaggccgacggtaactctcaccgtgccctcagatgaagcacagagaggttgttacttgcccgggccatccagtgggctggctgggtcttgtgtccccatctgtggacccctctagggtctgagatgagatgagaagtgtctcctgtatccacctcttcctggcctcccttcccccacttcctggtccctgtccactcctcaggttggtgctctcacttcttgaaagctctaggcacccccgcctcccgccaggctccccattggctcctggcaggccagctgagaatgaacaggagatggaggcaggcagcccaggctgcagaggtgagggatgtggggccaggcccagagggctcagcctagaggcttccaatctcagattctcctgcctgtggtcatctgtttgtccatcaccccaggacagggcagacagaggggcaaagcactgggggccccagagcctagcttcccctcagcctgggggacatcacagcatttcagtgtcagtcacattttaaactgatcagcctttgtataatgttttttaaatcatttctaaataaaacagaaatacagagtgagtgtgtcatttccctgggatgagggaacaaagatcaggttccaagagtaaccttaggacgctctgggaagagaaccgggtcctttggggtgtctgggagctgcccacccatctcctctgccagaccggcggtcagatagcctccctctacaacaggctggccctgggggcccagggttattggggttccaggaacacagcctgatgatgcctccttacgatccaggatggagagcagcccccccaggagtatggggagggtcactgtggcacgggcttctccatgacctgggacatgacctgggacacatagtcaagagcacggttatcagcaatacagatattaataaaaggcagacgaagtcaggaggtcagcaactttgcgggcttaccaggaggcctgtcctgcctctggaagccagcgacagagagggatgcccccgacccagccagccggagaaagggatggggtggtcacgaaggtctgagctgggtctgggtgtaggctgggaagcaggctggggtgtagactgcgaaggcggccctgccgggacttctttccagtccccggcgacctcttcgaattctctgctatctctggggagcctcgggtgggagggggtgtaagagacgcagggacgtggggagaggagacaaggcaggcaagaaccacaggggacggcggacagacgggcgacatcctgcggaggacgccgtcagtaccaggaagtgcaggcgatgaggaagcgcacgtcgtccagcggcccccacgggctgggctcgggctggggctggggctggggctggggctggggctggggctgggtttgcgcaggctccggggcgccgcggccgct

SEQ ID NO: 287609 - DNA, 4456 bp, Homo sapiens
gggatgccgaggagccggggcggccgcgccgcgccggggccgccgccgccgccgccgccgccgggccaggccccgcgctggagccgctggcgggtccctgggcggctgctgctgctgctgctgcccgcgctctgctgcctcccgggcgccgcgcgggcggcggcggcggcggcgggggcagggaaccgggcagcggtggcggtggcggtggcgcgggcggacgaggcggaggcgcccttcgccgggcagaactggttaaagtcctatggctatctgcttccctatgactcacgggcatctgcgctgcactcagcgaaggccttgcagtcggcagtctccactatgcagcagttttacgggatcccggtcaccggtgtgttggatcagacaacgatcgagtggatgaagaaaccccgatgtggtgtccctgatcacccccacttaagccgtaggcggagaaacaagcgctatgccctgactggacagaagtggaggcaaaaacacatcacctacagcattcacaactataccccaaaagtgggtgagctagacacgcggaaagctattcgccaggctttcgatgtgtggcagaaggtgaccccactgacctttgaagaggtgccataccatgagatcaaaagtgaccggaaggaggcagacatcatgatcttttttgcttctggtttccatggcgacagctccccatttgatggagaagggggattcctggcccatgcctacttccctggcccagggattggaggagacacccactttgactccgatgagccatggacgctaggaaatgccaaccatgacgggaacgacctcttcctggtggctgtgcatgagctgggccacgcgctgggactggagcactccagcgaccccagcgccatcatggcgcccttctaccagtacatggagacgcacaacttcaagctgccccaggacgatctccagggcatccagaagatctatggacccccagccgagcctctggagcccacaaggccactccctacactccccgtccgcaggatccactcaccatcggagaggaaacacgagcgccagcccaggccccctcggccgcccctcggggaccggccatccacaccaggcaccaaacccaacatctgtgacggcaacttcaacacagtggccctcttccggggcgagatgtttgtctttaaggatcgctggttctggcgtctgcgcaataaccgagtgcaggagggctaccccatgcagatcgagcagttctggaagggcctgcctgcccgcatcgacgcagcctatgaaagggccgatgggagatttgtcttcttcaaaggtgacaagtattgggtgtttaaggaggtgacggtggagcctgggtacccccacagcctgggggagctgggcagctgtttgccccgtgaaggcattgacacagctctgcgctgggaacctgtgggcaagacctactttttcaaaggcgagcggtactggcgctacagcgaggagcggcgggccacggaccctggctaccctaagcccatcaccgtgtggaagggcatcccacaggctccccaaggagccttcatcagcaaggaaggatattacacctatttctacaagggccgggactactggaagtttgacaaccagaaactgagcgtggagccaggctacccgcgcaacatcctgcgtgactggatgggctgcaaccagaaggaggtggagcggcggaaggagcggcggctgccccaggacgacgtggacatcatggtgaccatcaacgatgtgccgggctccgtgaacgccgtggccgtggtcatcccctgcatcctgtccctctgcatcctggtgctggtctacaccatcttccagttcaagaacaagacaggccctcagcctgtcacctactataagcggccagtccaggaatgggtgtgagcagcccagagccctctctatccacttggtctggccagccaggcccttcctcaccagggtctgaggggcagctctggccagtgctcaccagggccagcagggccctaggctggggtcgtacagctgaagtggtgggtgcattggcctaggctgagcgtggggcagggaattatgggggctgtgccccagggtgggtgtctggcacccagctgccagccttctgtcctgggcaaactactccctacttaagggaataggccaggctccatccggaggcagggaccatgccaggaggagcccctgtggtcacggcatcctgtggtgtccatgaggtaccacagctccactcctggctggaacccagcaccctctgtgggaagccagcactagctctcatcccccatccgggagataccaccagtcctggtccccttttgccaacacctgctggtcagatgtccccctacccccaccccactgtcctccaaggctacaggacccctgcttctgacacagtgagcaacaagcctgggtttccctgctggcagacggcagatccctcaggaaacctgctccacttgtcagggtctcttcggagacccaggatttagggtcacatgctgcaggcagggctgtggcccagctgggtctgacaaggacccagctgtcacatcgtgaatatttaaatgtcctgtcactactgtcccattttgcaaaggctgcttgaggctttaggtgaactagaggtgactgtcttggtgatgaggccagcatagcggccctcccccaggcgacaaggaccaaggtgctgctaaggccactctagcgcccagacaccccagtagctgagctctgctcctatggctacagagctggggcagaagctgaccccatttctggaggaagatccgagtttgtgaccgtcctccactcccctctattgtcactgtccccagctttgctccagtctgtcacttgcagcctggagctcagcctcaccagttaggtgaggcagagatggctgcagggccaacactggcagagcctgggagtccttcggaaggggaccagggcgtctgaagtgctcagtgcccccactactctgaggccgactccagctactctgaggccgactcaatctctcggctggaagcagtgttttcccagagcttggcccttgctgacctcgctcactgggcccatcttcccacactgctcttagaaggacacccctaccggtagcagccccaagctgagggggctccctttttgaccttcactggcccgcccttcactgtctccagcaggagttcctagggcttggcctgccttgctccacagtacggcggaggcagccctgcttgtcactgaggagccctagacaaggccaatgggttcatcaatgcccactggctctctgccaaagccaaaaaggtgtcaggcagtctccagcgtgctggccgggtctcggatgccacccctgctcactgagcctgcatgggccttgcccccgaccctgtggtctctgggattggggtcggcttaccctgtagcacagacagggactcctgctgccctgggagctgtctcaagcaaaatctcttgtcccagaggtgcccatgtgggtccgctgtgtcccctgtcatcatccttgttttttctcattttggccaagggcaggctccctgggacaggcagggaacaactgcggagatattagtgattcataggtttgtacagtgttttatactttgcaaagcactttattagctcacacctgtccactcacatgaaactcgtgttaggccctgggaggccgacggtaactctcaccgtgccctcagatgaagcacagagaggttgttacttgcccgggccatccagtgggctggctgggtcttgtgtccccatctgtggacccctctagggtctgagatgagatgagaagtgtctcctgtatccacctcttcctggcctcccttcccccacttcctggtccctgtccactcctcaggttggtgctctcacttcttgaaagctctaggcacccccgcctcccgccaggctccccattggctcctggcaggccagctgagaatgaacaggagatggaggcaggctggggtgtagactgcgaaggcggccctgccgggacttctttccagtccccggcgacctcttcgaattctctgctatctctggggagcctcgggtgggagggggtgtaagagacgcagggacgtggggagaggagacaaggcaggcaagaaccacaggggacggcggacagacgggcgacatcctgcggaggacgccgtcagtaccaggaagtgcaggcgatgaggaagcgcacgtcgtccagcggcccccacgggctgggctcgggctggggctggggctggggctggggctggggctggggcggatgccggggctgttccgggccctccggcgccgcaggctggggctggggctggggctgggtttgcgcaggctccggggcgccgcggccgct

SEQ ID NO: 287610 - DNA, 4865 bp, Homo sapiens
gggatgccgaggagccggggcggccgcgccgcgccggggccgccgccgccgccgccgccgccgggccaggccccgcgctggagccgctggcgggtccctgggcggctgctgctgctgctgctgcccgcgctctgctgcctcccgggcgccgcgcgggcggcggcggcggcggcgggggcagggaaccgggcagcggtggcggtggcggtggcgcgggcggacgaggcggaggcgcccttcgccgggcagaactggttaaagtcctatggctatctgcttccctatgactcacgggcatctgcgctgcactcagcgaaggccttgcagtcggcagtctccactatgcagcagttttacgggatcccggtcaccggtgtgttggatcagacaacgatcgagtggatgaagaaaccccgatgtggtgtccctgatcacccccacttaagccgtaggcggagaaacaagcgctatgccctgactggacagaagtggaggcaaaaacacatcacctacagcattcacaactataccccaaaagtgggtgagctagacacgcggaaagctattcgccaggctttcgatgtgtggcagaaggtgaccccactgacctttgaagaggtgccataccatgagatcaaaagtgaccggaaggaggcagacatcatgatcttttttgcttctggtttccatggcgacagctccccatttgatggagaagggggattcctggcccatgcctacttccctggcccagggattggaggagacacccactttgactccgatgagccatggacgctaggaaatgccaaccatgacgggaacgacctcttcctggtggctgtgcatgagctgggccacgcgctgggactggagcactccagcgaccccagcgccatcatggcgcccttctaccagtacatggagacgcacaacttcaagctgccccaggacgatctccagggcatccagaagatctatggacccccagccgagcctctggagcccacaaggccactccctacactccccgtccgcaggatccactcaccatcggagaggaaacacgagcgccagcccaggccccctcggccgcccctcggggaccggccatccacaccaggcaccaaacccaacatctgtgacggcaacttcaacacagtggccctcttccggggcgagatgtttgtctttaaggatcgctggttctggcgtctgcgcaataaccgagtgcaggagggctaccccatgcagatcgagcagttctggaagggcctgcctgcccgcatcgacgcagcctatgaaagggccgatgggagatttgtcttcttcaaaggtgacaagtattgggtgtttaaggaggtgacggtggagcctgggtacccccacagcctgggggagctgggcagctgtttgccccgtgaaggcattgacacagctctgcgctgggaacctgtgggcaagacctactttttcaaaggcgagcggtactggcgctacagcgaggagcggcgggccacggaccctggctaccctaagcccatcaccgtgtggaagggcatcccacaggctccccaaggagccttcatcagcaaggaaggatattacacctatttctacaagggccgggactactggaagtttgacaaccagaaactgagcgtggagccaggctacccgcgcaacatcctgcgtgactggatgggctgcaaccagaaggaggtggagcggcggaaggagcggcggctgccccaggacgacgtggacatcatggtgaccatcaacgatgtgccgggctccgtgaacgccgtggccgtggtcatcccctgcatcctgtccctctgcatcctggtgctggtctacaccatcttccagttcaagaacaagacaggccctcagcctgtcacctactataagcggccagtccaggaatgggtgtgagcagcccagagccctctctatccacttggtctggccagccaggcccttcctcaccagggtctgaggggcagctctggccagtgctcaccagggccagcagggccctaggctggggtcgtacagctgaagtggtgggtgcattggcctaggctgagcgtggggcagggaattatgggggctgtgccccagggtgggtgtctggcacccagctgccagccttctgtcctgggcaaactactccctacttaagggaataggccaggctccatccggaggcagggaccatgccaggaggagcccctgtggtcacggcatcctgtggtgtccatgaggtaccacagctccactcctggctggaacccagcaccctctgtgggaagccagcactagctctcatcccccatccgggagataccaccagtcctggtccccttttgccaacacctgctggtcagatgtccccctacccccaccccactgtcctccaaggctacaggacccctgcttctgacacagtgagcaacaagcctgggtttccctgctggcagacggcagatccctcaggaaacctgctccacttgtcagggtctcttcggagacccaggatttagggtcacatgctgcaggcagggctgtggcccagctgggtctgacaaggacccagctgtcacatcgtgaatatttaaatgtcctgtcactactgtcccattttgcaaaggctgcttgaggctttaggtgaactagaggtgactgtcttggtgatgaggccagcatagcggccctcccccaggcgacaaggaccaaggtgctgctaaggccactctagcgcccagacaccccagtagctgagctctgctcctatggctacagagctggggcagaagctgaccccatttctggaggaagatccgagtttgtgaccgtcctccactcccctctattgtcactgtccccagctttgctccagtctgtcacttgcagcctggagctcagcctcaccagttaggtgaggcagagatggctgcagggccaacactggcagagcctgggagtccttcggaaggggaccagggcgtctgaagtgctcagtgcccccactactctgaggccgactccagctactctgaggccgactcaatctctcggctggaagcagtgttttcccagagcttggcccttgctgacctcgctcactgggcccatcttcccacactgctcttagaaggacacccctaccggtagcagccccaagctgagggggctccctttttgaccttcactggcccgcccttcactgtctccagcaggagttcctagggcttggcctgccttgctccacagtacggcggaggcagccctgcttgtcactgaggagccctagacaaggccaatgggttcatcaatgcccactggctctctgccaaagccaaaaaggtgtcaggcagtctccagcgtgctggccgggtctcggatgccacccctgctcactgagcctgcatgggccttgcccccgaccctgtggtctctgggattggggtcggcttaccctgtagcacagacagggactcctgctgccctgggagctgtctcaagcaaaatctcttgtcccagaggtgcccatgtgggtccgctgtgtcccctgtcatcatccttgttttttctcattttggccaagggcaggctccctgggacaggcagggaacaactgcggagatattagtgattcataggtttgtacagtgttttatactttgcaaagcactttattagctcacacctgtccactcacatgaaactcgtgttaggccctgggaggccgacggtaactctcaccgtgccctcagatgaagcacagagaggttgttacttgcccgggccatccagtgggctggctgggtcttgtgtccccatctgtggacccctctagggtctgagatgagatgagaagtgtctcctgtatccacctcttcctggcctcccttcccccacttcctggtccctgtccactcctcaggttggtgctctcacttcttgaaagctctaggcacccccgcctcccgccaggctccccattggctcctggcaggccagctgagaatgaacaggagatggaggcaggcagcccaggctgcagaggtgagggatgtggggccaggcccagagggctcagcctagaggcttccaatctcagattctcctgcctgtggtcatctgtttgtccatcaccccaggacagggcagacagaggggcaaagcactgggggccccagagcctagcttcccctcagcctgggggacatcacagcatttcagtgtcagtcacattttaaactgatcagcctttgtataatgttttttaaatcatttctaaataaaacagaaatacagagtgagtgtgtcatttccctgggatgagggaacaaagatcaggttccaagagtaaccttaggacgctctgggaagagaaccgggtcctttggggtgtctgggagctgcccacccatctcctctgccagaccggcggtcagatagcctccctctacaacaggctggccctgggggcccagggttattggggttccaggaacacagcctgatgatgcctccttacgatccaggatggagagcagcccccccaggagtatggggagggtcactgtggcacgggcttctccatgacctgggacatgacctgggacacatagtcaagagcacggttatcagcaatacagatattaataaaaggcagacgaagtcaggaggtcagcaactttgcgggcttaccaggaggcctgtcctgcctctggaagccagcgacagagagggatgcccccgacccagccagccggagaaagggatggggtggtcacggcgccagctcctcccgacgccgagaccatgggggctcagctaagcggcggccg

SEQ ID NO: 287611 - DNA, 4300 bp, Homo sapiens
gggatgccgaggagccggggcggccgcgccgcgccggggccgccgccgccgccgccgccgccgggccaggccccgcgctggagccgctggcgggtccctgggcggctgctgctgctgctgctgcccgcgctctgctgcctcccgggcgccgcgcgggcggcggcggcggcggcgggggcagggaaccgggcagcggtggcggtggcggtggcgcgggcggacgaggcggaggcgcccttcgccgggcagaactggttaaagtcctatggctatctgcttccctatgactcacgggcatctgcgctgcactcagcgaaggccttgcagtcggcagtctccactatgcagcagttttacgggatcccggtcaccggtgtgttggatcagacaacgatcgagtggatgaagaaaccccgatgtggtgtccctgatcacccccacttaagccgtaggcggagaaacaagcgctatgccctgactggacagaagtggaggcaaaaacacatcacctacagcattcacaactataccccaaaagtgggtgagctagacacgcggaaagctattcgccaggctttcgatgtgtggcagaaggtgaccccactgacctttgaagaggtgccataccatgagatcaaaagtgaccggaaggaggcagacatcatgatcttttttgcttctggtttccatggcgacagctccccatttgatggagaagggggattcctggcccatgcctacttccctggcccagggattggaggagacacccactttgactccgatgagccatggacgctaggaaatgccaaccatgacgggaacgacctcttcctggtggctgtgcatgagctgggccacgcgctgggactggagcactccagcgaccccagcgccatcatggcgcccttctaccagtacatggagacgcacaacttcaagctgccccaggacgatctccagggcatccagaagatctatggacccccagccgagcctctggagcccacaaggccactccctacactccccgtccgcaggatccactcaccatcggagaggaaacacgagcgccagcccaggccccctcggccgcccctcggggaccggccatccacaccaggcaccaaacccaacatctgtgacggcaacttcaacacagtggccctcttccggggcgagatgtttgtctttaaggatcgctggttctggcgtctgcgcaataaccgagtgcaggagggctaccccatgcagatcgagcagttctggaagggcctgcctgcccgcatcgacgcagcctatgaaagggccgatgggagatttgtcttcttcaaaggtgacaagtattgggtgtttaaggaggtgacggtggagcctgggtacccccacagcctgggggagctgggcagctgtttgccccgtgaaggcattgacacagctctgcgctgggaacctgtgggcaagacctactttttcaaaggcgagcggtactggcgctacagcgaggagcggcgggccacggaccctggctaccctaagcccatcaccgtgtggaagggcatcccacaggctccccaaggagccttcatcagcaaggaaggatattacacctatttctacaagggccgggactactggaagtttgacaaccagaaactgagcgtggagccaggctacccgcgcaacatcctgcgtgactggatgggctgcaaccagaaggaggtggagcggcggaaggagcggcggctgccccaggacgacgtggacatcatggtgaccatcaacgatgtgccgggctccgtgaacgccgtggccgtggtcatcccctgcatcctgtccctctgcatcctggtgctggtctacaccatcttccagttcaagaacaagacaggccctcagcctgtcacctactataagcggccagtccaggaatgggtgtgagcagcccagagccctctctatccacttggtctggccagccaggcccttcctcaccagggtctgaggggcagctctggccagtgctcaccagggccagcagggccctaggctggggtcgtacagctgaagtggtgggtgcattggcctaggctgagcgtggggcagggaattatgggggctgtgccccagggtgggtgtctggcacccagctgccagccttctgtcctgggcaaactactccctacttaagggaataggccaggctccatccggaggcagggaccatgccaggaggagcccctgtggtcacggcatcctgtggtgtccatgaggtaccacagctccactcctggctggaacccagcaccctctgtgggaagccagcactagctctcatcccccatccgggagataccaccagtcctggtccccttttgccaacacctgctggtcagatgtccccctacccccaccccactgtcctccaaggctacaggacccctgcttctgacacagtgagcaacaagcctgggtttccctgctggcagacggcagatccctcaggaaacctgctccacttgtcagggtctcttcggagacccaggatttagggtcacatgctgcaggcagggctgtggcccagctgggtctgacaaggacccagctgtcacatcgtgaatatttaaatgtcctgtcactactgtcccattttgcaaaggctgcttgaggctttaggtgaactagaggtgactgtcttggtgatgaggccagcatagcggccctcccccaggcgacaaggaccaaggtgctgctaaggccactctagcgcccagacaccccagtagctgagctctgctcctatggctacagagctggggcagaagctgaccccatttctggaggaagatccgagtttgtgaccgtcctccactcccctctattgtcactgtccccagctttgctccagtctgtcacttgcagcctggagctcagcctcaccagttaggtgaggcagagatggctgcagggccaacactggcagagcctgggagtccttcggaaggggaccagggcgtctgaagtgctcagtgcccccactactctgaggccgactccagctactctgaggccgactcaatctctcggctggaagcagtgttttcccagagcttggcccttgctgacctcgctcactgggcccatcttcccacactgctcttagaaggacacccctaccggtagcagccccaagctgagggggctccctttttgaccttcactggcccgcccttcactgtctccagcaggagttcctagggcttggcctgccttgctccacagtacggcggaggcagccctgcttgtcactgaggagccctagacaaggccaatgggttcatcaatgcccactggctctctgccaaagccaaaaaggtgtcaggcagtctccagcgtgctggccgggtctcggatgccacccctgctcactgagcctgcatgggccttgcccccgaccctgtggtctctgggattggggtcggcttaccctgtagcacagacagggactcctgctgccctgggagctgtctcaagcaaaatctcttgtcccagaggtgcccatgtgggtccgctgtgtcccctgtcatcatccttgttttttctcattttggccaagggcaggctccctgggacaggcagggaacaactgcggagatattagtgattcataggtttgtacagtgttttatactttgcaaagcactttattagctcacacctgtccactcacatgaaactcgtgttaggccctgggaggccgacggtaactctcaccgtgccctcagatgaagcacagagaggttgttacttgcccgggccatccagtgggctggctgggtcttgtgtccccatctgtggacccctctagggtctgagatgagatgagaagtgtctcctgtatccacctcttcctggcctcccttcccccacttcctggtccctgtccactcctcaggttggtgctctcacttcttgaaagctctaggcacccccgcctcccgccaggctccccattggctcctggcaggccagctgagaatgaacaggagatggaggcaggcagcccaggctgcagaggtgagggatgtggggccaggcccagagggctcagcctagaggcttccaatctcagattctcctgcctgtggtcatctgtttgtccatcaccccaggacagggcagacagaggggcaaagcactgggggggacatcacagcatttcagtgtcagtcacattttaaactgatcagcctttgtataatgttttttaaatcatttctaaataaaacagaaatacaga

SEQ ID NO: 287612 - DNA, 1685 bp, Homo sapiens
gagagagagagagagagagagagagagagagagagagagagagagagagagagagagagagagacaaaatctcttgtcccagaggtgcccatgtgggtccgctgtgtcccctgtcatcatccttgttttttctcattttggccaagggcaggctccctgggacaggcagggaacaactgcggagatattagtgattcataggtttgtacagtgttttatactttgcaaagcactttattagctcacacctgtccactcacatgaaactcgtgttaggccctgggaggccgacggtaactctcaccgtgccctcagatgaagcacagagaggttgttacttgcccgggccatccagtgggctggctgggtcttgtgtccccatctgtggacccctctagggtctgagatgagatgagaagtgtctcctgtatccacctcttcctggcctcccttcccccacttcctggtccctgtccactcctcaggttggtgctctcacttcttgaaagctctaggcacccccgcctcccgccaggctccccattggctcctggcaggccagctgagaatgaacaggagatggaggcaggcagcccaggctgcagaggtgagggatgtggggccaggcccagagggctcagcctagaggcttccaatctcagattctcctgcctgtggtcatctgtttgtccatcaccccaggacagggcagacagaggggcaaagcactgggggccccagagcctagcttcccctcagcctgggggacatcacagcatttcagtgtcagtcacattttaaactgatcagcctttgtataatgttttttaaatcatttctaaataaaacagaaatacagagtgagtgtgtcatttccctgggatgagggaacaaagatcaggttccaagagtaaccttaggacgctctgggaagagaaccgggtcctttggggtgtctgggagctgcccacccatctcctctgccagaccggcggtcagatagcctccctctacaacaggctggccctgggggcccagggttattggggttccaggaacacagcctgatgatgcctccttacgatccaggatggagagcagcccccccaggagtatggggagggtcactgtggcacgggcttctccatgacctgggacatgaccaggaggcctgtcctgcctctggaagccagcgacagagagggatgcccccgacccagccagccggagaaagggatggggtggtcacgaaggtctgagctgggtctgggtgtaggctgggaagcaggctggggtgtagactgcgaaggcggccctgccgggacttctttccagtccccggcgacctcttcgaattctctgctatctctggggagcctcgggtgggagggggtgtaagagacgcagggacgtggggagaggagacaaggcaggcaagaaccacaggggacggcggacagacgggcgacatcctgcggaggacgccgtcagtaccaggaagtgcaggcgatgaggaagcgcacgtcgtccagcggcccccacgggctgggctcgggctggggctggggctggggctggggctggggctggggcggatgccggggctgttccgggccctccggcgccgcaggctggggctggggctggggctgggtttgcgcaggctccggggcgccgcggccgct

SEQ ID NO: 287613 - DNA, 897 bp, Homo sapiens
ttttaaaactaagctgggtggccaacccagggacaccgtgctctgctaaatgatgactccagctacatttcccgaggccaagagatgagaagctgctggctccaagctccgctgcaggctgccctggctgagcgggtgctaggcaccgcggagcgctgcctggtgctctgaagccatgccccagtgcctccctgggagttctgctgtggagtctgtgtggaggctgactctggagagatgtttgtgtccaggtggctgcctgtggtctggctaagtaaaggggtgagtattcttggtgtcactgtccaaagcaaagttgtgtccatgggacacagactaggtgaggctctgtgtccaggtgatgctgtccagtgagagggggttgcagtcagagtgaggctgaccggaggcctctgtccagttggtgccctgtggaatgtgattacatactggttgacaccatcctgaggaccatcaccatgcgtggagaccctgcctcctcactgagaccttgcaagaaaaagaacctgcagtcaccccaaggaagaggagtctcggctgttccctggaggctgacccagccctggcccaaaggctgacccagacccaaggcccaaaggcccacccagacccaaggcccaaaggcccagctctaaggtccaaaggggctccaccctgttctctagccggactcagtctctggcaaggaccccggctgccagctgcactccctagacgcacgtggcccaccccctccttccagtaccggagccctaactggcggcacccgggcacccttttgactcagagccacgctccacgagggggaccgatctgctcacttgccccgtcctgggggtaccagagtagccagcgcgacgccttccgcacctcgcc

SEQ ID NO: 287614 - DNA, 505 bp, Homo sapiens
aagagatgagaagctgctggctccaagctccgctgcaggctgccctggctgagcgggtgctaggcaccgcggagcgctgcctggtgctctgaagccatgccccagtgcctccctgggagttctgctgtggagtctgtgtggaggctgactctggagagatgtttgtgtccaggtggctgcctgtggtctggctaagtaaaggggtgagtattcttggtgtcactgtccaaagcaaagttgtgtccatgggacacagactaggtgaggctctgtgtccaggtgatgctgtccagtgagagggggttgcagtcagagtgaggctgaccggaggcctctgtccagttggtgccctgtggaatgtgattacatactggttgacaccatcctgaggaccatcaccagctgagtgtctcagccgccctgtgtccctgggttctgtgctcttgtgtgtggtttgacactattccagtgcgtggagaccctgcctcctcactgagaccttgca

SEQ ID NO: 287615 - DNA, 417 bp, Homo sapiens
ctcccagccaaggataatcctaatccctgacttcagcttcttgctatctacaccatctgtaaaggttacctatccttagacatgttagaaaccatatcagtaaccatatgatatttaaaatcttgagatcaattgtgtcgagtaaaacaaattaaatcatgccagataaaaattatgaatttttccataaaagcatcatcttcaggaaggacctcaggatccttcctgaggatggtataacttcgcgggagccctcccagaaagactcctgtgttatctccaataacagtactaccattcaggatggcagaggaacctagagaagaggagatgagaaatacaccttcaccaggatactctagttttactagctcagcaaataataaaatccttcaccagcctttgggataccactct

SEQ ID NO: 287616 - DNA, 407 bp, Homo sapiens
cattttagccattgacagatgtattttcaaaccaaggcatgctctgtcagaagactacaaaaatattactgcttcaggaaaccatatcagtaaccatatgatatttaaaatcttgagatcaattgtgtcgagtaaaacaaattaaatcatgccagataaaaattatgaatttttccataaaagcatcatcttcaggaaggacctcaggatccttcctgaggatggtataacttcgcgggagccctcccagaaagactcctgtgttatctccaataacagtactaccattcaggatggcagaggaacctagagaagaggagatgagaaatacaccttcaccaggatactctagttttactagctcagcaaataataaaatccttcaccagcctttgggataccactct

SEQ ID NO: 287617 - DNA, 288 bp, Homo sapiens
ctcccagccaaggataatcctaatccctgacttcagcttcttgctatctacaccatctgtaaaggttacctatccttagacatgttaggatccttcctgaggatggtataacttcgcgggagccctcccagaaagactcctgtgttatctccaataacagtactaccattcaggatggcagaggaacctagagaagaggagatgagaaatacaccttcaccaggatactctagttttactagctcagcaaataataaaatccttcaccagcctttgggataccactct

SEQ ID NO: 287618 - DNA, 494 bp, Homo sapiens
ctcccagccaaggataatcctaatccctgacttcagcttcttgctatctacaccatctgtaaaggttacctatccttagacatgttagaaaccatatcagtaaccatatgatatttaaaatcttgagatcaattgtgtcgagtaaaacaaattaaatcatgccagataaaaattatgaatttttccataaaagcatcatcttcaggaaggacctcaggagggtgttctgccatcatcacgttatgaaaagcatttgaaagaaatgctgactgttgttgttgacaaggaggaggggatccttcctgaggatggtataacttcgcgggagccctcccagaaagactcctgtgttatctccaataacagtactaccattcaggatggcagaggaacctagagaagaggagatgagaaatacaccttcaccaggatactctagttttactagctcagcaaataataaaatccttcaccagcctttgggataccactct

SEQ ID NO: 287619 - DNA, 436 bp, Homo sapiens
cattttagccattgacagatgtattttcaaaccaaggcatgctctgtcagaagactacaaaaatattactgcttcagggtaatagtccttccttttatataaatgcacaaatacatgcatgtgtgtgtgtgcacatatgcatttgaagataagtatttacctgctcctgttgtacgtcctcgactccaatcactatatactgaacctccttcatgcgaggctatcactcgatacaggatccttcctgaggatggtataacttcgcgggagccctcccagaaagactcctgtgttatctccaataacagtactaccattcaggatggcagaggaacctagagaagaggagatgagaaatacaccttcaccaggatactctagttttactagctcagcaaataataaaatccttcaccagcctttgggataccactct

SEQ ID NO: 287620 - DNA, 448 bp, Homo sapiens
ctcccagccaaggataatcctaatccctgacttcagcttcttgctatctacaccatctgtaaaggttacctatccttagacatgttagaaaccatatcagtaaccatatgatatttaaaatcttgagatcaattgtgtcgagtaaaacaaattaaatcatgccagataaaaattatgaatttttccataaaagcatcatcttcaggaaggacctcaggatccttcctgaggatggtataacttcgcgggagccctcccagaaagactcctgtgttatctccaataacagtactaccattcaggatggcagaggaacctgtatatatcccatccagagtgatttggccaaaagcctgatgcctaatagcaattatttcatgccattttccatcactatattgtttgccatgatcattagttgtagttacttccactggtgaccccttaa

SEQ ID NO: 287621 - DNA, 420 bp, Homo sapiens
  misc_feature (420)..(420): n is a, c, g, or t
ccacccgctctcttcccatccaggctgcaacccacgcttcgagggccttgcgcattgcagaggacacggcagcctgctcatcacgctcaactacacctcctgcaagagctttggccaccttgggaggcaggatctagatatctccccacaaacctaaacaatttcgagagggacttgtgttctgcaaccagtcacagaatatcaggtgagctgggcgtgtcttcactgacccacccgcccagggactggtcgagtgtcatgtgcgccatggtcatgcatcatagggaagagactcgggtacggggctcacccgcctctaagatgagactggtatacagataacgcatgcaatgatggtcactataggaggtctcatatcatccagttataaatgattaaggctcagatgctgtcctgaan

SEQ ID NO: 287622 - DNA, 2294 bp, Homo sapiens
tttcactctttttcccccctgtatattccttcttttttttttttttcagggtccaagcctcggcatgtgctggcttgtttggctttattttagaaaccaaccaacatgtttcattagcactgacacagcaggggtcccctgctgccacctgacaatccagcgtcacttacactgcacccacgcaggccacaccttcaatggccacggcacgctagcccagagttagccacacagaaacacacttctcaccgcacaaaactcccttttgaaaaaaccaagcaatcgtcaggtcggaggagaatcactagccccccacagcgagaggggacaaagcttggtggccgaggcccaggtccttgtggcccctcccggtggggtgaaggtgcccgggactcctcggggttgcatggctacagccggggcgctgccagggcctcctctgcggctgagagatggaagggatccttcccgacgcccgcaggtgggggcgagccaccgggaaccgggcctgtcaccagcatccccgagcccccgcagaccggaatgcaaatggctccgcgcccacgcggctcccggtctgctgacgagggctgcctgctcccatttcttctcttcctcttcattttttttaagggctgccagttctggaaactttttctggcttctcagacaactgtggcaagatggagtagagagaggccccggccgggcgctttctgctgcctcgcggaggggcgggcacggggagtgaggggtccccaggcccagcgggtgcggggccgggtgaggagacggagctcacccccgttcggaacccagaagcatggcgggtccccacgcgcagcccttcaggggcctcgggagcccgcggcctgggtcacctccggctcccttcaggcggggggcggctgctgccgccaggctcgggcgtgggtgcgggcggtgggcatcccacgggggtaggggaggcgagagcctgaggagactcgggagggggcccgtggacgcggctggcccgggatggagctggcgcggccacagtgggggacgaggcagggcacgcggcgttccccgggctcggcctccctcccagcgcacgggcggtcggaggaactggagcccccaccccggacacggtcccgcgggcgaaggcttctccccgtcgccccggtccggcctccctcccgccgccgccagcagaggccgctgtcccacgcgccgggtcccgttggcgccggggcctcctgggacggcctggccgcggcctgcgggtatgcgctctttccagaaaggcagcacacgcatgtctctgccgtggccccagatcctccccgcgccgccgttttgagcgttcacactcattacccaggtccgtctgggagacccgccgggctcccgccctcccggcccgcagcctcctggccaaaatcctcccgggacaccccacctggactgctgcgaacgggcctccacccgcctccccggacccgcagcgccccccgctccctcagggttctggggtgaaggggtctgaatagcaccaggggaggcggcagggcgggcctgtcctacctgcgcccgagcactgctgagacgacatcccttccagcgccgccacgtagtccagccccagccagccgcggtcctggaagcaccgcaggcagacgacctgctcctcactgggctcaggcagggtcacccgcccagtgccgctagctgcaaattgctttacatacagtgacccaaagagcaagtcatttcagggccccaccactctgattggaagtcataagcttgacaactgattggcctctgtcacccaagcgggtgtggggacactaggcccgcaggtgccactggaagaggcgttcagaagcactgcggtgctccagctcctggatgcaggtctgaggcctgagatgtccaggaagaaagacccagaaatgagggatggtgtgggtgggattcctgagcgttctgctaggcctgctgagcacttcttggccttttccataaggctttctcactctgtcttacagatatctccccacaaacctaaacaatttcgagagggacttgtgttctgcaaccagtcacagaatatcaggtgagctgggcgtgtcttcactgacccacccgcccagggatgctgcactcctctccaccctgctcagaatcactagaatgaccgttctgtggctacagccctaaaagagctactaaaaagaccagaagtagtatgagaacttatgaatacgaatataaataaaggacatctggagaacaaaaaaaaa

SEQ ID NO: 287623 - DNA, 2197 bp, Homo sapiens
tttcactctttttcccccctgtatattccttcttttttttttttttcagggtccaagcctcggcatgtgctggcttgtttggctttattttagaaaccaaccaacatgtttcattagcactgacacagcaggggtcccctgctgccacctgacaatccagcgtcacttacactgcacccacgcaggccacaccttcaatggccacggcacgctagcccagagttagccacacagaaacacacttctcaccgcacaaaactcccttttgaaaaaaccaagcaatcgtcaggtcggaggagaatcactagccccccacagcgagaggggacaaagcttggtggccgaggcccaggtccttgtggcccctcccggtggggtgaaggtgcccgggactcctcggggttgcatggctacagccggggcgctgccagggcctcctctgcggctgagagatggaagggatccttcccgacgcccgcaggtgggggcgagccaccgggaaccgggcctgtcaccagcatccccgagcccccgcagaccggaatgcaaatggctccgcgcccacgcggctcccggtctgctgacgagggctgcctgctcccatttcttctcttcctcttcattttttttaagggctgccagttctggaaactttttctggcttctcagacaactgtggcaagatggagtagagagaggccccggccgggcgctttctgctgcctcgcggaggggcgggcacggggagtgaggggtccccaggcccagcgggtgcggggccgggtgaggagacggagctcacccccgttcggaacccagaagcatggcgggtccccacgcgcagcccttcaggggcctcgggagcccgcggcctgggtcacctccggctcccttcaggcggggggcggctgctgccgccaggctcgggcgtgggtgcgggcggtgggcatcccacgggggtaggggaggcgagagcctgaggagactcgggagggggcccgtggacgcggctggcccgggatggagctggcgcggccacagtgggggacgaggcagggcacgcggcgttccccgggctcggcctccctcccagcgcacgggcggtcggaggaactggagcccccaccccggacacggtcccgcgggcgaaggcttctccccgtcgccccggtccggcctccctcccgccgccgccagcagaggccgctgtcccacgcgccgggtcccgttggcgccggggcctcctgggacggcctggccgcggcctgcgggtatgcgctctttccagaaaggcagcacacgcatgtctctgccgtggccccagatcctccccgcgccgccgttttgagcgttcacactcattacccaggtccgtctgggagacccgccgggctcccgccctcccggcccgcagcctcctggccaaaatcctcccgggacaccccacctggactgctgcgaacgggcctccacccgcctccccggacccgcagcgccccccgctccctcagggttctggggtgaaggggtctgaatagcaccaggggaggcggcagggcgggcctgtcctacctgcgcccgagcactgctgagacgacatcccttccagcgccgccacgtagtccagccccagccagccgcggtcctggaagcaccgcaggcagacgacctgctcctcactgggctcaggcagggtcacccgcccagtgccgctagctgcaaattgctttacatacagtgacccaaagagcaagtcatttcagggccccaccactctgattggaagtcataagcttgacaactgattggcctctgtcacccaagcgggtgtggggacactaggcccgcaggtgccactggaagaggcgttcagaagcactgcggtgctccagctcctggatgcagatatctccccacaaacctaaacaatttcgagagggacttgtgttctgcaaccagtcacagaatatcaggtgagctgggcgtgtcttcactgacccacccgcccagggatgctgcactcctctccaccctgctcagaatcactagaatgaccgttctgtggctacagccctaaaagagctactaaaaagaccagaagtagtatgagaacttatgaatacgaatataaataaaggctgtaggcgtgcagctttctaacccatatcttaacagaagtacgccgtgcagggccaag

SEQ ID NO: 287624 - DNA, 1934 bp, Homo sapiens
tttcactctttttcccccctgtatattccttcttttttttttttttcagggtccaagcctcggcatgtgctggcttgtttggctttattttagaaaccaaccaacatgtttcattagcactgacacagcaggggtcccctgctgccacctgacaatccagcgtcacttacactgcacccacgcaggccacaccttcaatggccacggcacgctagcccagagttagccacacagaaacacacttctcaccgcacaaaactcccttttgaaaaaaccaagcaatcgtcaggtcggaggagaatcactagccccccacagcgagaggggacaaagcttggtggccgaggcccaggtccttgtggcccctcccggtggggtgaaggtgcccgggactcctcggggttgcatggctacagccggggcgctgccagggcctcctctgcggctgagagatggaagggatccttcccgacgcccgcaggtgggggcgagccaccgggaaccgggcctgtcaccagcatccccgagcccccgcagaccggaatgcaaatggctccgcgcccacgcggctcccggtctgctgacgagggctgcctgctcccatttcttctcttcctcttcattttttttaagggctgccagttctggaaactttttctggcttctcagacaactgtggcaagatggagtagagagaggccccggccgggcgctttctgctgcctcgcggaggggcgggcacggggagtgaggggtccccaggcccagcgggtgcggggccgggtgaggagacggagctcacccccgttcggaacccagaagcatggcgggtccccacgcgcagcccttcaggggcctcgggagcccgcggcctgggtcacctccggctcccttcaggcggggggcggctgctgccgccaggctcgggcgtgggtgcgggcggtgggcatcccacgggggtaggggaggcgagagcctgaggagactcgggagggggcccgtggacgcggctggcccgggatggagctggcgcggccacagtgggggacgaggcagggcacgcggcgttccccgggctcggcctccctcccagcgcacgggcggtcggaggaactggagcccccaccccggacacggtcccgcgggcgaaggcttctccccgtcgccccggtccggcctccctcccgccgccgccagcagaggccgctgtcccacgcgccgggtcccgttggcgccggggcctcctgggacggcctggccgcggcctgcgggtatgcgctctttccagaaaggcagcacacgcatgtctctgccgtggccccagatcctccccgcgccgccgttttgagcgttcacactcattacccaggtccgtctgggagacccgccgggctcccgccctcccggcccgcagcctcctggccaaaatcctcccgggacaccccacctggactgctgcgaacgggcctccacccgcctccccggacccgcagcgccccccgctccctcagggttctggggtgaaggggtctgaatagcaccaggggaggcggcagggcgggcctgtcctacctgcgcccgagcactgctgagacgacatcccttccagcgccgccacgtagtccagccccagccagccgcgatatctccccacaaacctaaacaatttcgagagggacttgtgttctgcaaccagtcacagaatatcaggtgagctgggcgtgtcttcactgacccacccgcccagggatgctgcactcctctccaccctgctcagaatcactagaatgaccgttctgtggctacagccctaaaagagctactaaaaagaccagaagtagtatgagaacttatgaatacgaatataaataaaggctgtaggcgtgcagctttctaacccatatcttaacagaagtacgccgtgcagggccaag

SEQ ID NO: 287625 - DNA, 1661 bp, Homo sapiens
tttcactctttttcccccctgtatattccttcttttttttttttttcagggtccaagcctcggcatgtgctggcttgtttggctttattttagaaaccaaccaacatgtttcattagcactgacacagcaggggtcccctgctgccacctgacaatccagcgtcacttacactgcacccacgcaggccacaccttcaatggccacggcacgctagcccagagttagccacacagaaacacacttctcaccgcacaaaactcccttttgaaaaaaccaagcaatcgtcaggtcggaggagaatcactagccccccacagcgagaggggacaaagcttggtggccgaggcccaggtccttgtggcccctcccggtggggtgaaggtgcccgggactcctcggggttgcatggctacagccggggcgctgccagggcctcctctgcggctgagagatggaagggatccttcccgacgcccgcaggtgggggcgagccaccgggaaccgggcctgtcaccagcatccccgagcccccgcagaccggaatgcaaatggctccgcgcccacgcggctcccggtctgctgacgagggctgcctgctcccatttcttctcttcctcttcattttttttaagggctgccagttctggaaactttttctggcttctcagacaactgtggcaagatggagtagagagaggccccggccgggcgctttctgctgcctcgcggaggggcgggcacggggagtgaggggtccccaggcccagcgggtgcggggccgggtgaggagacggagctcacccccgttcggaacccagaagcatggcgggtccccacgcgcagcccttcaggggcctcgggagcccgcggcctgggtcacctccggctcccttcaggcggggggcggctgctgccgccaggctcgggcgtgggtgcgggcggtgggcatcccacgggggtaggggaggcgagagcctgaggagactcgggagggggcccgtggacgcggctggcccgggatggagctggcgcggccacagtgggggacgaggcagggcacgcggcgttccccgggctcggcctccctcccagcgcacgggcggtcggaggaactggagcccccaccccggacacggtcccgcgggcgaaggcttctccccgtcgccccggtccggcctccctcccgccgccgccagcagaggccgctgtcccacgcgccgggtcccgttggcgccggggcctcctgggacggcctggccgcggcctgcgggtatgcgctctttccagaaaggcagcacacgcatgtctctgccgtggccccagatcctccccgcgccgccgttttgagcgttcacactcattacccagatatctccccacaaacctaaacaatttcgagagggacttgtgttctgcaaccagtcacagaatatcaggtgagctgggcgtgtcttcactgacccacccgcccagggatgctgcactcctctccaccctgctcagaatcactagaatgaccgttctgtggctacagccctaaaagagctactaaaaagaccagaagtagtatgagaacttatgaatacgaatataaataaaggctgtaggcgtgcagctttctaacccatatcttaacagaagtacgccgtgcagggccaag

SEQ ID NO: 287626 - DNA, 429 bp, Homo sapiens
ccacccgctctcttcccatccaggctgcaacccacgcttcgagggccttgcgcattgcagaggacacggcagcctgctcatcacgctcaactacacctcctgcaagagctttggccaccttgggaggcaggatctagatatctccccacaaacctaaacaatttcgagagggacttgtgttctgcaaccagtcacagaatatcaggtgagctgggcgtgtcttcactgacccacccgcccagggatgctgcactcctctccaccctgctcagaatcactagaatgaccgttctgtggctacagccctaaaagagctactaaaaagaccagaagtagtatgagaacttatgaatacgaatataaataaaggctgtaggcgtgcagctttctaacccatatcttaacagaagtacgccgtgcagggccaag

SEQ ID NO: 287627 - DNA, 797 bp, Homo sapiens
gtaggcgcctcggcggccaccgcgtccccagggggcctcgcggacgggggcgcggggctgcggggaggaggcgggcgggcccctcgggcgacaccgcggggcgggcggcgggaagcccggactcagcggtttcctgggcaaccggcctcctccggcgcggcccgcgcggctccaggtggcgggaggcggcggttggcgggaagggccgcgcgggcccgggggcggcgcctcaggtagcagcgccaggtggcgcccgtgggcggcggggctcccggggaggcgcctgctcccgcccacgccgggcccggccttcgcgagcttccttctggattccagcgcgaagccgccgcggaaactccccgggcgggcatcggagctctggggcggggcggccgggctcagagggcgggcgggagcaggcgggcggcgagggcgggcagcagcagcgggagcaggggcgccccgggcgccggggccgctggggacgaacgcggcgggtcaggccccgaagcccgggccgcggtggccgcctcaggcgcccgctctggggtgggggtgggggcatctttcgggaccgaactcgccgcagcctccctctttgtgctcctttcccctgctgcccttccagatgcgctctttccagaaaggcagcacacgcatgtctctgccgtggccccagatcctccccgcgccgccgttttgagcgttcacactcattacccaggtccgtctgggagacccgccgggctcccgccctcccggcccgcagcctcctggccaaaatcctcccgggacac

SEQ ID NO: 287628 - DNA, 316 bp, Homo sapiens
cggacccgcagcgccccccgctccctcagggttctggggtgaaggggtctgaatagcaccaggggaggcggcagggcgggcctgtcctacctgcgcccgagcactgctgagacgacatcccttccagcgccgccacgtagtccagccccagccagccgcggtaggtggttttctctccgacaggcaccgcccggacggtggcatccttgaaaagcaggtcttggccatgatagttggaggagtcgaacattttgaacccgttcttattgtggtcgtctccaaacaggtcctggaagcaccgcaggcagacgacctg

SEQ ID NO: 287629 - DNA, 7580 bp, Homo sapiens
  misc_feature (3605)..(3605): n is a, c, g, or t
  misc_feature (5763)..(5763): n is a, c, g, or t
tagctttaaataagaaatttattgcaaatatagaaattgattctctccatacaggaatctccgagttgaggaaaacaatttcgtgccattcagttttaaaacaggaaattgagggaagggagaggcagatacagggaagagaaaataaagttaacccccacccccaaaagaagaaaaggagagggttcaaggccctcagaggaaggaaagtttcgtaacacagcaagggttcacaggttcagagcccagggcctgagcccagctctgcaggacccaaaccaggtgcccaaccacagccaacttggggactggcggctcctgaggaagggagggagggagggaagtgtggccgccactgcaggaactccaagcccctgtcccagccctgtgctggagtgtggagtggcagaggggcagaggaaggaggagcaggcccagaccatcctgcccgtcctacaggacccccttcctctccctcctgctcagcaggactgcctgacctttagtgaggcctgaagccgcctctggaggcaagcagtatggaccctggttttgtcttagaagggggacccagggtcagggaaggagtgtgtcaggatggaatctgagcatgagagttagaggaggtcccctctcctggggctcagccacctctggagcagccaccttgtcagacaggagaggtggcaatggggccagccaggcaaggctgccctaaccttcacactggcttccacgggcaaagtaagcccctcagggctgagcttccccaggctccccgacggcttgccccgcccatccacactcatggaaagggggctctgctgggccaggaatgggcaggggcagggtagtaggggacagaggcggtgcttgggggacaggcagccactgcaaccccactccctctagtctcgtcttcacacccacccacccacccacccttctggctcctcttgtcattcacagcttggctccctgtccccccatcccacacaggatgctccctgaccagccttgcccctcccccatcaccctattttaattttctgcaaggcgccagtcactagggagcattgtgtcttatcccttccctgcacttaggccccttataagctaggacctgtcactggtgtccttaattcctgatgccatcccggcctcagcactgtcacaaccgagtttgtcagctctaggtctcctttcctctcctttccgtctctgcacttctgttcaccccgctgttacatttccaggagggagtggggcaggcgaccaacttccagttgagaacatgggtgactctcggccagcctgatactccccactgctgctgccccagctgcctcccggggacgatccaggcctggccttcccaagcaggtctctttactcccaccctcctcgctcccctgacagcccttttcccagacctacccagacacgggctccccagcctggacacaggctgctcccacaggcctcctgcactgcctcaggaggggagcccaggtgagggattctttggtgggcagagagagactcttcctgccgcggggaaaagcaaggccgggacccgtgacgaggtttccccaccaaccaggctttcttgccttcatgccagacctctgtgttttgctactggaaggccataagctccaacagagggttagctgcacctgctgtgccctcccaggaaggagcagacccattgtgctacttcccagaaacagcttcagaggagattctccaacagaggcaggcaagcccaggtgtgaccttgttccggcccaaggcaggaggcctccccgcagaggtccagggcgtggcacccacacatccctcgctccaccgggcctccatctcccctccctccctgtggccccccctgccctcttttcctggtgtctgccctgctggcctgccccagaccacagcccagctccaccatgctcatcatcatcacaaacccagaccttggatggcaacattttgtgaatacttccctcccgcctgggaaaaactcatcctgagcaggacgtgggacacagatgcaggccagcctccgggtgggctctccccaagctgagcagttggggctctggcctggctgggaggccagagacccgagtcttagaccccgctctgcctcacaaagaaccacatgaactgggtcttcaaggccagttcccctcctggatcatcagagtcctgctctttggaagggcccctgtccctgcagtcagagagtctgaggtttcctaaatatcttcacgcagaaaggatggggaaatggcaagcgcaggcccctaactcctgctgctgggaaccctccctggggcccagcccaggcgtgctccttcttcccacgggttcctttctcaaagcccccaccctctccctgaagccccccacgaagccccaagctcctggcctcctacactcagcagtgtgactgatcctccaccccagctggccagccaattcaccaggcccgtctgggagccctgacttcctcatctacaaaacgggaacaagcgggacggacagacagtcccttccaccgggacaagagcccttgaggaggcttccctggggctgccctccctggcatggaggaggggaaggaactggggacaagggaggtggcagtggagagagggagggaggaagggaggtggcacatgggcccaatgctcagaaacacaggaggtgggtgtggggcagggctgtgtcttggtggcacctgttttgggtctgtttttgcagagctgacccctccctgggtttcaagagctgctcgtcagatcacaacagacagaatgtgggaaagcagggcatcagagagggggcgggggagtctggacaaactggcacatacacgacagatgtttgctcagaaaaatacagtaaaatcgtcatgcaaatataacagggagtctgcttcctcacacccctggcttctctgcctgcttgcttttctcagttgtgccaagggggtgtgaggaggggttggggggcaggttttgggggccgggggaggaggtctgctccgcgtatccatgccgccccctcccctcctcgccccaggagaacagtcttttctttgcaaatgtcaccctcaaagtgagccctgggcttcgttaaccccaaagttggtgtgagagaggtactcagctgagcccgagcctcctagccctctgctgtcctccctcaccccctgcccccagcaggaaggtcgttggggtccccaggggatggcactagctttcctggtcagagcccctgcccaccaacagtgccggtcttggacccattccagtgcctaccctcgcccctcagtcacactccccaaatctcaggaaacccatgtgggccacaggccctagactgggggtctctggcaggggcgtggggagagccggggccccccaagctgaggtgggtggcagccaagcgacatgttgctaggcgggcaaagctgctagtagaggcgtccccacaccccgctgggccagctcccacccagaggtgaaggatgatggactccggcccatcagcatcctgactggtcaagaccccagtctcaggaccgcagatttgcntcccaaaagagctggccccaggagctgctgccaggctggccctccctcaccaccctctgccaccgcctacatggacagagaaccccagagcccaacggtcactctgggcaccaactgccaggcacagggttaccatggtgacagaggctggctgggaggggctggggcgccacgaacccagcctgctcctcaaccctctctcgggtgggggcctcactgtttgtgctttgtttgatgttgggtgggggggtcagaaagagggaagtggccattgccacggaaacatgggagcccctctggccagggggccaggcctggatgagcagcccagaggggatgggtgagaaagccctccttccccgggtgggcggctgagataggagccgagatcccacgatggggtcgggcaggtggggacacaggccatggggacaggcaggaagtcccccatgacagctcctccctgcagccctccaggcatcacagtgcaccgctgcccttctgcggtgggcaggggtctcggaggaccagagaagctggggccgggagcctgcacctgagacgtcctgggagctggcctgcccgccacacgccccactcttcccaggccacgtggaagacacttgaagtgggctggtggaatgtcgccctgcctcggctcctttcccgtcaacaggaccctctcccttctcccgggtgccggcataggggtcaaaagccccccaggattctgaatcacagctgcacactctgggggcactgccatgtggctttctaggaagaaaaagcacctgcctgattcccaagtccctcagccccaagggaccacagcttcggaaagggatgtggggtgggcacagggcgggcaggggtccacaagagagctgcagggggttccgggacagcactgggctgggaagttgggggacttgaggctaagctgctgtgtgaccctggggttgtcaactcccttctctgggcctcagtttccccccctctctaaagtggaaggagacattgcccgatgtctaatgctaaatctgcaggtgacttgactcccagcttgggaagggaccctctccctgccctagaggggcttcagtccctctctactccagctttcttgacccccacacctgtttctagccccagaccccccagaccccacaccctctcttggcttccttcctccccccgccagccccccggccctgcacaccccagcagagtccctgggcagcacagtaaagacgactggtttcggtatcagtttgtaaactttaaggaaaatgtgtctctgttttcctgtccgttattgtcggatgttggtttgttcacagtcgggtggtggtcaggtgtgtgtgtgcgtgcgtgcgtgcgggtctgcatgtgcgtcctctcctgggccttggcccccgagtctgctccccgccctggccgcctggacccttcccccaaaaggcccccagccctctggctccgacctcaccagggaggaaggggggggtcacagcttctgctgggcggagacccccttccagtaatcaaggatgtcatgcagatcctcgtccttggcgaactggaccttcttgcgcagggcgtgaccggcggccatgtacacctcctcccggtggtgcttcttgtagggccggaagcgctcccagatcttgtgcgtgctctcggatgagtactcggggctggaggagtaccctgagtagtagtgtctgggggagagctgcgagtaggtggagtcacgcttggagcgggtcagcggcttgaggaaggacacgcgctggctcaggctgtcggcaccctcctcgtagtacagggcgggaaagctgtgccggtgctcgctgcagtggtaggccggcttcacctccaggtggtggatgcccccgcccccgccgctgcccccgccgctgcccgccggcaccagcgggagccggtccagcgggctgttgagggggctgcccttctcgatgtacttggagtcgcccttagccagccctgtggcggccggatggtcgggcacgtccaggctaaagaccttggcgctcttgatggaaccactggacgacacgctgcaggtcttgcgggtcacggccgcgtcggcgctcagctggcgctgtagtgggtggtgggagctctccttgtaggnaggcgaaaggaagctgggccgctccagggccccggggccagtggctgaggaggcggcagcagctgcagggagggactggcactcgaaggccagctcggggtccccactgctgctgccgcctcccagaaaagaggccgagtccagcttgagagcatcgatgcagttgttaatgatctggttgaccttgtccacctccttggcaatggtggagatctctgcagccgagccctggccgttctcgaggtccgggaggtcatcctcgggccgagccagaccgtccccgccggcgcctgtgcgcacctcgatatagttgcctttggtggctaccttgggtgtgtccagcccggcctccaaccccttggcggtgggcagcttctccccgatcatggaggggatggaggccatgcgagatacgggcagcacgggaggctcgcccagcttctgggcggcgtgcacaatggagccggcatccacatcagccccgtagcgcatctccaggatggtcttcttgacgttgacagacttctgcttctcctcctgcatgcgccgcttgcgcaggcagtagtacacggctcccagcacgataaccatgccaaagaggcagcccaggatggtcatgatgtagtgggtggtggtggaggtgctgggcgccaagtctccggggacggggtcccgcgtggtgaaggtcaggcaggtgtggttgaagcggcggctgttgcgcagcgaggtcacgcagaaggtgtactcagtgtgcgcccgcagtttgtccagcgtcacgatctccttcttgttcttgagggtcatgacgtcggagaagtagctgttgttgtactgcacgaggatgtacatcttgctgtaggggtgtgggatgatgaccaccagggtggccgaggtgaacgtgacgtggtgcagcttgatggctggccctgccgacgcatccgtggtggacgaggccggcggctccaccgaaaggatctcgtcggggttgaagcccgagttctcgtctggctccctctgggcgtcggtggagtagggcgtggggtggctcacgggccgggcgggcagcgagccattccgacacttggcctggagtacggtgatggcgttgaggctgtggtagggccggggcaccagcagcgggtagccggcaaactcccgcggcgactcacactgcaggcggtcgtagttcttggtgacgttgttgaagaccaccagccaggccaggaagccgaagaggtcgcactcacagttgaaggggttgccggccagctcacacaccatcaggctggcgaggctggcaaaggtggcaccgtccaggcggctgaggcggttggaggacaggtcgatgctgatgaggctcgggcactcggagaaggcggtgggcgtcaccacctcgatgaggttgtgctggacaaagaggaactgcaggcggctcatgcctcgcagcatgccctccgtcaggttgctgagcttgttgtagcccagctgcaggacctgcaggctcgactggcccaggaaggcaccgtcctcgatgtaggagatctcgttcttggtgaggttgaggtcggtgaggttcccaaagcggttgagcgaggagtagagcacggctttgagcttgttctcgttgagccgcaggtcgtgcacggtgctattgatgtgctgcgggatggtctcgtagggcggctggttctggctgcagatggccagccacacgtagcccttgtcgccctcaatgagccagcagtcggcacgcacggcacccggccggcacacgcacagcagcgccgccgcgcacagccccaggcgcagcatggcgc

SEQ ID NO: 287630 - DNA, 6753 bp, Homo sapiens
  misc_feature (3605)..(3605): n is a, c, g, or t
  misc_feature (5498)..(5498): n is a, c, g, or t
tagctttaaataagaaatttattgcaaatatagaaattgattctctccatacaggaatctccgagttgaggaaaacaatttcgtgccattcagttttaaaacaggaaattgagggaagggagaggcagatacagggaagagaaaataaagttaacccccacccccaaaagaagaaaaggagagggttcaaggccctcagaggaaggaaagtttcgtaacacagcaagggttcacaggttcagagcccagggcctgagcccagctctgcaggacccaaaccaggtgcccaaccacagccaacttggggactggcggctcctgaggaagggagggagggagggaagtgtggccgccactgcaggaactccaagcccctgtcccagccctgtgctggagtgtggagtggcagaggggcagaggaaggaggagcaggcccagaccatcctgcccgtcctacaggacccccttcctctccctcctgctcagcaggactgcctgacctttagtgaggcctgaagccgcctctggaggcaagcagtatggaccctggttttgtcttagaagggggacccagggtcagggaaggagtgtgtcaggatggaatctgagcatgagagttagaggaggtcccctctcctggggctcagccacctctggagcagccaccttgtcagacaggagaggtggcaatggggccagccaggcaaggctgccctaaccttcacactggcttccacgggcaaagtaagcccctcagggctgagcttccccaggctccccgacggcttgccccgcccatccacactcatggaaagggggctctgctgggccaggaatgggcaggggcagggtagtaggggacagaggcggtgcttgggggacaggcagccactgcaaccccactccctctagtctcgtcttcacacccacccacccacccacccttctggctcctcttgtcattcacagcttggctccctgtccccccatcccacacaggatgctccctgaccagccttgcccctcccccatcaccctattttaattttctgcaaggcgccagtcactagggagcattgtgtcttatcccttccctgcacttaggccccttataagctaggacctgtcactggtgtccttaattcctgatgccatcccggcctcagcactgtcacaaccgagtttgtcagctctaggtctcctttcctctcctttccgtctctgcacttctgttcaccccgctgttacatttccaggagggagtggggcaggcgaccaacttccagttgagaacatgggtgactctcggccagcctgatactccccactgctgctgccccagctgcctcccggggacgatccaggcctggccttcccaagcaggtctctttactcccaccctcctcgctcccctgacagcccttttcccagacctacccagacacgggctccccagcctggacacaggctgctcccacaggcctcctgcactgcctcaggaggggagcccaggtgagggattctttggtgggcagagagagactcttcctgccgcggggaaaagcaaggccgggacccgtgacgaggtttccccaccaaccaggctttcttgccttcatgccagacctctgtgttttgctactggaaggccataagctccaacagagggttagctgcacctgctgtgccctcccaggaaggagcagacccattgtgctacttcccagaaacagcttcagaggagattctccaacagaggcaggcaagcccaggtgtgaccttgttccggcccaaggcaggaggcctccccgcagaggtccagggcgtggcacccacacatccctcgctccaccgggcctccatctcccctccctccctgtggccccccctgccctcttttcctggtgtctgccctgctggcctgccccagaccacagcccagctccaccatgctcatcatcatcacaaacccagaccttggatggcaacattttgtgaatacttccctcccgcctgggaaaaactcatcctgagcaggacgtgggacacagatgcaggccagcctccgggtgggctctccccaagctgagcagttggggctctggcctggctgggaggccagagacccgagtcttagaccccgctctgcctcacaaagaaccacatgaactgggtcttcaaggccagttcccctcctggatcatcagagtcctgctctttggaagggcccctgtccctgcagtcagagagtctgaggtttcctaaatatcttcacgcagaaaggatggggaaatggcaagcgcaggcccctaactcctgctgctgggaaccctccctggggcccagcccaggcgtgctccttcttcccacgggttcctttctcaaagcccccaccctctccctgaagccccccacgaagccccaagctcctggcctcctacactcagcagtgtgactgatcctccaccccagctggccagccaattcaccaggcccgtctgggagccctgacttcctcatctacaaaacgggaacaagcgggacggacagacagtcccttccaccgggacaagagcccttgaggaggcttccctggggctgccctccctggcatggaggaggggaaggaactggggacaagggaggtggcagtggagagagggagggaggaagggaggtggcacatgggcccaatgctcagaaacacaggaggtgggtgtggggcagggctgtgtcttggtggcacctgttttgggtctgtttttgcagagctgacccctccctgggtttcaagagctgctcgtcagatcacaacagacagaatgtgggaaagcagggcatcagagagggggcgggggagtctggacaaactggcacatacacgacagatgtttgctcagaaaaatacagtaaaatcgtcatgcaaatataacagggagtctgcttcctcacacccctggcttctctgcctgcttgcttttctcagttgtgccaagggggtgtgaggaggggttggggggcaggttttgggggccgggggaggaggtctgctccgcgtatccatgccgccccctcccctcctcgccccaggagaacagtcttttctttgcaaatgtcaccctcaaagtgagccctgggcttcgttaaccccaaagttggtgtgagagaggtactcagctgagcccgagcctcctagccctctgctgtcctccctcaccccctgcccccagcaggaaggtcgttggggtccccaggggatggcactagctttcctggtcagagcccctgcccaccaacagtgccggtcttggacccattccagtgcctaccctcgcccctcagtcacactccccaaatctcaggaaacccatgtgggccacaggccctagactgggggtctctggcaggggcgtggggagagccggggccccccaagctgaggtgggtggcagccaagcgacatgttgctaggcgggcaaagctgctagtagaggcgtccccacaccccgctgggccagctcccacccagaggtgaaggatgatggactccggcccatcagcatcctgactggtcaagaccccagtctcaggaccgcagatttgcntcccaaaagagctggccccaggagctgctgccaggctggccctccctcaccaccctctgccaccgcctacatggacagagaaccccagagcccaacggtcactctgggcaccaactgccaggcacagggttaccatggtgacagaggctggctgggaggggctggggcgccacgaacccagcctgctcctcaaccctctctcggccctccaggcatcacagtgcaccgctgcccttctgcggtgggcaggggtctcggaggaccagagaagctggggccgggagcctgcacctgagacgtcctgggagctggcctgcccgccacacgccccactcttcccaggccacgtggaagacacttgaagtgggctggtggaatgtcgccctgcctcggctcctttcccgtcaacaggaccctctcccttctcccgggtgccggcataggggtcaaaagccccccaggattctgaatcacagctgcacactctgggggcactgccatgtggctttctaggaagaaaaagcacctgcctgattcccaagtccctcagccccaagggaccacagcttcggaaagggatgtggggtgggcacagggcgggcaggggtccacaagagagctgcagggggttccgggacagcactgggctgggaagttgggggacttgaggctaagctgctgtgtgaccctggggttgtcaactcccttctctgggcctcagtttccccccctctctaaagtggaaggagacattgcccgatgtctaatgctaaatctgcaggtgacttgactcccagcttgggaagggaccctctccctgccctagaggggcttcagtccctctctactccagctttcttgacccccacacctgtttctagccccagaccccccagaccccacaccctctcttggcttccttcctccccccgccagccccccggccctgcacaccccagcagagtccctgggcagcacagtaaagacgactggtttcggtatcagtttgtaaactttaaggaaaatgtgtctctgttttcctgtccgttattgtcggatgttggtttgttcacagtcgggtggtggtcaggtgtgtgtgtgcgtgcgtgcgtgcgggtctgcatgtgcgtcctctcctgggccttggcccccgagtctgctccccgccctggccgcctggacccttcccccaaaaggcccccagccctctggctccgacctcaccagggaggaaggggggggtcacagcttctgctgggcggagacccccttccagtaatcaaggatgtcatgcagatcctcgtccttggcgaactggaccttcttgcgcagggcgtgaccggcggccatgtacacctcctcccggtggtgcttcttgtagggccggaagcgctcccagatcttgtgcgtgctctcggatgagtactcggggctggaggagtaccctgagtagtagtgtctgggggagagctgcgagtaggtggagtcacgcttggagcgggtcagcggcttgaggaaggacacgcgctggctcaggctgtcggcaccctcctcgtagtacagggcgggaaagctgtgccggtgctcgctgcagtggtaggccggcttcacctccaggtggtggatgcccccgcccccgccgctgcccccgccgctgcccgccggcaccagcgggagccggtccagcgggctgttgagggggctgcccttctcgatgtacttggagtcgcccttagccagccctgtggcggccggatggtcgggcacgtccaggctaaagaccttggcgctcttgatggaaccactggacgacacgctgcaggtcttgcgggtcacggccgcgtcggcgctcagctggcgctgtagtgggtggtgggagctctccttgtaggnaggcgaaaggaagctgggccgctccagggccccggggccagtggctgaggaggcggcagcagctgcagggagggactggcactcgaaggccagctcggggtccccactgctgctgccgcctcccagaaaagaggccgagtccagcttgagagcatcgatgcagttgttaatgatctggttgaccttgtccacctccttggcaatggtggagatctctgcagccgagccctggccgttctcgaggtccgggaggtcatcctcgggccgagccagaccgtccccgccggcgcctgtgcgcacctcgatatagttgcctttggtggctaccttgggtgtgtccagcccggcctccaaccccttggcggtgggcagcttctccccgatcatggaggggatggaggccatgcgagatacgggcagcacgggaggctcgcccagcttctgggcggcgtgcacaatggagccggcatccacatcagccccgtagcgcatctccaggatggtcttcttgacgttgacagacttctgcttctcctcctgcatgcgccgcttgcgcaggcagtagtacacggctcccagcacgataaccatgccaaagaggcagcccaggatggtcatgatgtagtgggtggtggtggaggtgctgggcgccaagtctccggggacggggtcccgcgtggtgaaggtcaggcaggtgtggttgaagcggcggctgttgcgcagcgaggtcacgcagaaggtgtactcagtgtgcgcccgcagtttgtccagcgtcacgatctccttcttgttcttgagggtcatgacgtcggagaagtagctgttgttgtactgcacgaggatgtacatcttgctgtaggggtgtgggatgatgaccaccagggtggccgaggtgaacgtgacgtggtgcagcttgatggctggccctgccgacgcatccgtggtggacgaggccggcggctccaccgaaaggatctcgtcggggttgaagcccgagttctcgtctggctccctctgggcgtcggtggagtagggcgtggggtggctcacgggccgggcgggcagcgagccattccgacacttggcctggagtacggtgatggcgttgaggctgtgtcttggcctctgtgggtcaccaattctacaggactttaagctgtcctgaccctctgacagcttccccttggctccatgcggccccactggggagaggtccccaaccaagggagttcccacacagccaccccaggcccac

SEQ ID NO: 287631 - DNA, 435 bp, Homo sapiens
ataaatttaaaaatattttatttctattgaaagaataagtattgtgaaactgccatattatctaaggtgatctctagactcaataaactccctgtcaaaattccagtttttcacagtaatgaaaattacaatcctaaaatgtacacgaaaccacaataaattttgaatagccaaagcaatcttgaggaaaaagaacaaagcagaaggacattatactttataatttcaaactatatatatatacatcgagagagagtcttgctctgccgcccaggctaaagtacagtggcatgatctcagctcattgcaacctctggctcctgggttcaagcaattctcctgcctcagccacctgagcaggacaatcacttcaacctgggaggcagaggttgcagtgagccgagatcgcaccattgcactccagcatgggccaca

SEQ ID NO: 287632 - DNA, 1062 bp, Homo sapiens
ccgctgtagggcccgatgacgatgctggcctggcgggggacttggctgacccggcctccgcacaggtggactagttcacagagcttggccactggggggctgctggcaggcgagacaaacatcgctggctggtcggcaaagagggttccgcggtacggccctgcagacaagtggcactcgcttcggcacagctgtggggcagacagagatagaattacagagcataataaataccgagcctcagcagctttcatgtgccttgcaggagacagtggcagcaggggcaaatgattcttcctggatggtgactttaacaaagacttcttctggggggcaccgatctccacctggccatgtcttcaagcccaaggagaagtcccaggatgggtctgagctaatcacggtgatcgcaatacaaatgactgcgctaagcatggcacagctggcctcaatcctggccaatgcaacgtgagaatcaattgctggtgggattctgggggagtttttctcactgttataaacagatgcaaagcagaaatacttctctttgctggacactgtcatgtctaatgtgacgcctggatcactgaagcccccagaggccacgggacacgctgaaaatggcccagtgggaaggcggaaagccttgggtcctgaaaaacacttctaagtcactgacggaccaaactgaaatcatcctttattttgttcttttcatgtcagaaaaaaagacccctaaattctttaagtgacttttttgttaagtttttgtttctagaagcccaaaatatcctaataataataattttaaataatccacctatttttggaaatagcttgttcatcattgagattatgaataatagatcagttctcacccctgccttccccaccatttaccagagttaacaactgtgaaaaattctctgtgtatttttaaaaatcctgtaaaatgcacacacaacacacacacacatttatgataatgcttgttcttaaccaaaaactgagatctaatctctatctcactatatggataagcagtaaataaacctttttgta

SEQ ID NO: 287633 - DNA, 1409 bp, Homo sapiens
atgtgtggtcatctgtttgactcagaggaccgcgggaaggcccagttattctgaacacgcattttcctaactacgggttggtaaagacttcttcagtgtacacaccctgcgagatgctatgggttatgtgccatccacgttttgttttgcgtattttccctgcttatttttcctacaatatctgaaattaatggttcacacaaattagagatttgaggggatgtatttcggggaagggatgaagggaccttctcagaggagtataacctggggtggggtgacgtcggggtcctctcagtcaggggcagcaggcaaggctgacctcggaggcaggggtagggtgcaggttgggggaagagcagcaaagagtaaattccacagcccacatcactcacaaaatcagagaaacagtgaactattcttctgctaggttttcctactactgtaatatttaacaaaagaggatcctactgtgaaaatatagctccagcatcaatggagtagatccgatacacttatatatgctcatggaatttgcttgttctctccccttgtgttgaattttatagcataataaataccgagcctcagcagctttcatgtgccttgcaggagacagtggcagcaggggcaaatgattcttcctggatggtgactttaacaaagacttcttctggggggcaccgatctccacctggccatgtcttcaagcccaaggagaagtcccaggatgggtctgagctaatcacggtgatcgcaatacaaatgactgcgctaagcatggcacagctggcctcaatcctggccaatgcaacgtgagaatcaattgctggtgggattctgggggagtttttctcactgttataaacagatgcaaagcagaaatacttctctttgctggacactgtcatgtctaatgtgacgcctggatcactgaagcccccagaggccacgggacacgctgaaaatggcccagtgggaaggcggaaagccttgggtcctgaaaaacacttctaagtcactgacggaccaaactgaaatcatcctttattttgttcttttcatgtcagaaaaaaagacccctaaattctttaagtgacttttttgttaagtttttgtttctagaagcccaaaatatcctaataataataattttaaataatccacctatttttggaaatagcttgttcatcattgagattatgaataatagatcagttctcacccctgccttccccaccatttaccagagttaacaactgtgaaaaattctctgtgtatttttaaaaatcctgtaaaatgcacacacaacacacacacacatttatgataatgcttgttcttaaccaaaaactgagatctaatctctatctcactatatggataagcagtaaataaacctttttgta

SEQ ID NO: 287634 - DNA, 2046 bp, Homo sapiens
actgcgaaggaaggaggcaacacgggcaagggctgcctgctgcccgctggagaccgcaccatggagccaggcggggcccgtctgcgtctgcagaggacagaagggctgggaggggagcgggagcgccaaccctgtggagatggaaacactgagacgcacagagccccggacttggtacaatggacccgacacatggaggctgtgaaggcacaattgctggagcaagcgcagggacaactgagggagctgctggatcgggccatgcgggaggctatacaatcctacccatcacaagacaaacctctgcccccacctcccccaggttccttgagcaggacccaggagccatccctggggaaacagaaagttttcatcatccgcaagtccctgcttgatgagctgatggaggtgcagcatttccgcaccatctaccacatgttcatcgctggcctgtgtgtcttcatcatcagcaccctggccatcgacttcattgatgagggcaggctgctgctggagtttgacctactgatcttcagcttcggacagctgccattggcgctggtgacctgggtgcccatgtttctgtccaccctgttggcgccgtaccaggccctacggctgtgggccaggggcacctggacgcaggcgacgggcctgggctgtgcgctgctagccgcccacgccgtggtgctctgcgcgctgccggtccacgtggccgtggagcatcagctcccgccggcctcccgttgtgtcctggtcttcgagcaggttaggttcctgatgaaaagctactccttcctgagagaggctgtgcctgggacccttcgtgccagacgaggtgaggggatccaggcccccagtttctccagctacctctacttcctcttctgcccaacactcatctacagggagacttaccctaggacgccctatgtcaggtggaattatgtggccaagaactttgcccaggccctgggatgtgtgctctatgcctgcttcatcctgggccgcctctgtgttcctgtctttgccaacatgagccgagagcccttcagcacccgtgccctggtgctctctatcctgcatgccacgttgccaggcatcttcatgctgctgctcatcttctttgccttcctccattgctggctcaacgcctttgccgagatgctacgatttggagacaggatgttctaccgggactggtggaactcaacgtccttctccaactactaccgcacttggaacgtggtggtccatgactggctgtacagctacgtgtatcaggatgggctgcggctccttggtgcccgggcccgaggggtagccatgctgggtgtgttcctggtctccgcagtggcccatgagtatatcttctgcttcgtcctggggttcttctatcccgtcatgctgatactcttccttgtcattggaggaatgttgaacttcatgatgcatgaccagcgcaccggcccggcatggaacgtgctgatgtggaccatgctgtttctaggccagggaatccaggtcagcctgtactgccaggagtggtacgcacggcggcactgccccttaccccaggcaactttctgggggctggtgacacctcgatcttggtcctgccatacctagaggtcgggacagacgacgctacctgcccagacaccaccaagttctctgcctgcaaaacctggggaccaggactccctgtctgcattcccaaatttggctctgagtcgaggcaacctgcacacaagaccccaccaaggaatgtgcaaggactgagatctgcagacttgtgggtaactgatcacagacctcagcatgggggtgaccagggtgactcttcaatccctatccccatgggctgggtacaggatatcctcctaccccatgactgtcttagggagacttggggtaccttatggatttgatgaatgtgggggaactcagaggaactggggccaccaaggttggaaaagggtttggttcttgactttgtattccttccaatacagcaataaactttgtctccctttttattcattc

SEQ ID NO: 287635 - DNA, 5867 bp, Homo sapiens
  misc_feature (460)..(460): n is a, c, g, or t
  misc_feature (556)..(556): n is a, c, g, or t
  misc_feature (997)..(997): n is a, c, g, or t
  misc_feature (1390)..(1390): n is a, c, g, or t
  misc_feature (3027)..(3027): n is a, c, g, or t
  misc_feature (3252)..(3252): n is a, c, g, or t
  misc_feature (4555)..(4555): n is a, c, g, or t
  misc_feature (5293)..(5293): n is a, c, g, or t
atcacaaaggcggtgagactgcattcacttacaggttcctatttagggccaagttgctctgcctttccaaatcagcatgggcctcaggccctggctcagccctccaggctcgacttacccggctgatgagctgctcgcccgtctcggaggcagtgatgagtttgcaaagggcttggagggcaggattgggcagacctaaaccaagaaaaaagggtagaagttattcagaagggcctctgcacccaaaagcctgccaccttcccaggggaaagaaccctaaatccttggcatcggtggcatttttcagaagctcagcacagctagacatgtgtgtctgtgtgtgccttggaaaaggacagcgtggtctcccaggaaggtgggtggaagtgggttgagtcctgaccctgccgcagtcctctaggcgtggccacactcccaggacccaggcagcaccaccccnagtcaagcacccagcttcaccctggggttggccgcacagcttcatcggggccacagctgctgatgacaatggcagtagtggccagtgtctgccggnacgacctcccatcatcccgggaaggggcagcgccagtggggcgcagatgcctgccatcacagatggaaacagcaggtaaatggcacttgtttcctccaggtgtggagatgcttgtatctgggaccccctgccatttctcaggacaccctcctgctcctagctgggagatccagcatcctcatgaatgcggggcccaaggccaccaactgttccacctgctgtcagccaggcctgttgccccagccctacacccacagctcacccagcagggactggagtgtgctgctgcactgctggagccggtcgcccgggtcggaggttgggaagaagacagccgctggcaggccactggttggggggtccagccggaagcccacagcggtgaggagggcctgccagccagggatgccgcccactttgttctccacactctgctgggangtgtacatggcattgcgctgcccattctggatgcgctgcagggatttctccacctgagggggaattggggtaaacactgggatgccggagctcaggcatcccagacaggaggaagtgtgtactcacaccagccaggaggaaacaagcctgcctgggaggacagacgatcagccctggctgtccctcaggagcggggggcctccaaggcacactgcccactgggtcaaggagtatccaggaggagttagaagcatgacccatctgcctggcaccagcacctggggctgccaggcagccacccctgcagctgtgttgacaggacctggcagagggactgacccacctttggaaaatgacaccagcaatatcaggatgtgtcaactggatttatgntaagaaaataggatttttggtgttcctctgtttcccaaagtttgagacactttcagacactctgctttgcggttgtggccgatgttacccatgggtgggacttttgctttgctctagatttttgtaacaccctggggagtttcaggggccaatgctgagagaagaccacaggctgacacatcatgaggtgcctaacttactgagaatcatgcctgctgtgatgagcccttggaaaccatcaggactggatggtaggggtcctgagaggattgggggaggaggccttgatatgacagagtggacagaggccgtggaacccaggacagccagcctgctccacaatcctcatccccacagaccttcatgtgtggctcctaaataagaggaaacccactcctgataagtcaggggctttgaaaagtgattttgtttaaatggtgcaaacaagcaagccaatcttggggagacagggctaaacttaagtcctttaagaagctctacatactgacaagattctagttcccttccaccttatatgctgcaaagtaaaaagtatcactgaatgagaaaatcagcataaagaagcccaataatgtctgcctgagtttcccctatgatgacttttggtactttttgggaaacattaagtatgaagttatttcaaaataattttttggtgcctctgcttggtgatgccttaaactctgggtaagagaaacaccaggtgcctgtcaggagatggccttttccaggtttctggttaagctacaaacagctaactggctgctgtcatcaaaataaaagctttctgaaggtggaggcatctgatacccagagtgctgctatcagccggcacggtgggccgctgggtggcaggagcgtcgagaaggccagctcgcttcctatctgggattcagaatcagctatggaaacttgagagacctagagaaaataacttctttcactttgaactgattctttgcttcataagaaaagtattatccagccacaaaaatggtcaaaattcagatctacaaaagcctgtcaggcagaaactgaccccacttaggccacgccaatgagcaagtcatcaaagcagccaagacaggtcctgtgggggccacccatgcacagggcccagcctcgggtcctaaccccgcctatgctttccgccaccataaagaggcccatctgggtaagacctgtcccgcctgctgtggggtattagggcagatggggtctgaggggtctgagggctctgagagcagctggcagctcaaggacatccggagttggaggatggagcaatgcaggcccttgtggtaaagacagtcctgcagccgcgcaggcagggatgctgcaagtggagtgccaggcgggtgcggagccctgtgggactgtggaggggtcagagggaagccaggattttggggtctctgagagtttggagaaggggaagaagattaaagcttgtttcaaaagtttctaatcaggtgggcagggccaagggtggctgtggggtgagacccatgactcagggtggcccactgttactctattgatttttgggcgtttttttccaaattgattattcttgctgaatgagacctgagtccttgactgtccccttaaagccncctgacttgttttcagttccactggcctgtcgggctgttttctactcaactccactcttgcttgtctgccctccctgcctggggcccagccagcagtcagctcaagggccagatgaattgggtggctgtgctctgcccactgggcatcgtgtggatggtgggtgaccagccccctcaggtgctcagccaggcctcaagccttgctgtgtacctcagagcagctcngtaccctgatgtcacagcaaagaaacttagacatgacacaaactgtggcttcccaaggcagcaaagaatggccaggggtcatgagggccgtgccccacttttggacagacctactctaaagtcacgctacctgcgtgcaaatcataaaatcaacacttttgaggagatcacagctatgccttcgtaacacagcccagtccgaccagatagacggtgcctcgtgacccgaaaacaagcccccggccccccaccatgtgtgtgagccttaccttggactgcacgctgagggagcggatggaagggacagcaaggaggccgaagcgctcgtagaggtactcattggaggagcttcccttcaggagggcgaaaggaatgaggtagagctccccctccagaaccaggatgagctgccggtgccggcccacggggccgctggagtgcatcaggccctatggagcaagcacggagaggctgacatgggtggcccagcaggcaggggtttcaggcaccaggacaaccctgagccctagcctggatgacacaagcacgagagacaaatggcttctctggaacatccagctccgaattttaacccagagactatgagagacagaggtcgtcacatccccctcacctcatcttcacgtcaccatcgctatcctccacacctacttactgagccaccaccaagcagttaccctgaagtccagtttccaagcccagagttctcccaggcaacccccaatggatcccgaatgtgtctttgggtggtgaattctgattggattgccgtttcggtcagcgggaccttctgcatatgccctggttgagtacaggtcgagctcttcagaaagcactcatagcaaatgttatgttgatcatgtcctaatctggagtttaagaaagatgcgctccttgcgtatcgccaaggttagaggatctgcaggtgacctccgcggggcaccggggagtttcctttttactggcagacacggcaggcctctcagggattcacagtatcacaggccagaggaatgaaaatctctgatcaccatgggggagggaaagaaaatgcctgggtccatgagctttcagactgattagacttgggatgaaatggactttactgtctacaataaggattccagaggcaaagggcttcagggtatccagataccccagaactgtgtatagggcttcacattttttcctgactgatatttttgatggaataaatttatcaaacagaactgtttaaggtagaggaaccctttctgtgatgctgctgggaaatcctgtcatnatgggtggatacatacagttttggcaaagatcacacacctcctggaaatcaccctcaaccataactgaagcccaccaagactgtagatactgtatttcagccagaaatggaaaagcgaacattcaacccattcaactgtatgctttggccaaacaaccgcccactggtttgcctgaagtacctaagaaggtattggagaaacgtgaccaatggccagcaagagccagaagggcctgcctgaaacccagggtccaacttcagccaaatcagcttgaagggactgttcaagctgcaggagcctctgtgcagtgggcagggttggaggggcggaggggagcctctctctctatcttggctgacctggtaaaaatgatccctccacccctagtggcagaagaccctgacctgcctggaacctgccagggtaaggctaagatgtctgcttgttgaacaccagctagaatagagccagcacgcagatgacactcatgtaacagcagccatccaggtgagaatgccacttaccacgtgagatcttgctggttatcctgggtgctgccaccactggttttagtcatacagacagtttgcaagtaattgcctccatttttcctcctcctaatcagttgtgaaaatgcttgttgtccttgggtgatgtctgtcctcatttgaatatcactacagatgtctcaatcagaaatcaattagacagcctggtggtggggctgccagtctcanaggcctcatcctctacctcatactggaatctaggtctgattgtttctaaggacaaaaattccctggctatacccaagcctcccaatctatttagaaaacaggcagccacgtggtcagtctcattcctgttgcatctgttctaggagaggccgacttatcctgctacctgattttgcaaggggtattttacaaaacacaagggagtcctttcccccagggcagtgattacagtcatgacccaaccaaggccaagccactctcatggccgagccctcggcagagctagacccctgctttcactcttagatgagaagtcttaggtgaaatccctgagctccagtgcttggaaagcagttcaacagcctaacagacataaacaagttttgaataagtttctaggattttaaacaggtgactccacacttcatgaatcacaagctgaggtgaatgagatgtacttttctttctgatcaaagtcatttgctcttgctacctgtcctagaaccttggtttttaaatttaaatacaggaaacagggaatttaaataaagggaaataaaagtaaggataacag

SEQ ID NO: 287636 - DNA, 2328 bp, Homo sapiens
  misc_feature (1016)..(1016): n is a, c, g, or t
  misc_feature (1754)..(1754): n is a, c, g, or t
ggacagcgctaacatccattcctcacaggcctatgaggccaaggtagctgcacagtgggtaaagcatctagccccatgcctggcactggtgtgcactccagacatattggtcaaatgcgaatttacaactgtcttcagtgcttggaataaagtgatactgcccctattatttatactattcttttctcctggcccataatcatttttccagtattactcattccctttctctctggcgtttacaaacattcatgtggctaaaagagacaaatggcttctctggaacatccagctccgaattttaacccagagactatgagagacagaggtcgtcacatccccctcacctcatcttcacgtcaccatcgctatcctccacacctacttactgagccaccaccaagcagttaccctgaagtccagtttccaagcccagagttctcccaggcaacccccaatggatcccgaatgtgtctttgggtggtgaattctgattggattgccgtttcggtcagcgggaccttctgcatatgccctggttgagtacaggtcgagctcttcagaaagcactcatagcaaatgttatgttgatcatgtcctaatctggagtttaagaaagatgcgctccttgcgtatcgccaaggttagaggatctgcaggtgacctccgcggggcaccggggagtttcctttttactggcagacacggcaggcctctcagggattcacagtatcacaggccagaggaatgaaaatctctgatcaccatgggggagggaaagaaaatgcctgggtccatgagctttcagactgattagacttgggatgaaatggactttactgtctacaataaggattccagaggcaaagggcttcagggtatccagataccccagaactgtgtatagggcttcacattttttcctgactgatatttttgatggaataaatttatcaaacagaactgtttaaggtagaggaaccctttctgtgatgctgctgggaaatcctgtcatnatgggtggatacatacagttttggcaaagatcacacacctcctggaaatcaccctcaaccataactgaagcccaccaagactgtagatactgtatttcagccagaaatggaaaagcgaacattcaacccattcaactgtatgctttggccaaacaaccgcccactggtttgcctgaagtacctaagaaggtattggagaaacgtgaccaatggccagcaagagccagaagggcctgcctgaaacccagggtccaacttcagccaaatcagcttgaagggactgttcaagctgcaggagcctctgtgcagtgggcagggttggaggggcggaggggagcctctctctctatcttggctgacctggtaaaaatgatccctccacccctagtggcagaagaccctgacctgcctggaacctgccagggtaaggctaagatgtctgcttgttgaacaccagctagaatagagccagcacgcagatgacactcatgtaacagcagccatccaggtgagaatgccacttaccacgtgagatcttgctggttatcctgggtgctgccaccactggttttagtcatacagacagtttgcaagtaattgcctccatttttcctcctcctaatcagttgtgaaaatgcttgttgtccttgggtgatgtctgtcctcatttgaatatcactacagatgtctcaatcagaaatcaattagacagcctggtggtggggctgccagtctcanaggcctcatcctctacctcatactggaatctaggtctgattgtttctaaggacaaaaattccctggctatacccaagcctcccaatctatttagaaaacaggcagccacgtggtcagtctcattcctgttgcatctgttctaggagaggccgacttatcctgctacctgattttgcaaggggtattttacaaaacacaagggagtcctttcccccagggcagtgattacagtcatgacccaaccaaggccaagccactctcatggccgagccctcggcagagctagacccctgctttcactcttagatgagaagtcttaggtgaaatccctgagctccagtgcttggaaagcagttcaacagcctaacagacataaacaagttttgaataagtttctaggattttaaacaggtgactccacacttcatgaatcacaagctgaggtgaatgagatgtacttttctttctgatcaaagtcatttgctcttgctacctgtcctagaaccttggtttttaaatttaaatacaggaaacagggaatttaaataaagggaaataaaagtaaggataacag

SEQ ID NO: 287637 - DNA, 494 bp, Homo sapiens
gcggacacagcctcattcctgttcattgcagaacaaggctaagggcgcgggcatcttaatgagagcagcaggcaacaatcctggaagctgggtccacacagactgcggtgaacaaagaggtggcgtggaagctgctgctgcagcccagagcctgccaagaaggtcccaggtccacagggcctgcgcaacactgggtgccaggggtggggctggcctgccccccaaccccatctgctgaggagtggctgacaagcggacacccaccagggtgccactcgcttgtgcctggggaagcaaatgtgctcgcttgacccgtctgatgtgctgccgtgggcacttgactgagagtggcagagcactaggctaacccaaagtgacacatgcctggcgggatgttcagtctctgtaaacccatatggtttttttttttctttcctttaaaaaaaatttctagctccatctagcgaaagcagaaataaaaagtattaggccaa

SEQ ID NO: 287638 - DNA, 4022 bp, Homo sapiens
  misc_feature (460)..(460): n is a, c, g, or t
  misc_feature (556)..(556): n is a, c, g, or t
  misc_feature (997)..(997): n is a, c, g, or t
  misc_feature (1390)..(1390): n is a, c, g, or t
  misc_feature (3027)..(3027): n is a, c, g, or t
  misc_feature (3252)..(3252): n is a, c, g, or t
atcacaaaggcggtgagactgcattcacttacaggttcctatttagggccaagttgctctgcctttccaaatcagcatgggcctcaggccctggctcagccctccaggctcgacttacccggctgatgagctgctcgcccgtctcggaggcagtgatgagtttgcaaagggcttggagggcaggattgggcagacctaaaccaagaaaaaagggtagaagttattcagaagggcctctgcacccaaaagcctgccaccttcccaggggaaagaaccctaaatccttggcatcggtggcatttttcagaagctcagcacagctagacatgtgtgtctgtgtgtgccttggaaaaggacagcgtggtctcccaggaaggtgggtggaagtgggttgagtcctgaccctgccgcagtcctctaggcgtggccacactcccaggacccaggcagcaccaccccnagtcaagcacccagcttcaccctggggttggccgcacagcttcatcggggccacagctgctgatgacaatggcagtagtggccagtgtctgccggnacgacctcccatcatcccgggaaggggcagcgccagtggggcgcagatgcctgccatcacagatggaaacagcaggtaaatggcacttgtttcctccaggtgtggagatgcttgtatctgggaccccctgccatttctcaggacaccctcctgctcctagctgggagatccagcatcctcatgaatgcggggcccaaggccaccaactgttccacctgctgtcagccaggcctgttgccccagccctacacccacagctcacccagcagggactggagtgtgctgctgcactgctggagccggtcgcccgggtcggaggttgggaagaagacagccgctggcaggccactggttggggggtccagccggaagcccacagcggtgaggagggcctgccagccagggatgccgcccactttgttctccacactctgctgggangtgtacatggcattgcgctgcccattctggatgcgctgcagggatttctccacctgagggggaattggggtaaacactgggatgccggagctcaggcatcccagacaggaggaagtgtgtactcacaccagccaggaggaaacaagcctgcctgggaggacagacgatcagccctggctgtccctcaggagcggggggcctccaaggcacactgcccactgggtcaaggagtatccaggaggagttagaagcatgacccatctgcctggcaccagcacctggggctgccaggcagccacccctgcagctgtgttgacaggacctggcagagggactgacccacctttggaaaatgacaccagcaatatcaggatgtgtcaactggatttatgntaagaaaataggatttttggtgttcctctgtttcccaaagtttgagacactttcagacactctgctttgcggttgtggccgatgttacccatgggtgggacttttgctttgctctagatttttgtaacaccctggggagtttcaggggccaatgctgagagaagaccacaggctgacacatcatgaggtgcctaacttactgagaatcatgcctgctgtgatgagcccttggaaaccatcaggactggatggtaggggtcctgagaggattgggggaggaggccttgatatgacagagtggacagaggccgtggaacccaggacagccagcctgctccacaatcctcatccccacagaccttcatgtgtggctcctaaataagaggaaacccactcctgataagtcaggggctttgaaaagtgattttgtttaaatggtgcaaacaagcaagccaatcttggggagacagggctaaacttaagtcctttaagaagctctacatactgacaagattctagttcccttccaccttatatgctgcaaagtaaaaagtatcactgaatgagaaaatcagcataaagaagcccaataatgtctgcctgagtttcccctatgatgacttttggtactttttgggaaacattaagtatgaagttatttcaaaataattttttggtgcctctgcttggtgatgccttaaactctgggtaagagaaacaccaggtgcctgtcaggagatggccttttccaggtttctggttaagctacaaacagctaactggctgctgtcatcaaaataaaagctttctgaaggtggaggcatctgatacccagagtgctgctatcagccggcacggtgggccgctgggtggcaggagcgtcgagaaggccagctcgcttcctatctgggattcagaatcagctatggaaacttgagagacctagagaaaataacttctttcactttgaactgattctttgcttcataagaaaagtattatccagccacaaaaatggtcaaaattcagatctacaaaagcctgtcaggcagaaactgaccccacttaggccacgccaatgagcaagtcatcaaagcagccaagacaggtcctgtgggggccacccatgcacagggcccagcctcgggtcctaaccccgcctatgctttccgccaccataaagaggcccatctgggtaagacctgtcccgcctgctgtggggtattagggcagatggggtctgaggggtctgagggctctgagagcagctggcagctcaaggacatccggagttggaggatggagcaatgcaggcccttgtggtaaagacagtcctgcagccgcgcaggcagggatgctgcaagtggagtgccaggcgggtgcggagccctgtgggactgtggaggggtcagagggaagccaggattttggggtctctgagagtttggagaaggggaagaagattaaagcttgtttcaaaagtttctaatcaggtgggcagggccaagggtggctgtggggtgagacccatgactcagggtggcccactgttactctattgatttttgggcgtttttttccaaattgattattcttgctgaatgagacctgagtccttgactgtccccttaaagccncctgacttgttttcagttccactggcctgtcgggctgttttctactcaactccactcttgcttgtctgccctccctgcctggggcccagccagcagtcagctcaagggccagatgaattgggtggctgtgctctgcccactgggcatcgtgtggatggtgggtgaccagccccctcaggtgctcagccaggcctcaagccttgctgtgtacctcagagcagctcngtaccctgatgtcacagcaaagaaacttagacatgacacaaactgtggcttcccaaggcagcaaagaatggccaggggtcatgagggccgtgccccacttttggacagacctactctaaagtcacgctacctgcgtgcaaatcataaaatcaacacttttgaggagatcacagctatgccttcgtaacacagcccagtccgaccagatagacggtgcctcgtgacccgaaaacaagcccccggccccccaccatgtgtgtgagccttaccttggactgcacgctgagggagcggatggaagggacagcaaggaggccgaagcgctcgtagaggtactcattggaggagcttcccttcaggagggcgaaaggaatgaggtagagctccccctccagaaccaggatgagctgccggtgccggcccacggggccgctggagtgcatcaggccctatggagcaagcacggagaggctgacatgggtggcccagcaggcaggggtttcaggcaccaggacaaccctgagccctagcctggatgacacaagcacgagtcgcttgtgcctggggaagcaaatgtgctcgcttgacccgtctgatgtgctgccgtgggcacttgactgagagtggcagagcactaggctaacccaaagtgacacatgcctggcgggatgttcagtctctgtaaacccatatggtttttttttttctttcctttaaaaaaaatttctagctccatctagcgaaagcagaaataaaaagtattaggccaa

SEQ ID NO: 287639 - DNA, 395 bp, Homo sapiens
taaacactgggatgccggagctcaggcatcccagacaggaggaagtgtgtactcacaccagccaggaggaaacaagcctgcctgggaggacagacgatcagccctggctgtccctcaggagcggggggcctccaaggcacactgcccactgggtcaaggagtatccaggaggagttagaaggtaggggctggggaacttgacccatggcccccacacccaccccagaagataataccaaggaaaaagaggaaacccttaagtgggcctgaggggcctcaaggccatgtaggggcagctgagaggcctggcctgggaggaggtgactaatgggtagagaaggcagttccatttccccaaaaaagcagtgtgtagtggcagcaaggacggagggact

SEQ ID NO: 287640 - DNA, 567 bp, Homo sapiens
tggctggccaagaaaaattggcatctggcatacctaggaatcattcaaaatagtttaataggaaggacattttgaggccagccagcattatgacatttgtgggtcctacggcatttcaccttggaaacattttcctgggcatctaaaagtattgtggacctgagacactgtgcttacagggcctactgggttgattctaaagaagaaagaaaatctatatgcatgaaaagatgtcttaaaaagttttgaactactcaaagttaagatttggggaaatagaaatagtatataacttaagaaaattgccactggctgtgaacccccatggcattttctttgcacttttttgcttctcgttagattgtatgtgtttttaccatttcacacaaacttttaaagattattccacgccgttagctctgtgcttctattagtgtctctatctctctttctctctctcttccatctgagtacaatggctagaaaataatacacacttgaatgaataaatgtcatttaaatattttaataaacagaaggaatagtacaatatatttcccttgacca

SEQ ID NO: 287641 - DNA, 535 bp, Homo sapiens
tggctggccaagaaaaattggcatctggcatacctaggaatcattcaaaatagtttaataggaaggacattttgaggccagccagcattatgacatttgtgggtcctacggcatttcaccttggaaacattttcctgggcatctaaaagtattgtggacctgagacactgtgcttacagggcctactggttttcactgtatgagaccgagaatggattatggcagttcctcttacctccgctgcatacttgactccatccacggtgtgctcagagccatgatcatccgaagagccccagtgaagatgaaactggcgaagtcggtagggtccagggagaggaccccctctcagcactgtgattcagataagcttggtcaacagtgaattcatgcttcttttacagagctctactttaaccaagtgctcttagagccaaggcttaatggacaaaatgtggtcagtttgctgggtggatggtgccactcccaggacactggactcctcacaaaatgaagtctggggatatgtcaagat

SEQ ID NO: 287642 - DNA, 4608 bp, Homo sapiens
aagacaacgtcactagcagtttctggagctacttgccaaggctgagtgtgagctgagcctgccccaccaccaagatgatcctgagcttgctgttcagccttgggggccccctgggctgggggctgctgggggcatgggcccaggcttccagtactagcctctctgatctgcagagctccaggacacctggggtctggaaggcagaggctgaggacaccagcaaggaccccgttggacgtaactggtgcccctacccaatgtccaagctggtcaccttactagctctttgcaaaacagagaaattcctcatccactcgcagcagccgtgtccgcagggagctccagactgccagaaagtcaaagtcatgtaccgcatggcccacaagccagtgtaccaggtcaagcagaaggtgctgacctctttggcctggaggtgctgccctggctacacgggccccaactgcgagcaccacgattccatggcaatccctgagcctgcagatcctggtgacagccaccaggaacctcaggatggaccagtcagcttcaaacctggccaccttgctgcagtgatcaatgaggttgaggtgcaacaggaacagcaggaacatctgctgggagatctccagaatgatgtgcaccgggtggcagacagcctgccaggcctgtggaaagccctgcctggtaacctcacagctgcagtgatggaagcaaatcaaacagggcacgagttccctgatagatccttggagcaggtgctgctaccccacgtggacaccttcctacaagtgcatttcagccccatctggaggagctttaaccaaagcctgcacagccttacccaggccataagaaacctgtctcttgacgtggaggccaaccgccaggccatctccagagtccaggacagtgccgtggccagggctgacttccaggagcttggtgccaaatttgaggccaaggtccaggagaacactcagagagtgggtcagctgcgacaggacgtggaggaccgcctgcacgcccagcactttaccctgcaccgctcgatctcagagctccaagccgatgtggacaccaaattgaagaggctgcacaaggctcaggaggccccagggaccaatggcagtctggtgttggcaacgcctggggctggggcaaggcctgagccggacagcctgcaggccaggctgggccagctgcagaggaacctctcagagctgcacatgaccacggcccgcagggaggaggagttgcagtacaccctggaggacatgagggccaccctgacccggcacgtggatgagatcaaggaactgtactccgaatcggacgagactttcgatcagattagcaaggtggagcggcaggtggaggagctgcaggtgaaccacacggcgctccgtgagctgcgcgtgatcctgatggagaagtctctgatcatggaggagaacaaggaggaggtggagcggcagctcctggagctcaacctcacgctgcagcacctgcagggtggccatgccgacctcatcaagtacgtgaaggactgcaattgccagaagctctatttagacctggacgtcatccgggagggccagagggacgccacgcgtgccctggaggagacccaggtgagcctggacgagcggcggcagctggacggctcctccctgcaggccctgcagaacgccgtggacgccgtgtcgctggccgtggacgcgcacaaagcggagggcgagcgggcgcgggcggccacgtcgcggctccggagccaagtgcaggcgctggatgacgaggtgggcgcgctgaaggcggccgcggccgaggcccgccacgaggtgcgccagctgcacagcgccttcgccgccctgctggaggacgcgctgcggcacgaggcggtgctggccgcgctcttcggggaggaggtgctggaggagatgtctgagcagacgccgggaccgctgcccctgagctacgagcagatccgcgtggccctgcaggacgccgctagcgggctgcaggagcaggcgctcggctgggacgagctggccgcccgagtgacggccctggagcaggcctcggagcccccgcggccggcagagcacctggagcccagccacgacgcgggccgcgaggaggccgccaccaccgccctggccgggctggcgcgggagctccagagcctgagcaacgacgtcaagaatgtcgggcggtgctgcgaggccgaggccggggccggggccgcctccctcaacgcctcccttgacggcctccacaacgcactcttcgccactcagcgcagcttggagcagcaccagcggctcttccacagcctctttgggaacttccaagggctcatggaagccaacgtcagcctggacctggggaagctgcagaccatgctgagcaggaaagggaagaagcagcagaaagacctggaagctccccggaagagggacaagaaggaagcggagcctttggtggacatacgggtcacagggcctgtgccaggtgccttgggcgcggcgctctgggaggcaggatcccctgtggccttctatgccagcttttcagaagggacggctgccctgcagacagtgaagttcaacaccacatacatcaacattggcagcagctacttccctgaacatggctacttccgagcccctgagcgtggtgtctacctgtttgcagtgagcgttgaatttggcccagggccaggcaccgggcagctggtgtttggaggtcaccatcggactccagtctgtaccactgggcaggggagtggaagcacagcaacggtctttgccatggctgagctgcagaagggtgagcgagtatggtttgagttaacccagggatcaataacaaagagaagcctgtcgggcactgcatttgggggcttcctgatgtttaagacctgaaccccagccccaatctgatcagacatcatggactcgcccagctctcctcggcctggggctctggccaaggatgggctggaggtcattcagttggtctgtctcttccctggaaaccttctgcaaagatggtgtggtgtacgtggcttccctgtaaccacatggggcttggccatttctccatgatgagaaggactggaatgcttctccgggcaggacatggtcctaggaagcctgaaccttggcttggcatgccttctcagacagcacggcctgggctccaactcttcaccacaccctgtattctacaacttctttggtgttttgctcctcctgtggttggaaacttctgtacaacactttaaacttttctcttgcttcctcttctcttctcccttatcgtatgatagaaagacattcttccccaggaggaatgtttaaaatggaggcaacattttggccaacattggaaagcactagagggcaatgggattaaaccaacctgcttggtctctattagtcagtaatgaagacgacagcctggccaaccaagggaaaggaaattagtatctttagtttcagtcattccttgtaggatatggtttagctgtgcccccacctaaaatatcatcttgaattgtaatccctataatccccacatcaagggagagatcaggtggaggtaattggatcttgggggcggttcccccatgctgttcttgtgatagttctcacgagatctgatgattttataagtttgatagttcctcctgtgttcattctccttcctgccaccttgtgaagatgccttggttcctcttcactgtctgccatgattgtaagtttcctgaggcctccccagccatgtggaacagtgagtcaattaaacctctttcctttataaattatccagtcttgggcaattcttgatagcagtgtgaaaatggactaatacacttgtgtttatctgtaatttaaatttcatgtctttttctccttgccttacatagggtaaagaccaagaaatgccaaacgtgaactaaaatatgtagggccttcaacttttttacttcctccagtatcttaggaccatcgtaattcttgttagcatctctaaccaggaggcagctgagggaggagggaaagaagactgtaaaaatccccctcactaatgatcaactttggaataaagtgatgcccttcaaatctctgcctcatttacttctggagggcaaaaataattggtagagtaggtaaaaaaaacatgggacaacgtgaaactatgtgggtaaatgtgactgattattccaggccctgttatgtagaatgatttccgtttattctatataaaacacttggaagtttccacactaggcaaagatactaatactggactagacagtacagctcatagctgcaattattcctgtaatataccagcatatggttttcaaaaaagttcagatcctatagcaaactggcctgagaaaacagtcatctagctatcagaaacaaggttttttttggtattaagtactcaaaatttgttgaatatagtcttctctataagaaaatcagattgctgaggcaggagaatcggttgaacccgggaggcggaggttgcagtgagctgagatggtgacactgcaccccagcctgggagacagagcgagactctgtctcaaaa

SEQ ID NO: 287643 - DNA, 834 bp, Homo sapiens
  misc_feature (795)..(795): n is a, c, g, or t
cccagatcccatcctccggaaagggttagtcaggcaagtgtgctgagaggcccctgggaacctcgtctcgattaacccatcagaaagcagcccatcctttgcacccagctctcagatggaaaagtgaagcccagaaggaagggacctgacacggaggcttccttggtagcatttcagtctcaagggaagaactgtgggcctcccctggagcactggtgaagtaaggggttggtttggatattgtctcctgactgggatatgggcaggactgacagggagctggagtcctaacgaagcctgggctaggtgcaggaagaaccaacccagtggtctcctgacatctcccacgcccccaccgcagctgggtcacctccagaatacggaggagagagctggaggtggaggaactaaggaccttctttgccaggtggggacttaaagcatacagtgaagttgttctctgaagttcctcatctgccttaagtctggacccaccaaagaagaaaacaatgaccactggtcccttcccggagttttctctgactgaactgctgtcacaggaagaaagactgaagcctgctcacatacctggacagattttgcaaaccgttgtctgctctgtgagcccaacagactttgtcccaggccactgtatgttcttcaagcccactgaattcccctgaaaatcatttactagccccctgaaattacccacacttccccattgctcatctgtaccccatttcgtggtggggcagtcactctgatttccccttgcatgctaatgaatgtgtntccatttctatctgtcagacgattcacggacttaaggag

SEQ ID NO: 287644 - DNA, 579 bp, Homo sapiens
  misc_feature (540)..(540): n is a, c, g, or t
gcagtgaggtcggtctcacccaaacgcatgtggcagggacttggatcctcgaatctgcctaggtgcctgtaaaccctagggctctggcatcatcggagcccccagccccaaacagctgcaggggcactgctgactggctctctgcctgtagccagagacccagtggatgcagccggagagggcctgcatacagtgaagttgttctctgaagttcctcatctgccttaagtctggacccaccaaagaagaaaacaatgaccactggtcccttcccggagttttctctgactgaactgctgtcacaggaagaaagactgaagcctgctcacatacctggacagattttgcaaaccgttgtctgctctgtgagcccaacagactttgtcccaggccactgtatgttcttcaagcccactgaattcccctgaaaatcatttactagccccctgaaattacccacacttccccattgctcatctgtaccccatttcgtggtggggcagtcactctgatttccccttgcatgctaatgaatgtgtntccatttctatctgtcagacgattcacggacttaaggag

SEQ ID NO: 287645 - DNA, 827 bp, Homo sapiens
  misc_feature (788)..(788): n is a, c, g, or t
cccagatcccatcctccggaaagggttagtcaggcaagtgtgctgagaggcccctgggaacctcgtctcgattaacccatcagaaagcagcccatcctttgcacccagctctcagatggaaaagtgaagcccagaaggaagggacctgacacggaggcttccttggtagcatttcagtctcaagggaagaactgtgggcctcccctggagcactggtgaactgggtcacctccagaatacggaggagagagctggaggtggaggaactaaggaccttctttgccaggtggggacttaaagtttcagttactcattgttggggctcagaaaccaataccccgaaatatagtggtgtgacattctgaactgaagaagccttaaggtctctccgaccagactcccacaggccccccaaccctttgtctcttccaaagcatacagtgaagttgttctctgaagttcctcatctgccttaagtctggacccaccaaagaagaaaacaatgaccactggtcccttcccggagttttctctgactgaactgctgtcacaggaagaaagactgaagcctgctcacatacctggacagattttgcaaaccgttgtctgctctgtgagcccaacagactttgtcccaggccactgtatgttcttcaagcccactgaattcccctgaaaatcatttactagccccctgaaattacccacacttccccattgctcatctgtaccccatttcgtggtggggcagtcactctgatttccccttgcatgctaatgaatgtgtntccatttctatctgtcagacgattcacggacttaaggag

SEQ ID NO: 287646 - DNA, 657 bp, Homo sapiens
  misc_feature (577)..(577): n is a, c, g, or t
  misc_feature (606)..(606): n is a, c, g, or t
  misc_feature (609)..(609): n is a, c, g, or t
aagacaacgtcactagcagtttctggagctacttgccaaggctgagtgtgagctgagcctgccccaccaccaagatgatcctgagcttgctgttcagccttgggggccccctgggctgggggctgctgggggcatgggcccaggcttccagtactagcctctctgatctgcagagctccaggacacctggggtctggaaggcagaggctgaggacaccagcaaggaccccgttggacgtaactggtgcccctacccaatgtccaagctggtcaccttactagctctttgcaaaacagagaaattcctcatccactcgcagcagccgtgtccgcagggagctccagactgccagaaagtcaaagtcatgtaccgcatggcccacaagccagtgtaccaggtcaagcagaaggtgctgacctctttggcctggaggtgctgccctggctacacgggccccaactgcgagcaccacgattccatggcaatccctgagcctgcagatcctggtgacagccaccaggaacctcaggatggaccagtcagcttcaaacctgggccacctttgctgcagtgatnaaattgaagggttgaagggtgcaaacaanggnaacaagcaagggaaacaatcctggctggggaagaattctccaaagaaa

SEQ ID NO: 287647 - DNA, 4682 bp, Homo sapiens
cccagatcccatcctccggaaagggttagtcaggcaagtgtgctgagaggcccctgggaacctcgtctcgattaacccatcagaaagcagcccatcctttgcacccagctctcagatggaaaagtgaagcccagaaggaagggacctgacacggaggcttccttggtagcatttcagtctcaagggaagaactgtgggcctcccctggagcactggtgaagtaaggggttggtttggatattgtctcctgactgggatatgggcaggactgacagggagctggagtcctaacgaagcctgggctaggtgcaggaagaaccaacccagtggtctcctgacatctcccacgcccccaccgcagctgggtcacctccagaatacggaggagagagctggaggtggaggaactaaggaccttctttgccaggtggggacttaaaggtaccgcatggcccacaagccagtgtaccaggtcaagcagaaggtgctgacctctttggcctggaggtgctgccctggctacacgggccccaactgcgagcaccacgattccatggcaatccctgagcctgcagatcctggtgacagccaccaggaacctcaggatggaccagtcagcttcaaacctggccaccttgctgcagtgatcaatgaggttgaggtgcaacaggaacagcaggaacatctgctgggagatctccagaatgatgtgcaccgggtggcagacagcctgccaggcctgtggaaagccctgcctggtaacctcacagctgcagtgatggaagcaaatcaaacagggcacgagttccctgatagatccttggagcaggtgctgctaccccacgtggacaccttcctacaagtgcatttcagccccatctggaggagctttaaccaaagcctgcacagccttacccaggccataagaaacctgtctcttgacgtggaggccaaccgccaggccatctccagagtccaggacagtgccgtggccagggctgacttccaggagcttggtgccaaatttgaggccaaggtccaggagaacactcagagagtgggtcagctgcgacaggacgtggaggaccgcctgcacgcccagcactttaccctgcaccgctcgatctcagagctccaagccgatgtggacaccaaattgaagaggctgcacaaggctcaggaggccccagggaccaatggcagtctggtgttggcaacgcctggggctggggcaaggcctgagccggacagcctgcaggccaggctgggccagctgcagaggaacctctcagagctgcacatgaccacggcccgcagggaggaggagttgcagtacaccctggaggacatgagggccaccctgacccggcacgtggatgagatcaaggaactgtactccgaatcggacgagactttcgatcagattagcaaggtggagcggcaggtggaggagctgcaggtgaaccacacggcgctccgtgagctgcgcgtgatcctgatggagaagtctctgatcatggaggagaacaaggaggaggtggagcggcagctcctggagctcaacctcacgctgcagcacctgcagggtggccatgccgacctcatcaagtacgtgaaggactgcaattgccagaagctctatttagacctggacgtcatccgggagggccagagggacgccacgcgtgccctggaggagacccaggtgagcctggacgagcggcggcagctggacggctcctccctgcaggccctgcagaacgccgtggacgccgtgtcgctggccgtggacgcgcacaaagcggagggcgagcgggcgcgggcggccacgtcgcggctccggagccaagtgcaggcgctggatgacgaggtgggcgcgctgaaggcggccgcggccgaggcccgccacgaggtgcgccagctgcacagcgccttcgccgccctgctggaggacgcgctgcggcacgaggcggtgctggccgcgctcttcggggaggaggtgctggaggagatgtctgagcagacgccgggaccgctgcccctgagctacgagcagatccgcgtggccctgcaggacgccgctagcgggctgcaggagcaggcgctcggctgggacgagctggccgcccgagtgacggccctggagcaggcctcggagcccccgcggccggcagagcacctggagcccagccacgacgcgggccgcgaggaggccgccaccaccgccctggccgggctggcgcgggagctccagagcctgagcaacgacgtcaagaatgtcgggcggtgctgcgaggccgaggccggggccggggccgcctccctcaacgcctcccttgacggcctccacaacgcactcttcgccactcagcgcagcttggagcagcaccagcggctcttccacagcctctttgggaacttccaagggctcatggaagccaacgtcagcctggacctggggaagctgcagaccatgctgagcaggaaagggaagaagcagcagaaagacctggaagctccccggaagagggacaagaaggaagcggagcctttggtggacatacgggtcacagggcctgtgccaggtgccttgggcgcggcgctctgggaggcaggatcccctgtggccttctatgccagcttttcagaagggacggctgccctgcagacagtgaagttcaacaccacatacatcaacattggcagcagctacttccctgaacatggctacttccgagcccctgagcgtggtgtctacctgtttgcagtgagcgttgaatttggcccagggccaggcaccgggcagctggtgtttggaggtcaccatcggactccagtctgtaccactgggcaggggagtggaagcacagcaacggtctttgccatggctgagctgcagaagggtgagcgagtatggtttgagttaacccagggatcaataacaaagagaagcctgtcgggcactgcatttgggggcttcctgatgtttaagacctgaaccccagccccaatctgatcagacatcatggactcgcccagctctcctcggcctggggctctggccaaggatgggctggaggtcattcagttggtctgtctcttccctggaaaccttctgcaaagatggtgtggtgtacgtggcttccctgtaaccacatggggcttggccatttctccatgatgagaaggactggaatgcttctccgggcaggacatggtcctaggaagcctgaaccttggcttggcatgccttctcagacagcacggcctgggctccaactcttcaccacaccctgtattctacaacttctttggtgttttgctcctcctgtggttggaaacttctgtacaacactttaaacttttctcttgcttcctcttctcttctcccttatcgtatgatagaaagacattcttccccaggaggaatgtttaaaatggaggcaacattttggccaacattggaaagcactagagggcaatgggattaaaccaacctgcttggtctctattagtcagtaatgaagacgacagcctggccaaccaagggaaaggaaattagtatctttagtttcagtcattccttgtaggatatggtttagctgtgcccccacctaaaatatcatcttgaattgtaatccctataatccccacatcaagggagagatcaggtggaggtaattggatcttgggggcggttcccccatgctgttcttgtgatagttctcacgagatctgatgattttataagtttgatagttcctcctgtgttcattctccttcctgccaccttgtgaagatgccttggttcctcttcactgtctgccatgattgtaagtttcctgaggcctccccagccatgtggaacagtgagtcaattaaacctctttcctttataaattatccagtcttgggcaattcttgatagcagtgtgaaaatggactaatacacttgtgtttatctgtaatttaaatttcatgtctttttctccttgccttacatagggtaaagaccaagaaatgccaaacgtgaactaaaatatgtagggccttcaacttttttacttcctccagtatcttaggaccatcgtaattcttgttagcatctctaaccaggaggcagctgagggaggagggaaagaagactgtaaaaatccccctcactaatgatcaactttggaataaagtgatgcccttcaaatctctgcctcatttacttctggagggcaaaaataattggtagagtaggtaaaaaaaacatgggacaacgtgaaactatgtgggtaaatgtgactgattattccaggccctgttatgtagaatgatttccgtttattctatataaaacacttggaagtttccacactaggcaaagatactaatactggactagacagtacagctcatagctgcaattattcctgtaatataccagcatatggttttcaaaaaagttcagatcctatagcaaactggcctgagaaaacagtcatctagctatcagaaacaaggttttttttggtattaagtactcaaaatttgttgaatatagtcttctctataagaaaatcagattgctgaggcaggagaatcggttgaacccgggaggcggaggttgcagtgagctgagatggtgacactgcaccccagcctgggagacagagcgagactctgtctcaaaa

SEQ ID NO: 287648 - DNA, 4811 bp, Homo sapiens
cccagatcccatcctccggaaagggttagtcaggcaagtgtgctgagaggcccctgggaacctcgtctcgattaacccatcagaaagcagcccatcctttgcacccagctctcagatggaaaagtgaagcccagaaggaagggacctgacacggaggcttccttggtagcatttcagtctcaagggaagaactgtgggcctcccctggagcactggtgaagtaaggggttggtttggatattgtctcctgactgggatatgggcaggactgacagggagctggagtcctaacgaagcctgggctaggtgcaggaagaaccaacccagtggtctcctgacatctcccacgcccccaccgcagctgggtcacctccagaatacggaggagagagctggaggtggaggaactaaggaccttctttgccaggtggggacttaaagtaactggtgcccctacccaatgtccaagctggtcaccttactagctctttgcaaaacagagaaattcctcatccactcgcagcagccgtgtccgcagggagctccagactgccagaaagtcaaagtcatgtaccgcatggcccacaagccagtgtaccaggtcaagcagaaggtgctgacctctttggcctggaggtgctgccctggctacacgggccccaactgcgagcaccacgattccatggcaatccctgagcctgcagatcctggtgacagccaccaggaacctcaggatggaccagtcagcttcaaacctggccaccttgctgcagtgatcaatgaggttgaggtgcaacaggaacagcaggaacatctgctgggagatctccagaatgatgtgcaccgggtggcagacagcctgccaggcctgtggaaagccctgcctggtaacctcacagctgcagtgatggaagcaaatcaaacagggcacgagttccctgatagatccttggagcaggtgctgctaccccacgtggacaccttcctacaagtgcatttcagccccatctggaggagctttaaccaaagcctgcacagccttacccaggccataagaaacctgtctcttgacgtggaggccaaccgccaggccatctccagagtccaggacagtgccgtggccagggctgacttccaggagcttggtgccaaatttgaggccaaggtccaggagaacactcagagagtgggtcagctgcgacaggacgtggaggaccgcctgcacgcccagcactttaccctgcaccgctcgatctcagagctccaagccgatgtggacaccaaattgaagaggctgcacaaggctcaggaggccccagggaccaatggcagtctggtgttggcaacgcctggggctggggcaaggcctgagccggacagcctgcaggccaggctgggccagctgcagaggaacctctcagagctgcacatgaccacggcccgcagggaggaggagttgcagtacaccctggaggacatgagggccaccctgacccggcacgtggatgagatcaaggaactgtactccgaatcggacgagactttcgatcagattagcaaggtggagcggcaggtggaggagctgcaggtgaaccacacggcgctccgtgagctgcgcgtgatcctgatggagaagtctctgatcatggaggagaacaaggaggaggtggagcggcagctcctggagctcaacctcacgctgcagcacctgcagggtggccatgccgacctcatcaagtacgtgaaggactgcaattgccagaagctctatttagacctggacgtcatccgggagggccagagggacgccacgcgtgccctggaggagacccaggtgagcctggacgagcggcggcagctggacggctcctccctgcaggccctgcagaacgccgtggacgccgtgtcgctggccgtggacgcgcacaaagcggagggcgagcgggcgcgggcggccacgtcgcggctccggagccaagtgcaggcgctggatgacgaggtgggcgcgctgaaggcggccgcggccgaggcccgccacgaggtgcgccagctgcacagcgccttcgccgccctgctggaggacgcgctgcggcacgaggcggtgctggccgcgctcttcggggaggaggtgctggaggagatgtctgagcagacgccgggaccgctgcccctgagctacgagcagatccgcgtggccctgcaggacgccgctagcgggctgcaggagcaggcgctcggctgggacgagctggccgcccgagtgacggccctggagcaggcctcggagcccccgcggccggcagagcacctggagcccagccacgacgcgggccgcgaggaggccgccaccaccgccctggccgggctggcgcgggagctccagagcctgagcaacgacgtcaagaatgtcgggcggtgctgcgaggccgaggccggggccggggccgcctccctcaacgcctcccttgacggcctccacaacgcactcttcgccactcagcgcagcttggagcagcaccagcggctcttccacagcctctttgggaacttccaagggctcatggaagccaacgtcagcctggacctggggaagctgcagaccatgctgagcaggaaagggaagaagcagcagaaagacctggaagctccccggaagagggacaagaaggaagcggagcctttggtggacatacgggtcacagggcctgtgccaggtgccttgggcgcggcgctctgggaggcaggatcccctgtggccttctatgccagcttttcagaagggacggctgccctgcagacagtgaagttcaacaccacatacatcaacattggcagcagctacttccctgaacatggctacttccgagcccctgagcgtggtgtctacctgtttgcagtgagcgttgaatttggcccagggccaggcaccgggcagctggtgtttggaggtcaccatcggactccagtctgtaccactgggcaggggagtggaagcacagcaacggtctttgccatggctgagctgcagaagggtgagcgagtatggtttgagttaacccagggatcaataacaaagagaagcctgtcgggcactgcatttgggggcttcctgatgtttaagacctgaaccccagccccaatctgatcagacatcatggactcgcccagctctcctcggcctggggctctggccaaggatgggctggaggtcattcagttggtctgtctcttccctggaaaccttctgcaaagatggtgtggtgtacgtggcttccctgtaaccacatggggcttggccatttctccatgatgagaaggactggaatgcttctccgggcaggacatggtcctaggaagcctgaaccttggcttggcatgccttctcagacagcacggcctgggctccaactcttcaccacaccctgtattctacaacttctttggtgttttgctcctcctgtggttggaaacttctgtacaacactttaaacttttctcttgcttcctcttctcttctcccttatcgtatgatagaaagacattcttccccaggaggaatgtttaaaatggaggcaacattttggccaacattggaaagcactagagggcaatgggattaaaccaacctgcttggtctctattagtcagtaatgaagacgacagcctggccaaccaagggaaaggaaattagtatctttagtttcagtcattccttgtaggatatggtttagctgtgcccccacctaaaatatcatcttgaattgtaatccctataatccccacatcaagggagagatcaggtggaggtaattggatcttgggggcggttcccccatgctgttcttgtgatagttctcacgagatctgatgattttataagtttgatagttcctcctgtgttcattctccttcctgccaccttgtgaagatgccttggttcctcttcactgtctgccatgattgtaagtttcctgaggcctccccagccatgtggaacagtgagtcaattaaacctctttcctttataaattatccagtcttgggcaattcttgatagcagtgtgaaaatggactaatacacttgtgtttatctgtaatttaaatttcatgtctttttctccttgccttacatagggtaaagaccaagaaatgccaaacgtgaactaaaatatgtagggccttcaacttttttacttcctccagtatcttaggaccatcgtaattcttgttagcatctctaaccaggaggcagctgagggaggagggaaagaagactgtaaaaatccccctcactaatgatcaactttggaataaagtgatgcccttcaaatctctgcctcatttacttctggagggcaaaaataattggtagagtaggtaaaaaaaacatgggacaacgtgaaactatgtgggtaaatgtgactgattattccaggccctgttatgtagaatgatttccgtttattctatataaaacacttggaagtttccacactaggcaaagatactaatactggactagacagtacagctcatagctgcaattattcctgtaatataccagcatatggttttcaaaaaagttcagatcctatagcaaactggcctgagaaaacagtcatctagctatcagaaacaaggttttttttggtattaagtactcaaaatttgttgaatatagtcttctctataagaaaatcagattgctgaggcaggagaatcggttgaacccgggaggcggaggttgcagtgagctgagatggtgacactgcaccccagcctgggagacagagcgagactctgtctcaaaa

SEQ ID NO: 287649 - DNA, 3975 bp, Homo sapiens
gcttctaagctcctgctcagaggacatcagcagctaacttccctgctctcagccttcaactctccttctctgaaccttgtgatcttcccaggcctgagttccctgatagatccttggagcaggtgctgctaccccacgtggacaccttcctacaagtgcatttcagccccatctggaggagctttaaccaaagcctgcacagccttacccaggccataagaaacctgtctcttgacgtggaggccaaccgccaggccatctccagagtccaggacagtgccgtggccagggctgacttccaggagcttggtgccaaatttgaggccaaggtccaggagaacactcagagagtgggtcagctgcgacaggacgtggaggaccgcctgcacgcccagcactttaccctgcaccgctcgatctcagagctccaagccgatgtggacaccaaattgaagaggctgcacaaggctcaggaggccccagggaccaatggcagtctggtgttggcaacgcctggggctggggcaaggcctgagccggacagcctgcaggccaggctgggccagctgcagaggaacctctcagagctgcacatgaccacggcccgcagggaggaggagttgcagtacaccctggaggacatgagggccaccctgacccggcacgtggatgagatcaaggaactgtactccgaatcggacgagactttcgatcagattagcaaggtggagcggcaggtggaggagctgcaggtgaaccacacggcgctccgtgagctgcgcgtgatcctgatggagaagtctctgatcatggaggagaacaaggaggaggtggagcggcagctcctggagctcaacctcacgctgcagcacctgcagggtggccatgccgacctcatcaagtacgtgaaggactgcaattgccagaagctctatttagacctggacgtcatccgggagggccagagggacgccacgcgtgccctggaggagacccaggtgagcctggacgagcggcggcagctggacggctcctccctgcaggccctgcagaacgccgtggacgccgtgtcgctggccgtggacgcgcacaaagcggagggcgagcgggcgcgggcggccacgtcgcggctccggagccaagtgcaggcgctggatgacgaggtgggcgcgctgaaggcggccgcggccgaggcccgccacgaggtgcgccagctgcacagcgccttcgccgccctgctggaggacgcgctgcggcacgaggcggtgctggccgcgctcttcggggaggaggtgctggaggagatgtctgagcagacgccgggaccgctgcccctgagctacgagcagatccgcgtggccctgcaggacgccgctagcgggctgcaggagcaggcgctcggctgggacgagctggccgcccgagtgacggccctggagcaggcctcggagcccccgcggccggcagagcacctggagcccagccacgacgcgggccgcgaggaggccgccaccaccgccctggccgggctggcgcgggagctccagagcctgagcaacgacgtcaagaatgtcgggcggtgctgcgaggccgaggccggggccggggccgcctccctcaacgcctcccttgacggcctccacaacgcactcttcgccactcagcgcagcttggagcagcaccagcggctcttccacagcctctttgggaacttccaagggctcatggaagccaacgtcagcctggacctggggaagctgcagaccatgctgagcaggaaagggaagaagcagcagaaagacctggaagctccccggaagagggacaagaaggaagcggagcctttggtggacatacgggtcacagggcctgtgccaggtgccttgggcgcggcgctctgggaggcaggatcccctgtggccttctatgccagcttttcagaagggacggctgccctgcagacagtgaagttcaacaccacatacatcaacattggcagcagctacttccctgaacatggctacttccgagcccctgagcgtggtgtctacctgtttgcagtgagcgttgaatttggcccagggccaggcaccgggcagctggtgtttggaggtcaccatcggactccagtctgtaccactgggcaggggagtggaagcacagcaacggtctttgccatggctgagctgcagaagggtgagcgagtatggtttgagttaacccagggatcaataacaaagagaagcctgtcgggcactgcatttgggggcttcctgatgtttaagacctgaaccccagccccaatctgatcagacatcatggactcgcccagctctcctcggcctggggctctggccaaggatgggctggaggtcattcagttggtctgtctcttccctggaaaccttctgcaaagatggtgtggtgtacgtggcttccctgtaaccacatggggcttggccatttctccatgatgagaaggactggaatgcttctccgggcaggacatggtcctaggaagcctgaaccttggcttggcatgccttctcagacagcacggcctgggctccaactcttcaccacaccctgtattctacaacttctttggtgttttgctcctcctgtggttggaaacttctgtacaacactttaaacttttctcttgcttcctcttctcttctcccttatcgtatgatagaaagacattcttccccaggaggaatgtttaaaatggaggcaacattttggccaacattggaaagcactagagggcaatgggattaaaccaacctgcttggtctctattagtcagtaatgaagacgacagcctggccaaccaagggaaaggaaattagtatctttagtttcagtcattccttgtaggatatggtttagctgtgcccccacctaaaatatcatcttgaattgtaatccctataatccccacatcaagggagagatcaggtggaggtaattggatcttgggggcggttcccccatgctgttcttgtgatagttctcacgagatctgatgattttataagtttgatagttcctcctgtgttcattctccttcctgccaccttgtgaagatgccttggttcctcttcactgtctgccatgattgtaagtttcctgaggcctccccagccatgtggaacagtgagtcaattaaacctctttcctttataaattatccagtcttgggcaattcttgatagcagtgtgaaaatggactaatacacttgtgtttatctgtaatttaaatttcatgtctttttctccttgccttacatagggtaaagaccaagaaatgccaaacgtgaactaaaatatgtagggccttcaacttttttacttcctccagtatcttaggaccatcgtaattcttgttagcatctctaaccaggaggcagctgagggaggagggaaagaagactgtaaaaatccccctcactaatgatcaactttggaataaagtgatgcccttcaaatctctgcctcatttacttctggagggcaaaaataattggtagagtaggtaaaaaaaacatgggacaacgtgaaactatgtgggtaaatgtgactgattattccaggccctgttatgtagaatgatttccgtttattctatataaaacacttggaagtttccacactaggcaaagatactaatactggactagacagtacagctcatagctgcaattattcctgtaatataccagcatatggttttcaaaaaagttcagatcctatagcaaactggcctgagaaaacagtcatctagctatcagaaacaaggttttttttggtattaagtactcaaaatttgttgaatatagtcttctctataagaaaatcagattgctgaggcaggagaatcggttgaacccgggaggcggaggttgcagtgagctgagatggtgacactgcaccccagcctgggagacagagcgagactctgtctcaaaa

SEQ ID NO: 287650 - DNA, 2368 bp, Homo sapiens
aagacaacgtcactagcagtttctggagctacttgccaaggctgagtgtgagctgagcctgccccaccaccaagatgatcctgagcttgctgttcagccttgggggccccctgggctgggggctgctgggggcatgggcccaggcttccagtactagcctctctgatctgcagagctccaggacacctggggtctggaaggcagaggctgaggacaccagcaaggaccccgttggacgtaactggtgcccctacccaatgtccaagctggtcaccttactagctctttgcaaaacagagaaattcctcatccactcgcagcagccgtgtccgcagggagctccagactgccagaaagtcaaagtcatgtaccgcatggcccacaagccagtgtaccaggtcaagcagaaggtgctgacctctttggcctggaggtgctgccctggctacacgggccccaactgcgagcaccacgattccatggcaatccctgagcctgcagatcctggtgacagccaccaggaacctcaggatggaccagtcagcttcaaacctggccaccttgctgcagtgatcaatgaggttgaggtgcaacaggaacagcaggaacatctgctgggagatctccagaatgatgtgcaccgggtggcagacagcctgccaggcctgtggaaagccctgcctggtaacctcacagctgcagtgatggaagcaaatcaaacagggcacgagttccctgatagatccttggagcaggtgctgctaccccacgtggacaccttcctacaagtgcatttcagccccatctggaggagctttaaccaaagcctgcacagccttacccaggccataagaaacctgtctcttgacgtggaggccaaccgccaggccatctccagagtccaggacagtgccgtggccagggctgacttccaggagcttggtgccaaatttgaggccaaggtccaggagaacactcagagagtgggtcagctgcgacaggacgtggaggaccgcctgcacgcccagcactttaccctgcaccgctcgatctcagagctccaagccgatgtggacaccaaattgaagaggctgcacaaggctcaggaggccccagggaccaatggcagtctggtgttggcaacgcctggggctggggcaaggcctgagccggacagcctgcaggccaggctgggccagctgcagaggaacctctcagagctgcacatgaccacggcccgcagggaggaggagttgcagtacaccctggaggacatgagggccaccctgacccggcacgtggatgagatcaaggaactgtactccgaatcggacgagactttcgatcagattagcaaggtggagcggcaggtggaggagctgcaggtgaaccacacggcgctccgtgagctgcgcgtgatcctgatgattttataagtttgatagttcctcctgtgttcattctccttcctgccaccttgtgaagatgccttggttcctcttcactgtctgccatgattgtaagtttcctgaggcctccccagccatgtggaacagtgagtcaattaaacctctttcctttataaattatccagtcttgggcaattcttgatagcagtgtgaaaatggactaatacacttgtgtttatctgtaatttaaatttcatgtctttttctccttgccttacatagggtaaagaccaagaaatgccaaacgtgaactaaaatatgtagggccttcaacttttttacttcctccagtatcttaggaccatcgtaattcttgttagcatctctaaccaggaggcagctgagggaggagggaaagaagactgtaaaaatccccctcactaatgatcaactttggaataaagtgatgcccttcaaatctctgcctcatttacttctggagggcaaaaataattggtagagtaggtaaaaaaaacatgggacaacgtgaaactatgtgggtaaatgtgactgattattccaggccctgttatgtagaatgatttccgtttattctatataaaacacttggaagtttccacactaggcaaagatactaatactggactagacagtacagctcatagctgcaattattcctgtaatataccagcatatggttttcaaaaaagttcagatcctatagcaaactggcctgagaaaacagtcatctagctatcagaaacaaggttttttttggtattaagtactcaaaatttgttgaatatagtcttctctataagaaaatcagattgctgaggcaggagaatcggttgaacccgggaggcggaggttgcagtgagctgagatggtgacactgcaccccagcctgggagacagagcgagactctgtctcaaaa

SEQ ID NO: 287651 - DNA, 644 bp, Homo sapiens
cccaggctggagtgtggtggcaagatcagagctcactgcagcctccaactttctggctcaagtgatcctcccacctcagcaccccaagcagctgggaccacaggtgtggactaacacacctggctgtttttttttatttttagtagagatgaggtcttactatgttgcctaggctgatttcgaattcctgggcttaagcgatcctccctccttggcctctcaaagtgctgggattacaggcatggtggcgggcgcctgtagtcccagctactcgggaggctgaggcaggagaatggcatgaacccgggaggcggagcttgcaatgagccgagatcgcgccactgcactccagcctgggcgacagagcaagtctctaaaatggacaggaggcatccctgtgatattaggggtaatatcacggcacatcagaaactatccaccaattagtacccggagaatctagtcctgcagggcaagaggatgacagcagacgacacctggggtccagctgaggagaaagccaggacccgccccctcgagaccctgcccttcaaaacaccacttccagaccttgccctcaagatgacgatcaccctctggcccggcctccaggcagcctcctcattcttgccccgcccagattc

SEQ ID NO: 287652 - DNA, 690 bp, Homo sapiens
cggatgcgtgactctacctgctcaaaaaaggcgctttgcattaaaaccattttcaacttaagaggaaaaacgattcagcgttcagtacaggtggcccaacacaatatgttgttttaccttcgattgtttgaaatattaacttaggggccgggcgcggtggctcgcgcctgtaatcccagcactttgggaggccgaggcgggcggatcacgaggtcaggagatcgagaccatcctggctaacacagtgaaaccccgtctctactgaaaatacaaaaaattagccaggcatggtggcgggcgcctgtagtcccagctactcgggaggctgaggcaggagaatggcatgaacccgggaggcggagcttgcaatgagccgagatcgcgccactgcactccagcctgggcgacagagcaagtctctaaaatggacaggaggcatccctgtgatattaggggtaatatcacggcacatcagaaactatccaccaattagtacccggagaatctagtcctgcagggcaagaggatgacagcagacgacacctggggtccagctgaggagaaagccaggacccgccccctcgagaccctgcccttcaaaacaccacttccagaccttgccctcaagatgacgatcaccctctggcccggcctccaggcagcctcctcattcttgccccgcccagattc

SEQ ID NO: 287653 - DNA, 689 bp, Homo sapiens
gtgtgtgttctggaagggtggggaagggaggttaaaaatcaaagctgagctccagtgagtagggatggggttcgccttgctgccctgtgaaaggagaagggacagattgagtcagagttcctcagaaatgttgtgccctaaacccccaagacagaaacatctgtctactgcagctaacacattttggtaaagcattaacattccactgggatgggatagcctccatagaatcacctctaccagtgactgtcttcacaattcttcaacatcaatagatgactaaaattaactaaattcatgtcaatatgcccttgagggtctcaaaaagagtatatcccaaatgttcatcttgataatgagcagtttgggcaaagaaaatacagaaaaaccgggccaacaaatagagatgaaatagtgagcaaatgtcaaatactgagattataaaacctaagcagattcatgggttttaaacttaaaaaagtccgtggagtttttgctatgagtaatagactgaaggtgaatggcctaccatgaagatctatactagagatgactcatctattctcaaaaccagtgagtgatcaaaccacaagacctaataggttctactgttaggggaaaagatgttttaaataaggagcacattattccactcactgacaaaacgaaaatacagatggaattaaaaa

SEQ ID NO: 287654 - DNA, 1207 bp, Homo sapiens
  misc_feature (355)..(355): n is a, c, g, or t
tatatctagaaatcaacttttagcctattcttactgacctagagaataataagctctttaaatgacacccttaatgaaaactgtcacataattttcctctaaagtcagcgatattttttaacaatcatattctttatagaattcctaaatctgggtttttgaaaaaagaaactagtgaccatttaaaattgttggctctattcccactgcttctagtggactagcctgaaaaaaatatttttccatgtctgcgtatattttataccttatataatgtcctctctgaaatcatggaggaatttaagaaggagaaaattgataatcatacttacttagtttctttgggaatatttgncatttagacacaacatcagtagcagaagcaagacacaacccaagcataggggagggaagtgttggtgggctgactggcagtttgagtgcaagtggaagccacatggatcgaataggagccatccgagacaacctgagtgaaacggccagcaccatggcactagctggagccagtataacggggagtctgtcaggaagtgccatggtaaactgttttaacaggtgtgtgttttggtttggtttggttctgctttctggtaactacaaattattaattaggtgagaattttgaacataaagcatgatgattatatataaccctactatgtcaaggttcaaaatagtaatgttaaaaatgaaatttggggccaggtgcagtggctcacgcctgtaatcccagcatgttgggaagccaaagcaggtggattgcctgagctcaggagttcgagaccagcctgggcaacatggcgaaaccccatctctactaaaaaaatataaaaaattagccggatttggtggcatgcacctgtagtcccagctggtcgggaggctgaggtaggaggatcacttgagcctgggagttggaggctgcagtcagccaagatcacaccactgagctccaacctgagtgacagtgagaccctgtctcaaaaaaaaaaatgtccttgtcacattttatattataaatcgttgctacagctgcttcagtagacattgaagcaaaggcagtacttaagcctagatcttacctctgtgggtaacaacagccagatattaggagatgggactttggctgagtcctgggaaacaggtggagtcaggacatccaggaatgtgtgaactgggaccggga

SEQ ID NO: 287655 - DNA, 1090 bp, Homo sapiens
gggtgaggagcagagcacctggacagacctgcacaggaaggagcctgcagcctgcggggtggggtcacttactgggctcctattggctggatgcagtgggattaggggtcagggttctcactccttctgactctggggtctgagaaaacacagcaacgaggtgaatgacatgggagacagacctggggtctttcagggacggaaagcctcagccaagacccagactcccagggtcatcaacctcctcgggtcactaaccctccccagtgtctgtctacccctaagtccagagaacacgtcctctctaggctcgagccggaatcaatataggctacaagggcatcagttcaggctgcgcggaggagagaaggaagtgctgatgtggaggtaagagggtggccctgtcagaacctccggattcgaatcccggctctgccactcccagtgtgaccttgccccagttagttactacatttggcctcaattttctatctgcagggggactaaacgcgggggaataggggatccccaaaatttttgacagctctccagtaagaggagggtagcagagcatggctgtttccctccacaatttaaaaacaaacacaaagattggtgccgtcgcttctctcctctactcagtctccgtgtaggtcccacgagtggagaaagggagaggagagcggtcccacaatcttctcccgttctcccccgacggcccgcgaaggcaagcgccatcgggaagggatgggtaggacagaggagaccggccgggcccagcacccggaacccgtccctacgagtccctacgcagcccgtccgcgtggagactgacacccttgcgtggccggtgccaagcgccccggaccttgcacacaacctcgcgcgcaccccaaacacgccctgcagctcttggagcctcagcctttgtgcgcagcaaccgagcgcccgctccgtgctggccctttcccccgagcctccagctccaggggacgcggatcaatcacaccgcccgccggcccggctggcgccttccaggccctacggcccctcgcctgcccctccccctacctgctgccgccgcggccgc

SEQ ID NO: 287656 - DNA, 698 bp, Homo sapiens
gggtgaggagcagagcacctggacagacctgcacaggaaggagcctgcagcctgcggggtggggtcacttactgggctcctattggctggatgcagtgggattaggggtcagggttctcactccttctgactctggggtctgagaaaacacagcaacgaggtgaatgacatgggagacagacctggggtctttcagggacggaaagcctcagccaagacccagactcccagggtcatcaacctcctcgggtcactaaccctccccagtgtctgtctacccctaagtccagagaacacgtcctctctaggctcgagccggaatcaatataggctacaagggcatcagttcaggctgcgcggaggagagaaggaagtgctgatgtggaggatccgtgaggttcatctatctgtagtgcttctggccagagaaaaggccgaagagagaaaaccctgaggaacatctttgacctgcatagaaacttatctgaagattttcagaatctgagcctcaccctcagtctatcccagttttatcctgacctgtccacatctgttatactccaaggcttgctgggcccaacactggaagctatttaatgtttctattgcgactggccttttaaagccagtgggattctccatgctacacttgagcctggagactagaaaacatgacagcctgttttcattaatccgtt

SEQ ID NO: 287657 - DNA, 986 bp, Homo sapiens
  misc_feature (821)..(821): n is a, c, g, or t
  misc_feature (823)..(823): n is a, c, g, or t
  misc_feature (832)..(833): n is a, c, g, or t
  misc_feature (836)..(837): n is a, c, g, or t
  misc_feature (843)..(843): n is a, c, g, or t
  misc_feature (845)..(845): n is a, c, g, or t
  misc_feature (849)..(849): n is a, c, g, or t
  misc_feature (851)..(851): n is a, c, g, or t
  misc_feature (854)..(854): n is a, c, g, or t
  misc_feature (857)..(858): n is a, c, g, or t
aaattacggctagtagaggctgggtgttgaatcggccgaggcctacatgaagccagagatgtgggggaagtgcctggactgcatcaatgagctgatggatatcctgtttgcaaatcccaacatttttgttggagagaatattctggaagagagtgagaacctgcacaacgctgaccagccactgcgtgtccgtggctgcatcctaactctggtggaacgaatggatgaagaatttaccaaaataatgcaaaatactgaccctcactcccaagagtacgtggagcacttgaaggatgaggcccaggtgtgtgccatcatcgagcgtgtgcagcgctacctggaggagaagggcactaccgaggaggtctgccgcatctacctgctgcgcatcctgcacacctactacaagtttgattacaaggcccatcagcgacagctgaccccgcctgagggctcctcaaagtctgagcaagaccaggcagaaaatgagggcgaggactcggctgtgttgatggagagactgtgcaagtacatctacgccaaggaccgcacagaccggatccgcacatgtgccatcctctgccacatctaccaccatgctctgcactcgcgctggtaccaggcccgcgacctcatgctcatgagccacttgcaggacaacattcagcatgcagacccgccagtgcagatcctttacaaccgcaccatggtgcagctgggcatctgtgccttccgccaaggctgaccaaggacgcacacaacgccctgctggacatccagtcgagtggcgagccaggagcttctgggccagggctgtgtgngnactgagganngannggagcngnaagngnggngcnnaggccttcactgcataacggatgagggtgtaacggttgccagctgaatccatggcatgaaatcggtaaaaataccaaggggggaccggggcccatgacgtccgcaagggcaaacacaggcgggcgacc

SEQ ID NO: 287658 - DNA, 471 bp, Homo sapiens
tcgctcgcccacgcgcagctggtggtggaactgcttgctgatcatgcgtcggcgggcatcgctctcatgggcggccatgtaggggatctccaggagcatggcagacaccaggtagacacactccagcagctccaggttgatgtgcaggtggaaggggacctgacggcgccgctccaccttctcctgctcctggttgcgctcctgcaggctgcgcagcagcaggccctggcccagaagctccttggctcggccactcgactggatgtccagcagggcgttgtgtgcgtccttggtcaggccttggcggaaggcacagatgcccagctgcaccatggtgcggttgtaaaggattctgcactcgcgctggtaccaggcccgcgacctcatgctcatgagccacttgcaggacaacattcagcatgcagacccgccagtgcagatcctctgagtcgaccgatccttgagtcgacg

SEQ ID NO: 287659 - DNA, 1043 bp, Homo sapiens
aaaatgtttgccaagggaactgagatcacccatgctgttgttatcaagaaactgaatgagatcctacaggcacgaggcaagaagggaactgatcgtgctgcccagattgagctgctgcaactgctggttcagattgcagcggaaaacaacctgggagagggcgtcattgtcaagatcaagttcaatatcatcgcctctctctatgactacaaccccaacctggcaacctacatgaagccagagatgtgggggaagtgcctggactgcatcaatgagctgatggatatcctgtttgcaaatcccaacatttttgttggagagaatattctggaagagagtgagaacctgcacaacgctgaccagccactgcgtgtccgtggctgcatcctaactctggtggaacgaatggatgaagaatttaccaaaataatgcaaaatactgaccctcactcccaagagtacgtggagcacttgaaggatgaggcccaggtgtgtgccatcatcgagcgtgtgcagcgctacctggaggagaagggcactaccgaggaggtctgccgcatctacctgctgcgcatcctgcacacctactacaagtttgattacaaggcccatcagcgacagctgaccccgcctgagggctcctcaaagtctgagcaagaccaggcagaaaatgagggcgaggactcggctgtgttgatggagagactgtgcaagtacatctacgccaaggaccgcacagaccggatccgcacatgtgccatcctctgccacatctaccaccatgctctgcactcgcgctggtaccaggcccgcgacctcatgctcatgagccacttgcaggacaacattcagcatgcagacccgccagtgcagatcctttacaaccgcaccatggtgcagctgggcatctgtgccttccgccaaggctgaccaaggacgcacacaacgccctgctggacatccagtcgagtggcgagccaggagcttctgggccagggctggtgtggcccgggggcaccggacggagaggggggggacagacc

SEQ ID NO: 287660 - DNA, 1291 bp, Homo sapiens
aaaatgtttgccaagggaactgagatcacccatgctgttgttatcaagaaactgaatgagatcctacaggcacgaggcaagaagggaactgatcgtgctgcccagattgagctgctgcaactgctggttcagattgcagcggaaaacaacctgggagagggcgtcattgtcaagatcaagttcaatatcatcgcctctctctatgactacaaccccaacctggcaacctacatgaagccagagatgtgggggaagtgcctggactgcatcaatgagctgatggatatcctgtttgcaaatcccaacatttttgttggagagaatattctggaagagagtgagaacctgcacaacgctgaccagccactgcgtgtccgtggctgcatcctaactctggtggaacgaatggatgaagaatttaccaaaataatgcaaaatactgaccctcactcccaagagtacgtggagcacttgaaggatgaggcccaggtgtgtgccatcatcgagcgtgtgcagcgctacctggaggagaagggcactaccgaggaggtctgccgcatctacctgctgcgcatcctgcacacctactacaagtttgattacaaggcccatcagcgacagctgaccccgcctgagggctcctcaaagtctgagcaagaccaggcagaaaatgagggcgaggactcggctgtgttgatggagagactgtgcaagtacatctacgccaaggaccgcacagaccggatccgcacatgtgccatcctctgccacatctaccaccatgctctgcactcgcgctggtaccaggcccgcgacctcatgctcatgagccacttgcaggacaacattcagcatgcagacccgccagtgcagatcctttacaaccgcaccatggtgcagctgggcatctgtgccttccgccaaggctgaccaaggacgcacacaacgccctgctggacatccagtcgagtggcgagccaggagcttctgggccagggcctgctgctgcgcagcctgcaggagcgcaaccaggagcaggagaaggtggagcggcgccgtcaggtccccttccacctgcacatcaacctggagctgctggagtgtgtctacctggtgtctgccatgctcctggagatcccctacatggccgccatgagagcgatgcccgccgacgcatgatcagcaagcagttccaccaccagctgcgcgtgggcgagcgacagccctggtggtccccctgagtcatgcgggactgtggtcgctgctcccaggctagtggtgactggacccg

SEQ ID NO: 287661 - DNA, 1171 bp, Homo sapiens
  misc_feature (1006)..(1006): n is a, c, g, or t
  misc_feature (1008)..(1008): n is a, c, g, or t
  misc_feature (1017)..(1018): n is a, c, g, or t
  misc_feature (1021)..(1022): n is a, c, g, or t
  misc_feature (1028)..(1028): n is a, c, g, or t
  misc_feature (1030)..(1030): n is a, c, g, or t
  misc_feature (1034)..(1034): n is a, c, g, or t
  misc_feature (1036)..(1036): n is a, c, g, or t
  misc_feature (1039)..(1039): n is a, c, g, or t
  misc_feature (1042)..(1043): n is a, c, g, or t
aaaatgtttgccaagggaactgagatcacccatgctgttgttatcaagaaactgaatgagatcctacaggcacgaggcaagaagggaactgatcgtgctgcccagattgagctgctgcaactgctggttcagattgcagcggaaaacaacctgggagagggcgtcattgtcaagatcaagttcaatatcatcgcctctctctatgactacaaccccaacctggcaacctacatgaagccagagatgtgggggaagtgcctggactgcatcaatgagctgatggatatcctgtttgcaaatcccaacatttttgttggagagaatattctggaagagagtgagaacctgcacaacgctgaccagccactgcgtgtccgtggctgcatcctaactctggtggaacgaatggatgaagaatttaccaaaataatgcaaaatactgaccctcactcccaagagtacgtggagcacttgaaggatgaggcccaggtgtgtgccatcatcgagcgtgtgcagcgctacctggaggagaagggcactaccgaggaggtctgccgcatctacctgctgcgcatcctgcacacctactacaagtttgattacaaggcccatcagcgacagctgaccccgcctgagggctcctcaaagtctgagcaagaccaggcagaaaatgagggcgaggactcggctgtgttgatggagagactgtgcaagtacatctacgccaaggaccgcacagaccggatccgcacatgtgccatcctctgccacatctaccaccatgctctgcactcgcgctggtaccaggcccgcgacctcatgctcatgagccacttgcaggacaacattcagcatgcagacccgccagtgcagatcctttacaaccgcaccatggtgcagctgggcatctgtgccttccgccaaggctgaccaaggacgcacacaacgccctgctggacatccagtcgagtggcgagccaggagcttctgggccagggctgtgtgngnactgagganngannggagcngnaagngnggngcnnaggccttcactgcataacggatgagggtgtaacggttgccagctgaatccatggcatgaaatcggtaaaaataccaaggggggaccggggcccatgacgtccgcaagggcaaacacaggcgggcgacc

SEQ ID NO: 287662 - DNA, 1037 bp, Homo sapiens
cgaagatgatgaagactgggacacaggttccacatcttccgattccgactcagaggaggaagaagggaaacaaaccgcgctggcctcaagatttcttaaaaaggcacccaccacagatgaggacaagaaggcagccgagaagaaacgggagagggcgtcattgtcaagatcaagttcaatatcatcgcctctctctatgactacaaccccaacctggcaacctacatgaagccagagatgtgggggaagtgcctggactgcatcaatgagctgatggatatcctgtttgcaaatcccaacatttttgttggagagaatattctggaagagagtgagaacctgcacaacgctgaccagccactgcgtgtccgtggctgcatcctaactctggtggaacgaatggatgaagaatttaccaaaataatgcaaaatactgaccctcactcccaagagtacgtggagcacttgaaggatgaggcccaggtgtgtgccatcatcgagcgtgtgcagcgctacctggaggagaagggcactaccgaggaggtctgccgcatctacctgctgcgcatcctgcacacctactacaagtttgattacaaggcccatcagcgacagctgaccccgcctgagggctcctcaaagtctgagcaagaccaggcagaaaatgagggcgaggactcggctgtgttgatggagagactgtgcaagtacatctacgccaaggaccgcacagaccggatccgcacatgtgccatcctctgccacatctaccaccatgctctgcactcgcgctggtaccaggcccgcgacctcatgctcatgagccacttgcaggacaacattcagcatgcagacccgccagtgcagatcctttacaaccgcaccatggtgcagctgggcatctgtgccttccgccaaggctgaccaaggacgcacacaacgccctgctggacatccagtcgagtggcgagccaggagcttctgggccagggctggtgtggcccgggggcaccggacggagaggggggggacagacc

SEQ ID NO: 287663 - DNA, 858 bp, Homo sapiens
aaattacggctagtagaggctgggtgttgaatcggccgaggcctacatgaagccagagatgtgggggaagtgcctggactgcatcaatgagctgatggatatcctgtttgcaaatcccaacatttttgttggagagaatattctggaagagagtgagaacctgcacaacgctgaccagccactgcgtgtccgtggctgcatcctaactctggtggaacgaatggatgaagaatttaccaaaataatgcaaaatactgaccctcactcccaagagtacgtggagcacttgaaggatgaggcccaggtgtgtgccatcatcgagcgtgtgcagcgctacctggaggagaagggcactaccgaggaggtctgccgcatctacctgctgcgcatcctgcacacctactacaagtttgattacaaggcccatcagcgacagctgaccccgcctgagggctcctcaaagtctgagcaagaccaggcagaaaatgagggcgaggactcggctgtgttgatggagagactgtgcaagtacatctacgccaaggaccgcacagaccggatccgcacatgtgccatcctctgccacatctaccaccatgctctgcactcgcgctggtaccaggcccgcgacctcatgctcatgagccacttgcaggacaacattcagcatgcagacccgccagtgcagatcctttacaaccgcaccatggtgcagctgggcatctgtgccttccgccaaggctgaccaaggacgcacacaacgccctgctggacatccagtcgagtggcgagccaggagcttctgggccagggctggtgtggcccgggggcaccggacggagaggggggggacagacc

SEQ ID NO: 287664 - DNA, 814 bp, Homo sapiens
cgtcctgagggctcagcgccagcgcctgctggtagtccgcctcggcaaaggccaggttgcccagctggaagaagcaatctagggtccggaggcgggggtgagtggacccccaactcccagtgcccgggagccccagcccagccggctccagcccgggggccagggcctgaaactggtggctgataaccccccgccgcagtctccgtcctctctagttttctgggcgtctgggcactgttccccagctgcctgttttgagcattttaaggagtctggagccagtttgtctaaggcaacatttcccaaaggccttcccagctcccacttccggctactgacaccccaagctttgatgtctccagctcaggcctggtcccaagtctcaggccttgggggtcctacagtcccttgggtaaccttcaggaccctcactccagcaggccacactgagcacctcacctgacttctgccccaggttctcccattttggtgaggtcaccttccccaccagctacccaagccagagacctctgtccaagcagccgccgagccttacaaggatctttcacatgcctggttcttggcatggcggccagggccttccctgagtcggactgctgcccctgcctctcccggccttcaccctttcctgcgaacccagcctcggtctctctgcctggccctctgcctttgcgttagtcttctcccaagcccgcacctcgtccgaatctgtcatgaggccccttccaggaggaccccgaggcctctgccaactacctcgcggccctggccctgacgttgctaggcaccatca

SEQ ID NO: 287665 - DNA, 477 bp, Homo sapiens
agcagaaggggcaccttgcaaccctcgacctggagcgcctcacgctaaacctggcgacccccacctggacggcctcccaccaaaccctcgcatcccccacaggccttagtttcccatttgtcctagaggcgcagaaccaaacaccctttccaggtgcctttctagtcttggtacctgcccctcggccagggagtgaccgctctctgcgtcgcggccgttagggacgacccccaggcggcagccatcttcctccacaagctccgcccctcgcgtctcccccgtttctcacccggggcctcgggaggcggagagaacgaacaggaggccgggacttcacggaggccccgcccccccaacatgcctattgggtagtgcgggaggagaaggtgtctgattggctaggaatgctccagacggcagcggcggggacgcacccaggaagccggagaggtttgtcttgtgaccgcgggcggccgc

SEQ ID NO: 287666 - DNA, 1450 bp, Homo sapiens
cgtcctggtgatggtgcctagcaacgtcagggccagggccgcgaggtagttggcagaggcctcggggtcctcctggaaggggcctcatgacagattcggacgaggatgccctgaaggttgaccagggcccctcacgggacatcccaaagccatgggtgattccagcccccaaagggatcctgcagcacatctttgggaccagccacgtgttccaaagcatctgtgatgtaaaaccaaaggtcacagggttaacagtgcccctcaaagtcagggaatactactccagaggccagcagtgcttggagcaggcagactgggagacagctgtgctgctcttctcccgcgcactccacctggacccacagctggtggacttctatgccttacgggctgaggcctacctccagctctgtgacttctcctcggccgcccagaacctgcgaagggcctactcattacagcaggacaactgcaagcacctggagcgcctcacctttgtgctctacctacagggacaatgcctttttgagcagtgtgccttcctggatgccctgaatgtcttctcacatgctgctgagctccagcctgagaaaccatgcttccgttaccgatgcatggcctgtctcctggccctcaagcagcatcaggcctgcctcacgctcatcaccaacgagctgaagcaggacaccaccaacgccgatgtctacatcttccgggccagactctacaactttctccagaagccccacctctgctaccgggacctgcacagcgccttgctgttgaatcccaagcacccgcaggccaggatgctgctccagaagatggtggcccaggcccagcaggcgcgccaagatgcggggatcctggctgtgcagggcaagctgcagcacgcactgcagcggatcaaccgtgccatcgagaacaaccctctggaccccagtctcttcctcttccggggcaccatgtaccgacggctccaggagttcgatggggcagtggaggacttcctgaaggtgctggacatggtgaccgaggaccaggaggacatggtgcggcaggcacagcgccagctgttgctgacctacaacgactttgccgtgcactgctacaggcagggcgcctaccaggagggcgtgctgctgctgaacaaggccctccgggacgagcagcaggagaaaggactctacatcaaccgaggcggtgcgcagcgaccagggcactggggagggggggtgcgggggagcctcgccatctctaaggcccccactgggcacttgaggcccctggggggaaggaggaagggagagaggaaggaagcaagggaagaggaaatgtaatagtctcagtatcccaggaacacactttgggaaatgttgccttagacaaactggctccagactccttaaaatgctcaaaacaggcagctggggaacagtgcccagacgcc

SEQ ID NO: 287667 - DNA, 5160 bp, Homo sapiens
cccagcccaagtttttagggtggggatccagactggttatacgtaccttcagtccttctcccagaggaaggcagaaacacctcaaagcctgcatgtaagaacatctactgagaaattattttaatcagacaccagctgagtgggagaaaggaaaagaacagagaagaacaaacaaaactcccttggtcttggatgtaagagaatccagcagagatggactggagtttcttcagagtagttgcagtgctgttcatttttctggtggtggtagaagttaacagtgaattccgaatccaggtaagagattataacactaaaaatggcaccatcaaatggcattcaatccgaaggcagaaacgtgaatggatcaagttcgcagcagcctgtcgtgaaggtgaagacaactcaaagaggaacccaatcgccaaaattcactcagattgtgctgcaaaccagcaagttacataccgcatctctggagtaggaattgatcagccaccatatgggatctttgtcattaatcagaaaactggtgaaattaatataacatccatagttgatcgagaggtcactcctttcttcattatctactgccgagctctgaactcaatgggccaagatttagagaggcctctagagctcagagtcagggttttggatataaatgacaaccctccagtgttttcaatggctacatttgcaggacaaatagaagaaaattctaatgcaaatacactggtgatgatactcaatgctactgacgcagatgaaccgaacaatttgaactcaaaaatagccttcaagattataagacaagaaccttcagattcaccaatgtttattatcaacagaaatactggagaaattcgaacgatgaataattttctagacagagagcaatacggccagtatgctcttgctgtaagaggctctgaccgagatggtggggcagatggcatgtcagcggaatgtgagtgcaacattaaaatcctcgatgtcaatgataatatcccttacatggaacagtcttcatataccatagaaattcaagaaaatactctaaattcaaatttgctcgagattagagtaattgatttggatgaagagttctcagctaactggatggcagtaattttctttatctctggaaatgaaggaaattggtttgagatagaaatgaatgaaagaacaaatgtgggaattttaaaggttgttaagcccttagattatgaagctatgcagagtctgcaactcagtattggtgtcagaaataaagctgaatttcatcattcaattatgtctcaatataaactgaaagcatctgcaatttctgtgactgtgttaaatgtaattgaaggcccagtgtttcgtccaggttcaaagacatatgttgtaactggtaatatgggatcaaatgataaagtgggagactttgtagctactgacctggacacaggtagaccttcaacgactgttaggtatgtaatgggaaataatccagctgacctgctagctgttgattcaagaacaggcaaactcactttgaaaaataaagttaccaaggaacagtacaatatgctcggaggaaaataccaaggaacgattctctctatagatgataatcttcaaagaacttgcactggtacaattaatattaacattcaaagttttggtaatgacgacaggactaatacagagccgaacactaaaattactaccaatactggcagacaagaaagtacttcttccactaactatgataccagcacaacttctactgactctagccaagtatattcttctgaacccggaaacggagccaaagatttgttatcagacaatgtacattttggtcctgctggcattggactcctcatcatgggattcttggtcttaggattggtcccatttttgatgatctgttgtgattgtggaggtgctcctcgtagtgcagctggctttgagcctgttcccgaatgttcagatggagcaattcattcatgggcagtagaaggaccacagcctgaacccagggatataaccactgtcataccacaaataccacctgataacgcaaatataattgaatgcattgacaactcaggagtttatacaaatgagtatggtggcagagaaatgcaagatctgggaggaggagagagaatgacaggatttgaactaacagagggagttaaaacttcaggaatgcctgagatatgtcaagaatactctggaacattaagaagaaattctatgagggaatgtagagaaggaggtctgaatatgaatttcatggaaagctacttctgtcagaaagcatatgcttacgcagatgaagatgaaggacgcccatctaatgactgtttgctcatatatgacatcgaaggtgtaggttcccctgctggctctgtgggttgttgtagcttcattggagaagacctggatgacagcttcttggataccctgggacctaaatttaagaagttggcagacatcagcctaggaaaagaatcatatccagaccttgatccttcttggccaccacaaagcactgaaccagtttgccttcctcaggaaacagagcccgttgttagtggacacccaccaatctccccacatttcggcactaccacagtaatttctgagagcacctatccctcgggacctggtgtactgcatcctaagcctattctcgatcctctgggctatggtaatgtcactgtgaccgagtcttacaccacctctgacactctgaagccctctgtgcacgttcacgataaccgaccagcatcaaacgtggtagtgacagagagagtggtcggcccaatctctggcgctgatttgcatggaatgttagagatgcctgacttgcgagatgggtcgaatgttatagtgacagaaagggtaatagcaccaagctctagtctacccacctctctgactatccatcatcctagagagtcttcaaatgtggtagtgacagaaagagtaatccaaccaacttccggcatgataggtagtctgagtatgcaccccgagttagccaatgcccacaatgtcattgtgacagagagggttgtttctggtgctggcgtaactggaattagtggcaccactgggatcagcggtggcataggcagcagtggcctggttggcaccagcatgggtgctgggagcggtgccctgagtggagctggcataagtggtggtggcattggcctgagcagcttgggagggacagccagcattggccacatgaggagttcctctgaccatcactttaaccaaaccattgggtccgcctcccctagcacagctcgaagtcgaatcacaaagtatagtaccgtgcaatatagcaagtagtcaggaccccagctcactttttcatagtcattgtggtttagatccaattcccaccactaaaaaactaacaatgtgatttataacgcacaacttcgtgctcaggtcatctaggagcaaggtgagaaatcacaatgagaaaaataaatggaaacaccactgctaggggagagctctccttagcattcataaacttttctcttatattaggactaaggaactaaaacttgaggcagagtcttctttgtgcctgagtggcctgtagtccatctccagcatgtaactggccttacgatggcaattggcatcattctccttgctctgttttgcttttccatatagctcgagcaaaattcaaaaagaactaaatatgcaatatatgttcatatctatgggaaaaatctaaaatgtgtgccagatgccctgttggtttcacagataacataaataaaaattcaaccacagatttatacaagggttaaccattttttttaagtttgactacatagtcaagtccacaagccatcaagcactcctaccttaattattgcactagagaaaataaattccaaattaggaagtgtttcctaggaggaaaattccattagagagtggcaataggatgaggtttcttcagggtaaactagcaatgcctgagcctgaaccttaatgtggggcctcagttaaatctcctgtggagtcaaggattcttctgattctagtgtgtgtttagtgatagatgtagtcttgacgaatattgcttactggtgaggttgaggaatatcacactcgtctttccctttaccactgtggttttgacttaagaaagcaaaactcactaagtttacttctcgaattgaagcaagtgaggcctgacatggttgtcatcactagtggcaaatgaccttccaagtaagcagatgggaactgaattgtgttttcaggttttgtttttagtaggtgatattcattcgtatccagctctttattacatagctctgaagttaaaatgatttacataggccgagctgtggacaaaaaaaaagaagcagcagcttgtagtatgcttaagctttggggaatttttttttaaggggatctaaaaaaatgtttttagaacatgtaaaatgtttaatggtgaaagttggaaaagaattcttctgtaaagtaataccatgctaattattcgcttttagtaagtaaagtagtggttgctttagcaaacctctgctgccattttgcaggaatcaaccaggaacctttagcagaattgacaatatggtgttgataagcatgaaataataatagaaacctattctgctagtttatctcaccctctaatttttctcactagcataaattttaaattcctgatttgatttgtcaataagatcttggcttatatatgctgatttataggtagtgtccaaattatatagtataacatatttttctagtttcaaaatttagtaatgtcctatttatgatatatcatttctgtgtgtttgctatgtagtattacccaattaaaaatctctaaaaagaattaaagcattctaagaaaaaggtaaatttactattgcatggtacagaaattttttctttcttaaatacaatgttactataagctcactaaaatgaaactctatatgacaaaataaaattagaaaaaaatttgccctggagttgtgaattatatacaacttttaaagaatttaccccaattactcaaatttcccaggaaattacaaagccaaagaatattcaacttcctccactggtcaaaagaggataggagtg

SEQ ID NO: 287668 - DNA, 3338 bp, Homo sapiens
agcggagtctttacacatgaaccaagatggccgccatcactcacagtctatgctgttttttgtgctgagaaagctaatggagaaaatgaagaggaatcagaaacacaacaaaattagatggaagtaaccagggaagattttctaagtgaagttcaaattttaaatggatttcagaatttcctaaatagtattttttttttaggaaatctgaggatataaccactgtcataccacaaataccacctgataacgcaaatataattgaatgcattgacaactcaggagtttatacaaatgagtatggtggcagagaaatgcaagatctgggaggaggagagagaatgacaggatttgaactaacagagggagttaaaacttcaggaatgcctgagatatgtcaagaatactctggaacattaagaagaaattctatgagggaatgtagagaaggaggtctgaatatgaatttcatggaaagctacttctgtcagaaagcatatgcttacgcagatgaagatgaaggacgcccatctaatgactgtttgctcatatatgacatcgaaggtgtaggttcccctgctggctctgtgggttgttgtagcttcattggagaagacctggatgacagcttcttggataccctgggacctaaatttaagaagttggcagacatcagcctaggaaaagaatcatatccagaccttgatccttcttggccaccacaaagcactgaaccagtttgccttcctcaggaaacagagcccgttgttagtggacacccaccaatctccccacatttcggcactaccacagtaatttctgagagcacctatccctcgggacctggtgtactgcatcctaagcctattctcgatcctctgggctatggtaatgtcactgtgaccgagtcttacaccacctctgacactctgaagccctctgtgcacgttcacgataaccgaccagcatcaaacgtggtagtgacagagagagtggtcggcccaatctctggcgctgatttgcatggaatgttagagatgcctgacttgcgagatgggtcgaatgttatagtgacagaaagggtaatagcaccaagctctagtctacccacctctctgactatccatcatcctagagagtcttcaaatgtggtagtgacagaaagagtaatccaaccaacttccggcatgataggtagtctgagtatgcaccccgagttagccaatgcccacaatgtcattgtgacagagagggttgtttctggtgctggcgtaactggaattagtggcaccactgggatcagcggtggcataggcagcagtggcctggttggcaccagcatgggtgctgggagcggtgccctgagtggagctggcataagtggtggtggcattggcctgagcagcttgggagggacagccagcattggccacatgaggagttcctctgaccatcactttaaccaaaccattgggtccgcctcccctagcacagctcgaagtcgaatcacaaagtatagtaccgtgcaatatagcaagtagtcaggaccccagctcactttttcatagtcattgtggtttagatccaattcccaccactaaaaaactaacaatgtgatttataacgcacaacttcgtgctcaggtcatctaggagcaaggtgagaaatcacaatgagaaaaataaatggaaacaccactgctaggggagagctctccttagcattcataaacttttctcttatattaggactaaggaactaaaacttgaggcagagtcttctttgtgcctgagtggcctgtagtccatctccagcatgtaactggccttacgatggcaattggcatcattctccttgctctgttttgcttttccatatagctcgagcaaaattcaaaaagaactaaatatgcaatatatgttcatatctatgggaaaaatctaaaatgtgtgccagatgccctgttggtttcacagataacataaataaaaattcaaccacagatttatacaagggttaaccattttttttaagtttgactacatagtcaagtccacaagccatcaagcactcctaccttaattattgcactagagaaaataaattccaaattaggaagtgtttcctaggaggaaaattccattagagagtggcaataggatgaggtttcttcagggtaaactagcaatgcctgagcctgaaccttaatgtggggcctcagttaaatctcctgtggagtcaaggattcttctgattctagtgtgtgtttagtgatagatgtagtcttgacgaatattgcttactggtgaggttgaggaatatcacactcgtctttccctttaccactgtggttttgacttaagaaagcaaaactcactaagtttacttctcgaattgaagcaagtgaggcctgacatggttgtcatcactagtggcaaatgaccttccaagtaagcagatgggaactgaattgtgttttcaggttttgtttttagtaggtgatattcattcgtatccagctctttattacatagctctgaagttaaaatgatttacataggccgagctgtggacaaaaaaaaagaagcagcagcttgtagtatgcttaagctttggggaatttttttttaaggggatctaaaaaaatgtttttagaacatgtaaaatgtttaatggtgaaagttggaaaagaattcttctgtaaagtaataccatgctaattattcgcttttagtaagtaaagtagtggttgctttagcaaacctctgctgccattttgcaggaatcaaccaggaacctttagcagaattgacaatatggtgttgataagcatgaaataataatagaaacctattctgctagtttatctcaccctctaatttttctcactagcataaattttaaattcctgatttgatttgtcaataagatcttggcttatatatgctgatttataggtagtgtccaaattatatagtataacatatttttctagtttcaaaatttagtaatgtcctatttatgatatatcatttctgtgtgtttgctatgtagtattacccaattaaaaatctctaaaaagaattaaagcattctaagaaaaaggtaaatttactattgcatggtacagaaattttttctttcttaaatacaatgttactataagctcactaaaatgaaactctatatgacaaaataaaattagaaaaaaatttgccctggagttgtgaattatatacaacttttaaagaatttaccccaattactcaaatttcccaggaaattacaaagccaaagaatattcaacttcctccactggtcaaaagaggataggagtg

SEQ ID NO: 287669 - DNA, 529 bp, Homo sapiens
atttatgtaaacgttgagccaacttttcaaagaactttacataagacaaagtaaaggctgtctacgtcaagtgtgatattgcctgtaatatgtatttttagcaatacggccagtatgctcttgctgtaagaggctctgaccgagatggtggggcagatggcatgtcagcggaatgtgagtgcaacattaaaatcctcgatgtcaatgataatatcccttacatggaacagtcttcagtaagtatttgttcttggaattaataaatctaaattcgctatattctaaaacatatacgaacaattctgcttacagaggcacatgttatgtttattgacatacaacccaaatgtagacacatacttttttcttgtgtttatgcaagaataaatggagttaagcaatgaaaaatgagatgaaaaccacagatatcttttctaaataatgaagttatcaacattccagtataagcctactgtagttctctctctttcacacagtttgtgctaagagttttcacttcttgtttcag

SEQ ID NO: 287670 - DNA, 950 bp, Homo sapiens
ttttttttttttggaatagacacaaggtcttttctatattgcccaggctggtcttgaactactgggctcaagcgatcctcccacctcccaaagtgctctgattacaggcgtgaaccacagtgcctggctctaaataacatattttgatgaaacataacccaagttttgagaaagtggtgagactagaggcattattttacacttttgcaaatcctctaatatctggcttaacagaggctggattctcctgcgtgcttctacgacacactcttctcgttgcaggacctgaggaagatccacctcacgccaatgtggagttggaaagagagggaccttgaagatgtccttgaaagaatcttaaggaacctcaggggtcctcagaccacactttgagaactgctgcccaagtgtggcttcctggccatgtgaagtggcagagtcggaaatggaagtcagaggggcagctgccaggctcacaccccaccccgtcacccctcagctgcccctggacaggaagctggaactcacctctccattgaggtagatgaggtcgaaggcgtacaaacacacctgcacctggatctcagacgcatccacctcctgggttggggcacaacggagttcgtgagtgcaggaaggtgggacggggcactgtgcctgaggccgacagcattcatctaccggtctccctctcgccacctaactggctgcccatctgtgagggcggcatgctgctggctccaggtgctggatccttaacggctctcagctaattccgacaacctcattccccttcaccagatatttgctctcctagacttttctgcagctaatggcagtgacatggcacagttctggccatgagatggaaaaggggaaacctgtggggtgcaggttgtggggttttccagaacagatcttcttcatagtaaacaacagagatgccgaaa

SEQ ID NO: 287671 - DNA, 845 bp, Homo sapiens
tgtaagatgtgcctttgctcctctttcgccttctgccatgactgtgaggcctccccagccgtgtggaactccccagttccccaggaccttgcatatggcctgcagctcctcactgtcctcgtcgtaggaggccagcaggaagcccccgtaccggccggcccgcttcccccggcccaggacctgaggaagatccacctcacgccaatgtggagttggaaagagagggaccttgaagatgtccttgaaagaatcttaaggaacctcaggggtcctcagaccacactttgagaactgctgcccaagtgtggcttcctggccatgtgaagtggcagagtcggaaatggaagtcagaggggcagctgccaggctcacaccccaccccgtcacccctcagctgcccctggacaggaagctggaactcacctctccattgaggtagatgaggtcgaaggcgtacaaacacacctgcacctggatctcagacgcatccacctcctgggttggggcacaacggagttcgtgagtgcaggaaggtgggacggggcactgtgcctgaggccgacagcattcatctaccggtctccctctcgccacctaactggctgcccatctgtgagggcggcatgctgctggctccaggtgctggatccttaacggctctcagctaattccgacaacctcattccccttcaccagatatttgctctcctagacttttctgcagctaatggcagtgacatggcacagttctggccatgagatggaaaaggggaaacctgtggggtgcaggttgtggggttttccagaacagatcttcttcatagtaaacaacagagatgccgaaa

SEQ ID NO: 287672 - DNA, 1002 bp, Homo sapiens
tgtaagatgtgcctttgctcctctttcgccttctgccatgactgtgaggcctccccagccgtgtggaactccccagttccccaggaccttgcatatggcctgcagctcctcactgtcctcgtcgtaggaggccagcaggaagcccccgtaccggccggcccgcttcccccggcccaggctcctgctcgctggccctcaacacacccgtcctccactcgaggggaaaccccaggagcttcgcacaatgacaacctgtgactcccggcacggaacccccactgacttcctgaaaccttcaagaggaagatccagttttatctcacagtggccccaggacctgaggaagatccacctcacgccaatgtggagttggaaagagagggaccttgaagatgtccttgaaagaatcttaaggaacctcaggggtcctcagaccacactttgagaactgctgcccaagtgtggcttcctggccatgtgaagtggcagagtcggaaatggaagtcagaggggcagctgccaggctcacaccccaccccgtcacccctcagctgcccctggacaggaagctggaactcacctctccattgaggtagatgaggtcgaaggcgtacaaacacacctgcacctggatctcagacgcatccacctcctgggttggggcacaacggagttcgtgagtgcaggaaggtgggacggggcactgtgcctgaggccgacagcattcatctaccggtctccctctcgccacctaactggctgcccatctgtgagggcggcatgctgctggctccaggtgctggatccttaacggctctcagctaattccgacaacctcattccccttcaccagatatttgctctcctagacttttctgcagctaatggcagtgacatggcacagttctggccatgagatggaaaaggggaaacctgtggggtgcaggttgtggggttttccagaacagatcttcttcatagtaaacaacagagatgccgaaa

SEQ ID NO: 287673 - DNA, 5455 bp, Homo sapiens
  misc_feature (488)..(488): n is a, c, g, or t
  misc_feature (534)..(534): n is a, c, g, or t
  misc_feature (576)..(576): n is a, c, g, or t
  misc_feature (621)..(621): n is a, c, g, or t
  misc_feature (643)..(643): n is a, c, g, or t
  misc_feature (942)..(942): n is a, c, g, or t
  misc_feature (1983)..(1983): n is a, c, g, or t
  misc_feature (3745)..(3745): n is a, c, g, or t
  misc_feature (3813)..(3813): n is a, c, g, or t
gcgcggagcctagacccgctgccgggccggggctgggccggagcggcggcgcctggatgccggcccggggctgggccggagactggcgcccgccccgaagcgactttcggtccccgacccgctccgcctgacccctatgatgaagagggcgtccactggagttcttgctgtcgacatctttgacaagttcaacttcacgggagccagagtcccatggttcgacgccattcatgaagaattccccagggagctggagtcctccatctccttcccagccaacttcttcaaaccacctgaagaaaaagtgcttaggtagaggttgagcatcctaatcctgaaatctgaaatgctccagaatctgaaccttcttgagcaccaacctgacacttaaaggaagtgctcattggaggatctgtgacaattactaaaaacttccccaaataaaaaggacatgaaaagaatctcacgctatcgcccaggctggagtncagtggcgcgatctccgctcactgcaagctccgcctcccgggttcncgccattctcctgcctcagcctcccgagagtagctgggactncaggcgcccgccaccacgcccagctaattttttgtatttttagtngagacggggtttcaccgtgttngccagaatggtttcgatctcctcacctcgcgatccatccgcctcagcctcccaaagtgctgggattacaggcgtgagccaccgtgcctggccctcatgtgtcttaaaaagaggggtgactctgatgtggggtcatgcttgaaactgagaggacgaggtccccgaccctccattgcagccagctctctctggaactaacagagtgagaactcgctcattaccaaggggaggacaccaagccattcatgggggacccacccccatgacccaaacaaccccgaccacgcccacctccaaccnttaagcagtccatctccagaactcttttcatcctgcagatctgaaactctagcccacaaaacaccaactccactccccagccactggtgcccaccgttgtttctgtctctgaatttgactcctctagggacctcccataagtggaatcatacaatatttgtccttttgtgcttggcttatttcactgagcgtaatgttctctaggttcacctgtgttgtagcaaacgtcagactttccctccttttgaaggctgagtaatattctgttgtgtggatggagcacgcattgtttatccactcacctgttgacgcatgcctgggtcgtttccacctttcggcctgtgtgaatggtgctgctctgaacaggggtgaagacgtatctgggcgtctgctttcagttcttttgggtgtatacccagaagtgggcttgctgggtcacgtggtaaatcctgtggttgattttttgaggacgcaccatactgttttcggtgggacatctgttgggttttgagaagcacctgctggcactgagagctgtcttggggaacacaggtgctcctgccggagtcctcacgctctgctcacgttgcagaaggccccctggtaaggccagccagccggaggaccaccccgcagaccacacgcccagggcctggcaccgagggggaggccccgatcagcaggtgaaagcgacaccctgatgacactggctagttcaccttcactctggtcatcgtttactgtaccccggggcagctcccgcctgagccctatgaccccaaccgccgcagcctctggtaaggcctgggtatggggcacatggagagggcccattccagaggctcctaagtcaaaagagattccacaagtcaaaatcctgatcctgatcaagcacaggccttcacagtgacatttcactgtgaccctggcccagagacagagaccactgtcctgcagtgtccctgggagggaggttctgggtctgccacaggacaccacaccctggaacattgcacaccctttgcctggccttttcccagngtttctgtcagaaatgccccctcccaagcatacaccccatcttgtgccccgagggactcgattctctccccacacacccgacccgaggctgtcatgggtagtgcctgctgctggccccagggttagggctgctcagccagtcctggctggaaaggatgaatgtcccacaagcagctttggggcctgcttggtgggagcagcccgaggatccgcccttcgtcctcctgccatttcccacttccctggctctggggtcctcatgttcacgtggttctcagtgactgggtgattgacccccatgagctgtcattattttggtgtcttttgctggacatttaagccattccttgtgtttctgccattagctattatgggctgtaacatctttgcacctgtgccttctttctttttaaatttctgaagtcctaatttgacccaaaggtgacacatctccctgtgtgccctgtcagtgatgaaacctgctctggggatgaagatgccgtggggcccacagatccaagctctcggagtgtgattctgtctcccctagaaacacatccatggcatgtcctcagggcatttgtgcatgggattaagcaaatgtttcctaatcatgtttgtccctgtgctctggcttcttgacctcaggctgcctcactggcccatcattaatacgtcgatggtgagcgcactggtgtacagcgagggggctccacttccgagacccctggagaggcccgtcctggtggagttcaccctgctggagatggagaagcgaaccaagcctgtctgtgtgttctggaaccattccctggcgtaaatgtgatgccgggagttctgcatcttcatgtgagggctttgccaagacacagagaacccgcagggttgttggctcagcggcagatcgtcccacggggacagtctcttgtggtctgtgtctcccccttcagccccctgtggggcagtgagcctcctgctctgcttctgtgggtgcatcagagcccccccagatgcccacacgcagacgcgcacaggcctgcacgtggaaacacagacatgcgcacacgcaggcccacacacagacgcacacagagctgcacgtggagacacgtgcgcacacgcaggcccacacgcaggcccacacacaggtgcacgcggacctgcacgtggagacacagatgtgtgcacatgcaggcccacacacaggtgagcgtggacctgtgtgaacagatgcgcgcagacctgcacgtggagacacagacatgcaggcgcacaaagagatccctcaaggctgacacccaggaaggggcctctcacttgtgggactcccgagatgcagtggccaacactagtgtagtgcccagttcactgctggataagacagaggcctgttctggtcacacatgggaggcagaacccagagactgggcccaggagcccttctgctgacagtgggaactcccagctacgtgtgggggtccccataccagacaaaggtccctgaccttagtcttgcccgagaggccgacacagcccagctttggggtctggctttacccacaagaggccacaccttgccacagcactgtttatctggcctgtttcagaagcaccgtcagagtggcgaaggcaggaggtggtgcacgagagtctacgttctagcatccattcaagtgagggaaaggcgtttcgtacttagaaaaatgcaaaattaatgattctcacccacacatgagactgtggattcacccatgtatgaganagtggattcagagccatgctgtggctctcatctgctgggagccagtagtgtttgtgctttggttttgnttttttagctacatggtttatgtgaggtgcggacttacttgagttgctctgtctttacagggagcttgctttttctctgctggtttgttttcacttttgctgtctctgtttagaagaaaacattagaactggggtgtggtggaaggatgggagcacaatctgggaggggaagacctgctctctctccacataccaggagggagtggcaggaaggggagacactgtgccggactcagggagtcaagagcgtgagcacccccaggcttcaatctgctgaacgttgtgcatctgggggcgcccgtgcagcaggaacactctccccatcacaattcctctgggcacagtggagagccatgagtgggggctgtcctgggggctgcgctatggtgagtgagcccacgccaggagccagttcagcccagcctcattcttctcctgcttctttgctttccaagttctagttcataagcaaccagcacagtacctggaatgtaagaggcgcttggcttataaaagagagaagaaaggaacccctttcaccacgagggacgtcaggcccagctctctgtcccgggcattcatcttttttccggcaattagcttcagctctaatgacctgctgtctgctttatgttgcacctatgatttccagattgtaaagtttgtggcaaatgtattaacgttcacatcccatttacagattagcaaactaaggatctgagaggttatgtgattttcccagtctggcggagggcagggccctgtcagaagccgagacacacctcgtaacagcttgttatttggggcttcccatcagtgaggcaggagtcataatggggccctggcttctgggcaattcccataaaacattgtgccacctgaagatggaagtgtcagaggaaggcgagatgttatttctgaaagcatctaccctcagaaagagacagaggagtgcatcgcagctgtgtgaacccggggtggtggtggttccagcagcggggcacgtggtggacgcaagacggccccgtttgagttttgctgctaggtgacatgtagaacttgaacttcagagggtgctccttggaggccctgatgagagagacacagaagggaagggagactgttcccatggtcctgcctctgcggcagcgagcctgctgctcttgcagctgggtggctgttcggtgcagggggccggtgaggaacacggtggggagcagcctgcgagggcgccgggctttcagcactcactatacctgctgtttggtttggccaggatggcctgggagtccccagggccgggcaaagactgcccccaacagacatgggcggagggaaccgtctcacccctgcctcttctcccttctctacgcagtgtcagtgggacgggagggtggtctgcccggggcttcaagctcctgtccaggaaccggacccatgtcgtacgccagtgcagccacacggccagcttcgaggtgctcatggacgtctccaggtgtgagatgggcatcttcttgtggccactatgcccgctgagcctacccccaaacctgcccctcctcaaactaaatcttccattctaagcactttgaacgaagcaaatcaaccaattaaaaaaatatattccaggaaaaaaaaaagt

SEQ ID NO: 287674 - DNA, 1298 bp, Homo sapiens
cagcgggtcggggaccgaaagtcgcttcggggcgggcgccagtctccggcccagccccgggccggcatccaggcgccgccgctccggcccagccccggcccggcccctatgatgaagagggcgtccactggagttcttgctgtcgacatctttgacaagttcaacttcacgggagccagagtcccatggttcgacgccattcatgaagaattccccagggagctggagtcctccatctccttcccagccaacttcttcaaaccacctgaagaaaaagaaggccccctggtaaggccagccagccggaggaccaccccgcagaccacacgcccagggcctggcaccgagggggaggccccgatcagcaggtgaaagcgacaccctgatgacactggctagttcaccttcactctggtcatcgtttactgtaccccggggcagctcccgcctgagccctatgaccccaaccgccgcagcctctggctgcctcactggcccatcattaatacgtcgatggtgagcgcactggtgtacagcgagggggctccacttccgagacccctggagaggcccgtcctggtggagttcaccctgctggagatggagaagcgaaccaagcctgtctgtgtgttctggaaccattccctggcgtaaatgtgatgccgggagttctgcatcttcataccaagagcagtgatgaccttttagctggaatggccagaggggtaacggtgactaatggtgttaaagggaaggaaagctcctgcccatctgcagcaccttcggcatctgcccctgccatgaccactgtggagaacaaatccaagattagcacagggcaccaactggacagaggcctccggtcagcctcactctgactgcaaccccctctcactggacagcatcacctggacacagagcctcacctagtctgtgtcccatggacacaactttgctttggacagtgacaccaagaatactcacccctttacttagccagaccacaggcagccacctggacacaaacatctctccagagtcagcctccacacagactccacagcagaactcccagggaggcactggggcatggcttcagagcaccaggcagcgctccgcggtgcctagcacccgctcagccagggcagcctgcagcggagcttggagccagcagcttctcatctcttggcctcgggaaatgtagctggagtcatcatttagcagagcacggtgtccctgggttggccacccagcttagttttaaaataaaataatgtaatcttggcctaatggtggaa

SEQ ID NO: 287675 - DNA, 489 bp, Homo sapiens
gcggccgcacaagggcagcctaggcgagggcaccaactggacagaggcctccggtcagcctcactctgactgcaaccccctctcactggacagcatcacctggacacagagcctcacctagtctgtgtcccatggacacaactttgctttggacagtgacaccaagaatactcacccctttacttagccagaccacaggcagccacctggacacaaacatctctccagagtcagcctccacacagactccacagcagaactcccagggaggcactggggcatggcttcagagcaccaggcagcgctccgcggtgcctagcacccgctcagccagggcagcctgcagcggagcttggagccagcagcttctcatctcttggcctcgggaaatgtagctggagtcatcatttagcagagcacggtgtccctgggttggccacccagcttagttttaaaataaaataatgtaatcttggcctaatggtggaa

SEQ ID NO: 287676 - DNA, 800 bp, Homo sapiens
gcgcggagcctagacccgctgccgggccggggctgggccggagcggcggcgcctggatgccggcccggggctgggccggagactggcgcccgccccgaagcgactttcggtccccgacccgctccgcctgacccctatgatgaagagggcgtccactggagttcttgctgtcgacatctttgacaagttcaacttcacgggagccagagtcccatggttcgacgccattcatgaagaattccccagggagctggagtcctccatctccttcccagccaacttcttcaaaccacctgaagaaaaagtagagacagggtttcaccatattggccaggctggtctcgatctcctgtccttgcgatccgcccgcctccacctcccaaagtgctgggattacagaccaagagcagtgatgaccttttagctggaatggccagaggggtaacggtgactaatggtgttaaagggaaggaaagctcctgcccatctgcagcaccttcggcatctgcccctgccatgaccactgtggagaacaaatccaagattagcacaggaacaagacgaggatgcccgttctcaccacttttattagacatcacacaaatatgcaagagaaaaaaataaaagccacccacactggaaaagaggacatcaaattatccttgtctgatgaagatgtgatcttggatttacaaacatgtaaagcctccaccagaaaactctagacttgataaataaattaatacagtcatttgcaggatacaaaatcaacatacaaaaatcagcagcattttatacac

SEQ ID NO: 287677 - DNA, 3334 bp, Homo sapiens
  misc_feature (1624)..(1624): n is a, c, g, or t
  misc_feature (1692)..(1692): n is a, c, g, or t
gcgcggagcctagacccgctgccgggccggggctgggccggagcggcggcgcctggatgccggcccggggctgggccggagactggcgcccgccccgaagcgactttcggtccccgacccgctccgcctgacccctatgatgaagagggcgtccactggagttcttgctgtcgacatctttgacaagttcaacttcacgggagccagagtcccatggttcgacgccattcatgaagaattccccagggagctggagtcctccatctccttcccagccaacttcttcaaaccacctgaagaaaaagaaggccccctggtaaggccagccagccggaggaccaccccgcagaccacacgcccagggcctggcaccgagggggaggccccgatcagcaggtgaaagcgacaccctgatgacactggctagttcaccttcactctggtcatcgtttactgtaccccggggcagctcccgcctgagccctatgaccccaaccgccgcagcctctggctgcctcactggcccatcattaatacgtcgatggtgagcgcactggtgtacagcgagggggctccacttccgagacccctggagaggcccgtcctggtggagttcaccctgctggagatggagaagcgaaccaagcctgtctgtgtgttctggaaccattccctggcgtaaatgtgatgccgggagttctgcatcttcatgtgagggctttgccaagacacagagaacccgcagggttgttggctcagcggcagatcgtcccacggggacagtctcttgtggtctgtgtctcccccttcagccccctgtggggcagtgagcctcctgctctgcttctgtgggtgcatcagagcccccccagatgcccacacgcagacgcgcacaggcctgcacgtggaaacacagacatgcgcacacgcaggcccacacacagacgcacacagagctgcacgtggagacacgtgcgcacacgcaggcccacacgcaggcccacacacaggtgcacgcggacctgcacgtggagacacagatgtgtgcacatgcaggcccacacacaggtgagcgtggacctgtgtgaacagatgcgcgcagacctgcacgtggagacacagacatgcaggcgcacaaagagatccctcaaggctgacacccaggaaggggcctctcacttgtgggactcccgagatgcagtggccaacactagtgtagtgcccagttcactgctggataagacagaggcctgttctggtcacacatgggaggcagaacccagagactgggcccaggagcccttctgctgacagtgggaactcccagctacgtgtgggggtccccataccagacaaaggtccctgaccttagtcttgcccgagaggccgacacagcccagctttggggtctggctttacccacaagaggccacaccttgccacagcactgtttatctggcctgtttcagaagcaccgtcagagtggcgaaggcaggaggtggtgcacgagagtctacgttctagcatccattcaagtgagggaaaggcgtttcgtacttagaaaaatgcaaaattaatgattctcacccacacatgagactgtggattcacccatgtatgaganagtggattcagagccatgctgtggctctcatctgctgggagccagtagtgtttgtgctttggttttgnttttttagctacatggtttatgtgaggtgcggacttacttgagttgctctgtctttacagggagcttgctttttctctgctggtttgttttcacttttgctgtctctgtttagaagaaaacattagaactggggtgtggtggaaggatgggagcacaatctgggaggggaagacctgctctctctccacataccaggagggagtggcaggaaggggagacactgtgccggactcagggagtcaagagcgtgagcacccccaggcttcaatctgctgaacgttgtgcatctgggggcgcccgtgcagcaggaacactctccccatcacaattcctctgggcacagtggagagccatgagtgggggctgtcctgggggctgcgctatggtgagtgagcccacgccaggagccagttcagcccagcctcattcttctcctgcttctttgctttccaagttctagttcataagcaaccagcacagtacctggaatgtaagaggcgcttggcttataaaagagagaagaaaggaacccctttcaccacgagggacgtcaggcccagctctctgtcccgggcattcatcttttttccggcaattagcttcagctctaatgacctgctgtctgctttatgttgcacctatgatttccagattgtaaagtttgtggcaaatgtattaacgttcacatcccatttacagattagcaaactaaggatctgagaggttatgtgattttcccagtctggcggagggcagggccctgtcagaagccgagacacacctcgtaacagcttgttatttggggcttcccatcagtgaggcaggagtcataatggggccctggcttctgggcaattcccataaaacattgtgccacctgaagatggaagtgtcagaggaaggcgagatgttatttctgaaagcatctaccctcagaaagagacagaggagtgcatcgcagctgtgtgaacccggggtggtggtggttccagcagcggggcacgtggtggacgcaagacggccccgtttgagttttgctgctaggtgacatgtagaacttgaacttcagagggtgctccttggaggccctgatgagagagacacagaagggaagggagactgttcccatggtcctgcctctgcggcagcgagcctgctgctcttgcagctgggtggctgttcggtgcagggggccggtgaggaacacggtggggagcagcctgcgagggcgccgggctttcagcactcactatacctgctgtttggtttggccaggatggcctgggagtccccagggccgggcaaagactgcccccaacagacatgggcggagggaaccgtctcacccctgcctcttctcccttctctacgcagtgtcagtgggacgggagggtggtctgcccggggcttcaagctcctgtccaggaaccggacccatgtcgtacgccagtgcagccacacggccagcttcgaggtgctcatggacgtctccaggtgtgagatgggcatcttcttgtggccactatgcccgctgagcctacccccaaacctgcccctcctcaaactaaatcttccattctaagcactttgaacgaagcaaatcaaccaattaaaaaaatatattccaggaaaaaaaaaagt

SEQ ID NO: 287678 - DNA, 3190 bp, Homo sapiens
  misc_feature (1480)..(1480): n is a, c, g, or t
  misc_feature (1548)..(1548): n is a, c, g, or t
gcgcggagcctagacccgctgccgggccggggctgggccggagcggcggcgcctggatgccggcccggggctgggccggagactggcgcccgccccgaagcgactttcggtccccgacccgctccgcctgacccctatgatgaagagggcgtccactggagaaggccccctggtaaggccagccagccggaggaccaccccgcagaccacacgcccagggcctggcaccgagggggaggccccgatcagcaggtgaaagcgacaccctgatgacactggctagttcaccttcactctggtcatcgtttactgtaccccggggcagctcccgcctgagccctatgaccccaaccgccgcagcctctggctgcctcactggcccatcattaatacgtcgatggtgagcgcactggtgtacagcgagggggctccacttccgagacccctggagaggcccgtcctggtggagttcaccctgctggagatggagaagcgaaccaagcctgtctgtgtgttctggaaccattccctggcgtaaatgtgatgccgggagttctgcatcttcatgtgagggctttgccaagacacagagaacccgcagggttgttggctcagcggcagatcgtcccacggggacagtctcttgtggtctgtgtctcccccttcagccccctgtggggcagtgagcctcctgctctgcttctgtgggtgcatcagagcccccccagatgcccacacgcagacgcgcacaggcctgcacgtggaaacacagacatgcgcacacgcaggcccacacacagacgcacacagagctgcacgtggagacacgtgcgcacacgcaggcccacacgcaggcccacacacaggtgcacgcggacctgcacgtggagacacagatgtgtgcacatgcaggcccacacacaggtgagcgtggacctgtgtgaacagatgcgcgcagacctgcacgtggagacacagacatgcaggcgcacaaagagatccctcaaggctgacacccaggaaggggcctctcacttgtgggactcccgagatgcagtggccaacactagtgtagtgcccagttcactgctggataagacagaggcctgttctggtcacacatgggaggcagaacccagagactgggcccaggagcccttctgctgacagtgggaactcccagctacgtgtgggggtccccataccagacaaaggtccctgaccttagtcttgcccgagaggccgacacagcccagctttggggtctggctttacccacaagaggccacaccttgccacagcactgtttatctggcctgtttcagaagcaccgtcagagtggcgaaggcaggaggtggtgcacgagagtctacgttctagcatccattcaagtgagggaaaggcgtttcgtacttagaaaaatgcaaaattaatgattctcacccacacatgagactgtggattcacccatgtatgaganagtggattcagagccatgctgtggctctcatctgctgggagccagtagtgtttgtgctttggttttgnttttttagctacatggtttatgtgaggtgcggacttacttgagttgctctgtctttacagggagcttgctttttctctgctggtttgttttcacttttgctgtctctgtttagaagaaaacattagaactggggtgtggtggaaggatgggagcacaatctgggaggggaagacctgctctctctccacataccaggagggagtggcaggaaggggagacactgtgccggactcagggagtcaagagcgtgagcacccccaggcttcaatctgctgaacgttgtgcatctgggggcgcccgtgcagcaggaacactctccccatcacaattcctctgggcacagtggagagccatgagtgggggctgtcctgggggctgcgctatggtgagtgagcccacgccaggagccagttcagcccagcctcattcttctcctgcttctttgctttccaagttctagttcataagcaaccagcacagtacctggaatgtaagaggcgcttggcttataaaagagagaagaaaggaacccctttcaccacgagggacgtcaggcccagctctctgtcccgggcattcatcttttttccggcaattagcttcagctctaatgacctgctgtctgctttatgttgcacctatgatttccagattgtaaagtttgtggcaaatgtattaacgttcacatcccatttacagattagcaaactaaggatctgagaggttatgtgattttcccagtctggcggagggcagggccctgtcagaagccgagacacacctcgtaacagcttgttatttggggcttcccatcagtgaggcaggagtcataatggggccctggcttctgggcaattcccataaaacattgtgccacctgaagatggaagtgtcagaggaaggcgagatgttatttctgaaagcatctaccctcagaaagagacagaggagtgcatcgcagctgtgtgaacccggggtggtggtggttccagcagcggggcacgtggtggacgcaagacggccccgtttgagttttgctgctaggtgacatgtagaacttgaacttcagagggtgctccttggaggccctgatgagagagacacagaagggaagggagactgttcccatggtcctgcctctgcggcagcgagcctgctgctcttgcagctgggtggctgttcggtgcagggggccggtgaggaacacggtggggagcagcctgcgagggcgccgggctttcagcactcactatacctgctgtttggtttggccaggatggcctgggagtccccagggccgggcaaagactgcccccaacagacatgggcggagggaaccgtctcacccctgcctcttctcccttctctacgcagtgtcagtgggacgggagggtggtctgcccggggcttcaagctcctgtccaggaaccggacccatgtcgtacgccagtgcagccacacggccagcttcgaggtgctcatggacgtctccaggtgtgagatgggcatcttcttgtggccactatgcccgctgagcctacccccaaacctgcccctcctcaaactaaatcttccattctaagcactttgaacgaagcaaatcaaccaattaaaaaaatatattccaggaaaaaaaaaagt

SEQ ID NO: 287679 - DNA, 1870 bp, Homo sapiens
  misc_feature (754)..(754): n is a, c, g, or t
gcgcggagcctagacccgctgccgggccggggctgggccggagcggcggcgcctggatgccggcccggggctgggccggagactggcgcccgccccgaagcgactttcggtccccgacccgctccgcctgacccctatgatgaagagggcgtccactggagttcttgctgtcgacatctttgacaagttcaacttcacgggagccagagtcccatggttcgacgccattcatgaagaattccccagggagctggagtcctccatctccttcccagccaacttcttcaaaccacctgaagaaaaagaaggccccctggtaaggccagccagccggaggaccaccccgcagaccacacgcccagggcctggcaccgagggggaggccccgatcagcaggtgaaagcgacaccctgatgacactggctagttcaccttcactctggtcatcgtttactgtaccccggggcagctcccgcctgagccctatgaccccaaccgccgcagcctctggtaaggcctgggtatggggcacatggagagggcccattccagaggctcctaagtcaaaagagattccacaagtcaaaatcctgatcctgatcaagcacaggccttcacagtgacatttcactgtgaccctggcccagagacagagaccactgtcctgcagtgtccctgggagggaggttctgggtctgccacaggacaccacaccctggaacattgcacaccctttgcctggccttttcccagngtttctgtcagaaatgccccctcccaagcatacaccccatcttgtgccccgagggactcgattctctccccacacacccgacccgaggctgtcatgggtagtgcctgctgctggccccagggttagggctgctcagccagtcctggctggaaaggatgaatgtcccacaagcagctttggggcctgcttggtgggagcagcccgaggatccgcccttcgtcctcctgccatttcccacttccctggctctggggtcctcatgttcacgtggttctcagtgactgggtgattgacccccatgagctgtcattattttggtgtcttttgctggacatttaagccattccttgtgtttctgccattagctattatgggctgtaacatctttgcacctgtgccttctttctttttaaatttctgaagtcctaatttgacccaaaggtgacacatctccctgtgtgccctgtcagtgatgaaacctgctctggggatgaagatgccgtggggcccacagatccaagctctcggagtgtgattctgtctcccctagaaacacatccatggcatgtcctcagggcatttgtgcatgggattaagcaaatgtttcctaatcatgtttgtccctgtgctctggcttcttgacctcaggctgcctcactggcccatcattaatacgtcgatggtgagcgcactggtgtacagcgagggggctccacttccgagacccctggagaggcccgtcctggtggagttcaccctgctggagatggagaagcgaaccaagcctgtctgtgtgttctggaaccattccctggcgtaaatgtgatgccgggagttctgcatcttcattgtcagtgggacgggagggtggtctgcccggggcttcaagctcctgtccaggaaccggacccatgtcgtacgccagtgcagccacacggccagcttcgaggtgctcatggacgtctccaggtgtgagatgggcatcttcttgtggccactatgcccgctgagcctacccccaaacctgcccctcctcaaactaaatcttccattctaagcactttgaacgaagcaaatcaaccaattaaaaaaatatattccaggaaaaaaaaaagt

SEQ ID NO: 287680 - DNA, 811 bp, Homo sapiens
aggggtaacggtgactaatggtgttaaagggaaggaaagctcctgcccatctgcagcaccttcggcatctgcccctgccatgaccactgtggagaacaaatccaagattagcacaggtatgggtgacattcagtctgagacttcaactgcttttttgtttgaataggcaggatgcattggtgtttacagtgttccatctcattataggaaattgtagacatacaaaagtagatggattgatatttcagcccaatacgctcatcacgctcatcaccattatcagctcacagccagttgtaactctgtgatacccaccctcccctcttattattttgaagcagattctggacatcatatcatttcatccataaatattttattatcttggaaagagaaggattcttttaaaaatataatcctaataccattatcagtccttaaaataattgataatcattccttaaatcataccttattcaatgagtatttaaatttctaacagtcttataaatatttttgttttatttactatctatttttatgtttggatcaggactcccataggtccatatataattggctgatgtgtctcttaaatcttcttttttaaatctatgggtttaacccaattcttgcagtttaatttttgtggaagctggtcacgtgacctatagagtttctgagcatgtggatttttatatcacaatatccccatgacgtttttgcccatcaccctttgttgtgtgtatttattgtaaatggcattggagacttatgggacagattcaggtcccctgtccccccaatttga

SEQ ID NO: 287681 - DNA, 891 bp, Homo sapiens
ggttagaaatgctggatctcaatcccaacccaacctaaggaactggaatctgcattttaacaagatgccctggtgatttgtgtgtaccggagccatggaagtcaaatgctgaggatggtggcatcataggatgaatggagctgggttcttgaaacactgcctggaggaaagacagcaaaaatgcctcatgaatccaactggactgttaggatgctcacccttggagaccagcaacaatgtgtgcagaaacccaggccatgtggagaggccccacatacgtgtccaactgaggtcccagctgacagctggcattgacataatgttactctgggggaagccagctgccacgctgtaaggacactcgggcagtcctatgaagaggcccgtgtggtgagaaagagaggcctccagccaacagccatgtgagtgggccattgaggaagcagcctcagtgcctgcagccctgactggcatcctgaactaccaccttaaatgagaccctgagccagagtcactacttccaaattcttgacccacagaaattgtgaaataatatttgttgttttaagccgccaagttttgggagtaatttgttatatagcaaaagataattaatacattcacttcctaagattatggtgaagaattaaggatacagcatgaaaagaactttgctattatttttattatctgatccaatttatgttgaagggccttcagtactttcttcttttactctatcttgacatttgtctgaaacatttttgtttgtttgtttgtttgtttgtttgttttttagagatggggtcttgctatgtttcccagttggagtgcagtgattattcacagacatgatcccactactgatcagcatgggagttttcacctgct

SEQ ID NO: 287682 - DNA, 765 bp, Homo sapiens
gcggcataaatcaagtccgcggggcatggaggctgctgtcgctgcagcagctcagcttgcccggggcgggaactccccctttctcctttcgcctccccagcacccacaccctgtctcccccttaattcttccctggataatagcaccctaacgacaacagtcataataatagggttagaacgacaggggaggaaaactcaacagcctaaatatctctgaaaactgcatcgcaaaatggaagaaagagggggtcccactactgtttcaaaagagagccatggaagtcaaatgctgaggatggtggcatcataggatgaatggagctgggttcttgaaacactgcctggaggaaagacagcaaaaatgcctcatgaatccaactggactgttaggatgctcacccttggagaccagcaacaatgtgtgcagaaacccaggccatgtggagaggccccacatacgtgtccaactgaggtcccagctgacagctggcattgacataaaacagagcttcctgaaaaacaactattgaaggaatatgagtcactgtcaaaattgtgagtcatccatttcttcttgccagtgcagcacactcccaggggacacgtggcttcactcctgaacaagttcagtaagcagtgctggagagaatactgaaaacgttaaagaattatgaatacagctcagatctcactttcctgttttttagattttgggaattcattcaggtggaaacagcatttcttgccatcacatgatgggggt

SEQ ID NO: 287683 - DNA, 646 bp, Homo sapiens
gcggcataaatcaagtccgcggggcatggaggctgctgtcgctgcagcagctcagcttgcccggggcgggaactccccctttctcctttcgcctccccagcacccacaccctgtctcccccttaattcttccctggataatagcaccctaacgacaacagtcataataatagggttagaacgacaggggaggaaaactcaacagcctaaatatctctgaaaactgcatcgcaaaatggaagaaagagggggtcccactactgtttcaaaagagagccatggaagtcaaatgctgaggatggtggcatcataggatgaatggagctgggttcttgaaacactgcctggaggaaagacagcaaaaatgcctcatgaatccaactggactgttaggatgctcacccttggagaccagcaacaatgtgtgcagaaacccaggccatgtggagaggccccacatacgtgtccaactgaggtcccagctgacagctggcattgacatgtgagtgagactctgaacgttccagctgatgacaagtacagtttgagcgagctatccctgttgggcctgtcaaaactgcagatttcatgaagaaaataagtgttgttgacttaagccagtaagttttgacatactatgttacaca

SEQ ID NO: 287684 - DNA, 1649 bp, Homo sapiens
  misc_feature (1)..(4): n is a, c, g, or t
  misc_feature (374)..(374): n is a, c, g, or t
  misc_feature (1402)..(1405): n is a, c, g, or t
nnnnaaactcctgaccttgtgatccacccaatcttcattgcatcatttaactttcattggtatcacagtaattcactaacattcattccttacaggcagttatgaataattgaaaaatttttaacatcatctcatgggcaaaagaatatttattcattggcttagcttaacaaatcattattaaacacctattgtgtgccaggcactgttctagacactggagttacagcagtgaacaaaataaacacgctctccagtctggtgggagttcacatactggtgcggggagagagatgcatacaaacaaaaatgcatatttaatacttcaccaactgataggtgctatgaagaaaaataaaccatagtaaggatgncatagagtgctggatggaggttttagtacatatacgttagccagagaaggcatctctgagaagttgccatttgagaaaaagagggagtaggctcagtggattctgagggaagaataagtttgagattctgagtcattcatgtccttggcagatcaataaagaggaagcagatgctgtggccggaactcagtgtgcatgttggggcagtggtaggaggctatggttgtaagacagggctacctcccatagggtcttgaagaccatagtaaagactgtggcatctcctctccagtagtttgagcagaggaatggtagcattctacttaggatttaaaaggtttgctctagctgatttgtggagaataggtttgtaaggcagcatagtgaatgaaaggagaaaagttaggcgattgcaaacatccaggtgagagttgatatcagacggtgatggtgtcacagatgcgtttcatgcgatgggctcaattaatggcctccatgtttcacccttctctttcttgggactggcttgcctgctggaaggtgaggaaacagcctgtcatcccagctgaggccatcctagatcagccaactgtcagctgcttgtgtgtcagtgaaccccagccaagaccagaagacctgcccagctgagctcagccaagatcagcaaaacctctcagcttataaccttataaacttaccaatttaggtgtggttgtgacacagaattattgtattattgtatgcatggtgagtattgtatattacacatgggaatcatagaaacagtgaaaagccagtaatttctgagtatatattaaagttagggcaaattgtgtgaggtggagaagccacatactccaaatttctggcctgagacattggaagaatgaatatggatgatggaggtggatattgaatctgaaatgaatttttcattttgtgaaattttgtgaagtttcattttgtgttgaatatcttgtgactcaccgaaatgaaaatcataaaataaaatttgtccttaatgcatnnnnaaaaaaagcacatgaagggggccgacgtctagcgagcaacgggataacaggtcgcgtccttcgttgtcgtcctcgtctatttcattctgtcttgctgcgttggcgtccgtgtctgtggtcgtcgtttcttttgccgtcttgtgtgtttcacgtcgcttggctgagaccagctattcgtctccgcgctgcttactcgctccggcgatataccaacgccaggcgccctctgagcagaatcgataca

SEQ ID NO: 287685 - DNA, 1293 bp, Homo sapiens
  misc_feature (1046)..(1049): n is a, c, g, or t
ggttagaaatgctggatctcaatcccaacccaacctaaggaactggaatctgcattttaacaagatgccctggtgatttgtgtgtaccgagtttgggacaccacttgaggccaagacctctgagtgtaacaacagactgagagaattcctgattggggatctggaaactccaggagattggacctgcaccagagagaaaatttggaagagatggaggcagatgtggagccatggaagtcaaatgctgaggatggtggcatcataggatgaatggagctgggttcttgaaacactgcctggaggaaagacagcaaaaatgcctcatgaatccaactggactgttaggatgctcacccttggagaccagcaacaatgtgtgcagaaacccaggccatgtggagaggccccacatacgtgtccaactgaggtcccagctgacagctggcattgacataatgttactctgggggaagccagctgccacgctgtaaggacactcgggcagtcctatgaagaggcccgtgtggtgagaaagagaggcctccagccaacagccatgtgaggaaacagcctgtcatcccagctgaggccatcctagatcagccaactgtcagctgcttgtgtgtcagtgaaccccagccaagaccagaagacctgcccagctgagctcagccaagatcagcaaaacctctcagcttataaccttataaacttaccaatttaggtgtggttgtgacacagaattattgtattattgtatgcatggtgagtattgtatattacacatgggaatcatagaaacagtgaaaagccagtaatttctgagtatatattaaagttagggcaaattgtgtgaggtggagaagccacatactccaaatttctggcctgagacattggaagaatgaatatggatgatggaggtggatattgaatctgaaatgaatttttcattttgtgaaattttgtgaagtttcattttgtgttgaatatcttgtgactcaccgaaatgaaaatcataaaataaaatttgtccttaatgcatnnnnaaaaaaagcacatgaagggggccgacgtctagcgagcaacgggataacaggtcgcgtccttcgttgtcgtcctcgtctatttcattctgtcttgctgcgttggcgtccgtgtctgtggtcgtcgtttcttttgccgtcttgtgtgtttcacgtcgcttggctgagaccagctattcgtctccgcgctgcttactcgctccggcgatataccaacgccaggcgccctctgagcagaatcgataca

SEQ ID NO: 287686 - DNA, 401 bp, Homo sapiens
catagaaacagtgaaaagccagtaatttctgagtatatattaaagttagggcaaattgtgtgaggtggagaagccacatactccaaatttctggcctgagacattggaagaatgaatatggatgatggaggtggatattgaatctgaaatgaatttttcattttgtgaaattttgtgaagtttcattttgtgttgaatatcttgtgactcaccgaaatgaaaatcataaaataaaatttgtccttaatgcctaaaattttataatgttgttctattctttaggaaaaaaaattctggctgggcgtggtggctcacgtctgtaatcccaacagtttgggaggccattgaggtcaggagttcacgaccagcatggccaacatggtgaaaccccatctcttaaa

SEQ ID NO: 287687 - DNA, 331 bp, Homo sapiens
atctctgagaagttgccatttgagaaaaagagggagtaggctcagtggattctgagggaagaataagtttgagattctgagtcattcatgtccttggcagatcaataaagaggaagcagatgctgtggccggaactcagtgtgcatgttggggcagtggtaggaggctatggttgtaagacagggctacctcccatagggtcttgaagaccatagtaaagactgtggcatctcctctccagtagtttgagcagaggaatggtagcattctacttaggatttaaaaggtttgctctagctgatttgtggagaataggtttgtaaggcagcat

SEQ ID NO: 287688 - DNA, 641 bp, Homo sapiens
tttttttttcttcaattctatgtttaatatccatctacctggaaacttcacattccaggcctgccttccgggaacaacagggcgagggtggaaaaagagggttgcctccaggagaagcacgttttcctggggttggaactggggagaagcagggccggcacgaggagggaggtggtgggcgatggcgccttcggacaggggtggggtctgcaggatcccaggaccaggcagaggacgcggccttcccgggagtggggctgcagcgctgccctccaggcgccgatgaggagcccagggcgagagtccaactcgctggtgaggacctgaaacagcgcgaggcgggaggacgggtcgggaagggttttgagaaggaaagtttcgctacaggaggtgtctgcacggccctactgcagaaaagaccgggacgggaccagcctcagggcgactttaaactcaaaaggaaaagactcacggactcccacccggacgtctcaatttgctctgagttgagaaagaggggccggaatttccagcatcacgtctctgtatagagtcctctgagcagggtccaggcatttccactcctcctgagagaattctatggccacatccctgaatgtcagtagaccctgaaaggaaaa

SEQ ID NO: 287689 - DNA, 1544 bp, Homo sapiens
agcggggggcccggcccgttaagaagagcgtggccggccgcggccaccgctggccccagggaaagccgagcggccaccgagccggcagagacccaccgagcggcggcggagggagcagcgccggggcgcacgagggcaccatggcccagacgcccgccttcgacaagcccaaagtagaactgcatgtccacctagacggatccatcaagcctgaaaccatcttatactatggcaggaggagagggatcgccctcccagctaacacagcagaggggctgctgaacgtcattggcatggacaagccgctcacccttccagacttcctggccaagtttgactactacatgcctgctatcgcgggctgccgggaggctatcaaaaggatcgcctatgagtttgtagagatgaaggccaaagagggcgtggtgtatgtggaggtgcggtacagtccgcacctgctggccaactccaaagtggagccaatcccctggaaccaggctgaaggggacctcaccccagacgaggtggtggccctagtgggccagggcctgcaggagggggagcgagacttcggggtcaaggcccggtccatcctgtgctgcatgcgccaccagcccaactggtcccccaaggtggtggagctgtgtaagaagtaccagcagcagaccgtggtagccattgacctggctggagatgagaccatcccaggaagcagcctcttgcctggacatgtccaggcctaccaggaggctgtgaagagcggcattcaccgtactgtccacgccggggaggtgggctcggccgaagtagtaaaagaggctgtggacatactcaagacagagcggctgggacacggctaccacaccctggaagaccaggccctttataacaggctgcggcaggaaaacatgcacttcgagatctgcccctggtccagctacctcactggtgcctggaagccggacacggagcatgcagtcattcggctcaaaaatgaccaggctaactactcgctcaacacagatgacccgctcatcttcaagtccaccctggacactgattaccagatgaccaaacgggacatgggctttactgaagaggagtttaaaaggctgaacatcaatgcggccaaatctagtttcctcccagaagatgaaaagagggagcttctcgacctgctctataaagcctatgggatgccaccttcagcctctgcagggcagaacctctgaagacgccactcctccaagccttcaccctgtggagtcaccccaactctgtggggctgagcaacatttttacatttattccttccaagaagaccatgatctcaatagtcagttactgatgctcctgaaccctatgtgtccatttctgcacacacgtatacctcggcatggccgcgtcacttctctgattatgtgccctggccagggaccagcgcccttgcacatgggcatggttgaatctgaaaccctccttctgtggcaacttgtactgaaaatctggtgctcaataaagaagcccatggctggtggcatgca

SEQ ID NO: 287690 - DNA, 950 bp, Homo sapiens
  misc_feature (862)..(862): n is a, c, g, or t
agcggggggcccggcccgttaagaagagcgtggccggccgcggccaccgctggccccagggaaagccgagcggccaccgagccggcagagacccaccgagcggcggcggagggagcagcgccggggcgcacgagggcaccatggcccagacgcccgccttcgacaagcccaaagtagaactgcatgtccacctagacggatccatcaagcctgaaaccatcttatactatggcaggaggagagggatcgccctcccagctaacacagcagaggggctgctgaacgtcattggcatggacaagccgctcacccttccagacttcctggccaagtttgactactacatgcctgctatcgcgggctgccgggaggctatcaaaaggatcgcctatgagtttgtagagatgaaggccaaagagggcgtggtgtatgtggaggtgcggtacagtccgcacctgctggccaactccaaagtggagccaatcccctggaaccaggctgaaggggacctcaccccagacgaggtggtggccctagtgggccagggcctgcaggagggggagcgagacttcggggtcaaggcccggtccatcctgtgctgcatgcgccaccagcccaactggtcccccaaggtggtggagctgtgtaagaagtaccagcagcagaccgtggtagccattgacctggctggagatgagaccatcccaggaagcagcctcttgcctggacatgtccaggcctaccaggctgtggacatactcaagacagagcggctgggacacggctaccacaccctggaagaccaggccctttataacaggctgcggcaggaaaacatgcacttcgagatctgccctggtcnagtactcaatggtgcctgaaagcacggaacagacacatcaacacacacgctcacaactacaaggcatgatatcagcaaacaagaatag

SEQ ID NO: 287691 - DNA, 2012 bp, Homo sapiens
agcggggggcccggcccgttaagaagagcgtggccggccgcggccaccgctggccccagggaaagccgagcggccaccgagccggcagagacccaccgagcggcggcggagggagcagcgccggggcgcacgagggcaccatggcccagacgcccgccttcgacaagcccaaagtagaactgcatgtccacctagacggatccatcaagcctgaaaccatcttatactatggcaggaggagagggatcgccctcccagctaacacagcagaggggctgctgaacgtcattggcatggacaagccgctcacccttccagacttcctggccaagtttgactactacatgcctgctatcgcgggctgccgggaggctatcaaaaggatcgcctatgagtttgtagagatgaaggccaaagagggcgtggtgtatgtggaggtgcggtacagtccgcacctgctggccaactccaaagtggagccaatcccctggaaccaggctgaaggggacctcaccccagacgaggtggtggccctagtgggccagggcctgcaggagggggagcgagacttcggggtcaaggcccggtccatcctgtgctgcatgcgccaccagcccaactggtcccccaaggtggtggagctgtgtaagaagtaccagcagcagaccgtggtagccattgacctggctggagatgagaccatcccaggaagcagcctcttgcctggacatgtccaggcctaccaggaggctgtgaagagcggcattcaccgtactgtccacgccggggaggtgggctcggccgaagtagtaaaagaggctgtggacatactcaagacagagcggctgggacacggctaccacaccctggaagaccaggccctttataacaggctgcggcaggaaaacatgcacttcgagatctgcccctggtccagctacctcactggtgcctggaagccggacacggagcatgcagtcattcggctcaaaaatgaccaggctaactactcgctcaacacagatgacccgctcatcttcaagtccaccctggacactgattaccagatgaccaaacgggacatgggctttactgaagaggagtttaaaaggctgaacatcaatgcggccaaatctagtttcctcccagaagatgaaaagagggagcttctcgacctgctctataaagcctatgggatgccaccttcagcctctgcagggcagaacctctgaagacgccactcctccaagccttcaccctgtggagtcaccccaactctgtggggctgagcaacatttttacatttattccttccaagaagaccatgatctcaatagtcagttactgatgctcctgaaccctatgtgtccatttctgcacacacgtatacctcggcatggccgcgtcacttctctgattatgtgccctggccagggaccagcgcccttgcacatgggcatggttgaatctgaaaccctccttctgtggcaacttgtactgaaaatctggtgctcaataaagaagcccatggctggtggcatgcaaaaaaaaaaaaaaaaaaaaaaaaaaaaaaaaaaaaaaaaaaaaaaaaaaaaaaaaaaaaaaaaaaaaaaaaaaaagaaaaaaaaaaaaaaaaaaaggggggggggcaccaaagaaaacccccaggggggcccaaaaacaaggacaagagaggtttggtaaaaagaggggcgcataatagagagcgataaaaatagaagagaagtagacgggagagtaaacaacaaggtggaggggagaaaacgtggtggagaagtatttaaagacgaagcaccacaaccagaggggcggggagacaaacaacacgggcgcgcaaaccccccaccacagagcagaaagagacgacgaagagagacacacagcaacgcacgagcggaggtataaggcgaacacacccacgcagaatataacgcggcggcgagacaagaccgacgccccgcggagccgatacacaccgaaaaataatacag

SEQ ID NO: 287692 - DNA, 1595 bp, Homo sapiens
agcggggggcccggcccgttaagaagagcgtggccggccgcggccaccgctggccccagggaaagccgagcggccaccgagccggcagagacccaccgagcggcggcggagggagcagcgccggggcgcacgagggcaccatggcccagacgcccgccttcgacaagcccaaagtagaactgcatgtccacctagacggatccatcaagcctgaaaccatcttatactatggcaggaggagagggatcgccctcccagctaacacagcagaggggctgctgaacgtcattggcatggacaagccgctcacccttccagacttcctggccaagtttgactactacatgcctgctatcgcgggctgccgggaggctatcaaaaggatcgcctatgagtttgtagagatgaaggccaaagagggcgtggtgtatgtggaggtgcggtacagtccgcacctgctggccaactccaaagtggagccaatcccctggaaccaggctgaaggggacctcaccccagacgaggtggtggccctagtgggccagggcctgcaggagggggagcgagacttcggggtcaaggcccggtccatcctgtgctgcatgcgccaccagcccaactggtcccccaaggtggtggagctgtgtaagaagtaccagcagcagaccgtggtagccattgacctggctggagatgagaccatcccaggaagcagcctcttgcctggacatgtccaggcctaccaggaggctgtgaagagcggcattcaccgtactgtccacgccggggaggtgggctcggccgaagtagtaaaagaggctgtggacatactcaagacagagcggctgggacacggctaccacaccctggaagaccaggccctttataacaggctgcggcaggaaaacatgcacttcgagatctgcccctggtccagctacctcactggtgcctggaagccggacacggagcatgcagtcattcggctcaaaaatgaccaggctaactactcgctcaacacagatgacccgctcatcttcaagtccaccctggacactgattaccagatgaccaaacgggacatgggctttactgaagaggagtttaaaaggctgaacatcaatgcggccaaatctagtttcctcccagaagatgaaaagagggagcttctcgacctgctctataaagcctatgggatgccaccttcagcctctgcagggcagaacctctgaagacgccactcctccaagccttcaccctgtggagtcaccccaactctgtggggctgagcaacatttttacatttattccttccaagaagaccatgatctcaatagtcagttactgatgctcctgaaccctatgtgtccatttctgcacacacgtatacctcggcatggccgcgtcacttctctgattatgtgccctggccagggaccagcgcccttgcacatgggcatggttgaatctgaaaccctccttctgtggcaacttgtactgaaaatctggtgctcaataaagaagcccatggctggtggcatgcaaacaaaaatacctttcaaaaacataatcttcctcggcctccttggcctcaa

SEQ ID NO: 287693 - DNA, 1620 bp, Homo sapiens
agcggggggcccggcccgttaagaagagcgtggccggccgcggccaccgctggccccagggaaagccgagcggccaccgagccggcagagacccaccgagcggcggcggagggagcagcgccggggcgcacgagggcaccatggcccagacgcccgccttcgacaagcccaaagtagaactgcatgtccacctagacggatccatcaagcctgaaaccatcttatactatggcaggaggagagggatcgccctcccagctaacacagcagaggggctgctgaacgtcattggcatggacaagccgctcacccttccagacttcctggccaagtttgactactacatgcctgctatcgcgggctgccgggaggctatcaaaaggatcgcctatgagtttgtagagatgaaggccaaagagggcgtggtgtatgtggaggtgcggtacagtccgcacctgctggccaactccaaagtggagccaatcccctggaaccaggctgaaggggacctcaccccagacgaggtggtggccctagtgggccagggcctgcaggagggggagcgagacttcggggtcaaggcccggtccatcctgtgctgcatgcgccaccagcccaactggtcccccaaggtggtggagctgtgtaagaagtaccagcagcagaccgtggtagccattgacctggctggagatgagaccatcccaggaagcagcctcttgcctggacatgtccaggcctaccaggaggctgtgaagagcggcattcaccgtactgtccacgccggggaggtgggctcggccgaagtagtaaaagaggtgagggcctgggctggccatggggtccctcctcactgcctcctcccatacttggctctattctgcttctctacaggctgtggacatactcaagacagagcggctgggacacggctaccacaccctggaagaccaggccctttataacaggctgcggcaggaaaacatgcacttcgagatctgcccctggtccagctacctcactggtgcctggaagccggacacggagcatgcagtcattcggctcaaaaatgaccaggctaactactcgctcaacacagatgacccgctcatcttcaagtccaccctggacactgattaccagatgaccaaacgggacatgggctttactgaagaggagtttaaaaggctgaacatcaatgcggccaaatctagtttcctcccagaagatgaaaagagggagcttctcgacctgctctataaagcctatgggatgccaccttcagcctctgcagggcagaacctctgaagacgccactcctccaagccttcaccctgtggagtcaccccaactctgtggggctgagcaacatttttacatttattccttccaagaagaccatgatctcaatagtcagttactgatgctcctgaaccctatgtgtccatttctgcacacacgtatacctcggcatggccgcgtcacttctctgattatgtgccctggccagggaccagcgcccttgcacatgggcatggttgaatctgaaaccctccttctgtggcaacttgtactgaaaatctggtgctcaataaagaagcccatggctggtggcatgca

SEQ ID NO: 287694 - DNA, 899 bp, Homo sapiens
catgacctggctctcccccttccaggaggctgtgaagagcggcattcaccgtactgtccacgccggggaggtgggctcggccgaagtagtaaaagaggtgagggcctgggctggccatggggtccctcctcactgcctcctcccatacttggctctattctgcttctctacaggctgtggacatactcaagacagagcggctgggacacggctaccacaccctggaagaccaggccctttataacaggctgcggcaggaaaacatgcacttcgagatctgcccctggtccagctacctcactggtgcctggaagccggacacggagcatgcagtcattcggctcaaaaatgaccaggctaactactcgctcaacacagatgacccgctcatcttcaagtccaccctggacactgattaccagatgaccaaacgggacatgggctttactgaagaggagtttaaaaggctgaacatcaatgcggccaaatctagtttcctcccagaagatgaaaagagggagcttctcgacctgctctataaagcctatgggatgccaccttcagcctctgcagggcagaacctctgaagacgccactcctccaagccttcaccctgtggagtcaccccaactctgtggggctgagcaacatttttacatttattccttccaagaagaccatgatctcaatagtcagttactgatgctcctgaaccctatgtgtccatttctgcacacacgtatacctcggcatggccgcgtcacttctctgattatgtgccctggccagggaccagcgcccttgcacatgggcatggttgaatctgaaaccctccttctgtggcaacttgtactgaaaatctggtgctcaataaagaagcccatggctggtggcatgca

SEQ ID NO: 287695 - DNA, 1183 bp, Homo sapiens
agcggggggcccggcccgttaagaagagcgtggccggccgcggccaccgctggccccagggaaagccgagcggccaccgagccggcagagacccaccgagcggcggcggagggagcagcgccggggcgcacgagggcaccatggcccagacgcccgccttcgacaagcccaaagtagaactgcatgtccacctagacggatccatcaagcctgaaaccatcttatactatggcaggaggagagggatcgccctcccagctaacacagcagaggggctgctgaacgtcattggcatggacaagccgctcacccttccagacttcctggccaagtttgactactacatgcctgctatcgcgggctgccgggaggctatcaaaaggatcgcctatgagtttgtagagatgaaggccaaagagggcgtggtgtatgtggaggtgcggtacagtccgcacctgctggccaactccaaagtggagccaatcccctggaaccaggctgaaggggacctcaccccagacgaggtggtggccctagtgggccagggcctgcaggagggggagcgagacttcggggtcaaggcccggtccatcctgtgctgcatgcgccaccagcccaactggtcccccaaggtggtggagctgtgtaagaagtaccagcagcagaccgtggtagccattgacctggctggagatgagaccatcccaggaagcagcctcttgcctggacatgtccaggcctaccaggtgggtcctgtgagaaggaatggagaggctggccctgggtgagcttgtctcccacccatagttgggagaaatcacaagaaccagggaccatggtgtctcctgagttctgaagtgtgtctttgttgggtcttaaggcttggaactggaatccccctgggccaggcgtggtggttcatgcctgtgatcccagcactttgggaggcgaggcaggaggattgcttgagcctaggagtttgagaccagccagggcaacatagtgagatccatctctgcaaatacaaaaaaaagtagtcaggcatggtggtgcatgcctgtagtcccagctacttgggaggctgaggtgggagaattgcttgagtccaggaagtcaaagctgcagtgagctgtgataatgcgactgcactccagcctgggtgacagagggagaccctgtctca

SEQ ID NO: 287696 - DNA, 186 bp, Homo sapiens
ctgattaccagatgaccaaacgggacatgggctttactgaagaggagtttaaaaggctggtgagtgggtgtgagccatactggccttgactcgggtttgggagtatggtatctacaggtccagtccggggcctggaatctttggagagagggagtgagtctgcctcaacagtccaagacaagccca

SEQ ID NO: 287697 - DNA, 802 bp, Homo sapiens
aacatcaatgcggccaaatctagtttcctcccagaagatgaaaagagggagcttctcgacctgctctataaagcctatgggatgccaccttcagcctctgcaggtaggttcctgtctgggcttctgggcagttgccctgtcctggccccagtgtggctttctgtgggacttctagcaagatgcccttccattcttgggcagcgccatgaatgtgtgatgactccctggtttctgggccctggctgggagcagcgtctcattagatcggtttgttttctataaaagttcttgagaggctgttctaaggggagactttctgaagcccagtcccaaaggtctgggcagttggggacacctccatggctgcccaaagccaagggcagggagaggggcccaggcctgttctgctcctttcttcctatgtggtcttggcaaggcatcttcttgccatcataggaaggagttcctttctggttctggtgttctatgatttttacaacatcctgggtactacaagttgcctgatctttttgcttctctgaaccaacgagcagggcagaacctctgaagacgccactcctccaagccttcaccctgtggagtcaccccaactctgtggggctgagcaacatttttacatttattccttccaagaagaccatgatctcaatagtcagttactgatgctcctgaaccctatgtgtccatttctgcacacacgtatacctcggcatggccgcgtcacttctctgattatgtgccctggccagggaccagcgcccttgcacatgggcatggttga

SEQ ID NO: 287698 - DNA, 1686 bp, Homo sapiens
  misc_feature (1686)..(1686): n is a, c, g, or t
gccccggcgcgtctaggtcccccaggtctctccgggcctccggctccgtatagccgcgcatcctagcccgaagctgatgctgcccggtcggctccggccttcccggctgcctgacccgccgggccccaagccccgggctccggcctgggcccagcggcctggagcgcggccttggcccgtctgcccgccgcctcgccgccacgacttcgcccgtctgtgccccaccggccgcacctttgaataggtagtcgtactcgtcgtcccgggtccccattgtcctggcgcttccggcgggatcggcgactccgcagccccaccacaaacacccgacgggggcggagccggcgccgcgcagagcggcggttgaatggcctatcagcggcgagtggagtagcgacgggcacccagcgaagccaatcagagatggaagtagtgctctgagggtgggcgccgcttggtaccaccctcctcgccctcggtgtcctggagaaaggcggaaggaatgcggacctttttgaagtgacggacgcgccagcctatcaggggcgagctcaagagggcggggcggaagactgcaggaatgaaatggattgacagaccaaataactaatgagaggcttgattgagaacctacccgactatcagaggacctgtccgggaagagaaatggggctacgtccagacagaatctcgctctgttgcctgggctggagtgcagtggcactgtatccggaattggggggttcttggtctcactgacttcaagaatgaagccacggacccttgcgagatgggggttccaccatgttggcccggctggtctcgaactgctgacctcaagtgacctgcctgtctcggcctcacaaatggctgggattacaggcacgagacaccgtgcctggccctgggaacatgtttacatggactttgttcactttttaaaacaaactgagggtaacttactagatctgtgaactaaagaaagagaaaaaaaagaaagaaaacaaacaagaacaaaaaaaaaaaaaaaaaaaaaaaaaaaaaaaaaaaaaaaaaaaaaagaaacaaaaaaaaagggggggcgggcgggccgcctaagaagaattcccccccggggggggcgccacacgataactcgcgcgacgaccaccgacggtaattggtgagacaaagaggggcgcgccacaataaaggagagagcgcgcgtataataaaaacctaccgagcgacgagcgaggcgcgcgcgagagttaaacaacacggtagggagcaggagaggggaaacaacacgatccggcgcggtcctgcgcgaggaggaacaccactgtgtggagagacacgagcagacaccacctaacctccactggcgaggggggggagcgagacaacaaaatatggggggggcaacacacaatctactcgctagcttagcagaaaagtattttatatagcgccccccctaggcggggcgggaatcaaatataacaacaaactctctcaaacacgcggggttaattaatggcggtgggtcatagccaccaccagaagccggacataatttaacgactcgtcgcgccgtagaagaacagaatctcgcgcgtacattctgagggcagtttagtgctatctaccaaaagccagcatttattttacacgacggcgtatgctggataatataaaagtgtn

SEQ ID NO: 287699 - DNA, 1743 bp, Homo sapiens
  misc_feature (1743)..(1743): n is a, c, g, or t
gccccggcgcgtctaggtcccccaggtctctccgggcctccggctccgtatagccgcgcatcctagcccgaagctgatgctgcccggtcggctccggccttcccggctgcctgacccgccgggccccaagccccgggctccggcctgggcccagcggcctggagcgcggccttggcccgtctgcccgccgcctcgccgccacgacttcgcccgtctgtgccccaccggccgcacctttgaataggtagtcgtactcgtcgtcccgggtccccattgtcctggcgcttccggcgggatcggcgactccgcagccccaccacaaacacccgacgggggcggagccggcgccgcgcagagcggcggttgaatggcctatcagcggcgagtggagtagcgacgggcacccagcgaagccaatcagagatggaagtagtgctctgagggtgggcgccgcttggtaccaccctcctcgccctcggtgtcctggagaaaggcggaaggaatgcggacctttttgaagtgacggacgcgccagcctatcaggggcgagctcaagagggcggggcggaagactgcaggaatgaaatggattgacagaccaaataactaatgagaggcttgattgagaacctacccgactatcagaggacctgtccgggaagagaaatggggctacgtccagacagaatctcgctctgttgcctgggctggagtgcagtggcactgtatccggaattggggggttcttggtctcactgacttcaagaatgaagccacggacccttgcggtaagtgttccagctcttaaggtggcgcgtctggagtttgtttcttctgatgttcagagatgggggttccaccatgttggcccggctggtctcgaactgctgacctcaagtgacctgcctgtctcggcctcacaaatggctgggattacaggcacgagacaccgtgcctggccctgggaacatgtttacatggactttgttcactttttaaaacaaactgagggtaacttactagatctgtgaactaaagaaagagaaaaaaaagaaagaaaacaaacaagaacaaaaaaaaaaaaaaaaaaaaaaaaaaaaaaaaaaaaaaaaaaaaaagaaacaaaaaaaaagggggggcgggcgggccgcctaagaagaattcccccccggggggggcgccacacgataactcgcgcgacgaccaccgacggtaattggtgagacaaagaggggcgcgccacaataaaggagagagcgcgcgtataataaaaacctaccgagcgacgagcgaggcgcgcgcgagagttaaacaacacggtagggagcaggagaggggaaacaacacgatccggcgcggtcctgcgcgaggaggaacaccactgtgtggagagacacgagcagacaccacctaacctccactggcgaggggggggagcgagacaacaaaatatggggggggcaacacacaatctactcgctagcttagcagaaaagtattttatatagcgccccccctaggcggggcgggaatcaaatataacaacaaactctctcaaacacgcggggttaattaatggcggtgggtcatagccaccaccagaagccggacataatttaacgactcgtcgcgccgtagaagaacagaatctcgcgcgtacattctgagggcagtttagtgctatctaccaaaagccagcatttattttacacgacggcgtatgctggataatataaaagtgtn

SEQ ID NO: 287700 - DNA, 1084 bp, Homo sapiens
  misc_feature (1084)..(1084): n is a, c, g, or t
ctgcagactggactcaccaccagctccagtgacagtgggctcagaggagatcctctaagcctgctcagtacaggacacagacagaatctcgctctgttgcctgggctggagtgcagtggcactgtatccggaattggggggttcttggtctcactgacttcaagaatgaagccacggacccttgcgagatgggggttccaccatgttggcccggctggtctcgaactgctgacctcaagtgacctgcctgtctcggcctcacaaatggctgggattacaggcacgagacaccgtgcctggccctgggaacatgtttacatggactttgttcactttttaaaacaaactgagggtaacttactagatctgtgaactaaagaaagagaaaaaaaagaaagaaaacaaacaagaacaaaaaaaaaaaaaaaaaaaaaaaaaaaaaaaaaaaaaaaaaaaaaagaaacaaaaaaaaagggggggcgggcgggccgcctaagaagaattcccccccggggggggcgccacacgataactcgcgcgacgaccaccgacggtaattggtgagacaaagaggggcgcgccacaataaaggagagagcgcgcgtataataaaaacctaccgagcgacgagcgaggcgcgcgcgagagttaaacaacacggtagggagcaggagaggggaaacaacacgatccggcgcggtcctgcgcgaggaggaacaccactgtgtggagagacacgagcagacaccacctaacctccactggcgaggggggggagcgagacaacaaaatatggggggggcaacacacaatctactcgctagcttagcagaaaagtattttatatagcgccccccctaggcggggcgggaatcaaatataacaacaaactctctcaaacacgcggggttaattaatggcggtgggtcatagccaccaccagaagccggacataatttaacgactcgtcgcgccgtagaagaacagaatctcgcgcgtacattctgagggcagtttagtgctatctaccaaaagccagcatttattttacacgacggcgtatgctggataatataaaagtgtn

SEQ ID NO: 287701 - DNA, 627 bp, Homo sapiens
tatctttgtcttcataagggctgctaggctgtttcgtagcagtctccgggctactaggccgttgtgtgctggtagtacctggttcactgaaaggcgcatctccctccccgcgtcgccctgaagcaggggaaggacttcgcccagccaaggcagttgtatgagttttagctgcagcacttcgagacctgcaggagttaattgaggacgtgggagaggaaggaaatcagctcaaagggagaacagaaaaccccctccccaactcccatccacctttcctaactggacaaccctcttccaaaaagcctttagtcgcacaactcaaatcattcactgaaatgcaagtacagtccactttggttcttcttttcccaacacaatcccaaagagcgttctccctctacccctttactcacctcccccaaacatccccaaaccatccacccagcccactccctacccgcttcattcacaactcacctctgagcccacctccttcaggaagccttccccgattaaggaagccagggtaaggattccttcctcccccagacaccacgaacaaaccaccaccccccctattctggcagtccatatacatcagaacgaaacaaaaataacaaataaaca

SEQ ID NO: 287702 - DNA, 316 bp, Homo sapiens
ccccggggcccgcgcccccgcggcagggatgcatcatggccacgctggcttgccgggtgcagttcttggacgacacggaccctttcaacagcaccaacttccccgagcccagccggccgccgctgttcacgttccgcgaggacctcgcgctcggcacccagctggcgggggtccataggctgctgcaggcgccgcacaagctggatgactgtactctgcagctctctcacaatggcgcctacctggatttggaggccaccctggcagagcagcgggatgagttggaaggcttccaggatgacgccgggtaagagca

SEQ ID NO: 287703 - DNA, 2782 bp, Homo sapiens
  misc_feature (820)..(820): n is a, c, g, or t
  misc_feature (1379)..(1379): n is a, c, g, or t
  misc_feature (1388)..(1388): n is a, c, g, or t
  misc_feature (1399)..(1399): n is a, c, g, or t
  misc_feature (1440)..(1441): n is a, c, g, or t
  misc_feature (1620)..(1621): n is a, c, g, or t
  misc_feature (2550)..(2550): n is a, c, g, or t
agtactagcttcagaaggaaaagctttattttctcagagaaaagggtggtagattaaggaaatgacccagcatgttggtattttgttgttgttgttgtttaggtgtacatttaaatgcttatcaaaaaggaaacattgtcatgtcaaagaccactgcaggggaagcccagaggtggctgtaagcaagcagatcacaagtcctttaacaagttctttcaaatagcagtagagctcagaggggggctgttgtttcaaacaagattcaattagcatcaagttattaaagggcagccggggaaacaagaataatattgacagacctgctttttaagcagtatcttttccctctaatcagctgagtttgttggagctgatcattttatttcttcaactccattcaactataggtgcaaagaatgagaacttcagtgtaactccaattttctaagagaactaatcatattgctgctttataaaaaaggtaatctttcacagttgcttagatttatgaataattagatttaaagcattatactggaatctagaaatctagctaaaagagctgaggttcttatctgaattatttgggccgttagccttctgttgaactatagaaagaacttaaagatatagttgtaaaataaggacgtactccccaaaactgtcccaagtatccacttgattctgtatctttatattgcatctttttctcatatttctgcaagtttacataaactctggtcaactatgaatgcctcccgggatgagaaatgggagtttgggtgaaatagattagagaataggttttggggtttttttnaaccacatactctcttgtcaactttcaagttttgtgcttgtacctcttccaaagtattcatttgaaaatatttcatttttgaaatcagaaaggcactgtctgtgctctctctccgccagatactcagtctgggttacaggaagtagaaatttgtgactactagcctttcccagcctcctttgtaactcttgactttggaaatgggaattcagccactgagaactttttgatgtgcagctgcctttctcagggaacactaaccaagaaacaaagtcttcaggtcacctttcctcttccttttgtgaggacaggagacaaaagaacaagatctccctgaagtgtctccttggctttacaacattccacagtaggcacctaacacttgagttaaatgtgcagactacacacctaccataaaattagggcactcaaggtaaggaaagtatttccatagttacttggatatttggcagagtagttttctctcttaaactactaattgcccataacttgctgggtgtgtacacaacctgtaggaagtattatttttaaaagttancggctgggngtggtggctcncgtttgtaattctagcactttgtgaggccgaggtgggcggnncacctgaggtcaggagttcgagtccaacctggccaacatggtgaaccccgtctctactaaaaaaaatacaaaaaattagctgggcatggtgctcatgcctgtaatcccagctactggggatggtgaggcaggagaatcacttgaacctgggaggcagaggttgtggtgagccagaattnngccactgcactccagcctgggcaacagagcaagactccgtgtcaaaaaaaaaaaaaagttatcaacataaacaaattctcatagcagaatcaagaaaattcaaatacaggaaactgaatcaactttaaagaaagagaatcattattaaagagtgtaagaaaagcagagagcagcagattctataatttttattacaaaaaaaaccctttacatgctatgacattaaatgtcacttataaggtcattgcaagcaaatctttttaaaaaatatacatactgtatatatttacattcaagtttgaataatatttgtcaagatatagttcagattctactctttacccattctgtggatttgttcatctagtaactaaacagcgattgtatcatcactcaggcacatagagaggtagaaaccgcttttttaaagaaaaaaaaactggagtgcaaatgtgaagatcactgaagcagcttagctacatcaaggagaccctaactagctttggtcatctcaaaaagctgaatatatgtagccttgtcctttaaattaaaaccagaaaaactttgggcaggtgctcttctgagcacatcagagtgctgacagaactcagcaactaatggtctgccactctgcaacgcgaattgcacatgactaagtgaggcaaagatagcagcggagctgggctggcagctgggcaccttttccctgataagacacaaatcataaccaaacaagtggcttacaagacagtcaattaatatctggacatatagtctggaactcggaagccaactaaagtacttcatttcccaagtgaaatccctattcatttttgttctcccacctccatcccaaactgagctcctaagtctagatagggatgggggtcgcctgggacttctgcaggccacagtttttcggccccaantaccggcctcacgaaggctcttgggactgagaagggctgccggggttcttgataaacttagtgggggttgttccagagaggggaagttggaggggagccacaggaatggccgtggccagaagcccttctcgttcccttttcttctgtttcatcctgcggttctggaaccagattttgacttgcgtgtcattcaggtgcaagcagttggctatctcgatgcgccgggctcgag

SEQ ID NO: 287704 - DNA, 1723 bp, Homo sapiens
gggcgggggggtggggggaaaaggggaggtgggaggggcccgggagaggaggggcgtctgcccttgtttcccccgttaacgtttaatttgggaacgagatgcccggggatgcaaccagccccgcgctcggaggcggcggtcggagttccgtgcgcagagggcacacaaaagcctcgaggatcattgcctcgaccccatcccccaccgcgcggcgacgccccctacgggctgggacacctccaccctcggactgctgccgggtttccctccggctgcgaccctggagagtttgccatctccgtaccaccaccaccaccacacacagcaccctcaagactccctgtgatcctgggatgcactcaacgaagagtgtgtggcccaggatttgatggaaatgctacaagagaagcaggctctccccttctgaaatgatgagtgataatgaccatacaggtcaacttttccaccacttggagggagcctgtcaaagaacaaaggcaacagagaagagagcagagctgaggttgggtgagagggagaaattcctgagtgcttgaatcccacatgccggaagccgcaccacacttggacttctcaatacaggagccactgagaaaccaagtcatgctgaagacctggaaatcccagcaggctgcaaaccagctgcaactacaatgggtcagcccttttgagatgctgctgactacccacttatctgccaagttagccagtgttaagccatggattcaccacgctcagataaaacctgcccctctgggatccctccagaaaaaaacaggcatgctgttgtgaaccctaagatggccttaagttaatattcaatgcccagccaaagaccctaaataagaagtcataaaggaaacatgtgcttttcaggtaccaatcaccctccagatctaagaatggcttcaggctggggctgcagtcacctctttgcccagcttctcccctgccctattctgcttcacttgcatccttaaaggttccacccaagagctcttctacaagaaagcacctataaagccagacacattggcttatgcctataatcctagcactttgggaggccaaggtaggaggatggcttgaggccaggagttcaagaccagcctgggcaacttggtgaggccccgtctctataaaaaataaaaaaattaaccaggtgtggtggtgcacgtctctagtctcagctactcaggaggctgtggcaggaagatggcttgagcccaggaggttgaggctgcagtgaactgagatcatgccactgcacccatcttgggcaacagaatgagatcctgtctctaaaaaaataaaaacaatttacaacagtaagcacctgtacacaagccccatctccagtcctgtttctagggcttccaatttaacacacctagaggctgggcatagtagctcatgcctgtaatcccaatactttgggaggctgaggcaagtgaagcacttgaggtcaggagttcgagaccagcctggccaacatggcaaaaccccatctctactaaaaatgcaaacattagctgggcatggtggcacatgcctgtaatcccagctactcgggaggctgagacaggagaatcacttgaacccaggaggtggaggttacagtgagccaagatcacaccactgtaccacagcctgagcaacgaaagaagactctgtctaaaaaaagtaaaaaataaaataaaac

SEQ ID NO: 287705 - DNA, 538 bp, Homo sapiens
gatggctcctccgccgaccccgcggtcccccactggctccgcgtcccttccccgccattcccggagggctcaaggcaccgcagggtcatgagagaagggtcaccgcggcaaagacaggtggccgcccgagctggggtcagagaagggttcgcgtccttccttgaagtcagtgcgaatcccaaaacgagtccctgcggggtgtccgaaatggtggcagagagagaagggatggggctctttctccccagatcctggaggacggatgacaaagtccctcgcagccgcggtcacccactgatcgcctgccgcgggcgcccgagctgcgggcacggggtatcctgaggctgtgcacccgggaccccggcgcgcactgtccgcgggccacgcggtgagggtggctgcgggcgagagggctcatgcttcaggggaagcccaaggcccgccagccgcggcggctgcgacgagacttggcaagagttaaacgtcggtcccaggagcagcgagtgcgcgcgacttcccagaccgacgcgcctccctt

SEQ ID NO: 287706 - DNA, 748 bp, Homo sapiens
agaatctagagaccagaggtcacaaaccacctgcctatcgggaccatatttgactcactcagagtgttctggttggtatgccaggattctctaaagaaaatgtgaactaaattgagatttcatctccaaagagaaccagatttctgctttctcttaatcagccataaggtctgtcaatactgggtcccatttcctcaaggcagtgatcaactgaagcagaggagtgagtgcctgccttagaaggcatgtgccctcccgtttgcccaatcctcacccgccccaaggtctccccaacactgagcattgcttgccttttgtcatcacccttgcattactgtttcttatggtggagagatatttatttggacccaagtctctaccagaagtgacgaaataaaagacagacccagaaggctgaatatgtcagaataaaagggagaaggcatatttctctgtggaagaaaataatattcctctgtgtttaagagactgggttctcacacctgatgtatttcattcttctatattcccacctagctctgcaggcatttattggcaggctacacctaagactttctctgcagaaaaatgttctagatgcacagatttgggggcttgattgacaacctgacacctcactctaaatccgcatgggtctgttgacctcaggtgagaacacttgttctaagggagtggaaggtctttattaagataaccctgagaaataaaagtctgccttgagcattgt

SEQ ID NO: 287707 - DNA, 385 bp, Homo sapiens
gggcgggggggtggggggaaaaggggaggtgggaggggcccgggagaggaggggcgtctgcccttgtttcccccgttaacgtttaatttgggaacgagatgcccggggatgcaaccagccccgcgctcggaggcggcggtcggagttccgtgcgcagagggcacacaaaagcctcgaggatcattgcctcgaccccatcccccaccgcgcggcgacgccccctacgggctgggacacctccaccctcggactgctgccgggtttccctccggctgcgaccctggaggtgggaaggagagagggagggagggaggaaggagcgagggcgggaggcaggccggtggggaggagcgggagatcaggttattaggaggattattaattt

SEQ ID NO: 287708 - DNA, 1627 bp, Homo sapiens
gggcgggggggtggggggaaaaggggaggtgggaggggcccgggagaggaggggcgtctgcccttgtttcccccgttaacgtttaatttgggaacgagatgcccggggatgcaaccagccccgcgctcggaggcggcggtcggagttccgtgcgcagagggcacacaaaagcctcgaggatcattgcctcgaccccatcccccaccgcgcggcgacgccccctacgggctgggacacctccaccctcggactgctgccgggtttccctccggctgcgaccctggaggatttgatggaaatgctacaagagaagcaggctctccccttctgaaatgatgagtgataatgaccatacaggtcaacttttccaccacttggagggagcctgtcaaagaacaaaggcaacagagaagagagcagagctgaggttgggtgagagggagaaattcctgagtgcttgaatcccacatgccggaagccgcaccacacttggacttctcaatacaggagccactgagaaaccaagtcatgctgaagacctggaaatcccagcaggctgcaaaccagctgcaactacaatgggtcagcccttttgagatgctgctgactacccacttatctgccaagttagccagtgttaagccatggattcaccacgctcagataaaacctgcccctctgggatccctccagaaaaaaacaggcatgctgttgtgaaccctaagatggccttaagttaatattcaatgcccagccaaagaccctaaataagaagtcataaaggaaacatgtgcttttcaggtaccaatcaccctccagatctaagaatggcttcaggctggggctgcagtcacctctttgcccagcttctcccctgccctattctgcttcacttgcatccttaaaggttccacccaagagctcttctacaagaaagcacctataaagccagacacattggcttatgcctataatcctagcactttgggaggccaaggtaggaggatggcttgaggccaggagttcaagaccagcctgggcaacttggtgaggccccgtctctataaaaaataaaaaaattaaccaggtgtggtggtgcacgtctctagtctcagctactcaggaggctgtggcaggaagatggcttgagcccaggaggttgaggctgcagtgaactgagatcatgccactgcacccatcttgggcaacagaatgagatcctgtctctaaaaaaataaaaacaatttacaacagtaagcacctgtacacaagccccatctccagtcctgtttctagggcttccaatttaacacacctagaggctgggcatagtagctcatgcctgtaatcccaatactttgggaggctgaggcaagtgaagcacttgaggtcaggagttcgagaccagcctggccaacatggcaaaaccccatctctactaaaaatgcaaacattagctgggcatggtggcacatgcctgtaatcccagctactcgggaggctgagacaggagaatcacttgaacccaggaggtggaggttacagtgagccaagatcacaccactgtaccacagcctgagcaacgaaagaagactctgtctaaaaaaagtaaaaaataaaataaaac

SEQ ID NO: 287709 - DNA, 1594 bp, Homo sapiens
cgcctccctccccagtcagcgctccgctcgcgccccgcccggctgctgcggaggcggctttccaggaactttccaggaatcggcctcacgtgaccgcgggccccgctactgctttaaagaggctcggtcgcaatacacaggcttcagggaagaccggagtttgccatctccgtaccaccaccaccaccacacacagcaccctcaagactccctgtgatcctgggatgcactcaacgaagagtgtgtggcccaggatttgatggaaatgctacaagagaagcaggctctccccttctgaaatgatgagtgataatgaccatacaggtcaacttttccaccacttggagggagcctgtcaaagaacaaaggcaacagagaagagagcagagctgaggttgggtgagagggagaaattcctgagtgcttgaatcccacatgccggaagccgcaccacacttggacttctcaatacaggagccactgagaaaccaagtcatgctgaagacctggaaatcccagcaggctgcaaaccagctgcaactacaatgggtcagcccttttgagatgctgctgactacccacttatctgccaagttagccagtgttaagccatggattcaccacgctcagataaaacctgcccctctgggatccctccagaaaaaaacaggcatgctgttgtgaaccctaagatggccttaagttaatattcaatgcccagccaaagaccctaaataagaagtcataaaggaaacatgtgcttttcaggtaccaatcaccctccagatctaagaatggcttcaggctggggctgcagtcacctctttgcccagcttctcccctgccctattctgcttcacttgcatccttaaaggttccacccaagagctcttctacaagaaagcacctataaagccagacacattggcttatgcctataatcctagcactttgggaggccaaggtaggaggatggcttgaggccaggagttcaagaccagcctgggcaacttggtgaggccccgtctctataaaaaataaaaaaattaaccaggtgtggtggtgcacgtctctagtctcagctactcaggaggctgtggcaggaagatggcttgagcccaggaggttgaggctgcagtgaactgagatcatgccactgcacccatcttgggcaacagaatgagatcctgtctctaaaaaaataaaaacaatttacaacagtaagcacctgtacacaagccccatctccagtcctgtttctagggcttccaatttaacacacctagaggctgggcatagtagctcatgcctgtaatcccaatactttgggaggctgaggcaagtgaagcacttgaggtcaggagttcgagaccagcctggccaacatggcaaaaccccatctctactaaaaatgcaaacattagctgggcatggtggcacatgcctgtaatcccagctactcgggaggctgagacaggagaatcacttgaacccaggaggtggaggttacagtgagccaagatcacaccactgtaccacagcctgagcaacgaaagaagactctgtctaaaaaaagtaaaaaataaaataaaac

SEQ ID NO: 287710 - DNA, 1463 bp, Homo sapiens
gcggccgcgcctcgccgccctccccgagtttgccatctccgtaccaccaccaccaccacacacagcaccctcaagactccctgtgatcctgggatgcactcaacgaagagtgtgtggcccaggatttgatggaaatgctacaagagaagcaggctctccccttctgaaatgatgagtgataatgaccatacaggtcaacttttccaccacttggagggagcctgtcaaagaacaaaggcaacagagaagagagcagagctgaggttgggtgagagggagaaattcctgagtgcttgaatcccacatgccggaagccgcaccacacttggacttctcaatacaggagccactgagaaaccaagtcatgctgaagacctggaaatcccagcaggctgcaaaccagctgcaactacaatgggtcagcccttttgagatgctgctgactacccacttatctgccaagttagccagtgttaagccatggattcaccacgctcagataaaacctgcccctctgggatccctccagaaaaaaacaggcatgctgttgtgaaccctaagatggccttaagttaatattcaatgcccagccaaagaccctaaataagaagtcataaaggaaacatgtgcttttcaggtaccaatcaccctccagatctaagaatggcttcaggctggggctgcagtcacctctttgcccagcttctcccctgccctattctgcttcacttgcatccttaaaggttccacccaagagctcttctacaagaaagcacctataaagccagacacattggcttatgcctataatcctagcactttgggaggccaaggtaggaggatggcttgaggccaggagttcaagaccagcctgggcaacttggtgaggccccgtctctataaaaaataaaaaaattaaccaggtgtggtggtgcacgtctctagtctcagctactcaggaggctgtggcaggaagatggcttgagcccaggaggttgaggctgcagtgaactgagatcatgccactgcacccatcttgggcaacagaatgagatcctgtctctaaaaaaataaaaacaatttacaacagtaagcacctgtacacaagccccatctccagtcctgtttctagggcttccaatttaacacacctagaggctgggcatagtagctcatgcctgtaatcccaatactttgggaggctgaggcaagtgaagcacttgaggtcaggagttcgagaccagcctggccaacatggcaaaaccccatctctactaaaaatgcaaacattagctgggcatggtggcacatgcctgtaatcccagctactcgggaggctgagacaggagaatcacttgaacccaggaggtggaggttacagtgagccaagatcacaccactgtaccacagcctgagcaacgaaagaagactctgtctaaaaaaagtaaaaaataaaataaaac

SEQ ID NO: 287711 - DNA, 691 bp, Homo sapiens
cgcctccctccccagtcagcgctccgctcgcgccccgcccggctgctgcggaggcggctttccaggaactttccaggaatcggcctcacgtgaccgcgggccccgctactgctttaaagaggctcggtcgcaatacacaggcttcagggaagaccggagtttgccatctccgtaccaccaccaccaccacacacagcaccctcaagactccctgtgatcctgggatgcactcaacgaagagtgtgtggcccaggatttgatggaaatgctacaagagaagcaggctctccccttctgaaatgatgagtgataatgaccatacaggtcaacttttccaccacttggagggagcctgtcaaagaacaaaggcaacagagaagagagcagagctgaggttgggtgagagggagaaattcctgagtgcttgaatcccacatgccggaagccgcaccacacttggacttctcaatacaggagccactctgcaggcatttattggcaggctacacctaagactttctctgcagaaaaatgttctagatgcacagatttgggggcttgattgacaacctgacacctcactctaaatccgcatgggtctgttgacctcaggtgagaacacttgttctaagggagtggaaggtctttattaagataaccctgagaaataaaagtctgccttgagcattgt

SEQ ID NO: 287712 - DNA, 631 bp, Homo sapiens
cgcctccctccccagtcagcgctccgctcgcgccccgcccggctgctgcggaggcggctttccaggaactttccaggaatcggcctcacgtgaccgcgggccccgctactgctttaaagaggctcggtcgcaatacacaggcttcagggaagaccggagtttgccatctccgtaccaccaccaccaccacacacagcaccctcaagactccctgtgatcctgggatgcactcaacgaagagtgtgtggcccaggatttgatggaaatgctacaagagaagcaggctctccccttctgaaatgatgagtgataatgaccatacaggtcaacttttccaccacttggagggagcctgtcaaagaacaaaggcaacagagaagagagcagagctgaggttgggtgagagggagaaattcctgagtgcttgaatcccacatgccggaagccgcaccacacttggacttctcaatacaggagccaaaaccaaggcaaatttaatattaggcatggcgagagggcagaaggtgagagtagggaagtctactagccagggactcaggagcacaaggctggggtcccaagcttggtttccatagagaagtcccatttctgggccttctagtttccttag

SEQ ID NO: 287713 - DNA, 351 bp, Homo sapiens
cctctgcccaacaagagtcttctcattagcaaaagagtaatttccaagggtgttaggagctctatgctgggaaccagggaccaagagtaaatatatattttgtattttaccacaggtaccaatcaccctccagatctaagaatggcttcaggctggggctgcagtcacctctttgcccagcttctcccctgccctattctgcttcacttgcatccttaaaggttccacccaagagctcttctacaagaaagcacctataaagccagacacattggcttatgcctataatcctagcactttgggaggccaaggtaggaggatggcttgaggccaggagttcaagaccagcct

SEQ ID NO: 287714 - DNA, 447 bp, Homo sapiens
gtaactctcctcggggcggagccttcgggcttcccccactaccggtacctgccgcgggcgcccgagctgcgggcacggggtatcctgaggctgtgcacccgggaccccggcgcgcactgtccgcgggccacgcggtgagggtggctgcgggcgagagggctcatgcttcaggggaagcccaaggcccgccagccgcggcggctgcgacgagacttggcaagagttaaacgtcggtcccaggagcagcgagtgcgcgcgacttcccagaccgacgcgcctcccttgctccccgcctccctccccagtcagcgctccgctcgcgccccgcccggctgctgcggaggcggctttccaggaactttccaggaatcggcctcacgtgaccgcgggccccgctactgctttaaagaggctcggtcgcaatacacaggcttcagggaagaccgg

SEQ ID NO: 287715 - DNA, 5745 bp, Homo sapiens
cacagggcctgcagagaggggacccaccgggcaggatgcactggcttccagcaggccacgacatcaacggtgccctggagccctccaacatagacaccagcatcctggaggagtacatcagcaaggaggatgcctccgacctctgcttccctgacatctctgctccagccagctcggcctcctactcccacgggcagcctgcgatgcctggctccagcggggtccaccacctgagcccccctgggggtggaccctccccggggcgccatggtcccctcccacccccgggctacggcaccccgctgaactgcaacaacaacaacggcatgggcgctgcccccaagcccttcccggggggcaccgggccccccatcaaggctgagcccaaggctccctatgccccaggcacactgccggactctcccccagactcgggctccgaggcctactccccccagcaggtgaatgagccccacctcctgcgcacgataacccctgagacactgtgccacgtgggagtgccctcccgcctggagcatccgcccccacctccagcccacttgccaggccccccgccacccccaccacccccacctcactaccctgtcctgcagcgggatctgtacatgaaggccgagcccccgatcccccactacgctgccatggggcaggggctggtgcccactgatcttcaccacacccagcagtcccagatgctgcaccagctcctgcagcagcacggagctgagctccctacacacccctccaagaagaggaagcactctgaatcccccccgagcaccctcaatgcccagatgctgaatggaatgatcaaacaggagcctgggaccgtgacagccctgcctctgcaccccactcgagccccatcgccaccctggcctccccagggtccgctctccccgggccctggttccttgcctctcagcattgcccgtgtccagacaccgccttggcacccgccaggtgccccctccccaggcctcctgcaggacagtgacagcctcagtggctcctacctggaccccaactaccagtccatcaagtggcagcctcatcagcagaacaagtgggcgaccctgtacgatgctaactacaaggagctgcccatgctcacctaccgcgtggatgcggacaagggcttcaacttttcggtgggcgacgacgcctttgtgtgccagaagaagaaccacttccaggtgacagtgtacatcggcatgctgggcgagcccaagtacgtcaagacgcccgagggcctcaagcccctcgactgcttctatctgaagctgcacggagtgaagctggaggccctgaaccagtccattaacatcgagcagtcccagtcagaccggagcaagcggcccttcaacccggtcacggtcaatctgccccctgagcaggtcacgaaggtgactgtggggcggctgcacttcagcgagaccaccgctaacaacatgcgtaagaagggcaagcccaacccggaccagaggtacttcatgctggtggtggccctccaggctcatgcacagaaccagaactacacgctggccgcccagatctcagagcgcatcattgtgcgggcctccaacccaggccagttcgagagcgacagcgatgtgttgtggcagcgggcacaggtgcccgacaccgtcttccaccacggccgcgtgggcatcaacacagaccggccggatgaggcgctggttgtgcacgggaatgtcaaggtcatgggctcgcttatgcacccctccgacctgcgcgccaaggaacacgtgcaggaggtggacaccaccgagcaattgaagaggatctcgcgcatgcggctggtgcactacagatacaagcccgagttcgccgccagcgcgggcatcgaggccaccgcgccagagacaggtgtcatcgctcaggaggtgaaggagatcttgcctgaggctgtgaaagacaccggagacatggtctttgccaatgggaaaaccatagagaacttcctggtggtgaacaaggagcgcatcttcatggagaacgtaggggccgtgaaggagctgtgcaagctgacagacaacctggagacgcgcattgatgagctggagcgctggagccacaagctggccaagctgcggcggctcgacagcctcaagtccaccggcagctcgggcgccttcagccatgcagggagccagttcagtcgggcgggcagcgtcccccacaagaagaggccccccaaggtggccagcaagtcatcgtccgtggttccggaccaggcctgcatcagccagcgcttcctgcagggaaccatcattgccctggtggtggtcatggccttcagcgtggtgtccatgtccacactgtacgtgctgagcctgcgcacagaggaggacctggtagacactgatggaggtccagccagagctttgggaccacgcagctccgacagtcccccttgaccacggggctaccaggcatacagccctctttgctgctggtgaccaccagcctcaccagctcggccccaggttctgctgtccgcaccttggacatgtgttccagccacccctgccctgtcatctgctgttcctcacccactaccaaccctaccactggtcctagtcttggccccagctttaaccctggccatgttctcagcccaagtcccagccccagcaccaaccgctcaggccccagccagatggcccttctgccagtcaccaacatcagagccaagtcctggggtctttcagtcaatggcattggccactccaagcatcacaagagtctggagcctctggccagccctgcagtccccttccctggggggcagggcaaagccaagaacagtcccagccttggtttccatggccgggcccgccgaggggccctccagtccagcgtgggccctgctgagcccacctgggcccagggccagtcagagccagtgccctccctgacctccatccaggtgctggagaattcgatgtccatcacctcccagtactgtgctccaggggatgcctgcaggcctgggaacttcacctaccacatccctgtcagtagtggcaccccactgcacctcagcctgactctgcagatgaactcctcctcccccgtgtctgtggtgctgtgcagcctgaggtcaaaggaggaaccatgtgaggaggggagccttccacagagtctccacacccaccaggacacccagggcacctctcaccggtggccaataaccatcctgtccttccgtgaattcacctaccacttccgggtggcactgctgggtcaggccaactgcagttcagaggctctcgcccagccagccacagactaccacttccacttctaccgcctgtgtgactgagctgccctcctgaggcagcaccacaccagggaccaggggtgcccaggcaccccccaacactggatgcaatggtgttacactggagcccgctgcaggccagctctgctgttcactggccctacccgagactggtgaaactggaagtcttcacactggagttgctgttccagctggtcgcccctcacggcacagagggaacctgagagccagagacttcttgggccttcctgcctgccaccccctaggggccaggacaggaccagtttacctctttccagatatggtggttggagggctggttcaggtgccctggagggaaggggaagcctgtggccctgatttgttcagagcccattctcccttgcctccccttttgagactggagccaacccttttggagagaggacctgcccacctttgagatcagcagggggctcggatccagccctaagagacttgggtggacccccatgagtcaatggagggcagacggctctcccccttaaagctgttccctgggggatggcttggtagtggactttctggggtttgcctgttacgccagactcggacttctaagctttaagtgtggcccaggaggtttcttctccctgggagggcttggctcccaagaagtcccagggcagccgaggccagccctgcctgggttggagaaactgactttgtgccttaagtctactcagtgcctggtgaagccaccctcagcccttcacaggcctgaaccagtaggggccagtgggccaggtaagccctagagccttgaaccaggaatatccaggaagaggaaattccctttgagcccccagatggtattgcagcttcactgcctgcgttcctgggagcgtctggagctcacagtgatcagtgaccacatcattctctctgagcagaggagcaggaatccctcaagcagcagcctggtcttggctggtgggcagatgcaaatagcttttgctgttattaatgaagtaattactaaatgcacttaaaccagggcaggaaggaatggaaggatggagctagaaagctcagagtgggccagagcaggggtgtgacacttgcaaagacagggctctgactctgatccctcccagggagcctccgacacccatcccactcccaaccaccaagaccctgggttagggaagaagttgtatcttaagtgccaccttcaagtttcttagtggtgcctggtgcattccgaggctacatccaggctcatggaaggagtgtagtattcatttagccatgtctgccatgggtccagaaatgggaaagggaattgctgtccttgccctgtggtatgctgccacctctttgggaagcaggccttgcccctgtcccaccactcattctcagctttgaatgggaggcctttctatagtggaggcctttccttgaagcctatgaactgcaggcccccttttgccattgatctcaaagcacttgtcctcaggatagggaagagcagggggatgcaggaatagcagggatagcttgctcccagccccctccccaatttggttccgttgacataggaattttacgattcccaaaccatgcaggggctgagccttccttatgatgactttgttctccctcccactgggggaatcctccctatgccttaaaactgccgagccccactccatgtaataggattcctgggcttcctcaatgggggttcatgttcttggactgcgggccctcagtccttaactggaaagtgaccgtccactgccccatggagcccatctggacacagcacagccccaaaaccgttagcagctggctctgtttccaagcctggggaggggttcctcagtgcaggagttggggacaggctggggatccaagctgcttgagggggtcaaccttggaccaaagttgccttaagcctgtggtaaaagggcttcagggaaggtaagtgggccacctgctggaagctgccagctgcccggctggcaatggtgtgagtgtcttggccctgtccctgccctggggtccagcaggtcatccctcccttcttctctctcctttggcgtttgttcctgtagtcactgggctaatctccccctagcttcaagctgtacatagggcctcccagtgcaaatcctcctgcccataccgtgcacccttagaagcctgcgtgtgcatagagcgccccctacttcccagttaactcccagttcttctccctgagcttggtatttgtcatgtgccaactctgactctgaggtgggcagtgagggaagcagccccgggcctgcttgcttcctgtccccgaaatgttcgtttcttctgaagtaaatatacatatataaataaatgtataaatactgctttgtatctga

SEQ ID NO: 287716 - DNA, 411 bp, Homo sapiens
gtgaggactaaatgggatgatctacgtaaggctgcaggcctgattcctgatccttattctgtgctcaggccccagccagatggcccttctgccagtcaccaacatcagagccaagtcctggggtctttcagtcaatggcattggccactccaagcatcacaagagtctggagcctctggccagccctgcagtccccttccctggggggcagggcaaagccaagaacagtcccagccttggtttccatggccgggcccgccgaggggccctccagtccagcgtgggccctgctgagcccacctgggcccagggccagtcaggtacttgctgcacccctgacactacccagcccagcctggcaaggctcactggccagggcccacctcagcccagtcatgtgactgtctgggt

SEQ ID NO: 287717 - DNA, 5826 bp, Homo sapiens
cacagggcctgcagagaggggacccaccgggcaggatgcactggcttccagcaggccacgacatcaacggtgccctggagccctccaacatagacaccagcatcctggaggagtacatcagcaaggaggatgcctccgacctctgcttccctgacatctctgctccagccagctcggcctcctactcccacgggcagcctgcgatgcctggctccagcggggtccaccacctgagcccccctgggggtggaccctccccggggcgccatggtcccctcccacccccgggctacggcaccccgctgaactgcaacaacaacaacggcatgggcgctgcccccaagcccttcccggggggcaccgggccccccatcaaggctgagcccaaggctccctatgccccaggcacactgccggactctcccccagactcgggctccgaggcctactccccccagcaggtgaatgagccccacctcctgcgcacgataacccctgagacactgtgccacgtgggagtgccctcccgcctggagcatccgcccccacctccagcccacttgccaggccccccgccacccccaccacccccacctcactaccctgtcctgcagcgggatctgtacatgaaggccgagcccccgatcccccactacgctgccatggggcaggggctggtgcccactgatcttcaccacacccagcagtcccagatgctgcaccagctcctgcagcagcacggagctgagctccctacacacccctccaagaagaggaagcactctgaatcccccccgagcaccctcaatgcccagatgctgaatggaatgatcaaacaggagcctgggaccgtgacagccctgcctctgcaccccactcgagccccatcgccaccctggcctccccagggtccgctctccccgggccctggttccttgcctctcagcattgcccgtgtccagacaccgccttggcacccgccaggtgccccctccccaggcctcctgcaggacagtgacagcctcagtggctcctacctggaccccaactaccagtccatcaagtggcagcctcatcagcagaacaagtgggcgaccctgtacgatgctaactacaaggagctgcccatgctcacctaccgcgtggatgcggacaagggcttcaacttttcggtgggcgacgacgcctttgtgtgccagaagaagaaccacttccaggtgacagtgtacatcggcatgctgggcgagcccaagtacgtcaagacgcccgagggcctcaagcccctcgactgcttctatctgaagctgcacggagtgaagctggaggccctgaaccagtccattaacatcgagcagtcccagtcagaccggagcaagcggcccttcaacccggtcacggtcaatctgccccctgagcaggtcacgaaggtgactgtggggcggctgcacttcagcgagaccaccgctaacaacatgcgtaagaagggcaagcccaacccggaccagaggtacttcatgctggtggtggccctccaggctcatgcacagaaccagaactacacgctggccgcccagatctcagagcgcatcattgtgcgggcctccaacccaggccagttcgagagcgacagcgatgtgttgtggcagcgggcacaggtgcccgacaccgtcttccaccacggccgcgtgggcatcaacacagaccggccggatgaggcgctggttgtgcacgggaatgtcaaggtcatgggctcgcttatgcacccctccgacctgcgcgccaaggaacacgtgcaggaggtggacaccaccgagcaattgaagaggatctcgcgcatgcggctggtgcactacagatacaagcccgagttcgccgccagcgcgggcatcgaggccaccgcgccagagacaggtgtcatcgctcaggaggtgaaggagatcttgcctgaggctgtgaaagacaccggagacatggtctttgccaatgggaaaaccatagagaacttcctggtggtgaacaaggagcgcatcttcatggagaacgtaggggccgtgaaggagctgtgcaagctgacagacaacctggagacgcgcattgatgagctggagcgctggagccacaagctggccaagctgcggcggctcgacagcctcaagtccaccggcagctcgggcgccttcagccatgcagggagccagttcagtcgggcgggcagcgtcccccacaagaagaggccccccaaggtggccagcaagtcatcgtccgtggttccggaccaggcctgcatcagccagcgcttcctgcagggaaccatcattgccctggtggtggtcatggccttcagcgtggtgtccatgtccacactgtacgtgctgagcctgcgcacagaggaggacctggtagacactgatggctcttttgccgtgtccacttcctgtctcctggccctgctccggccccagccccctggggggagtgaggccttgtgcccatgaggtccagccagagctttgggaccacgcagctccgacagtcccccttgaccacggggctaccaggcatacagccctctttgctgctggtgaccaccagcctcaccagctcggccccaggttctgctgtccgcaccttggacatgtgttccagccacccctgccctgtcatctgctgttcctcacccactaccaaccctaccactggtcctagtcttggccccagctttaaccctggccatgttctcagcccaagtcccagccccagcaccaaccgctcaggccccagccagatggcccttctgccagtcaccaacatcagagccaagtcctggggtctttcagtcaatggcattggccactccaagcatcacaagagtctggagcctctggccagccctgcagtccccttccctggggggcagggcaaagccaagaacagtcccagccttggtttccatggccgggcccgccgaggggccctccagtccagcgtgggccctgctgagcccacctgggcccagggccagtcagagccagtgccctccctgacctccatccaggtgctggagaattcgatgtccatcacctcccagtactgtgctccaggggatgcctgcaggcctgggaacttcacctaccacatccctgtcagtagtggcaccccactgcacctcagcctgactctgcagatgaactcctcctcccccgtgtctgtggtgctgtgcagcctgaggtcaaaggaggaaccatgtgaggaggggagccttccacagagtctccacacccaccaggacacccagggcacctctcaccggtggccaataaccatcctgtccttccgtgaattcacctaccacttccgggtggcactgctgggtcaggccaactgcagttcagaggctctcgcccagccagccacagactaccacttccacttctaccgcctgtgtgactgagctgccctcctgaggcagcaccacaccagggaccaggggtgcccaggcaccccccaacactggatgcaatggtgttacactggagcccgctgcaggccagctctgctgttcactggccctacccgagactggtgaaactggaagtcttcacactggagttgctgttccagctggtcgcccctcacggcacagagggaacctgagagccagagacttcttgggccttcctgcctgccaccccctaggggccaggacaggaccagtttacctctttccagatatggtggttggagggctggttcaggtgccctggagggaaggggaagcctgtggccctgatttgttcagagcccattctcccttgcctccccttttgagactggagccaacccttttggagagaggacctgcccacctttgagatcagcagggggctcggatccagccctaagagacttgggtggacccccatgagtcaatggagggcagacggctctcccccttaaagctgttccctgggggatggcttggtagtggactttctggggtttgcctgttacgccagactcggacttctaagctttaagtgtggcccaggaggtttcttctccctgggagggcttggctcccaagaagtcccagggcagccgaggccagccctgcctgggttggagaaactgactttgtgccttaagtctactcagtgcctggtgaagccaccctcagcccttcacaggcctgaaccagtaggggccagtgggccaggtaagccctagagccttgaaccaggaatatccaggaagaggaaattccctttgagcccccagatggtattgcagcttcactgcctgcgttcctgggagcgtctggagctcacagtgatcagtgaccacatcattctctctgagcagaggagcaggaatccctcaagcagcagcctggtcttggctggtgggcagatgcaaatagcttttgctgttattaatgaagtaattactaaatgcacttaaaccagggcaggaaggaatggaaggatggagctagaaagctcagagtgggccagagcaggggtgtgacacttgcaaagacagggctctgactctgatccctcccagggagcctccgacacccatcccactcccaaccaccaagaccctgggttagggaagaagttgtatcttaagtgccaccttcaagtttcttagtggtgcctggtgcattccgaggctacatccaggctcatggaaggagtgtagtattcatttagccatgtctgccatgggtccagaaatgggaaagggaattgctgtccttgccctgtggtatgctgccacctctttgggaagcaggccttgcccctgtcccaccactcattctcagctttgaatgggaggcctttctatagtggaggcctttccttgaagcctatgaactgcaggcccccttttgccattgatctcaaagcacttgtcctcaggatagggaagagcagggggatgcaggaatagcagggatagcttgctcccagccccctccccaatttggttccgttgacataggaattttacgattcccaaaccatgcaggggctgagccttccttatgatgactttgttctccctcccactgggggaatcctccctatgccttaaaactgccgagccccactccatgtaataggattcctgggcttcctcaatgggggttcatgttcttggactgcgggccctcagtccttaactggaaagtgaccgtccactgccccatggagcccatctggacacagcacagccccaaaaccgttagcagctggctctgtttccaagcctggggaggggttcctcagtgcaggagttggggacaggctggggatccaagctgcttgagggggtcaaccttggaccaaagttgccttaagcctgtggtaaaagggcttcagggaaggtaagtgggccacctgctggaagctgccagctgcccggctggcaatggtgtgagtgtcttggccctgtccctgccctggggtccagcaggtcatccctcccttcttctctctcctttggcgtttgttcctgtagtcactgggctaatctccccctagcttcaagctgtacatagggcctcccagtgcaaatcctcctgcccataccgtgcacccttagaagcctgcgtgtgcatagagcgccccctacttcccagttaactcccagttcttctccctgagcttggtatttgtcatgtgccaactctgactctgaggtgggcagtgagggaagcagccccgggcctgcttgcttcctgtccccgaaatgttcgtttcttctgaagtaaatatacatatataaataaatgtataaatactgctttgtatctga

SEQ ID NO: 287718 - DNA, 3625 bp, Homo sapiens
aagtactaaccaggcccgaccctgcttagcttccgagatcagacgagatcgggcgccttcagccatgcagggagccagttcagtcgggcgggcagcgtcccccacaagaagaggccccccaaggtggccagcaagtcatcgtccgtggttccggaccaggcctgcatcagccagcgcttcctgcagggaaccatcattgccctggtggtggtcatggccttcagcgtggtgtccatgtccacactgtacgtgctgagcctgcgcacagaggaggacctggtagacactgatggaggtccagccagagctttgggaccacgcagctccgacagtcccccttgaccacggggctaccaggcatacagccctctttgctgctggtgaccaccagcctcaccagctcggccccaggttctgctgtccgcaccttggacatgtgttccagccacccctgccctgtcatctgctgttcctcacccactaccaaccctaccactggtcctagtcttggccccagctttaaccctggccatgttctcagcccaagtcccagccccagcaccaaccgctcaggccccagccagatggcccttctgccagtcaccaacatcagagccaagtcctggggtctttcagtcaatggcattggccactccaagcatcacaagagtctggagcctctggccagccctgcagtccccttccctggggggcagggcaaagccaagaacagtcccagccttggtttccatggccgggcccgccgaggggccctccagtccagcgtgggccctgctgagcccacctgggcccagggccagtcagagccagtgccctccctgacctccatccaggtgctggagaattcgatgtccatcacctcccagtactgtgctccaggggatgcctgcaggcctgggaacttcacctaccacatccctgtcagtagtggcaccccactgcacctcagcctgactctgcagatgaactcctcctcccccgtgtctgtggtgctgtgcagcctgaggtcaaaggaggaaccatgtgaggaggggagccttccacagagtctccacacccaccaggacacccagggcacctctcaccggtggccaataaccatcctgtccttccgtgaattcacctaccacttccgggtggcactgctgggtcaggccaactgcagttcagaggctctcgcccagccagccacagactaccacttccacttctaccgcctgtgtgactgagctgccctcctgaggcagcaccacaccagggaccaggggtgcccaggcaccccccaacactggatgcaatggtgttacactggagcccgctgcaggccagctctgctgttcactggccctacccgagactggtgaaactggaagtcttcacactggagttgctgttccagctggtcgcccctcacggcacagagggaacctgagagccagagacttcttgggccttcctgcctgccaccccctaggggccaggacaggaccagtttacctctttccagatatggtggttggagggctggttcaggtgccctggagggaaggggaagcctgtggccctgatttgttcagagcccattctcccttgcctccccttttgagactggagccaacccttttggagagaggacctgcccacctttgagatcagcagggggctcggatccagccctaagagacttgggtggacccccatgagtcaatggagggcagacggctctcccccttaaagctgttccctgggggatggcttggtagtggactttctggggtttgcctgttacgccagactcggacttctaagctttaagtgtggcccaggaggtttcttctccctgggagggcttggctcccaagaagtcccagggcagccgaggccagccctgcctgggttggagaaactgactttgtgccttaagtctactcagtgcctggtgaagccaccctcagcccttcacaggcctgaaccagtaggggccagtgggccaggtaagccctagagccttgaaccaggaatatccaggaagaggaaattccctttgagcccccagatggtattgcagcttcactgcctgcgttcctgggagcgtctggagctcacagtgatcagtgaccacatcattctctctgagcagaggagcaggaatccctcaagcagcagcctggtcttggctggtgggcagatgcaaatagcttttgctgttattaatgaagtaattactaaatgcacttaaaccagggcaggaaggaatggaaggatggagctagaaagctcagagtgggccagagcaggggtgtgacacttgcaaagacagggctctgactctgatccctcccagggagcctccgacacccatcccactcccaaccaccaagaccctgggttagggaagaagttgtatcttaagtgccaccttcaagtttcttagtggtgcctggtgcattccgaggctacatccaggctcatggaaggagtgtagtattcatttagccatgtctgccatgggtccagaaatgggaaagggaattgctgtccttgccctgtggtatgctgccacctctttgggaagcaggccttgcccctgtcccaccactcattctcagctttgaatgggaggcctttctatagtggaggcctttccttgaagcctatgaactgcaggcccccttttgccattgatctcaaagcacttgtcctcaggatagggaagagcagggggatgcaggaatagcagggatagcttgctcccagccccctccccaatttggttccgttgacataggaattttacgattcccaaaccatgcaggggctgagccttccttatgatgactttgttctccctcccactgggggaatcctccctatgccttaaaactgccgagccccactccatgtaataggattcctgggcttcctcaatgggggttcatgttcttggactgcgggccctcagtccttaactggaaagtgaccgtccactgccccatggagcccatctggacacagcacagccccaaaaccgttagcagctggctctgtttccaagcctggggaggggttcctcagtgcaggagttggggacaggctggggatccaagctgcttgagggggtcaaccttggaccaaagttgccttaagcctgtggtaaaagggcttcagggaaggtaagtgggccacctgctggaagctgccagctgcccggctggcaatggtgtgagtgtcttggccctgtccctgccctggggtccagcaggtcatccctcccttcttctctctcctttggcgtttgttcctgtagtcactgggctaatctccccctagcttcaagctgtacatagggcctcccagtgcaaatcctcctgcccataccgtgcacccttagaagcctgcgtgtgcatagagcgccccctacttcccagttaactcccagttcttctccctgagcttggtatttgtcatgtgccaactctgactctgaggtgggcagtgagggaagcagccccgggcctgcttgcttcctgtccccgaaatgttcgtttcttctgaagtaaatatacatatataaataaatgtataaatactgctttgtatctga

SEQ ID NO: 287719 - DNA, 1115 bp, Homo sapiens
aatacatagccggtacccttccaaagaggtggcagcatacacagggcaaggacagcaattcccttcccatttctggacccatggcagacatggctaaatgaatactacactcattctcagctttgaatgggaggcctttctatagtggaggcctttccttgaagcctatgaactgcaggcccccttttgccattgatctcaaagcacttgtcctcaggatagggaagagcagggggatgcaggaatagcagggatagcttgctcccagccccctccccaatttggttccgttgacataggaattttacgattcccaaaccatgcaggggctgagccttccttatgatgactttgttctccctcccactgggggaatcctccctatgccttaaaactgccgagccccactccatgtaataggattcctgggcttcctcaatgggggttcatgttcttggactgcgggccctcagtccttaactggaaagtgaccgtccactgccccatggagcccatctggacacagcacagccccaaaaccgttagcagctggctctgtttccaagcctggggaggggttcctcagtgcaggagttggggacaggctggggatccaagctgcttgagggggtcaaccttggaccaaagttgccttaagcctgtggtaaaagggcttcagggaaggtaagtgggccacctgctggaagctgccagctgcccggctggcaatggtgtgagtgtcttggccctgtccctgccctggggtccagcaggtcatccctcccttcttctctctcctttggcgtttgttcctgtagtcactgggctaatctccccctagcttcaagctgtacatagggcctcccagtgcaaatcctcctgcccataccgtgcacccttagaagcctgcgtgtgcatagagcgccccctacttcccagttaactcccagttcttctccctgagcttggtatttgtcatgtgccaactctgactctgaggtgggcagtgagggaagcagccccgggcctgcttgcttcctgtccccgaaatgttcgtttcttctgaagtaaatatacatatataaataaatgtataaatactgctttgtatctga

SEQ ID NO: 287720 - DNA, 5498 bp, Homo sapiens
cacagggcctgcagagaggggacccaccgggcaggatgcactggcttccagcaggccacgacatcaacggtgccctggagccctccaacatagacaccagcatcctggaggagtacatcagcaaggaggatgcctccgacctctgcttccctgacatctctgctccagccagctcggcctcctactcccacgggcagcctgcgatgcctggctccagcggggtccaccacctgagcccccctgggggtggaccctccccggggcgccatggtcccctcccacccccgggctacggcaccccgctgaactgcaacaacaacaacggcatgggcgctgcccccaagcccttcccggggggcaccgggccccccatcaaggctgagcccaaggctccctatgccccaggcacactgccggactctcccccagactcgggctccgaggcctactccccccagcaggtgaatgagccccacctcctgcgcacgataacccctgagacactgtgccacgtgggagtgccctcccgcctggagcatccgcccccacctccagcccacttgccaggccccccgccacccccaccacccccacctcactaccctgtcctgcagcgggatctgtacatgaaggccgagcccccgatcccccactacgctgccatggggcaggggctggtgcccactgatcttcaccacacccagcagtcccagatgctgcaccagctcctgcagcagcacggagctgagctccctacacacccctccaagaagaggaagcactctgaatcccccccgagcaccctcaatgcccagatgctgaatggaatgatcaaacaggagcctgggaccgtgacagccctgcctctgcaccccactcgagccccatcgccaccctggcctccccagggtccgctctccccgggccctggttccttgcctctcagcattgcccgtgtccagacaccgccttggcacccgccaggtgccccctccccaggcctcctgcaggacagtgacagcctcagtggctcctacctggaccccaactaccagtccatcaagtggcagcctcatcagcagaacaagtgggcgaccctgtacgatgctaactacaaggagctgcccatgctcacctaccgcgtggatgcggacaagggcttcaacttttcggtgggcgacgacgcctttgtgtgccagaagaagaaccacttccaggtgacagtgtacatcggcatgctgggcgagcccaagtacgtcaagacgcccgagggcctcaagcccctcgactgcttctatctgaagctgcacggagtgaagctggaggccctgaaccagtccattaacatcgagcagtcccagtcagaccggagcaagcggcccttcaacccggtcacggtcaatctgccccctgagcaggtcacgaaggtgactgtggggcggctgcacttcagcgagaccaccgctaacaacatgcgtaagaagggcaagcccaacccggaccagaggtacttcatgctggtggtggccctccaggctcatgcacagaaccagaactacacgctggccgcccagatctcagagcgcatcattgtgcgggcctccaacccaggccagttcgagagcgacagcgatgtgttgtggcagcgggcacaggtgcccgacaccgtcttccaccacggccgcgtgggcatcaacacagaccggccggatgaggcgctggttgtgcacgggaatgtcaaggtcatgggctcgcttatgcacccctccgacctgcgcgccaaggaacacgtgcaggaggtggacaccaccgagcaattgaagaggatctcgcgcatgcggctggtgcactacagatacaagcccgagttcgccgccagcgcgggcatcgaggccaccgcgccagagacaggtgtcatcgctcaggaggtgaaggagatcttgcctgaggctgtgaaagacaccggagacatggtctttgccaatgggaaaaccatagagaacttcctggtggtgaacaaggagcgcatcttcatggagaacgtaggggccgtgaaggagctgtgcaagctgacagacaacctggagacgcgcattgatgagctggagcgctggagccacaagctggccaagctgcggcggctcgacagcctcaagtccaccggcagctcgggcgccttcagccatgcagggagccagttcagtcgggcgggcagcgtcccccacaagaagaggccccccaaggtggccagcaagtcatcgtccgtggttccggaccaggcctgcatcagccagcgcttcctgcagggaaccatcattgccctggtggtggtcatggccttcagcgtggtgtccatgtccacactgtacgtgctgagcctgcgcacagaggaggacctggtagacactgatggaggtccagccagagctttgggaccacgcagctccgacagtcccccttgaccacggggctaccaggcatacagccctctttgctgctggtgaccaccagcctcaccagctcggccccaggttctgctgtccgcaccttggacatgtgttccagccacccctgccctgtcatctgctgttcctcacccactaccaaccctaccactggtcctagtcttggccccagctttaaccctggccatgttctcagcccaagtcccagccccagcaccaaccgctcaggccccagccagatggcccttctgccagtcaccaacatcagagccaagtcctggggtctttcagtcaatggcattggccactccaagcatcacaagagtctggagcctctggccagccctgcagtccccttccctggggggcagggcaaagccaagaacagtcccagccttggtttccatggccgggcccgccgaggggccctccagtccagcgtgggccctgctgagcccacctgggcccagggccagtcagagccagtgccctccctgacctccatccaggtgctggagaattcgatgtccatcacctcccagtactgtgctccaggggatgcctgcaggcctgggaacttcacctaccacatccctgtcagtagtggcaccccactgcacctcagcctgactctgcagatgaactcctcctcccccgtgtctgtggtgctgtgcagcctgaggtcaaaggaggaaccatgtgaggaggggagccttccacagagtctccacacccaccaggacacccagggcacctctcaccggtggccaataaccatcctgtccttccgtgaattcacctaccacttccgggtggcactgctgggtcaggccaactgcagttcagaggctctcgcccagccagccacagactaccacttccacttctaccgcctgtgtgactgagctgccctcctgaggcagcaccacaccagggaccaggggtgcccaggcaccccccaacactggatgcaatggtgttacactggagcccgctgcaggccagctctgctgttcactggccctacccgagactggtgaaactggaagtcttcacactggagttgctgttccagctggtcgcccctcacggcacagagggaacctgagagccagagacttcttgggccttcctgcctgccaccccctaggggccaggacaggaccagtttacctctttccagatatggtggttggagggctggttcaggtgccctggagggaaggggaagcctgtggccctgatttgttcagagcccattctcccttgcctccccttttgagactggagccaacccttttggagagaggacctgcccacctttgagatcagcagggggctcggatccagccctaagagacttgggtggacccccatgagtcaatggagggcagacggctctcccccttaaagctgttccctgggggatggcttggtagtggactttctggggtttgcctgttacgccagactcggacttctaagctttaagtgtggcccaggaggtttcttctccctgggagggcttggctcccaagaagtcccagggcagccgaggccagccctgcctgggttggagaaactgactttgtgccttaagtctactcagtgcctggtgaagccaccctcagcccttcacaggcctgaaccagtaggggccagtgggccaggtaagccctagagccttgaaccaggaatatccaggaagaggaaattccctttgagcccccagatggtattgcagcttcactgcctgcgttcctgggagcgtctggagctcacagtgatcagtgaccacatcattctctctgagcagaggagcaggaatccctcaagcagcagcctggtcttggctggtgggcagatgcaaatagcttttgctgttattaatgaagtaattactaaatgcacttaaaccagggcaggaaggaatggaaggatggagctagaaagctcagagtgggccagagcaggggtgtgacacttgcaaagacagggctctgactctgatccctcccagggagcctccgacacccatcccactcccaaccaccaagaccctgggttagggaagaagttgtatcttaagtgccaccttcaagtttcttagtggtgcctggtgcattccgaggctacatccaggctcatggaaggagtgtagtattcatttagccatgtctgccatgggtccagaaatgggaaagggaattgctgtccttgccctgtggtatgctgccacctctttgggaagcaggccttgcccctgtcccaccactcattctcagctttgaatgggaggcctttctatagtggaggcctttccttgaagcctatgaactgcaggcccccttttgccattgatctcaaagcacttgtcctcaggatagggaagagcagggggatgcaggaatagcagggatagcttgctcccagccccctccccaatttggttccgttgacataggaattttacgattcccaaaccatgcaggggctgagccttccttatgatgactttgttctccctcccactgggggaatcctccctatgccttaaaactgccgagccccactccatgtaataggattcctgggcttcctcaatgggggttcatgttcttggactgcgggccctcagtccttaactggaaagtgaccgtccactgccccatggagcccatctggacacagcacagccccaaaaccgttagcagctggctctgtttccaagcctggggaggggttcctcagtgcaggagttggggacaggctggggatccaagctgcttgagggggtcaaccttggaccaaagttgccttaagcctgcgtgtgcatagagcgccccctacttcccagttaactcccagttcttctccctgagcttggtatttgtcatgtgccaactctgactctgaggtgggcagtgagggaagcagccccgggcctgcttgcttcctgtccccgaaatgttcgtttcttctgaagtaaatatacatatataaataaatgtataaatactgctttgtatctga

SEQ ID NO: 287721 - DNA, 5290 bp, Homo sapiens
  misc_feature (5022)..(5023): n is a, c, g, or t
cacagggcctgcagagaggggacccaccgggcaggatgcactggcttccagcaggccacgacatcaacggtgccctggagccctccaacatagacaccagcatcctggaggagtacatcagcaaggaggatgcctccgacctctgcttccctgacatctctgctccagccagctcggcctcctactcccacgggcagcctgcgatgcctggctccagcggggtccaccacctgagcccccctgggggtggaccctccccggggcgccatggtcccctcccacccccgggctacggcaccccgctgaactgcaacaacaacaacggcatgggcgctgcccccaagcccttcccggggggcaccgggccccccatcaaggctgagcccaaggctccctatgccccaggcacactgccggactctcccccagactcgggctccgaggcctactccccccagcaggtgaatgagccccacctcctgcgcacgataacccctgagacactgtgccacgtgggagtgccctcccgcctggagcatccgcccccacctccagcccacttgccaggccccccgccacccccaccacccccacctcactaccctgtcctgcagcgggatctgtacatgaaggccgagcccccgatcccccactacgctgccatggggcaggggctggtgcccactgatcttcaccacacccagcagtcccagatgctgcaccagctcctgcagcagcacggagctgagctccctacacacccctccaagaagaggaagcactctgaatcccccccgagcaccctcaatgcccagatgctgaatggaatgatcaaacaggagcctgggaccgtgacagccctgcctctgcaccccactcgagccccatcgccaccctggcctccccagggtccgctctccccgggccctggttccttgcctctcagcattgcccgtgtccagacaccgccttggcacccgccaggtgccccctccccaggcctcctgcaggacagtgacagcctcagtggctcctacctggaccccaactaccagtccatcaagtggcagcctcatcagcagaacaagtgggcgaccctgtacgatgctaactacaaggagctgcccatgctcacctaccgcgtggatgcggacaagggcttcaacttttcggtgggcgacgacgcctttgtgtgccagaagaagaaccacttccaggtgacagtgtacatcggcatgctgggcgagcccaagtacgtcaagacgcccgagggcctcaagcccctcgactgcttctatctgaagctgcacggagtgaagctggaggccctgaaccagtccattaacatcgagcagtcccagtcagaccggagcaagcggcccttcaacccggtcacggtcaatctgccccctgagcaggtcacgaaggtgactgtggggcggctgcacttcagcgagaccaccgctaacaacatgcgtaagaagggcaagcccaacccggaccagaggtacttcatgctggtggtggccctccaggctcatgcacagaaccagaactacacgctggccgcccagatctcagagcgcatcattgtgcgggcctccaacccaggccagttcgagagcgacagcgatgtgttgtggcagcgggcacaggtgcccgacaccgtcttccaccacggccgcgtgggcatcaacacagaccggccggatgaggcgctggttgtgcacgggaatgtcaaggtcatgggctcgcttatgcacccctccgacctgcgcgccaaggaacacgtgcaggaggtggacaccaccgagcaattgaagaggatctcgcgcatgcggctggtgcactacagatacaagcccgagttcgccgccagcgcgggcatcgaggccaccgcgccagagacaggtgtcatcgctcaggaggtgaaggagatcttgcctgaggctgtgaaagacaccggagacatggtctttgccaatgggaaaaccatagagaacttcctggtggtgaacaaggagcgcatcttcatggagaacgtaggggccgtgaaggagctgtgcaagctgacagacaacctggagacgcgcattgatgagctggagcgctggagccacaagctggccaagctgcggcggctcgacagcctcaagtccaccggcagctcgggcgccttcagccatgcagggagccagttcagtcgggcgggcagcgtcccccacaagaagaggccccccaaggtggccagcaagtcatcgtccgtggttccggaccaggcctgcatcagccagcgcttcctgcagggaaccatcattgccctggtggtggtcatggccttcagcgtggtgtccatgtccacactgtacgtgctgagcctgcgcacagaggaggacctggtagacactgatggaggtccagccagagctttgggaccacgcagctccgacagtcccccttgaccacggggctaccaggcatacagccctctttgctgctggtgaccaccagcctcaccagctcggccccaggttctgctgtccgcaccttggacatgtgttccagccacccctgccctgtcatctgctgttcctcacccactaccaaccctaccactggtcctagtcttggccccagctttaaccctggccatgttctcagcccaagtcccagccccagcaccaaccgctcaggccccagccagatggcccttctgccagtcaccaacatcagagccaagtcctggggtctttcagtcaatggcattggccactccaagcatcacaagagtctggagcctctggccagccctgcagtccccttccctggggggcagggcaaagccaagaacagtcccagccttggtttccatggccgggcccgccgaggggccctccagtccagcgtgggccctgctgagcccacctgggcccagggccagtcagagccagtgccctccctgacctccatccaggtgctggagaattcgatgtccatcacctcccagtactgtgctccaggggatgcctgcaggcctgggaacttcacctaccacatccctgtcagtagtggcaccccactgcacctcagcctgactctgcagatgaactcctcctcccccgtgtctgtggtgctgtgcagcctgaggtcaaaggaggaaccatgtgaggaggggagccttccacagagtctccacacccaccaggacacccagggcacctctcaccggtggccaataaccatcctgtccttccgtgaattcacctaccacttccgggtggcactgctgggtcaggccaactgcagttcagaggctctcgcccagccagccacagactaccacttccacttctaccgcctgtgtgactgagctgccctcctgaggcagcaccacaccagggaccaggggtgcccaggcaccccccaacactggatgcaatggtgttacactggagcccgctgcaggccagctctgctgttcactggccctacccgagactggtgaaactggaagtcttcacactggagttgctgttccagctggtcgcccctcacggcacagagggaacctgagagccagagacttcttgggccttcctgcctgccaccccctaggggccaggacaggaccagtttacctctttccagatatggtggttggagggctggttcaggtgccctggagggaaggggaagcctgtggccctgatttgttcagagcccattctcccttgcctccccttttgagactggagccaacccttttggagagaggacctgcccacctttgagatcagcagggggctcggatccagccctaagagacttgggtggacccccatgagtcaatggagggcagacggctctcccccttaaagctgttccctgggggatggcttggtagtggactttctggggtttgcctgttacgccagactcggacttctaagctttaagtgtggcccaggaggtttcttctccctgggagggcttggctcccaagaagtcccagggcagccgaggccagccctgcctgggttggagaaactgactttgtgccttaagtctactcagtgcctggtgaagccaccctcagcccttcacaggcctgaaccagtaggggccagtgggccaggtaagccctagagccttgaaccaggaatatccaggaagaggaaattccctttgagcccccagatggtattgcagcttcactgcctgcgttcctgggagcgtctggagctcacagtgatcagtgaccacatcattctctctgagcagaggagcaggaatccctcaagcagcagcctggtcttggctggtgggcagatgcaaatagcttttgctgttattaatgaagtaattactaaatgcacttaaaccagggcaggaaggaatggaaggatggagctagaaagctcagagtgggccagagcaggggtgtgacacttgcaaagacagggctctgactctgatccctcccagggagcctccgacacccatcccactcccaaccaccaagaccctgggttagggaagaagttgtatcttaagtgccaccttcaagtttcttagtggtgcctggtgcattccgaggctacatccaggctcatggaaggagtgtagtattcatttagccatgtctgccatgggtccagaaatgggaaagggaattgctgtccttgccctgtggtatgctgccacctctttgggaagcaggccttgcccctgtcccaccactcattctcagctttgaatgggaggcctttctatagtggaggcctttccttgaagcctatgaactgcaggcccccttttgccattgatctcaaagcacttgtcctcaggatagggaagagcagggggatgcaggaatagcagggatagcttgctcccagccccctccccaatttggttccgttgacataggaattttacgattcccaaaccatgcaggggctgagccttccttatgatgactttgttctccctcccactgggggaatcctccctatgccaccnntgccgccaattttccaaaaaagcctggctcctcttttcctgttcctccatccaagcccccaaagatctctaaccagaaataaacaggaagactcagtgatttacaaaagacattttagttttacacgtacagaaaattctacccagcattacagaattcttagacttcttaaattcctgattttccttggtatttacattttgataagggagccaatggttcttcaaacatttgaaaagaacacatacagtcgacgcggccgcgaat

SEQ ID NO: 287722 - DNA, 5237 bp, Homo sapiens
cacagggcctgcagagaggggacccaccgggcaggatgcactggcttccagcaggccacgacatcaacggtgccctggagccctccaacatagacaccagcatcctggaggagtacatcagcaaggaggatgcctccgacctctgcttccctgacatctctgctccagccagctcggcctcctactcccacgggcagcctgcgatgcctggctccagcggggtccaccacctgagcccccctgggggtggaccctccccggggcgccatggtcccctcccacccccgggctacggcaccccgctgaactgcaacaacaacaacggcatgggcgctgcccccaagcccttcccggggggcaccgggccccccatcaaggctgagcccaaggctccctatgccccaggcacactgccggactctcccccagactcgggctccgaggcctactccccccagcaggtgaatgagccccacctcctgcgcacgataacccctgagacactgtgccacgtgggagtgccctcccgcctggagcatccgcccccacctccagcccacttgccaggccccccgccacccccaccacccccacctcactaccctgtcctgcagcgggatctgtacatgaaggccgagcccccgatcccccactacgctgccatggggcaggggctggtgcccactgatcttcaccacacccagcagtcccagatgctgcaccagctcctgcagcagcacggagctgagctccctacacacccctccaagaagaggaagcactctgaatcccccccgagcaccctcaatgcccagatgctgaatggaatgatcaaacaggagcctgggaccgtgacagccctgcctctgcaccccactcgagccccatcgccaccctggcctccccagggtccgctctccccgggccctggttccttgcctctcagcattgcccgtgtccagacaccgccttggcacccgccaggtgccccctccccaggcctcctgcaggacagtgacagcctcagtggctcctacctggaccccaactaccagtccatcaagtggcagcctcatcagcagaacaagtgggcgaccctgtacgatgctaactacaaggagctgcccatgctcacctaccgcgtggatgcggacaagggcttcaacttttcggtgggcgacgacgcctttgtgtgccagaagaagaaccacttccaggtgacagtgtacatcggcatgctgggcgagcccaagtacgtcaagacgcccgagggcctcaagcccctcgactgcttctatctgaagctgcacggagtgaagctggaggccctgaaccagtccattaacatcgagcagtcccagtcagaccggagcaagcggcccttcaacccggtcacggtcaatctgccccctgagcaggtcacgaaggtgactgtggggcggctgcacttcagcgagaccaccgctaacaacatgcgtaagaagggcaagcccaacccggaccagaggtacttcatgctggtggtggccctccaggctcatgcacagaaccagaactacacgctggccgcccagatctcagagcgcatcattgtgcgggcctccaacccaggccagttcgagagcgacagcgatgtgttgtggcagcgggcacaggtgcccgacaccgtcttccaccacggccgcgtgggcatcaacacagaccggccggatgaggcgctggttgtgcacgggaatgtcaaggtcatgggctcgcttatgcacccctccgacctgcgcgccaaggaacacgtgcaggaggtggacaccaccgagcaattgaagaggatctcgcgcatgcggctggtgcactacagatacaagcccgagttcgccgccagcgcgggcatcgaggccaccgcgccagagacaggtgtcatcgctcaggaggtgaaggagatcttgcctgaggctgtgaaagacaccggagacatggtctttgccaatgggaaaaccatagagaacttcctggtggtgaacaaggagcgcatcttcatggagaacgtaggggccgtgaaggagctgtgcaagctgacagacaacctggagacgcgcattgatgagctggagcgctggagccacaagctggccaagctgcggcggctcgacagcctcaagtccaccggcagctcgggcgccttcagccatgcagggagccagttcagtcgggcgggcagcgtcccccacaagaagaggccccccaaggtggccagcaagtcatcgtccgtggttccggaccaggcctgcatcagccagcgcttcctgcagggaaccatcattgccctggtggtggtcatggccttcagcgtggtgtccatgtccacactgtacgtgctgagcctgcgcacagaggaggacctggtagacactgatggaggtccagccagagctttgggaccacgcagctccgacagtcccccttgaccacggggctaccaggcatacagccctctttgctgctggtgaccaccagcctcaccagctcggccccaggttctgctgtccgcaccttggacatgtgttccagccacccctgccctgtcatctgctgttcctcacccactaccaaccctaccactggtcctagtcttggccccagctttaaccctggccatgttctcagcccaagtcccagccccagcaccaaccgctcaggccccagccagatggcccttctgccagtcaccaacatcagagccaagtcctggggtctttcagtcaatggcattggccactccaagcatcacaagagtctggagcctctggccagccctgcagtccccttccctggggggcagggcaaagccaagaacagtcccagccttggtttccatggccgggcccgccgaggggccctccagtccagcgtgggccctgctgagcccacctgggcccagggccagtcagagccagtgccctccctgacctccatccaggtgctggagaattcgatgtccatcacctcccagtactgtgctccaggggatgcctgcaggcctgggaacttcacctaccacatccctgtcagtagtggcaccccactgcacctcagcctgactctgcagatgaactcctcctcccccgtgtctgtggtgctgtgcagcctgaggtcaaaggaggaaccatgtgaggaggggagccttccacagagtctccacacccaccaggacacccagggcacctctcaccggtggccaataaccatcctgtccttccgtgaattcacctaccacttccgggtggcactgctgggtcaggccaactgcagttcagaggctctcgcccagccagccacagactaccacttccacttctaccgcctgtgtgactgagctgccctcctgaggcagcaccacaccagggaccaggggtgcccaggcaccccccaacactggatgcaatggtgttacactggagcccgctgcaggccagctctgctgttcactggccctacccgagactggtgaaactggaagtcttcacactggagttgctgttccagctggtcgcccctcacggcacagagggaacctgagagccagagacttcttgggccttcctgcctgccaccccctaggggccaggacaggaccagtttacctctttccagatatggtggttggagggctggttcaggtgccctggagggaaggggaagcctgtggccctgatttgttcagagcccattctcccttgcctccccttttgagactggagccaacccttttggagagaggacctgcccacctttgagatcagcagggggctcggatccagccctaagagacttgggtggacccccatgagtcaatggagggcagacggctctcccccttaaagctgttccctgggggatggcttggtagtggactttctggggtttgcctgttacgccagactcggacttctaagctttaagtgtggcccaggaggtttcttctccctgggagggcttggctcccaagaagtcccagggcagccgaggccagccctgcctgggttggagaaactgactttgtgccttaagtctactcagtgcctggtgaagccaccctcagcccttcacaggcctgaaccagtaggggccagtgggccaggtaagccctagagccttgaaccaggaatatccaggaagaggaaattccctttgagcccccagatggtattgcagcttcactgcctgcgttcctgggagcgtctggagctcacagtgatcagtgaccacatcattctctctgagcagaggagcaggaatccctcaagcagcagcctggtcttggctggtgggcagatgcaaatagcttttgctgttattaatgaagtaattactaaatgcacttaaaccagggcaggaaggaatggaaggatggagctagaaagctcagagtgggccagagcaggggtgtgacacttgcaaagacagggctctgactctgatccctcccagggagcctccgacacccatcccactcccaaccaccaagaccctgggttagggaagaagttgtatcttaagtgccaccttcaagtttcttagtggtgcctggtgcattccgaggctacatccaggctcatggaaggagtgtagtattcatttagccatgtctgccatgggtccagaaatgggaaagggaattgctgtccttgccctgtggtatgctgccacctctttgggaagcaggccttgcccctgtcccaccactcattctcagctttgaatgggaggcctttctatagtggaggcctttccttgaagcctatgaactgcaggcccccttttgccattgatctcaaagcacttgtcctcaggatagggaagagcagggggatgcaggaatagcagggatagcttgctcccagccccctcccttcttctctctcctttggcgtttgttcctgtagtcactgggctaatctccccctagcttcaagctgtacatagggcctcccagtgcaaatcctcctgcccataccgtgcacccttagaagcctgcgtgtgcatagagcgccccctacttcccagttaactcccagttcttctccctgagcttggtatttgtcatgtgccaactctgactctgaggtgggcagtgagggaagcagccccgggcctgcttgcttcctgtccccgaaatgttcgtttcttctgaagtaaatatacatatataaataaatgtataaatactgctttgtatctga

SEQ ID NO: 287723 - DNA, 1050 bp, Homo sapiens
cacagggcctgcagagaggggacccaccgggcaggatgcactggcttccagcaggccacgacatcaacggtgccctggagccctccaacatagacaccagcatcctggaggagtacatcagcaaggaggatgcctccgacctctgcttccctgacatctctgctccagccagctcggcctcctactcccacgggcagcctgcgatgcctggctccagcggggtccaccacctgagcccccctgggggtggaccctccccggggcgccatggtcccctcccacccccgggctacggcaccccgctgaactgcaacaacaacaacggcatgggcgctgcccccaagcccttcccggggggcaccgggccccccatcaaggctgagcccaaggctccctatgccccaggcacactgccggactctcccccagactcgggctccgaggcctactccccccagcaggtgaatgagccccacctcctgcgcacgataacccctgagacactgtgccacgtgggagtgccctcccgcctggagcatccgcccccacctccagcccacttgccaggccccccgccacccccaccacccccacctcactaccctgtcctgcagcgggatctgtacatgaaggccgagcccccgatcccccactacgctgccatggggcaggggctggtgcccactgatcttcaccacacccagcagtcccagatgctgcaccagctcctgcagcagcacggagctgagctccctacagaccccaggcggcatgccgtctgcagggacaggcgccacggaggccagcctcacaagggcatgtctgcatggtggaaagatggaattaggcctgggacacaccccgcccaccctacgggtgtatcccaaatgccgccggccgcacactcaggccgcaccatctgagccccctcctctgagaggcagggcacagacagggccgaggggcagtggagatgggaacaggaggggggctcagaccatgaaaacattggagaatcttagcgggactttggcctgatccatacagata

SEQ ID NO: 287724 - DNA, 131 bp, Homo sapiens
ggggcacccccttaaccgctcctccgacctccagcagagcccactggggacagcctcagcctggccctctttgcatttgcacttttcctcttggtcctcagtcatcgtccgtggttccggaccaggcctgc

SEQ ID NO: 287725 - DNA, 320 bp, Homo sapiens
cctctcagcattgcccgtgtccagacaccgccttggcacccgccaggtgccccctccccaggtacatggctggccaactcttcaaggtggggtgtgggacccaaggtgcagggcccacatgggcgttccctccctccaggcctcctgcaggacagtgacagcctcagtggctcctacctggaccccaactaccagtccatcaagtggcagcctcatcagcagaacaagtgggcgaccctgtacgatgctaactacaaggagctgtgagtgccctacaacactccccactcctccaggcccccccaccttgggacgcccca

SEQ ID NO: 287726 - DNA, 6832 bp, Homo sapiens
agcgcgacctttgacctgcagtagagcctacgtcagaggctggcgcaaacagaagtgcagcggtggcggcggctggttgcgggccggcggcgggctggcggagatggaggatcttgttcaagatggggtggcttcaccagctacccctgggaccgggaaatctaagaattggagaaagaaattgaagaactcagatcaaaacctgttactgaaggaactggtgatattattaaggcattaactgaacgtctggatgctcttcttctggaaaaagcagagactgagcaacagtgtctttctctgaaaaaggaaaatataaaaatgaagcaagaggttgaggattctgtaacaaagatgggagatgcacataaggagttggaacaatcacatataaactatgtgaaagaaattgaaaatttgaaaaatgagttgatggcagtacgttccaaatacagtgaagacaaagctaacttacaaaagcagctggaagaagcaatgaatacgcaattagaactttcagaacaacttaaatttcagaacaactctgaagataatgttaaaaaactacaagaagagattgagaaaattaggccaggctttgaggagcaaattttatatctgcaaaagcaattagacgctaccactgatgaaaagaaggaaacagttactcaactccaaaatatcattgaggctaattctcagcattaccaaaaaaatattaatagtttgcaggaagagcttttacagttgaaagctatacaccaagaagaggtgaaagagttgatgtgccagattgaagcatcagctaaggaacatgaagcagagataaataagttgaacgagctaaaagagaacttagtaaaacaatgtgaggcaagtgaaaagaacatccagaagaaatatgaatgtgagttagaaaatttaaggaaagccacctcaaatgcaaaccaagacaatcagatatgttctattctcttgcaagaaaatacatttgtagaacaagtagtaaatgaaaaagtcaaacacttagaagataccttaaaagaacttgaatctcaacacagtatcttaaaagatgaggtaacttatatgaataatcttaagttaaaacttgaaatggatgctcaacatataaaggatgagttttttcatgaacgggaagacttagagtttaaaattaatgaattattactagctaaagaagaacagggctgtgtaattgaaaaattaaaatctgagctagcaggtttaaataaacagttttgctatactgtagaacagcataacagagaagtacagagtcttaaggaacaacatcaaaaagaaatatcagaactaaatgagacatttttgtcagattcagaaaaagaaaaattaacattaatgtttgaaatacagggtcttaaggaacagtgtgaaaacctacagcaagaaaagcaagaagcaattttaaattatgagagtttacgagagattatggaaattttacaaacagaactgggggaatctgctggaaaaataagtcaagagttcgaatcaatgaagcaacagcaagcatctgatgttcatgaactgcagcagaagctcagaactgcttttactgaaaaagatgcccttctcgaaactgtgaatcgcctccagggagaaaatgaaaagttactatctcaacaagaattggtaccagaacttgaaaataccataaagaaccttcaagaaaagaatggagtatacttacttagtctcagtcaaagagataccatgttaaaagaattagaaggaaagataaattctcttactgaggaaaaagatgattttataaataaactgaaaaattcccatgaagaaatggataatttccataagaaatgtgaaagggaagaaagattgattcttgaacttgggaagaaagtagagcaaacaatccagtacaacagtgaactagaacaaaaggtaaatgaattaacaggaggactagaggagactttaaaagaaaaggatcaaaatgaccaaaaactagaaaaacttatggttcaaatgaaagttctctctgaagacaaagaagtattgtcagctgaagtgaagtctctttatgaggaaaacaataaactcagttcagaaaaaaaacagttgagtagggatttggaggtttttttgtctcaaaaagaagatgttatccttaaagaacatattactcaattagaaaagaaacttcagttaatggttgaagagcaagataatttaaataaactgcttgaaaatgagcaagttcagaagttatttgttaaaactcagttgtatggttttcttaaagaaatgggatcagaagtttcagaagacagtgaagagaaagatgttgttaatgtcctacaggcagtcggtgaatccttggcaaaaataaatgaggaaaaatgcaacctggcttttcagcgtgatgaaaaagtattagagttagaaaaagagattaagtgccttcaagaagagagtgtagttcagtgtgaagaacttaagtctttattgagagactatgagcaagagaaagttctcttaaggaaagagttagaagaaatacagtcagaaaaagaggccctgcagtctgatcttctagaaatgaagaatgctaatgaaaaaacaaggcttgaaaatcagaatcttttaattcaagttgaagaagtatctcaaacatgtagcaaaagtgaaatccataatgaaaaagaaaaatgttttataaaggaacatgaaaacctaaagccactactagaacaaaaagaattacgagataggagagcagagttgatactattaaaggattccttagcaaaatcaccttctgtaaaaaatgatcctctgtcttcagtaaaagagttggaagaaaaaatagaaaatctggaaaaagaatgcaaagaaaaggaggagaaaataaataagataaaattagttgccgtaaaggcaaagaaagaactagattccagcagaaaagagacccagactgtgaaggaagaacttgaatctcttcgatcagaaaaggaccagttatctgcttccatgagagatctcattcaaggagcagaaagctataagaatcttttattagaatatgaaaagcagtcagagcaactggatgtggaaaaagaacgtgctaataattttgagcatcgtattgaagaccttacaagacaattaagaaattcgactttgcagtgtgaaacaataaattctgataatgaagatctcctggctcgtattgagacattacagtctaatgccaaattattagaagtacagattttagaagtccagagagccaaagcaatggtagacaaagaattagaagctgaaaaacttcagaaagaacagaagataaaggaacatgccactactgtaaatgaacttgaagaacttcaggtacaacttcaaaaggaaaagaaacagcttcagaaaaccatgcaagaattagagctggttaaaaaggatgcccaacaaaccacattgatgaatatggaaatagctgattatgaacgtttgatgaaagaactaaatcaaaagttaactaataaaaacaacaagatagaagatttggagcaagaaataaaaattcaaaaacagaaacaagaaaccctacaagaagaaataacttcattacagtcttcagtacaacaatatgaagaaaaaaacaccaaaatcaagcaattgcttgtgaaaaccaaaaaggaactggcagattcaaagcaagcagaaactgatcacttaatacttcaagcatctttaaaaggtgagctggaggcaagccagcagcaagtagaagtctataaaatacagctggctgaaataacatcagagaagcacaaaatccacgagcacctgaaaacctctgcggaacagcaccagcgtacgctaagtgcataccagcagagagtgacagcactacaggaagagtgccgtgctgccaaggcagaacaagctactgtaacctctgaattcgagagctacaaagtccgagttcataatgttctaaaacaacagaaaaataaatctatgtctcaggctgaaactgagggcgctaaacaagaaagggaacatctggaaatgctgattgaccagctaaaaatcaaattacaagatagccaaaataacttacagattaatgtatctgaacttcaaacattgcagtctgaacatgatacactgctagaaaggcacaacaagatgctgcaggaaactgtgtccaaagaggcggaactccgggaaaaattgtgttcaatacagtcagagaacatgatgatgaaatctgaacatacacagactgtgagtcagctaacatcccagaacgaggtccttcgaaatagcttccgagatcaagtgcgacatttgcaggaagaacacagaaagacagtggagacattacagcagcagctctccaagatggaagcacagctcttccagcttaagaatgaaccgaccacaagaagcccagtttcctctcaacaatctttgaagaaccttcgagaaaggagaaacacagacctcccgcttctagacatgcacactgtaacccgggaagagggagaaggcatggagacaactgatacggagtctgtgtcttccgccagcacatacacacagtctttagagcagctgcttaactctcccgaaactaaacttgagcctccattatggcatgctgaatttaccaaagaagaattggttcagaagctcagttccaccacaaaaagtgcagatcacttaaacggcctgcttcgggaaacagaagcaaccaatgcaattcttatggagcaaattaagcttctcaaaagtgaaataagaagattggaaaggaatcaagagcgagagaagtctgcagctaacctggaatacttgaagaacgtcttgctgcagttcattttcttgaaaccaggtagtgaaagagagagacttcttcctgttataaatacgatgttgcagctcagccctgaagaaaagggaaaacttgctgcggttgctcaaggtgaggaagaaaatgcttcccgttcttctggatgggcatcctatcttcatagttggtctggacttcgataggttgatggaaggaatatttttattaaccaaatagaatctatttacaaaaatggttcacgtatattaccacaattcttttgtcaaaaagtgtgtatatatgtttgcatctacatatatttgtacatctatatgacagatgtattttaaaagtttcatcttgaagtaaaagtacaacagcttgaagtgttgatagcaggccacagccctctaactcatgtgatttcccatgcatgctgccagaataaaaccaccaggaatgaattcactccccacttctctggaacctcaggacccgcccatttctcggcagtactgtgaattttgaagttaaactaaattttggtaccataccaactggaatttaggctttaaaaataatgtttcaaggccaggtgtggtgattcatgcctgaaatcccactactttgggaggctgaggctggagaattgcttgaggctagtgagctgtgactcccactgcactccagctcggggaacagagcgagaccttgtctctaaaaataatagtaataaaataaaaataacgttttatgactatttattgcaaggtcagagttacagattgttataaattgttgagaaatttttgtgattagaatatgaaggaaaaagctttgttggtaaaagtgacatgttaaggggctatgaagtaaatatgctgcagttaattgtgctaagttaaaatacagtttagttatttgctttaaaataaactcttctttttttctttaaagtatactatctcaaaactcattatgttgtcagagccctagagctggctagtgtaacactgactatgagtaggtgggcccaccacttgaggtgatttcatggtgtctttccaggctcttgatagggtgtcactgcatgcaagccatgaatctgttttgagaatcctctccattttcccaaataaaaacctatcacaacagtgactatatcactcagcattggatctaaatataaaagtggtgctttcagtgtttttggcagatagtgttccataagctttccatcagaagggattttagacaccttagaggtccgtgctacatcgtcacagttcctccgaataaccttaggtggtagtgttacttgcctttgacacctctgcatatgttttaatgactagatccaaactgtgttgttcttaaatcaaaaattggataatttgtaatatttatgtgttaatcacacagtatgctctctgaagttctcttaagccttcagtttatactcttaatttaattttctttctgagctggagaactggctttgcactttggttacacagaacattggtttccaattcagtttaactgaaatttgctgctgatatgttgagtttgttctttaaaaaatagctcatatatctcatctttcctcctgtcttagaagaacagacctaactagtgaatgtattaatgaaaatgcatctatttcagagctgacatgaagagtttagtttttttactttataaactgtgaatatgagtatgccagctgcatacgatgtaactaatcatatttaaatatatttcactttctctttgactttagaccttttgaagtctgtataaacttgttttgaaatatagtctctgcttacgaatgtcataacaaaataattttttgcatgataaaaaattactttgattacaaaaggcatattctttcatggtttctgcaatgagaggaagtgtaatgattattttaatatttctattaaatatgtttaa

SEQ ID NO: 287727 - DNA, 610 bp, Homo sapiens
gggtggttttttaaatccaaaaaatggggaaaaattgggaaaaaatttaggggggtaaaccccccaggaaaggcccctctgaagttctcttaagccttcagtttatactcttaatttaattttctttctgagctggagaactggctttgcactttggttacacagaacattggtttccaattcagtttaactgaaatttgctgctgatatgttgagtttgttctttaaaaaatagctcatatatctcatctttcctcctgtcttagaagaacagacctaactagtgaatgtattaatgaaaatgcatctatttcagagctgacatgaagagtttagtttttttactttataaactgtgaatatgagtatgccagctgcatacgatgtaactaatcatatttaaatatatttcactttctctttgactttagaccttttgaagtctgtataaacttgttttgaaatatagtctctgcttacgaatgtcataacaaaataattttttgcatgataaaaaattactttgattacaaaaggcatattctttcatggtttctgcaatgagaggaagtgtaatgattattttaatatttctattaaatatgtttaa

SEQ ID NO: 287728 - DNA, 764 bp, Homo sapiens
tgtaggaattctctttgatagtgattttcttatgcttaacatgatggccagttcattatggaaaatgaattctgattctggtttttgttttgttttgtgtttttttttcccctgtaaaatctaggattccttagcaaaatcaccttctgtaaaaaatgatcctctgtcttcagtaaaagagttggaagaaaaaataggtaactatggttttgcagatgttgtcacaattaattagacagattcttgttagtgttagaatagattgggaaatatagtagccaaataatgagttgttaaaaacacagttcgtagctgtcttttcctcgagctcacattcttgcccctctaacacctgtttgccttctctttcaaaagtgttactttctattgtttaacccaagcaagattggtgtgatttataaatggcttcatgatttattttggatttttcattcatttagcaaattttatttaaatgcccaactattctagaccctggtgatagaaaagtggttgaggtacagaccatgtgctcagagatctcactgttgtttgaggtgtggacaagatacagtactaacagcataggaacttaacactgttttgagttaaaaaaaaaaaaaaaagcagcgtagaatagggttttcagccaagtcttgaagaatgagaaattttacacaggaagaaaggtattctaggaagaaggaagagcaggtgcttgtaggttgacatatagcatacatcaaggcacgtactaggaagtt

SEQ ID NO: 287729 - DNA, 749 bp, Homo sapiens
agcgcgacctttgacctgcagtagagcctacgtcagaggctggcgcaaacagaagtgcagcggtggcggcggctggttgcgggccggcggcgggctggcggagatggaggatcttgttcaagatggggtggcttcaccagctacccctgggaccgggaaatctaagaattggagaaagaaattgaagaactcagatcaaaacctgttactgaaggaactggtgatattattaagagtcttgctctgtcgcccaggctggagtgcaatgacgtgatctcggctcactgcaacctctacctcctgggttcaagcgattctcctgcctcaagctcgcattaactgaacgtctggatgctcttcttctggaaaaagcagagactgagcaacagtgtctttctctgaaaaaggaaaatataaaaatgaagcaagaggttgagctataatgccatctttactaaaagcgaaaaaaagtaagttgattttcacacatgactaaataccattatctctttagttctacggtattcagaggcatttcttgcctatttcttgcctattaggtctgggctaatttgagtaatagatttaatattgtagatatatattgtcatactttagataggcagcacctaaggagagttattggaatatcagtatcatgtttctccaaatacatttctgctcatttacttttctctctacttagcttgtggctaatatttttcctaaggtcagaggctccttttgtc

SEQ ID NO: 287730 - DNA, 299 bp, Homo sapiens
ataatttatttatgagtaacattaaaaaaaatttaaccaagattctcattctataggaaactgatcacttaatacttcaagcatctttaaaaggtgagctggaggggtccgctcgtcagaagctgcagctggagaaggctcgacgacagaggccaaaatgaagaaatttgaagacggacctgctgctcctggaagaccagaattccgagctgagcgaggagcgggagctgctgggagatcgtctggccgagttctcatcccaggccgctgaggaggaggagtccgcctcccggcctcat

SEQ ID NO: 287731 - DNA, 6917 bp, Homo sapiens
agcgcgacctttgacctgcagtagagcctacgtcagaggctggcgcaaacagaagtgcagcggtggcggcggctggttgcgggccggcggcgggctggcggagatggaggatcttgttcaagatggggtggcttcaccagctacccctgggaccgggaaatctaagctggaaacattgcccaaagaagacctcatcaagtttgccaagaaacagatgatgctaatacagaaagctaaatcaaggtgtacagaattggagaaagaaattgaagaactcagatcaaaacctgttactgaaggaactggtgatattattaaggcattaactgaacgtctggatgctcttcttctggaaaaagcagagactgagcaacagtgtctttctctgaaaaaggaaaatataaaaatgaagcaagaggttgaggattctgtaacaaagatgggagatgcacataaggagttggaacaatcacatataaactatgtgaaagaaattgaaaatttgaaaaatgagttgatggcagtacgttccaaatacagtgaagacaaagctaacttacaaaagcagctggaagaagcaatgaatacgcaattagaactttcagaacaacttaaatttcagaacaactctgaagataatgttaaaaaactacaagaagagattgagaaaattaggccaggctttgaggagcaaattttatatctgcaaaagcaattagacgctaccactgatgaaaagaaggaaacagttactcaactccaaaatatcattgaggctaattctcagcattaccaaaaaaatattaatagtttgcaggaagagcttttacagttgaaagctatacaccaagaagaggtgaaagagttgatgtgccagattgaagcatcagctaaggaacatgaagcagagataaataagttgaacgagctaaaagagaacttagtaaaacaatgtgaggcaagtgaaaagaacatccagaagaaatatgaatgtgagttagaaaatttaaggaaagccacctcaaatgcaaaccaagacaatcagatatgttctattctcttgcaagaaaatacatttgtagaacaagtagtaaatgaaaaagtcaaacacttagaagataccttaaaagaacttgaatctcaacacagtatcttaaaagatgaggtaacttatatgaataatcttaagttaaaacttgaaatggatgctcaacatataaaggatgagttttttcatgaacgggaagacttagagtttaaaattaatgaattattactagctaaagaagaacagggctgtgtaattgaaaaattaaaatctgagctagcaggtttaaataaacagttttgctatactgtagaacagcataacagagaagtacagagtcttaaggaacaacatcaaaaagaaatatcagaactaaatgagacatttttgtcagattcagaaaaagaaaaattaacattaatgtttgaaatacagggtcttaaggaacagtgtgaaaacctacagcaagaaaagcaagaagcaattttaaattatgagagtttacgagagattatggaaattttacaaacagaactgggggaatctgctggaaaaataagtcaagagttcgaatcaatgaagcaacagcaagcatctgatgttcatgaactgcagcagaagctcagaactgcttttactgaaaaagatgcccttctcgaaactgtgaatcgcctccagggagaaaatgaaaagttactatctcaacaagaattggtaccagaacttgaaaataccataaagaaccttcaagaaaagaatggagtatacttacttagtctcagtcaaagagataccatgttaaaagaattagaaggaaagataaattctcttactgaggaaaaagatgattttataaataaactgaaaaattcccatgaagaaatggataatttccataagaaatgtgaaagggaagaaagattgattcttgaacttgggaagaaagtagagcaaacaatccagtacaacagtgaactagaacaaaaggtaaatgaattaacaggaggactagaggagactttaaaagaaaaggatcaaaatgaccaaaaactagaaaaacttatggttcaaatgaaagttctctctgaagacaaagaagtattgtcagctgaagtgaagtctctttatgaggaaaacaataaactcagttcagaaaaaaaacagttgagtagggatttggaggtttttttgtctcaaaaagaagatgttatccttaaagaacatattactcaattagaaaagaaacttcagttaatggttgaagagcaagataatttaaataaactgcttgaaaatgagcaagttcagaagttatttgttaaaactcagttgtatggttttcttaaagaaatgggatcagaagtttcagaagacagtgaagagaaagatgttgttaatgtcctacaggcagtcggtgaatccttggcaaaaataaatgaggaaaaatgcaacctggcttttcagcgtgatgaaaaagtattagagttagaaaaagagattaagtgccttcaagaagagagtgtagttcagtgtgaagaacttaagtctttattgagagactatgagcaagagaaagttctcttaaggaaagagttagaagaaatacagtcagaaaaagaggccctgcagtctgatcttctagaaatgaagaatgctaatgaaaaaacaaggcttgaaaatcagaatcttttaattcaagttgaagaagtatctcaaacatgtagcaaaagtgaaatccataatgaaaaagaaaaatgttttataaaggaacatgaaaacctaaagccactactagaacaaaaagaattacgagataggagagcagagttgatactattaaaggattccttagcaaaatcaccttctgtaaaaaatgatcctctgtcttcagtaaaagagttggaagaaaaaatagaaaatctggaaaaagaatgcaaagaaaaggaggagaaaataaataagataaaattagttgccgtaaaggcaaagaaagaactagattccagcagaaaagagacccagactgtgaaggaagaacttgaatctcttcgatcagaaaaggaccagttatctgcttccatgagagatctcattcaaggagcagaaagctataagaatcttttattagaatatgaaaagcagtcagagcaactggatgtggaaaaagaacgtgctaataattttgagcatcgtattgaagaccttacaagacaattaagaaattcgactttgcagtgtgaaacaataaattctgataatgaagatctcctggctcgtattgagacattacagtctaatgccaaattattagaagtacagattttagaagtccagagagccaaagcaatggtagacaaagaattagaagctgaaaaacttcagaaagaacagaagataaaggaacatgccactactgtaaatgaacttgaagaacttcaggtacaacttcaaaaggaaaagaaacagcttcagaaaaccatgcaagaattagagctggttaaaaaggatgcccaacaaaccacattgatgaatatggaaatagctgattatgaacgtttgatgaaagaactaaatcaaaagttaactaataaaaacaacaagatagaagatttggagcaagaaataaaaattcaaaaacagaaacaagaaaccctacaagaagaaataacttcattacagtcttcagtacaacaatatgaagaaaaaaacaccaaaatcaagcaattgcttgtgaaaaccaaaaaggaactggcagattcaaagcaagcagaaactgatcacttaatacttcaagcatctttaaaaggtgagctggaggcaagccagcagcaagtagaagtctataaaatacagctggctgaaataacatcagagaagcacaaaatccacgagcacctgaaaacctctgcggaacagcaccagcgtacgctaagtgcataccagcagagagtgacagcactacaggaagagtgccgtgctgccaaggcagaacaagctactgtaacctctgaattcgagagctacaaagtccgagttcataatgttctaaaacaacagaaaaataaatctatgtctcaggctgaaactgagggcgctaaacaagaaagggaacatctggaaatgctgattgaccagctaaaaatcaaattacaagatagccaaaataacttacagattaatgtatctgaacttcaaacattgcagtctgaacatgatacactgctagaaaggcacaacaagatgctgcaggaaactgtgtccaaagaggcggaactccgggaaaaattgtgttcaatacagtcagagaacatgatgatgaaatctgaacatacacagactgtgagtcagctaacatcccagaacgaggtccttcgaaatagcttccgagatcaagtgcgacatttgcaggaagaacacagaaagacagtggagacattacagcagcagctctccaagatggaagcacagctcttccagcttaagaatgaaccgaccacaagaagcccagtttcctctcaacaatctttgaagaaccttcgagaaaggagaaacacagacctcccgcttctagacatgcacactgtaacccgggaagagggagaaggcatggagacaactgatacggagtctgtgtcttccgccagcacatacacacagtctttagagcagctgcttaactctcccgaaactaaacttgagcctccattatggcatgctgaatttaccaaagaagaattggttcagaagctcagttccaccacaaaaagtgcagatcacttaaacggcctgcttcgggaaacagaagcaaccaatgcaattcttatggagcaaattaagcttctcaaaagtgaaataagaagattggaaaggaatcaagagcgagagaagtctgcagctaacctggaatacttgaagaacgtcttgctgcagttcattttcttgaaaccaggtagtgaaagagagagacttcttcctgttataaatacgatgttgcagctcagccctgaagaaaagggaaaacttgctgcggttgctcaaggtgaggaagaaaatgcttcccgttcttctggatgggcatcctatcttcatagttggtctggacttcgataggttgatggaaggaatatttttattaaccaaatagaatctatttacaaaaatggttcacgtatattaccacaattcttttgtcaaaaagtgtgtatatatgtttgcatctacatatatttgtacatctatatgacagatgtattttaaaagtttcatcttgaagtaaaagtacaacagcttgaagtgttgatagcaggccacagccctctaactcatgtgatttcccatgcatgctgccagaataaaaccaccaggaatgaattcactccccacttctctggaacctcaggacccgcccatttctcggcagtactgtgaattttgaagttaaactaaattttggtaccataccaactggaatttaggctttaaaaataatgtttcaaggccaggtgtggtgattcatgcctgaaatcccactactttgggaggctgaggctggagaattgcttgaggctagtgagctgtgactcccactgcactccagctcggggaacagagcgagaccttgtctctaaaaataatagtaataaaataaaaataacgttttatgactatttattgcaaggtcagagttacagattgttataaattgttgagaaatttttgtgattagaatatgaaggaaaaagctttgttggtaaaagtgacatgttaaggggctatgaagtaaatatgctgcagttaattgtgctaagttaaaatacagtttagttatttgctttaaaataaactcttctttttttctttaaagtatactatctcaaaactcattatgttgtcagagccctagagctggctagtgtaacactgactatgagtaggtgggcccaccacttgaggtgatttcatggtgtctttccaggctcttgatagggtgtcactgcatgcaagccatgaatctgttttgagaatcctctccattttcccaaataaaaacctatcacaacagtgactatatcactcagcattggatctaaatataaaagtggtgctttcagtgtttttggcagatagtgttccataagctttccatcagaagggattttagacaccttagaggtccgtgctacatcgtcacagttcctccgaataaccttaggtggtagtgttacttgcctttgacacctctgcatatgttttaatgactagatccaaactgtgttgttcttaaatcaaaaattggataatttgtaatatttatgtgttaatcacacagtatgctctctgaagttctcttaagccttcagtttatactcttaatttaattttctttctgagctggagaactggctttgcactttggttacacagaacattggtttccaattcagtttaactgaaatttgctgctgatatgttgagtttgttctttaaaaaatagctcatatatctcatctttcctcctgtcttagaagaacagacctaactagtgaatgtattaatgaaaatgcatctatttcagagctgacatgaagagtttagtttttttactttataaactgtgaatatgagtatgccagctgcatacgatgtaactaatcatatttaaatatatttcactttctctttgactttagaccttttgaagtctgtataaacttgttttgaaatatagtctctgcttacgaatgtcataacaaaataattttttgcatgataaaaaattactttgattacaaaaggcatattctttcatggtttctgcaatgagaggaagtgtaatgattattttaatatttctattaaatatgtttaa

SEQ ID NO: 287732 - DNA, 6552 bp, Homo sapiens
gataaaaatgaagcaagaggttgatgctataatgccatctttactaaaagcgaaaaaaagattctgtaacaaagatgggagatgcacataaggagttggaacaatcacatataaactatgtgaaagaaattgaaaatttgaaaaatgagttgatggcagtacgttccaaatacagtgaagacaaagctaacttacaaaagcagctggaagaagcaatgaatacgcaattagaactttcagaacaacttaaatttcagaacaactctgaagataatgttaaaaaactacaagaagagattgagaaaattaggccaggctttgaggagcaaattttatatctgcaaaagcaattagacgctaccactgatgaaaagaaggaaacagttactcaactccaaaatatcattgaggctaattctcagcattaccaaaaaaatattaatagtttgcaggaagagcttttacagttgaaagctatacaccaagaagaggtgaaagagttgatgtgccagattgaagcatcagctaaggaacatgaagcagagataaataagttgaacgagctaaaagagaacttagtaaaacaatgtgaggcaagtgaaaagaacatccagaagaaatatgaatgtgagttagaaaatttaaggaaagccacctcaaatgcaaaccaagacaatcagatatgttctattctcttgcaagaaaatacatttgtagaacaagtagtaaatgaaaaagtcaaacacttagaagataccttaaaagaacttgaatctcaacacagtatcttaaaagatgaggtaacttatatgaataatcttaagttaaaacttgaaatggatgctcaacatataaaggatgagttttttcatgaacgggaagacttagagtttaaaattaatgaattattactagctaaagaagaacagggctgtgtaattgaaaaattaaaatctgagctagcaggtttaaataaacagttttgctatactgtagaacagcataacagagaagtacagagtcttaaggaacaacatcaaaaagaaatatcagaactaaatgagacatttttgtcagattcagaaaaagaaaaattaacattaatgtttgaaatacagggtcttaaggaacagtgtgaaaacctacagcaagaaaagcaagaagcaattttaaattatgagagtttacgagagattatggaaattttacaaacagaactgggggaatctgctggaaaaataagtcaagagttcgaatcaatgaagcaacagcaagcatctgatgttcatgaactgcagcagaagctcagaactgcttttactgaaaaagatgcccttctcgaaactgtgaatcgcctccagggagaaaatgaaaagttactatctcaacaagaattggtaccagaacttgaaaataccataaagaaccttcaagaaaagaatggagtatacttacttagtctcagtcaaagagataccatgttaaaagaattagaaggaaagataaattctcttactgaggaaaaagatgattttataaataaactgaaaaattcccatgaagaaatggataatttccataagaaatgtgaaagggaagaaagattgattcttgaacttgggaagaaagtagagcaaacaatccagtacaacagtgaactagaacaaaaggtaaatgaattaacaggaggactagaggagactttaaaagaaaaggatcaaaatgaccaaaaactagaaaaacttatggttcaaatgaaagttctctctgaagacaaagaagtattgtcagctgaagtgaagtctctttatgaggaaaacaataaactcagttcagaaaaaaaacagttgagtagggatttggaggtttttttgtctcaaaaagaagatgttatccttaaagaacatattactcaattagaaaagaaacttcagttaatggttgaagagcaagataatttaaataaactgcttgaaaatgagcaagttcagaagttatttgttaaaactcagttgtatggttttcttaaagaaatgggatcagaagtttcagaagacagtgaagagaaagatgttgttaatgtcctacaggcagtcggtgaatccttggcaaaaataaatgaggaaaaatgcaacctggcttttcagcgtgatgaaaaagtattagagttagaaaaagagattaagtgccttcaagaagagagtgtagttcagtgtgaagaacttaagtctttattgagagactatgagcaagagaaagttctcttaaggaaagagttagaagaaatacagtcagaaaaagaggccctgcagtctgatcttctagaaatgaagaatgctaatgaaaaaacaaggcttgaaaatcagaatcttttaattcaagttgaagaagtatctcaaacatgtagcaaaagtgaaatccataatgaaaaagaaaaatgttttataaaggaacatgaaaacctaaagccactactagaacaaaaagaattacgagataggagagcagagttgatactattaaaggattccttagcaaaatcaccttctgtaaaaaatgatcctctgtcttcagtaaaagagttggaagaaaaaatagaaaatctggaaaaagaatgcaaagaaaaggaggagaaaataaataagataaaattagttgccgtaaaggcaaagaaagaactagattccagcagaaaagagacccagactgtgaaggaagaacttgaatctcttcgatcagaaaaggaccagttatctgcttccatgagagatctcattcaaggagcagaaagctataagaatcttttattagaatatgaaaagcagtcagagcaactggatgtggaaaaagaacgtgctaataattttgagcatcgtattgaagaccttacaagacaattaagaaattcgactttgcagtgtgaaacaataaattctgataatgaagatctcctggctcgtattgagacattacagtctaatgccaaattattagaagtacagattttagaagtccagagagccaaagcaatggtagacaaagaattagaagctgaaaaacttcagaaagaacagaagataaaggaacatgccactactgtaaatgaacttgaagaacttcaggtacaacttcaaaaggaaaagaaacagcttcagaaaaccatgcaagaattagagctggttaaaaaggatgcccaacaaaccacattgatgaatatggaaatagctgattatgaacgtttgatgaaagaactaaatcaaaagttaactaataaaaacaacaagatagaagatttggagcaagaaataaaaattcaaaaacagaaacaagaaaccctacaagaagaaataacttcattacagtcttcagtacaacaatatgaagaaaaaaacaccaaaatcaagcaattgcttgtgaaaaccaaaaaggaactggcagattcaaagcaagcagaaactgatcacttaatacttcaagcatctttaaaaggtgagctggaggcaagccagcagcaagtagaagtctataaaatacagctggctgaaataacatcagagaagcacaaaatccacgagcacctgaaaacctctgcggaacagcaccagcgtacgctaagtgcataccagcagagagtgacagcactacaggaagagtgccgtgctgccaaggcagaacaagctactgtaacctctgaattcgagagctacaaagtccgagttcataatgttctaaaacaacagaaaaataaatctatgtctcaggctgaaactgagggcgctaaacaagaaagggaacatctggaaatgctgattgaccagctaaaaatcaaattacaagatagccaaaataacttacagattaatgtatctgaacttcaaacattgcagtctgaacatgatacactgctagaaaggcacaacaagatgctgcaggaaactgtgtccaaagaggcggaactccgggaaaaattgtgttcaatacagtcagagaacatgatgatgaaatctgaacatacacagactgtgagtcagctaacatcccagaacgaggtccttcgaaatagcttccgagatcaagtgcgacatttgcaggaagaacacagaaagacagtggagacattacagcagcagctctccaagatggaagcacagctcttccagcttaagaatgaaccgaccacaagaagcccagtttcctctcaacaatctttgaagaaccttcgagaaaggagaaacacagacctcccgcttctagacatgcacactgtaacccgggaagagggagaaggcatggagacaactgatacggagtctgtgtcttccgccagcacatacacacagtctttagagcagctgcttaactctcccgaaactaaacttgagcctccattatggcatgctgaatttaccaaagaagaattggttcagaagctcagttccaccacaaaaagtgcagatcacttaaacggcctgcttcgggaaacagaagcaaccaatgcaattcttatggagcaaattaagcttctcaaaagtgaaataagaagattggaaaggaatcaagagcgagagaagtctgcagctaacctggaatacttgaagaacgtcttgctgcagttcattttcttgaaaccaggtagtgaaagagagagacttcttcctgttataaatacgatgttgcagctcagccctgaagaaaagggaaaacttgctgcggttgctcaaggtgaggaagaaaatgcttcccgttcttctggatgggcatcctatcttcatagttggtctggacttcgataggttgatggaaggaatatttttattaaccaaatagaatctatttacaaaaatggttcacgtatattaccacaattcttttgtcaaaaagtgtgtatatatgtttgcatctacatatatttgtacatctatatgacagatgtattttaaaagtttcatcttgaagtaaaagtacaacagcttgaagtgttgatagcaggccacagccctctaactcatgtgatttcccatgcatgctgccagaataaaaccaccaggaatgaattcactccccacttctctggaacctcaggacccgcccatttctcggcagtactgtgaattttgaagttaaactaaattttggtaccataccaactggaatttaggctttaaaaataatgtttcaaggccaggtgtggtgattcatgcctgaaatcccactactttgggaggctgaggctggagaattgcttgaggctagtgagctgtgactcccactgcactccagctcggggaacagagcgagaccttgtctctaaaaataatagtaataaaataaaaataacgttttatgactatttattgcaaggtcagagttacagattgttataaattgttgagaaatttttgtgattagaatatgaaggaaaaagctttgttggtaaaagtgacatgttaaggggctatgaagtaaatatgctgcagttaattgtgctaagttaaaatacagtttagttatttgctttaaaataaactcttctttttttctttaaagtatactatctcaaaactcattatgttgtcagagccctagagctggctagtgtaacactgactatgagtaggtgggcccaccacttgaggtgatttcatggtgtctttccaggctcttgatagggtgtcactgcatgcaagccatgaatctgttttgagaatcctctccattttcccaaataaaaacctatcacaacagtgactatatcactcagcattggatctaaatataaaagtggtgctttcagtgtttttggcagatagtgttccataagctttccatcagaagggattttagacaccttagaggtccgtgctacatcgtcacagttcctccgaataaccttaggtggtagtgttacttgcctttgacacctctgcatatgttttaatgactagatccaaactgtgttgttcttaaatcaaaaattggataatttgtaatatttatgtgttaatcacacagtatgctctctgaagttctcttaagccttcagtttatactcttaatttaattttctttctgagctggagaactggctttgcactttggttacacagaacattggtttccaattcagtttaactgaaatttgctgctgatatgttgagtttgttctttaaaaaatagctcatatatctcatctttcctcctgtcttagaagaacagacctaactagtgaatgtattaatgaaaatgcatctatttcagagctgacatgaagagtttagtttttttactttataaactgtgaatatgagtatgccagctgcatacgatgtaactaatcatatttaaatatatttcactttctctttgactttagaccttttgaagtctgtataaacttgttttgaaatatagtctctgcttacgaatgtcataacaaaataattttttgcatgataaaaaattactttgattacaaaaggcatattctttcatggtttctgcaatgagaggaagtgtaatgattattttaatatttctattaaatatgtttaa

SEQ ID NO: 287733 - DNA, 6873 bp, Homo sapiens
agcgcgacctttgacctgcagtagagcctacgtcagaggctggcgcaaacagaagtgcagcggtggcggcggctggttgcgggccggcggcgggctggcggagatggaggatcttgttcaagatggggtggcttcaccagctacccctgggaccgggaaatctaagctggaaacattgcccaaagaagacctcatcaagtttgccaagaaacagatgatgctaatacagaaagctaaatcaaggtgtacagaattggagaaagaaattgaagaactcagatcaaaacctgttactgaaggaactggtgatattattaaggcattaactgaacgtctggatgctcttcttctggaaaaagcagagactgagcaacagtgtctttctctgaaaaaggaaaatataaaaatgaagcaagaggttgaggattctgtaacaaagatgggagatgcacataaggagttggaacaatcacatataaactatgtgaaagaaattgaaaatttgaaaaatgagttgatggcagtacgttccaaatacagtgaagacaaagctaacttacaaaagcagctggaagaagcaatgaatacgcaattagaactttcagaacaacttaaatttcagaacaactctgaagataatgttaaaaaactacaagaagagattgagaaaattaggccaggctttgaggagcaaattttatatctgcaaaagcaattagacgctaccactgatgaaaagaaggaaacagttactcaactccaaaatatcattgaggctaattctcagcattaccaaaaaaatattaatagtttgcaggaagagcttttacagttgaaagctatacaccaagaagaggtgaaagagttgatgtgccagattgaagcatcagctaaggaacatgaagcagagataaataagttgaacgagctaaaagagaacttagtaaaacaatgtgaggcaagtgaaaagaacatccagaagaaatatgaatgtgagttagaaaatttaaggaaagccacctcaaatgcaaaccaagacaatcagatatgttctattctcttgcaagaaaatacatttgtagaacaagtagtaaatgaaaaagtcaaacacttagaagataccttaaaagaacttgaatctcaacacagtatcttaaaagatgaggtaacttatatgaataatcttaagttaaaacttgaaatggatgctcaacatataaaggatgagttttttcatgaacgggaagacttagagtttaaaattaatgaattattactagctaaagaagaacagggctgtgtaattgaaaaattaaaatctgagctagcaggtttaaataaacagttttgctatactgtagaacagcataacagagaagtacagagtcttaaggaacaacatcaaaaagaaatatcagaactaaatgagacatttttgtcagattcagaaaaagaaaaattaacattaatgtttgaaatacagggtcttaaggaacagtgtgaaaacctacagcaagaaaagcaagaagcaattttaaattatgagagtttacgagagattatggaaattttacaaacagaactgggggaatctgctggaaaaataagtcaagagttcgaatcaatgaagcaacagcaagcatctgatgttcatgaactgcagcagaagctcagaactgcttttactgaaaaagatgcccttctcgaaactgtgaatcgcctccagggagaaaatgaaaagttactatctcaacaagaattggtaccagaacttgaaaataccataaagaaccttcaagaaaagaatggagtatacttacttagtctcagtcaaagagataccatgttaaaagaattagaaggaaagataaattctcttactgaggaaaaagatgattttataaataaactgaaaaattcccatgaagaaatggataatttccataagaaatgtgaaagggaagaaagattgattcttgaacttgggaagaaagtagagcaaacaatccagtacaacagtgaactagaacaaaaggtaaatgaattaacaggaggactagaggagactttaaaagaaaaggatcaaaatgaccaaaaactagaaaaacttatggttcaaatgaaagttctctctgaagacaaagaagtattgtcagctgaagtgaagtctctttatgaggaaaacaataaactcagttcagaaaaaaaacagttgagtagggatttggaggtttttttgtctcaaaaagaagatgttatccttaaagaacatattactcaattagaaaagaaacttcagttaatggttgaagagcaagataatttaaataaactgcttgaaaatgagcaagttcagaagttatttgttaaaactcagttgtatggttttcttaaagaaatgggatcagaagtttcagaagacagtgaagagaaagatgttgttaatgtcctacaggcagtcggtgaatccttggcaaaaataaatgaggaaaaatgcaacctggcttttcagcgtgatgaaaaagtattagagttagaaaaagagattaagtgccttcaagaagagagtgtagttcagtgtgaagaacttaagtctttattgagagactatgagcaagagaaagttctcttaaggaaagagttagaagaaatacagtcagaaaaagaggccctgcagtctgatcttctagaaatgaagaatgctaatgaaaaaacaaggcttgaaaatcagaatcttttaattcaagttgaagaagtatctcaaacatgtagcaaaagtgaaatccataatgaaaaagaaaaatgttttataaaggaacatgaaaacctaaagccactactagaacaaaaagaattacgagataggagagcagagttgatactattaaaggattccttagcaaaatcaccttctgtaaaaaatgatcctctgtcttcagtaaaagagttggaagaaaaaatagaaaatctggaaaaagaatgcaaagaaaaggaggagaaaataaataagataaaattagttgccgtaaaggcaaagaaagaactagattccagcagaaaagagacccagactgtgaaggaagaacttgaatctcttcgatcagaaaaggaccagttatctgcttccatgagagatctcattcaaggagcagaaagctataagaatcttttattagaatatgaaaagcagtcagagcaactggatgtggaaaaagaacgtgctaataattttgagcatcgtattgaagaccttacaagacaattaagaaattcgactttgcagtgtgaaacaataaattctgataatgaagatctcctggctcgtattgagacattacagtctaatgccaaattattagaagtacagattttagaagtccagagagccaaagcaatggtagacaaagaattagaagctgaaaaacttcagaaagaacagaagataaaggaacatgccactactgtaaatgaacttgaagaacttcaggtacaacttcaaaaggaaaagaaacagcttcagaaaaccatgcaagaattagagctggttaaaaagtgaacgtttgatgaaagaactaaatcaaaagttaactaataaaaacaacaagatagaagatttggagcaagaaataaaaattcaaaaacagaaacaagaaaccctacaagaagaaataacttcattacagtcttcagtacaacaatatgaagaaaaaaacaccaaaatcaagcaattgcttgtgaaaaccaaaaaggaactggcagattcaaagcaagcagaaactgatcacttaatacttcaagcatctttaaaaggtgagctggaggcaagccagcagcaagtagaagtctataaaatacagctggctgaaataacatcagagaagcacaaaatccacgagcacctgaaaacctctgcggaacagcaccagcgtacgctaagtgcataccagcagagagtgacagcactacaggaagagtgccgtgctgccaaggcagaacaagctactgtaacctctgaattcgagagctacaaagtccgagttcataatgttctaaaacaacagaaaaataaatctatgtctcaggctgaaactgagggcgctaaacaagaaagggaacatctggaaatgctgattgaccagctaaaaatcaaattacaagatagccaaaataacttacagattaatgtatctgaacttcaaacattgcagtctgaacatgatacactgctagaaaggcacaacaagatgctgcaggaaactgtgtccaaagaggcggaactccgggaaaaattgtgttcaatacagtcagagaacatgatgatgaaatctgaacatacacagactgtgagtcagctaacatcccagaacgaggtccttcgaaatagcttccgagatcaagtgcgacatttgcaggaagaacacagaaagacagtggagacattacagcagcagctctccaagatggaagcacagctcttccagcttaagaatgaaccgaccacaagaagcccagtttcctctcaacaatctttgaagaaccttcgagaaaggagaaacacagacctcccgcttctagacatgcacactgtaacccgggaagagggagaaggcatggagacaactgatacggagtctgtgtcttccgccagcacatacacacagtctttagagcagctgcttaactctcccgaaactaaacttgagcctccattatggcatgctgaatttaccaaagaagaattggttcagaagctcagttccaccacaaaaagtgcagatcacttaaacggcctgcttcgggaaacagaagcaaccaatgcaattcttatggagcaaattaagcttctcaaaagtgaaataagaagattggaaaggaatcaagagcgagagaagtctgcagctaacctggaatacttgaagaacgtcttgctgcagttcattttcttgaaaccaggtagtgaaagagagagacttcttcctgttataaatacgatgttgcagctcagccctgaagaaaagggaaaacttgctgcggttgctcaaggtgaggaagaaaatgcttcccgttcttctggatgggcatcctatcttcatagttggtctggacttcgataggttgatggaaggaatatttttattaaccaaatagaatctatttacaaaaatggttcacgtatattaccacaattcttttgtcaaaaagtgtgtatatatgtttgcatctacatatatttgtacatctatatgacagatgtattttaaaagtttcatcttgaagtaaaagtacaacagcttgaagtgttgatagcaggccacagccctctaactcatgtgatttcccatgcatgctgccagaataaaaccaccaggaatgaattcactccccacttctctggaacctcaggacccgcccatttctcggcagtactgtgaattttgaagttaaactaaattttggtaccataccaactggaatttaggctttaaaaataatgtttcaaggccaggtgtggtgattcatgcctgaaatcccactactttgggaggctgaggctggagaattgcttgaggctagtgagctgtgactcccactgcactccagctcggggaacagagcgagaccttgtctctaaaaataatagtaataaaataaaaataacgttttatgactatttattgcaaggtcagagttacagattgttataaattgttgagaaatttttgtgattagaatatgaaggaaaaagctttgttggtaaaagtgacatgttaaggggctatgaagtaaatatgctgcagttaattgtgctaagttaaaatacagtttagttatttgctttaaaataaactcttctttttttctttaaagtatactatctcaaaactcattatgttgtcagagccctagagctggctagtgtaacactgactatgagtaggtgggcccaccacttgaggtgatttcatggtgtctttccaggctcttgatagggtgtcactgcatgcaagccatgaatctgttttgagaatcctctccattttcccaaataaaaacctatcacaacagtgactatatcactcagcattggatctaaatataaaagtggtgctttcagtgtttttggcagatagtgttccataagctttccatcagaagggattttagacaccttagaggtccgtgctacatcgtcacagttcctccgaataaccttaggtggtagtgttacttgcctttgacacctctgcatatgttttaatgactagatccaaactgtgttgttcttaaatcaaaaattggataatttgtaatatttatgtgttaatcacacagtatgctctctgaagttctcttaagccttcagtttatactcttaatttaattttctttctgagctggagaactggctttgcactttggttacacagaacattggtttccaattcagtttaactgaaatttgctgctgatatgttgagtttgttctttaaaaaatagctcatatatctcatctttcctcctgtcttagaagaacagacctaactagtgaatgtattaatgaaaatgcatctatttcagagctgacatgaagagtttagtttttttactttataaactgtgaatatgagtatgccagctgcatacgatgtaactaatcatatttaaatatatttcactttctctttgactttagaccttttgaagtctgtataaacttgttttgaaatatagtctctgcttacgaatgtcataacaaaataattttttgcatgataaaaaattactttgattacaaaaggcatattctttcatggtttctgcaatgagaggaagtgtaatgattattttaatatttctattaaatatgtttaa

SEQ ID NO: 287734 - DNA, 6852 bp, Homo sapiens
agcgcgacctttgacctgcagtagagcctacgtcagaggctggcgcaaacagaagtgcagcggtggcggcggctggttgcgggccggcggcgggctggcggagatggaggatcttgttcaagatggggtggcttcaccagctacccctgggaccgggaaatctaagctggaaacattgcccaaagaagacctcatcaagtttgccaagaaacagatgatgctaatacagaaagctaaatcaaggtgtacagaattggagaaagaaattgaagaactcagatcaaaacctgttactgaaggaactggtgatattattaaggcattaactgaacgtctggatgctcttcttctggaaaaagcagagactgagcaacagtgtctttctctgaaaaaggaaaatataaaaatgaagcaagaggttgaggattctgtaacaaagatgggagatgcacataaggagttggaacaatcacatataaactatgtgaaagaaattgaaaatttgaaaaatgagttgatggcagtacgttccaaatacagtgaagacaaagctaacttacaaaagcagctggaagaagcaatgaatacgcaattagaactttcagaacaacttaaatttcagaacaactctgaagataatgttaaaaaactacaagaagagattgagaaaattaggccaggctttgaggagcaaattttatatctgcaaaagcaattagacgctaccactgatgaaaagaaggaaacagttactcaactccaaaatatcattgaggctaattctcagcattaccaaaaaaatattaatagtttgcaggaagagcttttacagttgaaagctatacaccaagaagaggtgaaagagttgatgtgccagattgaagcatcagctaaggaacatgaagcagagataaataagttgaacgagctaaaagagaacttagtaaaacaatgtgaggcaagtgaaaagaacatccagaagaaatatgaatgtgagttagaaaatttaaggaaagccacctcaaatgcaaaccaagacaatcagatatgttctattctcttgcaagaaaatacatttgtagaacaagtagtaaatgaaaaagtcaaacacttagaagataccttaaaagaacttgaatctcaacacagtatcttaaaagatgaggtaacttatatgaataatcttaagttaaaacttgaaatggatgctcaacatataaaggatgagttttttcatgaacgggaagacttagagtttaaaattaatgaattattactagctaaagaagaacagggctgtgtaattgaaaaattaaaatctgagctagcaggtttaaataaacagttttgctatactgtagaacagcataacagagaagtacagagtcttaaggaacaacatcaaaaagaaatatcagaactaaatgagacatttttgtcagattcagaaaaagaaaaattaacattaatgtttgaaatacagggtcttaaggaacagtgtgaaaacctacagcaagaaaagcaagaagcaattttaaattatgagagtttacgagagattatggaaattttacaaacagaactgggggaatctgctggaaaaataagtcaagagttcgaatcaatgaagcaacagcaagcatctgatgttcatgaactgcagcagaagctcagaactgcttttactgaaaaagatgcccttctcgaaactgtgaatcgcctccagggagaaaatgaaaagttactatctcaacaagaattggtaccagaacttgaaaataccataaagaaccttcaagaaaagaatggagtatacttacttagtctcagtcaaagagataccatgttaaaagaattagaaggaaagataaattctcttactgaggaaaaagatgattttataaataaactgaaaaattcccatgaagaaatggataatttccataagaaatgtgaaagggaagaaagattgattcttgaacttgggaagaaagtagagcaaacaatccagtacaacagtgaactagaacaaaaggtaaatgaattaacaggaggactagaggagactttaaaagaaaaggatcaaaatgaccaaaaactagaaaaacttatggttcaaatgaaagttctctctgaagacaaagaagtattgtcagctgaagtgaagtctctttatgaggaaaacaataaactcagttcagaaaaaaaacagttgagtagggatttggaggtttttttgtctcaaaaagaagatgttatccttaaagaacatattactcaattagaaaagaaacttcagttaatggttgaagagcaagataatttaaataaactgcttgaaaatgagcaagttcagaagttatttgttaaaactcagttgtatggttttcttaaagaaatgggatcagaagtttcagaagacagtgaagagaaagatgttgttaatgtcctacaggcagtcggtgaatccttggcaaaaataaatgaggaaaaatgcaacctggcttttcagcgtgatgaaaaagtattagagttagaaaaagagattaagtgccttcaagaagagagtgtagttcagtgtgaagaacttaagtctttattgagagactatgagcaagagaaagttctcttaaggaaagagttagaagaaatacagtcagaaaaagaggccctgcagtctgatcttctagaaatgaagaatgctaatgaaaaaacaaggcttgaaaatcagaatcttttaattcaagttgaagaagtatctcaaacatgtagcaaaagtgaaatccataatgaaaaagaaaaatgttttataaaggaacatgaaaacctaaagccactactagaacaaaaagaattacgagataggagagcagagttgatactattaaaggattccttagcaaaatcaccttctgtaaaaaatgatcctctgtcttcagtaaaagagttggaagaaaaaatagaaaatctggaaaaagaatgcaaagaaaaggaggagaaaataaataagataaaattagttgccgtaaaggcaaagaaagaactagattccagcagaaaagagacccagactgtgaaggaagaacttgaatctcttcgatcagaaaaggaccagttatctgcttccatgagagatctcattcaaggagcagaaagctataagaatcttttattagaatatgaaaagcagtcagagcaactggatgtggaaaaagaactgtgaaacaataaattctgataatgaagatctcctggctcgtattgagacattacagtctaatgccaaattattagaagtacagattttagaagtccagagagccaaagcaatggtagacaaagaattagaagctgaaaaacttcagaaagaacagaagataaaggaacatgccactactgtaaatgaacttgaagaacttcaggtacaacttcaaaaggaaaagaaacagcttcagaaaaccatgcaagaattagagctggttaaaaaggatgcccaacaaaccacattgatgaatatggaaatagctgattatgaacgtttgatgaaagaactaaatcaaaagttaactaataaaaacaacaagatagaagatttggagcaagaaataaaaattcaaaaacagaaacaagaaaccctacaagaagaaataacttcattacagtcttcagtacaacaatatgaagaaaaaaacaccaaaatcaagcaattgcttgtgaaaaccaaaaaggaactggcagattcaaagcaagcagaaactgatcacttaatacttcaagcatctttaaaaggtgagctggaggcaagccagcagcaagtagaagtctataaaatacagctggctgaaataacatcagagaagcacaaaatccacgagcacctgaaaacctctgcggaacagcaccagcgtacgctaagtgcataccagcagagagtgacagcactacaggaagagtgccgtgctgccaaggcagaacaagctactgtaacctctgaattcgagagctacaaagtccgagttcataatgttctaaaacaacagaaaaataaatctatgtctcaggctgaaactgagggcgctaaacaagaaagggaacatctggaaatgctgattgaccagctaaaaatcaaattacaagatagccaaaataacttacagattaatgtatctgaacttcaaacattgcagtctgaacatgatacactgctagaaaggcacaacaagatgctgcaggaaactgtgtccaaagaggcggaactccgggaaaaattgtgttcaatacagtcagagaacatgatgatgaaatctgaacatacacagactgtgagtcagctaacatcccagaacgaggtccttcgaaatagcttccgagatcaagtgcgacatttgcaggaagaacacagaaagacagtggagacattacagcagcagctctccaagatggaagcacagctcttccagcttaagaatgaaccgaccacaagaagcccagtttcctctcaacaatctttgaagaaccttcgagaaaggagaaacacagacctcccgcttctagacatgcacactgtaacccgggaagagggagaaggcatggagacaactgatacggagtctgtgtcttccgccagcacatacacacagtctttagagcagctgcttaactctcccgaaactaaacttgagcctccattatggcatgctgaatttaccaaagaagaattggttcagaagctcagttccaccacaaaaagtgcagatcacttaaacggcctgcttcgggaaacagaagcaaccaatgcaattcttatggagcaaattaagcttctcaaaagtgaaataagaagattggaaaggaatcaagagcgagagaagtctgcagctaacctggaatacttgaagaacgtcttgctgcagttcattttcttgaaaccaggtagtgaaagagagagacttcttcctgttataaatacgatgttgcagctcagccctgaagaaaagggaaaacttgctgcggttgctcaaggtgaggaagaaaatgcttcccgttcttctggatgggcatcctatcttcatagttggtctggacttcgataggttgatggaaggaatatttttattaaccaaatagaatctatttacaaaaatggttcacgtatattaccacaattcttttgtcaaaaagtgtgtatatatgtttgcatctacatatatttgtacatctatatgacagatgtattttaaaagtttcatcttgaagtaaaagtacaacagcttgaagtgttgatagcaggccacagccctctaactcatgtgatttcccatgcatgctgccagaataaaaccaccaggaatgaattcactccccacttctctggaacctcaggacccgcccatttctcggcagtactgtgaattttgaagttaaactaaattttggtaccataccaactggaatttaggctttaaaaataatgtttcaaggccaggtgtggtgattcatgcctgaaatcccactactttgggaggctgaggctggagaattgcttgaggctagtgagctgtgactcccactgcactccagctcggggaacagagcgagaccttgtctctaaaaataatagtaataaaataaaaataacgttttatgactatttattgcaaggtcagagttacagattgttataaattgttgagaaatttttgtgattagaatatgaaggaaaaagctttgttggtaaaagtgacatgttaaggggctatgaagtaaatatgctgcagttaattgtgctaagttaaaatacagtttagttatttgctttaaaataaactcttctttttttctttaaagtatactatctcaaaactcattatgttgtcagagccctagagctggctagtgtaacactgactatgagtaggtgggcccaccacttgaggtgatttcatggtgtctttccaggctcttgatagggtgtcactgcatgcaagccatgaatctgttttgagaatcctctccattttcccaaataaaaacctatcacaacagtgactatatcactcagcattggatctaaatataaaagtggtgctttcagtgtttttggcagatagtgttccataagctttccatcagaagggattttagacaccttagaggtccgtgctacatcgtcacagttcctccgaataaccttaggtggtagtgttacttgcctttgacacctctgcatatgttttaatgactagatccaaactgtgttgttcttaaatcaaaaattggataatttgtaatatttatgtgttaatcacacagtatgctctctgaagttctcttaagccttcagtttatactcttaatttaattttctttctgagctggagaactggctttgcactttggttacacagaacattggtttccaattcagtttaactgaaatttgctgctgatatgttgagtttgttctttaaaaaatagctcatatatctcatctttcctcctgtcttagaagaacagacctaactagtgaatgtattaatgaaaatgcatctatttcagagctgacatgaagagtttagtttttttactttataaactgtgaatatgagtatgccagctgcatacgatgtaactaatcatatttaaatatatttcactttctctttgactttagaccttttgaagtctgtataaacttgttttgaaatatagtctctgcttacgaatgtcataacaaaataattttttgcatgataaaaaattactttgattacaaaaggcatattctttcatggtttctgcaatgagaggaagtgtaatgattattttaatatttctattaaatatgtttaa

SEQ ID NO: 287735 - DNA, 6859 bp, Homo sapiens
agcgcgacctttgacctgcagtagagcctacgtcagaggctggcgcaaacagaagtgcagcggtggcggcggctggttgcgggccggcggcgggctggcggagatggaggatcttgttcaagatggggtggcttcaccagctacccctgggaccgggaaatctaagctggaaacattgcccaaagaagacctcatcaagtttgccaagaaacagatgatgctaatacagaaagctaaatcaaggtgtacagaattggagaaagaaattgaagaactcagatcaaaacctgttactgaaggaactggtgatattattaaggcattaactgaacgtctggatgctcttcttctggaaaaagcagagactgagcaacagtgtctttctctgaaaaaggaaaatataaaaatgaagcaagaggttgaggattctgtaacaaagatgggagatgcacataaggagttggaacaatcacatataaactatgtgaaagaaattgaaaatttgaaaaatgagttgatggcagtacgttccaaatacagtgaagacaaagctaacttacaaaagcagctggaagaagcaatgaatacgcaattagaactttcagaacaacttaaatttcagaacaactctgaagataatgttaaaaaactacaagaagagattgagaaaattaggccaggctttgaggagcaaattttatatctgcaaaagcaattagacgctaccactgatgaaaagaaggaaacagttactcaactccaaaatatcattgaggctaattctcagcattaccaaaaaaatattaatagtttgcaggaagagcttttacagttgaaagctatacaccaagaagaggtgaaagagttgatgtgccagattgaagcatcagctaaggaacatgaagcagagataaataagttgaacgagctaaaagagaacttagtaaaacaatgtgaggcaagtgaaaagaacatccagaagaaatatgaatgtgagttagaaaatttaaggaaagccacctcaaatgcaaaccaagacaatcagatatgttctattctcttgcaagaaaatacatttgtagaacaagtagtaaatgaaaaagtcaaacacttagaagataccttaaaagaacttgaatctcaacacagtatcttaaaagatgaggtaacttatatgaataatcttaagttaaaacttgaaatggatgctcaacatataaaggatgagttttttcatgaacgggaagacttagagtttaaaattaatgaattattactagctaaagaagaacagggctgtgtaattgaaaaattaaaatctgagctagcaggtttaaataaacagttttgctatactgtagaacagcataacagagaagtacagagtcttaaggaacaacatcaaaaagaaatatcagaactaaatgagacatttttgtcagattcagaaaaagaaaaattaacattaatgtttgaaatacagggtcttaaggaacagtgtgaaaacctacagcaagaaaagcaagaagcaattttaaattatgagagtttacgagagattatggaaattttacaaacagaactgggggaatctgctggaaaaataagtcaagagttcgaatcaatgaagcaacagcaagcatctgatgttcatgaactgcagcagaagctcagaactgcttttactgaaaaagatgcccttctcgaaactgtgaatcgcctccagggagaaaatgaaaagttactatctcaacaagaattggtaccagaacttgaaaataccataaagaaccttcaagaaaagaatggagtatacttacttagtctcagtcaaagagataccatgttaaaagaattagaaggaaagataaattctcttactgaggaaaaagatgattttataaataaactgaaaaattcccatgaagaaatggataatttccataagaaatgtgaaagggaagaaagattgattcttgaacttgggaagaaagtagagcaaacaatccagtacaacagtgaactagaacaaaaggtaaatgaattaacaggaggactagaggagactttaaaagaaaaggatcaaaatgaccaaaaactagaaaaacttatggttcaaatgaaagttctctctgaagacaaagaagtattgtcagctgaagtgaagtctctttatgaggaaaacaataaactcagttcagaaaaaaaacagttgagtagggatttggaggtttttttgtctcaaaaagaagatgttatccttaaagaacatattactcaattagaaaagaaacttcagttaatggttgaagagcaagataatttaaataaactgcttgaaaatgagcaagttcagaagttatttgttaaaactcagttgtatggttttcttaaagaaatgggatcagaagtttcagaagacagtgaagagaaagatgttgttaatgtcctacaggcagtcggtgaatccttggcaaaaataaatgaggaaaaatgcaacctggcttttcagcgtgatgaaaaagtattagagttagaaaaagagattaagtgccttcaagaagagagtgtagttcagtgtgaagaacttaagtctttattgagagactatgagcaagagaaagttctcttaaggaaagagttagaagaaatacagtcagaaaaagaggccctgcagtctgatcttctagaaatgaagaatgctaatgaaaaaacaaggcttgaaaatcagaatcttttaattcaagttgaagaagtatctcaaacatgtagcaaaagtgaaatccataatgaaaaagaaaaatgttttataaaggaacatgaaaacctaaagccactactagaacaaaaagaattacgagataggagagcagagttgatactattaaaggattccttagcaaaatcaccttctgtaaaaaatgatcctctgtcttcagtaaaagagttggaagaaaaaatagaaaatctggaaaaagaatgcaaagaaaaggaggagaaaataaataagataaaattagttgccgtaaaggcaaagaaagaactagattccagcagaaaagagacccagactgtgaaggaagaacttgaatctcttcgatcagaaaaggaccagttatctgcttccatgagagatctcattcaaggagcagaaagctataagaatcttttattagaatatgaaaagcagtcagagcaactggatgtggaaaaagaacgtgctaataattttgagcatcgtattgaagaccttacaagacaattaagaaattcgactttgcagtgtgaaacaataaattctgataatgaagatctcctggctcgtattgagacattacagtctaatgccaaattattagaagtacagattttagaagtccagagagccaaagcaatggtagacaaagaattagaagctgaaaaacttcagaaagaacagaagataaaggaacatgccactactgtaaatgaacttgaagaacttcaggtacaacttcaaaaggaaaagaaacagcttcagaaaaccatgcaagaattagagctggttaaaaaggatgcccaacaaaccacattgatgaatatggaaatagctgattatgaacgtttgatgaaagaactaaatcaaaagttaactaataaaaacaacaagatagaagatttggagcaagaaataaaaattcaaaaacagaaacaagaaaccctacaagaagaaataacttcattacagtcttcagtacaacaatatgaagaaaaaaacaccaaaatcaagcaattgcttgtgaaaaccaaaaaggaactggcagattcaaagcaagcagaaactgatcacttaatacttcaagcatctttaaaaggtgagctggaggcaagccagcagcaagtagaagtctataaaatacagctggctgaaataacatcagagaagcacaaaatccacgagcacctgaaaacctctgcggaacagcaccagcgtacgctaagtgcataccagcagagagtgacagcactacaggaagagtgccgtgctgccaaggcagaacaagctactgtaacctctgaattcgagagctacaaagtccgagttcataatgttctaaaacaacagaaaaataaatctatgtctcaggctgaaactgagggcgctaaacaagaaagggaacatctggaaatgctgattgaccagctaaaaatcaaattacaagatagccaaaataacttacagattaatgtatctgaacttcaaacattgcagtctgaacatgatacactgctagaaaggcacaacaagatgctgcaggaaactgtgtccaaagaggcggaactccgggaaaaattgtgttcaatacagtcagagaacatgatgatgaaatctgaacatacacagactgtgagtcagctaacatcccagaacgaggtccttcgaaatagcttccgagatcaagtgcgacatttgcaggaagaacacagaaagacagtggagacattacagcagcagctctccaagatggaagcacagctcttccagcttaagaatgaaccgaccacaagaagcccagtttcctctcaacaatctttgaagaaccttcgagaaaggagaaacacagacctcccgcttctagacatgcacactgtaacccgggaagagggagaaggcatggagacaactgatacggagtctgtgtcttccgccagcacatacacacagtctttagagcagctgcttaactctcccgaaactaaacttgagcctccattatggcatgctgaatttaccaaagaagaattggttcagaagctcagttccaccacaaaaagtgcagatcacttaaacggcctgcttcgggaaacagaagcaaccaatgcaattcttatggagcaaattaagcttctcaaaagtgaaataagaagattggaaaggaatcaagagcgagagaagtctgcagctaacctggaatacttgaagaacgtcttgctgcagttcattttcttgaaaccaggtagtgaaagagagagacttcttcctgttataaatacgatgttgcagctcagccctgaagaaaagggaaaacttgctgcggttgctcaaggtgaggaagaaaatgcttcccgttcttctggatgggcatcctatcttcatagttggtctggacttcgataggttgatggaaggaatatttttattaaccaaatagaatctatttacaaaaatggttcacgtatattaccacaattcttttgtcaaaaagtgtgtatatatgtttgcatctacatatatttgtacatctatatgacagatgtattttaaaagtttcatcttgaagtaaaagtacaacagcttgaagtgttgatagcaggccacagccctctaactcatgtgatttcccatgcatgctgccagaataaaaccaccaggaatgaattcactccccacttctctggaacctcaggacccgcccatttctcggcagtactgtgaattttgaagttaaactaaattttggtaccataccaactggaatttaggctttaaaaataatgtttcaaggccaggtgtggtgattcatgcctgaaatcccactactttgggaggctgaggctggagaattgcttgaggctagtgagctgtgactcccactgcactccagctcggggaacagagcgagaccttgtctctaaaaataatagtaataaaataaaaataacgttttatgactatttattgcaaggtcagagttacagattgttataaattgttgagaaatttttgtgattagaatatgaaggaaaaagctttgttggtaaaagtgacatgttaaggggctatgaagtaaatatgctgcagttaattgtgctaagttaaaatacagtttagttatttgctttaaaataaactcttctttttttctttaaagtatactatctcaaaactcattatgttgtcagagccctagagctggctagtgtaacactgactatgagtaggtgggcccaccacttgaggtgatttcatggtgtctttccaggctcttgatagggtgtcactgcatgcaagccatgaatctgttttgagaatcctctccattttcccaaataaaaacctatcacaacagtgactatatcactcagcattggatctaaatataaaagtggtgctttcagtgtttttggcagatagtgttccataagctttccatcagaagggattttagacaccttagaggtccgtgctacatcgtcacagttcctccgaataaccttaggtggtagtgttacttgcctttgacacctctgcatatgttttaatgactagatccaaactgtgttgctctgaagttctcttaagccttcagtttatactcttaatttaattttctttctgagctggagaactggctttgcactttggttacacagaacattggtttccaattcagtttaactgaaatttgctgctgatatgttgagtttgttctttaaaaaatagctcatatatctcatctttcctcctgtcttagaagaacagacctaactagtgaatgtattaatgaaaatgcatctatttcagagctgacatgaagagtttagtttttttactttataaactgtgaatatgagtatgccagctgcatacgatgtaactaatcatatttaaatatatttcactttctctttgactttagaccttttgaagtctgtataaacttgttttgaaatatagtctctgcttacgaatgtcataacaaaataattttttgcatgataaaaaattactttgattacaaaaggcatattctttcatggtttctgcaatgagaggaagtgtaatgattattttaatatttctattaaatatgtttaa

SEQ ID NO: 287736 - DNA, 5180 bp, Homo sapiens
agcgcgacctttgacctgcagtagagcctacgtcagaggctggcgcaaacagaagtgcagcggtggcggcggctggttgcgggccggcggcgggctggcggagatggaggatcttgttcaagatggggtggcttcaccagctacccctgggaccgggaaatctaagctggaaacattgcccaaagaagacctcatcaagtttgccaagaaacagatgatgctaatacagaaagctaaatcaaggtgtacagaattggagaaagaaattgaagaactcagatcaaaacctgttactgaaggaactggtgatattattaaggcattaactgaacgtctggatgctcttcttctggaaaaagcagagactgagcaacagtgtctttctctgaaaaaggaaaatataaaaatgaagcaagaggttgaggattctgtaacaaagatgggagatgcacataaggagttggaacaatcacatataaactatgtgaaagaaattgaaaatttgaaaaatgagttgatggcagtacgttccaaatacagtgaagacaaagctaacttacaaaagcagctggaagaagcaatgaatacgcaattagaactttcagaacaacttaaatttcagaacaactctgaagataatgttaaaaaactacaagaagagattgagaaaattaggccaggctttgaggagcaaattttatatctgcaaaagcaattagacgctaccactgatgaaaagaaggaaacagttactcaactccaaaatatcattgaggctaattctcagcattaccaaaaaaatattaatagtttgcaggaagagcttttacagttgaaagctatacaccaagaagaggtgaaagagttgatgtgccagattgaagcatcagctaaggaacatgaagcagagataaataagttgaacgagctaaaagagaacttagtaaaacaatgtgaggcaagtgaaaagaacatccagaagaaatatgaatgtgagttagaaaatttaaggaaagccacctcaaatgcaaaccaagacaatcagatatgttctattctcttgcaagaaaatacatttgtagaacaagtagtaaatgaaaaagtcaaacacttagaagataccttaaaagaacttgaatctcaacacagtatcttaaaagatgaggtaacttatatgaataatcttaagttaaaacttgaaatggatgctcaacatataaaggatgagttttttcatgaacgggaagacttagagtttaaaattaatgaattattactagctaaagaagaacagggctgtgtaattgaaaaattaaaatctgagctagcaggtttaaataaacagttttgctatactgtagaacagcataacagagaagtacagagtcttaaggaacaacatcaaaaagaaatatcagaactaaatgagacatttttgtcagattcagaaaaagaaaaattaacattaatgtttgaaatacagggtcttaaggaacagtgtgaaaacctacagcaagaaaagcaagaagcaattttaaattatgagagtttacgagagattatggaaattttacaaacagaactgggggaatctgctggaaaaataagtcaagagttcgaatcaatgaagcaacagcaagcatctgatgttcatgaactgcagcagaagctcagaactgcttttactgaaaaagatgcccttctcgaaactgtgaatcgcctccagggagaaaatgaaaagttactatctcaacaagaattggtaccagaacttgaaaataccataaagaaccttcaagaaaagaatggagtatacttacttagtctcagtcaaagagataccatgttaaaagaattagaaggaaagataaattctcttactgaggaaaaagatgattttataaataaactgaaaaattcccatgaagaaatggataatttccataagaaatgtgaaagggaagaaagattgattcttgaacttgggaagaaagtagagcaaacaatccagtacaacagtgaactagaacaaaaggtaaatgaattaacaggaggactagaggagactttaaaagaaaaggatcaaaatgaccaaaaactagaaaaacttatggttcaaatgaaagttctctctgaagacaaagaagtattgtcagctgaagtgaagtctctttatgaggaaaacaataaactcagttcagaaaaaaaacagttgagtagggatttggaggtttttttgtctcaaaaagaagatgttatccttaaagaacatattactcaattagaaaagaaacttcagttaatggttgaagagcaagataatttaaataaactgcttgaaaatgagcaagttcagaagttatttgttaaaactcagttgtatggttttcttaaagaaatgggatcagaagtttcagaagacagtgaagagaaagatgttgttaatgtcctacaggcagtcggtgaatccttggcaaaaataaatgaggaaaaatgcaacctggcttttcagcgtgatgaaaaagtattagagttagaaaaagagattaagtgccttcaagaagagagtgtagttcagtgtgaagaacttaagtctttattgagagactatgagcaagagaaagttctcttaaggaaagagttagaagaaatacagtcagaaaaagaggccctgcagtctgatcttctagaaatgaagaatgctaatgaaaaaacaaggcttgaaaatcagaatcttttaattcaagttgaagaagtatctcaaacatgtagcaaaagtgaaatccataatgaaaaagaaaaatgttttataaaggaacatgaaaacctaaagccactactagaacaaaaagaattacgagataggagagcagagttgatactattaaaggattccttagcaaaatcaccttctgtaaaaaatgatcctctgtcttcagtaaaagagttggaagaaaaaatagaaaatctggaaaaagaatgcaaagaaaaggaggagaaaataaataagataaaattagttgccgtaaaggcaaagaaagaactagattccagcagaaaagagacccagactgtgaaggaagaacttgaatctcttcgatcagaaaaggaccagttatctgcttccatgagagatctcattcaaggagcagaaagctataagaatcttttattagaatatgaaaagcagtcagagcaactggatgtggaaaaagaacgtgctaataattttgagcatcgtattgaagaccttacaagacaattaagaaattcgactttgcagtgtgaaacaataaattctgataatgaagatctcctggctcgtattgagacattacagtctaatgccaaattattagaagtacagattttagaagtccagagagccaaagcaatggtagacaaagaattagaagctgaaaaacttcagaaagaacagaagataaaggaacatgccactactgtaaatgaacttgaagaacttcaggtacaacttcaaaaggaaaagaaacagcttcagaaaaccatgcaagaattagagctggttaaaaaggatgcccaacaaaccacattgatgaatatggaaatagctgattatgaacgtttgatgaaagaactaaatcaaaagttaactaataaaaacaacaagatagaagatttggagcaagaaataaaaattcaaaaacagaaacaagaaaccctacaagaagaaataacttcattacagtcttcagtacaacaatatgaagaaaaaaacaccaaaatcaagcaattgcttgtgaaaaccaaaaaggaactggcagattcaaagcaagcagaaactgatcacttaatacttcaagcatctttaaaaggtgagctggaggcaagccagcagcaagtagaagtctataaaatacagctggctgaaataacatcagagaagcacaaaatccacgagcacctgaaaacctctgcggaacagcaccagcgtacgctaagtgcataccagcagagagtgacagcactacaggaagagtgccgtgctgccaaggcagaacaagctactgtaacctctgaattcgagagctacaaagtccgagttcataatgttctaaaacaacagaaaaataaatctatgtctcaggctgaaactgagggcgctaaacaagaaagggaacatctggaaatgctgattgaccagctaaaaatcaaattacaagatagccaaaataacttacagattaatgtatctgaacttcaaacattgcagtctgaacatgatacactgctagaaaggcacaacaagatgctgcaggaaactgtgtccaaagaggcggaactccgggaaaaattgtgttcaatacagtcagagaacatgatgatgaaatctgaacatacacagactgtgagtcagctaacatcccagaacgaggtccttcgaaatagcttccgagatcaagtgcgacatttgcaggaagaacacagaaagacagtggagacattacagcagcagctctccaagatggaagcacagctcttccagcttaagaatgaaccgaccacaagaagcccagtttcctctcaacaatctttgaagaaccttcgagaaaggagaaacacagacctcccgcttctagacatgcacactgtaacccgggaagagggagaaggcatggagacaactgatacggagtctgtgtcttccgccagcacatacacacagtctttagagcagctgcttaactctcccgaaactaaacttgagcctccattatggcatgctgaatttaccaaagaagaattggttcagaagctcagttccaccacaaaaagtgcagatcacttaaacggcctgcttcgggaaacagaagcaaccaatgcaattcttatggagcaaattaagcttctcaaaagtgaaataagaagattggaaaggaatcaagagcgagagaagtctgcagctaacctggaatacttgaagaacgtcttgctgcagttcattttcttgaaaccaggtagtgaaagagagagacttcttcctgttataaatacgatgttgcagctcagccctgaagaaaagggaaaacttgctgcggttgctcaaggtgaggaagaaaatgcttcccgttcttctggatgggcatcctatcttcatagttggtctggacttccatcaacctatcgaagtccagtcgacg

SEQ ID NO: 287737 - DNA, 3532 bp, Homo sapiens
aaatatccaactcctcatttctttgttacagtgtaaacaatttcagtattacagaaaagcacccatttattgctgtggcatcattttagcaattttacaaatgaaaaaaaaaatttacaaatgaactgatctactattgtgtaaatcttttacttataaaatgtgcaggatgcccaacaaaccacattgatgaatatggaaatagctgattatgaacgtttgatgaaagaactaaatcaaaagttaactaataaaaacaacaagatagaagatttggagcaagaaataaaaattcaaaaacagaaacaagaaaccctacaagaagaaataacttcattacagtcttcagtacaacaatatgaagaaaaaaacaccaaaatcaagcaattgcttgtgaaaaccaaaaaggaactggcagattcaaagcaagcagaaactgatcacttaatacttcaagcatctttaaaaggtgagctggaggcaagccagcagcaagtagaagtctataaaatacagctggctgaaataacatcagagaagcacaaaatccacgagcacctgaaaacctctgcggaacagcaccagcgtacgctaagtgcataccagcagagagtgacagcactacaggaagagtgccgtgctgccaaggcagaacaagctactgtaacctctgaattcgagagctacaaagtccgagttcataatgttctaaaacaacagaaaaataaatctatgtctcaggctgaaactgagggcgctaaacaagaaagggaacatctggaaatgctgattgaccagctaaaaatcaaattacaagatagccaaaataacttacagattaatgtatctgaacttcaaacattgcagtctgaacatgatacactgctagaaaggcacaacaagatgctgcaggaaactgtgtccaaagaggcggaactccgggaaaaattgtgttcaatacagtcagagaacatgatgatgaaatctgaacatacacagactgtgagtcagctaacatcccagaacgaggtccttcgaaatagcttccgagatcaagtgcgacatttgcaggaagaacacagaaagacagtggagacattacagcagcagctctccaagatggaagcacagctcttccagcttaagaatgaaccgaccacaagaagcccagtttcctctcaacaatctttgaagaaccttcgagaaaggagaaacacagacctcccgcttctagacatgcacactgtaacccgggaagagggagaaggcatggagacaactgatacggagtctgtgtcttccgccagcacatacacacagtctttagagcagctgcttaactctcccgaaactaaacttgagcctccattatggcatgctgaatttaccaaagaagaattggttcagaagctcagttccaccacaaaaagtgcagatcacttaaacggcctgcttcgggaaacagaagcaaccaatgcaattcttatggagcaaattaagcttctcaaaagtgaaataagaagattggaaaggaatcaagagcgagagaagtctgcagctaacctggaatacttgaagaacgtcttgctgcagttcattttcttgaaaccaggtagtgaaagagagagacttcttcctgttataaatacgatgttgcagctcagccctgaagaaaagggaaaacttgctgcggttgctcaaggtgaggaagaaaatgcttcccgttcttctggatgggcatcctatcttcatagttggtctggacttcgataggttgatggaaggaatatttttattaaccaaatagaatctatttacaaaaatggttcacgtatattaccacaattcttttgtcaaaaagtgtgtatatatgtttgcatctacatatatttgtacatctatatgacagatgtattttaaaagtttcatcttgaagtaaaagtacaacagcttgaagtgttgatagcaggccacagccctctaactcatgtgatttcccatgcatgctgccagaataaaaccaccaggaatgaattcactccccacttctctggaacctcaggacccgcccatttctcggcagtactgtgaattttgaagttaaactaaattttggtaccataccaactggaatttaggctttaaaaataatgtttcaaggccaggtgtggtgattcatgcctgaaatcccactactttgggaggctgaggctggagaattgcttgaggctagtgagctgtgactcccactgcactccagctcggggaacagagcgagaccttgtctctaaaaataatagtaataaaataaaaataacgttttatgactatttattgcaaggtcagagttacagattgttataaattgttgagaaatttttgtgattagaatatgaaggaaaaagctttgttggtaaaagtgacatgttaaggggctatgaagtaaatatgctgcagttaattgtgctaagttaaaatacagtttagttatttgctttaaaataaactcttctttttttctttaaagtatactatctcaaaactcattatgttgtcagagccctagagctggctagtgtaacactgactatgagtaggtgggcccaccacttgaggtgatttcatggtgtctttccaggctcttgatagggtgtcactgcatgcaagccatgaatctgttttgagaatcctctccattttcccaaataaaaacctatcacaacagtgactatatcactcagcattggatctaaatataaaagtggtgctttcagtgtttttggcagatagtgttccataagctttccatcagaagggattttagacaccttagaggtccgtgctacatcgtcacagttcctccgaataaccttaggtggtagtgttacttgcctttgacacctctgcatatgttttaatgactagatccaaactgtgttgttcttaaatcaaaaattggataatttgtaatatttatgtgttaatcacacagtatgctctctgaagttctcttaagccttcagtttatactcttaatttaattttctttctgagctggagaactggctttgcactttggttacacagaacattggtttccaattcagtttaactgaaatttgctgctgatatgttgagtttgttctttaaaaaatagctcatatatctcatctttcctcctgtcttagaagaacagacctaactagtgaatgtattaatgaaaatgcatctatttcagagctgacatgaagagtttagtttttttactttataaactgtgaatatgagtatgccagctgcatacgatgtaactaatcatatttaaatatatttcactttctctttgactttagaccttttgaagtctgtataaacttgttttgaaatatagtctctgcttacgaatgtcataacaaaataattttttgcatgataaaaaattactttgattacaaaaggcatattctttcatggtttctgcaatgagaggaagtgtaatgattattttaatatttctattaaatatgtttaa

SEQ ID NO: 287738 - DNA, 3406 bp, Homo sapiens
ttctgagttaatttttctcaaatttataaaaagaggggatatcataagagaaaatgtttattaagttccaaaagcacatagtgtcactataaaatgtatggttagtaaattaatctaccagggtagaagacatggtagaaacagatctcttatcagaaaatatgtattattgagaggcctttaaaaagtgtaaggcctcccaacatgaagacctgataaatgttggaggcaatggatatcctaattaccctgatttgcttattagacattgtatgcatccatcaaaatatcacatgcaccccataaatatgtacaattatgtatcaattaaaaagaaaattttttaagtgtaaagccaacagaagtatgctttttagcaaggttaatcaagaaaccaaaaagaatgtcagccatttttctcattttcaaaaacaggtttttatctcaatttgttaatctctgaaagaaaatagaaggaccctgttacagtagaaaaacgtttctctcttttaaatgttataggcagaacaagctactgtaacctctgaattcgagagctacaaagtccgagttcataatgttctaaaacaacagaaaaataaatctatgtctcaggctgaaactgagggcgctaaacaagaaagggaacatctggaaatgctgattgaccagctaaaaatcaaattacaagatagccaaaataacttacagattaatgtatctgaacttcaaacattgcagtctgaacatgatacactgctagaaaggcacaacaagatgctgcaggaaactgtgtccaaagaggcggaactccgggaaaaattgtgttcaatacagtcagagaacatgatgatgaaatctgaacatacacagactgtgagtcagctaacatcccagaacgaggtccttcgaaatagcttccgagatcaagtgcgacatttgcaggaagaacacagaaagacagtggagacattacagcagcagctctccaagatggaagcacagctcttccagcttaagaatgaaccgaccacaagaagcccagtttcctctcaacaatctttgaagaaccttcgagaaaggagaaacacagacctcccgcttctagacatgcacactgtaacccgggaagagggagaaggcatggagacaactgatacggagtctgtgtcttccgccagcacatacacacagtctttagagcagctgcttaactctcccgaaactaaacttgagcctccattatggcatgctgaatttaccaaagaagaattggttcagaagctcagttccaccacaaaaagtgcagatcacttaaacggcctgcttcgggaaacagaagcaaccaatgcaattcttatggagcaaattaagcttctcaaaagtgaaataagaagattggaaaggaatcaagagcgagagaagtctgcagctaacctggaatacttgaagaacgtcttgctgcagttcattttcttgaaaccaggtagtgaaagagagagacttcttcctgttataaatacgatgttgcagctcagccctgaagaaaagggaaaacttgctgcggttgctcaaggtgaggaagaaaatgcttcccgttcttctggatgggcatcctatcttcatagttggtctggacttcgataggttgatggaaggaatatttttattaaccaaatagaatctatttacaaaaatggttcacgtatattaccacaattcttttgtcaaaaagtgtgtatatatgtttgcatctacatatatttgtacatctatatgacagatgtattttaaaagtttcatcttgaagtaaaagtacaacagcttgaagtgttgatagcaggccacagccctctaactcatgtgatttcccatgcatgctgccagaataaaaccaccaggaatgaattcactccccacttctctggaacctcaggacccgcccatttctcggcagtactgtgaattttgaagttaaactaaattttggtaccataccaactggaatttaggctttaaaaataatgtttcaaggccaggtgtggtgattcatgcctgaaatcccactactttgggaggctgaggctggagaattgcttgaggctagtgagctgtgactcccactgcactccagctcggggaacagagcgagaccttgtctctaaaaataatagtaataaaataaaaataacgttttatgactatttattgcaaggtcagagttacagattgttataaattgttgagaaatttttgtgattagaatatgaaggaaaaagctttgttggtaaaagtgacatgttaaggggctatgaagtaaatatgctgcagttaattgtgctaagttaaaatacagtttagttatttgctttaaaataaactcttctttttttctttaaagtatactatctcaaaactcattatgttgtcagagccctagagctggctagtgtaacactgactatgagtaggtgggcccaccacttgaggtgatttcatggtgtctttccaggctcttgatagggtgtcactgcatgcaagccatgaatctgttttgagaatcctctccattttcccaaataaaaacctatcacaacagtgactatatcactcagcattggatctaaatataaaagtggtgctttcagtgtttttggcagatagtgttccataagctttccatcagaagggattttagacaccttagaggtccgtgctacatcgtcacagttcctccgaataaccttaggtggtagtgttacttgcctttgacacctctgcatatgttttaatgactagatccaaactgtgttgttcttaaatcaaaaattggataatttgtaatatttatgtgttaatcacacagtatgctctctgaagttctcttaagccttcagtttatactcttaatttaattttctttctgagctggagaactggctttgcactttggttacacagaacattggtttccaattcagtttaactgaaatttgctgctgatatgttgagtttgttctttaaaaaatagctcatatatctcatctttcctcctgtcttagaagaacagacctaactagtgaatgtattaatgaaaatgcatctatttcagagctgacatgaagagtttagtttttttactttataaactgtgaatatgagtatgccagctgcatacgatgtaactaatcatatttaaatatatttcactttctctttgactttagaccttttgaagtctgtataaacttgttttgaaatatagtctctgcttacgaatgtcataacaaaataattttttgcatgataaaaaattactttgattacaaaaggcatattctttcatggtttctgcaatgagaggaagtgtaatgattattttaatatttctattaaatatgtttaa

SEQ ID NO: 287739 - DNA, 3530 bp, Homo sapiens
agcgcgacctttgacctgcagtagagcctacgtcagaggctggcgcaaacagaagtgcagcggtggcggcggctggttgcgggccggcggcgggctggcggagatggaggatcttgttcaagatggggtggcttcaccagctacccctgggaccgggaaatctaagctggaaacattgcccaaagaagacctcatcaagtttgccaagaaacagatgatgctaatacagaaagctaaatcaaggtgtacagaattggagaaagaaattgaagaactcagatcaaaacctgttactgaaggaactggtgatattattaaggcattaactgaacgtctggatgctcttcttctggaaaaagcagagactgagcaacagtgtctttctctgaaaaaggaaaatataaaaatgaagcaagaggttgaggattctgtaacaaagatgggagatgcacataaggagttggaacaatcacatataaactatgtgaaagaaattgaaaatttgaaaaatgagttgatggcagtacgttccaaatacagtgaagacaaagctaacttacaaaagcagctggaagaagcaatgaatacgcaattagaactttcagaacaacttaaatttcagaacaactctgaagataatgttaaaaaactacaagaagagattgagaaaattaggccaggctttgaggagcaaattttatatctgcaaaagcaattagacgctaccactgatgaaaagaaggaaacagttactcaactccaaaatatcattgaggctaattctcagcattaccaaaaaaatattaatagtttgcaggaagagcttttacagttgaaagctatacaccaagaagaggtgaaagagttgatgtgccagattgaagcatcagctaaggaacatgaagcagagataaataagttgaacgagctaaaagagaacttagtaaaacaatgtgaggcaagtgaaaagaacatccagaagaaatatgaatgtgagttagaaaatttaaggaaagccacctcaaatgcaaaccaagacaatcagatatgttctattctcttgcaagaaaatacatttgtagaacaagtagtaaatgaaaaagtcaaacacttagaagataccttaaaagaacttgaatctcaacacagtatcttaaaagatgaggtaacttatatgaataatcttaagttaaaacttgaaatggatgctcaacatataaaggatgagttttttcatgaacgggaagacttagagtttaaaattaatgaattattactagctaaagaagaacagggctgtgtaattgaaaaattaaaatctgagctagcaggtttaaataaacagttttgctatactgtagaacagcataacagagaagtacagagtcttaaggaacaacatcaaaaagaaatatcagaactaaatgagacatttttgtcagattcagaaaaagaaaaattaacattaatgtttgaaatacagggtcttaaggaacagtgtgaaaacctacagcaagaaaagcaagaagcaattttaaattatgagagtttacgagagattatggaaattttacaaacagaactgggggaatctgctggaaaaataagtcaagagttcgaatcaatgaagcaacagcaagcatctgatgttcatgaactgcagcagaagctcagaactgcttttactgaaaaagatgcccttctcgaaactgtgaatcgcctccagggagaaaatgaaaagttactatctcaacaagaattggtaccagaacttgaaaataccataaagaaccttcaagaaaagaatggagtatacttacttagtctcagtcaaagagataccatgttaaaagaattagaaggaaagataaattctcttactgaggaaaaagatgattttataaataaactgaaaaattcccatgaagaaatggataatttccataagaaatgtgaaagggaagaaagattgattcttgaacttgggaagaaagtagagcaaacaatccagtacaacagtgaactagaacaaaaggtaaatgaattaacaggaggactagaggagactttaaaagaaaaggatcaaaatgaccaaaaactagaaaaacttatggttcaaatgaaagttctctctgaagacaaagaagtattgtcagctgaagtgaagtctctttatgaggaaaacaataaactcagttcagaaaaaaaacagttgagtagggatttggaggtttttttgtctcaaaaagaagatgttatccttaaagaacatattactcaattagaaaagaaacttcagttaatggttgaagagcaagataatttaaataaactgcttgaaaatgagcaagttcagaagttatttgttaaaactcagttgtatggttttcttaaagaaatgggatcagaagtttcagaagacagtgaagagaaagatgttgttaatgtcctacaggcagtcggtgaatccttggcaaaaataaatgaggaaaaatgcaacctggcttttcagcgtgatgaaaaagtattagagttagaaaaagagattaagtgccttcaagaagagagtgtagttcagtgtgaagaacttaagtctttattgagagactatgagcaagagaaagttctcttaaggaaagagttagaagaaatacagtcagaaaaagaggccctgcagtctgatcttctagaaatgaagaatgctaatgaaaaaacaaggcttgaaaatcagaatcttttaattcaagttgaagaagtatctcaaacatgtagcaaaagtgaaatccataatgaaaaagaaaaatgttttataaaggaacatgaaaacctaaagccactactagaacaaaaagaattacgagataggagagcagagttgatactattaaaggattccttagcaaaatcaccttctgtaaaaaatgatcctctgtcttcagtaaaagagttggaagaaaaaataggtaactatggttttgcagatgttgtcacaattaattagacagattcttgttagtgttagaatagattgggaaatatagtagccaaataatgagttgttaaaaacacagttcgtagctgtcttttcctcgagctcacattcttgcccctctaacacctgtttgccttctctttcaaaagtgttactttctattgtttaacccaagcaagattggtgtgatttataaatggcttcatgatttattttggatttttcattcatttagcaaattttatttaaatgcccaactattctagaccctggtgatagaaaagtggttgaggtacagaccatgtgctcagagatctcactgttgtttgaggtgtggacaagatacagtactaacagcataggaacttaacactgttttgagttaaaaaaaaaaaaaaaagcagcgtagaatagggttttcagccaagtcttgaagaatgagaaattttacacaggaagaaaggtattctaggaagaaggaagagcaggtgcttgtaggttgacatatagcatacatcaaggcacgtactaggaagtt

SEQ ID NO: 287740 - DNA, 3572 bp, Homo sapiens
agcgcgacctttgacctgcagtagagcctacgtcagaggctggcgcaaacagaagtgcagcggtggcggcggctggttgcgggccggcggcgggctggcggagatggaggatcttgttcaagatggggtggcttcaccagctacccctgggaccgggaaatctaagctggaaacattgcccaaagaagacctcatcaagtttgccaagaaacagatgatgctaatacagaaagctaaatcaaggtgtacagaattggagaaagaaattgaagaactcagatcaaaacctgttactgaaggaactggtgatattattaaggcattaactgaacgtctggatgctcttcttctggaaaaagcagagactgagcaacagtgtctttctctgaaaaaggaaaatataaaaatgaagcaagaggttgaggattctgtaacaaagatgggagatgcacataaggagttggaacaatcacatataaactatgtgaaagaaattgaaaatttgaaaaatgagttgatggcagtacgttccaaatacagtgaagacaaagctaacttacaaaagcagctggaagaagcaatgaatacgcaattagaactttcagaacaacttaaatttcagaacaactctgaagataatgttaaaaaactacaagaagagattgagaaaattaggccaggctttgaggagcaaattttatatctgcaaaagcaattagacgctaccactgatgaaaagaaggaaacagttactcaactccaaaatatcattgaggctaattctcagcattaccaaaaaaatattaatagtttgcaggaagagcttttacagttgaaagctatacaccaagaagaggtgaaagagttgatgtgccagattgaagcatcagctaaggaacatgaagcagagataaataagttgaacgagctaaaagagaacttagtaaaacaatgtgaggcaagtgaaaagaacatccagaagaaatatgaatgtgagttagaaaatttaaggaaagccacctcaaatgcaaaccaagacaatcagatatgttctattctcttgcaagaaaatacatttgtagaacaagtagtaaatgaaaaagtcaaacacttagaagataccttaaaagaacttgaatctcaacacagtatcttaaaagatgaggtaacttatatgaataatcttaagttaaaacttgaaatggatgctcaacatataaaggatgagttttttcatgaacgggaagacttagagtttaaaattaatgaattattactagctaaagaagaacagggctgtgtaattgaaaaattaaaatctgagctagcaggtttaaataaacagttttgctatactgtagaacagcataacagagaagtacagagtcttaaggaacaacatcaaaaagaaatatcagaactaaatgagacatttttgtcagattcagaaaaagaaaaattaacattaatgtttgaaatacagggtcttaaggaacagtgtgaaaacctacagcaagaaaagcaagaagcaattttaaattatgagagtttacgagagattatggaaattttacaaacagaactgggggaatctgctggaaaaataagtcaagagttcgaatcaatgaagcaacagcaagcatctgatgttcatgaactgcagcagaagctcagaactgcttttactgaaaaagatgcccttctcgaaactgtgaatcgcctccagggagaaaatgaaaagttactatctcaacaagaattggtaccagaacttgaaaataccataaagaaccttcaagaaaagaatggagtatacttacttagtctcagtcaaagagataccatgttaaaagaattagaaggaaagataaattctcttactgaggaaaaagatgattttataaataaactgaaaaattcccatgaagaaatggataatttccataagaaatgtgaaagggaagaaagattgattcttgaacttgggaagaaagtagagcaaacaatccagtacaacagtgaactagaacaaaaggtaaatgaattaacaggaggactagaggagactttaaaagaaaaggatcaaaatgaccaaaaactagaaaaacttatggttcaaatgaaagttctctctgaagacaaagaagtattgtcagctgaagtgaagtctctttatgaggaaaacaataaactcagttcagaaaaaaaacagttgagtagggatttggaggtttttttgtctcaaaaagaagatgttatccttaaagaacatattactcaattagaaaagaaacttcagttaatggttgaagagcaagataatttaaataaactgcttgaaaatgagcaagttcagaagttatttgttaaaactcagttgtatggttttcttaaagaaatgggatcagaagtttcagaagacagtgaagagaaagatgttgttaatgtcctacaggcagtcggtgaatccttggcaaaaataaatgaggaaaaatgcaacctggcttttcagcgtgatgaaaaagtattagagttagaaaaagagattaagtgccttcaagaagagagtgtagttcagtgtgaagaacttaagtctttattgagagactatgagcaagagaaagttctcttaaggaaagagttagaagaaatacagtcagaaaaagaggccctgcagtctgatcttctagaaatgaagaatgctaatgaaaaaacaaggcttgaaaatcagaatcttttaattcaagttgaagaagtatctcaaacatgtagcaaaagtgaaatccataatgaaaaagaaaaatgttttataaaggaacatgaaaacctaaagccactactagaacaaaaagaattacgagataggagagcagagttgatactattaaaggattccttagcaaaatcaccttctgtaaaaaatgatcctctgtcttcagtaaaagagttggaagaaaaaataggaaaaaatcgactagaaaggggaaaattattgctgcagaagaaggagggagaattgttgctctgatgcttgagtaggtaatgagacgcaggatgaaatgcagatgtggaacaattggcctttgctccgcacacagacacttcactatggcagccagagggaaggcaccggtgcaagtaaattaataggccaggacagaaattcagatcataactgaatttttagaaacaaataccaagaagtcctgaactcaggagttcaagctaaagaagttaacagagatcaatattggataggtaaaacatattacaggtttcgttgtgaaaatcagacccagcagccaagaggaggagtgcacttatggagcataaatgttgatctgcatctgatatctctgatacttgatcctaatttgcacactatcacctaaagtcctagcatacctgcatttccaggaaatctaatgagaaagaagtcctgaaagcctctaattcctggaaacatatgaaacggctagaaaaaagtagactattttggaggattaaagacaatggaaactttttacattgtttgtctcacataatgaataaaattccactttaaaaaatga

SEQ ID NO: 287741 - DNA, 115 bp, Homo sapiens
ccaccattttttaaccccaggcaaataaatcttgttctaaaataggcattaactgaacgtctggatgctcttcttctggaaaaagcagagactgagcaacagtgtctttctctga

SEQ ID NO: 287742 - DNA, 419 bp, Homo sapiens
gacatttgcaggaagaacacagaaagacagtggagacattacagcagcagctctccaagatggaagcacagctcttccagcttaagaatgaaccgaccacaagaagtatgtatgtacacatggaaatattagttgttcatgttttcatgcatttgtctcttaaatacattcttcacaaattcataagaaagaaaatttactaggtgtcaccagtgtcaaatctgtgattaatgaattttggatttgcttactagaaagataattgaaccatctgaatccttccctcttcattatacttacagaagtctgtataacctctgagaatgctgactttgatgtattccttaccctcaatggaaaggagtatttctttttctctgacttaaacatcctctgtcagtctcgtgacatgtcttttt

SEQ ID NO: 287743 - DNA, 472 bp, Homo sapiens
acatcagagaagcacaaaatccacgagcacctgaaaacctctgcggaacagcaccagcgtacgctaagtgcataccagcagagagtgacagcactacaggaagagtgccgtgctgccaaggtgcgttcttcagggcagccacagcaagccactgggattttattatcagctagtcattggtttactccagggctgtgctctgcctttttagtattttcctgttaagagcacttactagattaagacctgttcagttaatctggctttaaccccaatcccatgccaaccctaatcgtaagttggatcactttttttgccaaaaggaaaaacatgatgttttttccatttcaaccttgttttgcaatttatgtgtcacttatttataaaactttttttattagaaacgtgttacagttcttagggctaaatgattataaaataacattttaatagcatggctgtgggggcctac

SEQ ID NO: 287744 - DNA, 353 bp, Homo sapiens
tttgaattgatgttggtttaagaaaagataacttagaaaatgttctacttgtctctgctttttcaataataatacataaaaatatttcactacttaattatgccttatatgtacttatgtctcaaacctaaagtttgtattttaaggaaaacctctttaactagtgaagataggatttgctaaagctaaatttaaagatttacccccagatacagctggctgaaataacatcagagaagcacaaaatccacgagcacctgaaaacctctgcggaacagcaccagcgtacgctaagtgcataccagcagagagtgacagcactacaggaagagtgccgtgctgccaaggtgcgt

SEQ ID NO: 287745 - DNA, 164 bp, Homo sapiens
gatttatggggggttttgtgagaatgtacttatcagtttcccagtaattatgttctttatttctgaaccggagtcctttattttttaattgtttagaattggagaaagaaattgaagaactcagatcaaaacctgttactgaaggaactggtgatattattaag

SEQ ID NO: 287746 - DNA, 356 bp, Homo sapiens
aggggacacattcaaaccatattacccagtctcactggatgaatgctatctaagatgagctggacactgtcacaacacttggtgcgtggtcatttcttttccttgaaattatgatgcactatcttcagtctgtaagcaccatagtctcaggtcctttgggataagatatggtgtcttttgaaagggaggaggttgagcctggatacattggctttgggccttctgcctgtcctctctaatacatacttggtgttgggtgtggttttccttttggggtaatttggattattgccactcaaagtgtggtccatgtactaacggcatggaagaatctcaggcccaagacccactgaatg

SEQ ID NO: 287747 - DNA, 1890 bp, Homo sapiens
agcggagtgtttctctcctacagaggatgcagtgtccaggcatcatctatgaatggagacaacctttaccggacaccaaacctaccagcaccatgaccttgaactttccagccttctgaactatggcgtactgctctgttgcccaggttagagtgcagtggcttgatcatagctcactgcagccttgagctcctaggctcaagcagtcctcttgcctcagcctcctgaatagctgggactacaggttctattctgaggtactaaggttaagacctcaacatatgaattctggaggacaaaattcaacccagaagtctaccttgtattgggtcctcacggcaaggctgcaaaacccggggggttggtggcccagtcccacctcccatgagctaatgaatgtggggctcagggaggactgacaggactagagttgacaaccattcatccaacaaacatttactgcacgaggaagagaggtgatcaaggcactgcccttgtccccaggaagctcgccagtgcatgggactgtgcaggtgtcttcacctctgcattaggcattcgatgtcaggccatggctgagcatccatcctctctatgctaattttttccaaaagtcaagagtttggaagaacactaatgtgtttttcttccagcctttcctatacaaatgacaacatcattaccctcagcttttaaagtgcaagtctgtacagagatcccagagtcaaggagggcgcctgagtcatttgaaataattacctttttttttcctgcctgagtcttgcatatctgtgaatcagcaatgtggaaactgggcttcaaaaaaattaagggaggcttaaagtgagcaaagcagagaagagcattggcaagagctgagcgctgccacagcaggaacatcatgccgatcgtcatctaagggagctcatggtgctgtctgcctcctcttagcaacatccacacaggctggtacagtcagatcattgtgacttggacagggatgaaaatactcagctgacaccaatagctcccagcacagccagggtattctagagttgtgtggttcaagacagccctgtgcagcctcattgtatttacctgagtcacctgaacaaagcggtgactggctttgcctggctctggcaaggactcgcaacaaagccaaagcctcttcctccacggcctttgctcctgcagcacagcactggcatctttttagcatcatagacactgtcacgtggcaatcaatgacagatgaactgtcccttccctgggccacaagctcttcaaggcgggagcctcagcccagtttcttccatgtctccagcgcccagcacagggcctggcttctagctggtttctgatgaataaacgaatggctatagagatgtactcttcaaaacacaaggggcttctatagtggcaacatgttcagtagcacagtgctgtattggttctttacagcttgcaggacccaaagaaggaatgatttttgtttcccgggaaaggtgtacctcgtgggggcactgctcaagggaaggtgcccacaagttggggatcaagggaggcacaggttgatcaaagcccctggaattgaaatggaggtgttcacctgcggaggctccgaacatctgaggcagagcctcgattctccaggaaattgactttgccggagaacaaggctggggaaggcaggctgtcctaggggaggagtcgtatttcagccccactgagaccccaaaggcgcactcccatgctttaccccagctgtccaccagggggcaggcagaggcaagagaagaggaaagcgggcggctggtcaggcccagcacatccagcctggcatcccacacgctgggctgcctgactcagacaaagccaggccgctcc

SEQ ID NO: 287748 - DNA, 1333 bp, Homo sapiens
ggggtctgcggtgggcggtgtttcgtcgcgacagactctaggaaatttcacgatagaactagctttaggcgcttgagccttgccgtctttttggggtgtggcctgtctccgtctgccaaaggctttgagcttcctggtgttcatcgtacctccgcttggtcctgtcgtgactaaaccacgacagcaggaaaaaaaaaaaagcagctagccaagttgctgaggaattacggtgtgcagagccctcgcagctccttctcttgggaactcctggtctggttaggttctcagcgaggaaacagcctcccaccccgcccgattccgcctaattaactcaagggccagctccttttgctggcctccctgcttccacggagcagttaggcccgcctaaactcagcgagcgtttctggagcaccttgaggatagggaccaagtaacagagtccgggtgttaaggttatgatagtagttaacgttttcggaaagagactgtgtcaggctctgtgctaagaactttacatgaagtatttattcttcatgactgtgagctcctctaggacactgaaaaagcatcctaacatgctcaggacaggataggaaatggtcctctggcttgaaagactcagcatccagaagtagtacctcactctccatccagtggtcaccccccagaaatgtgctctcgccctacccacctgcctgggagctgcctgcctcttgatgtgctgacacctgctcctgctgctgctgctgctgctgctgctgttgctgctgctgctgctgttgccgttctctcaagggctggcggaactgagcagcccccaggacaacattccggagcttggcccagcgcagacgcccacctggtgtgccagacggccacttgctttccaacacagcctaccaagcacagtgcccatcaggatggcctacctcgacaccctaaccctgcctcatacccactccctgtcttggagccccagggaccgcccttcccctgcagacatcctgtctaggactgtccggccaatggctcagccaggaacaagagcccagaagagacagtaggcagcagctgcctcccaaggggcctagaagaacccagaggcagtggagaaaatttgtacccagaccttgctgcttagaaatataaaatatatggctctgaagaaatcatttcatttatttggtcattagtctcctcatctaaaaaacaggaggcagtttagtatcatggctggtgccgatgaatagcgaggtgcggatgaatagcgaggtgccgatgaatagcgagtgccgatgatagcgaggtgccgatgatagcaggagtcctc

SEQ ID NO: 287749 - DNA, 1023 bp, Homo sapiens
ggggtctgcggtgggcggtgtttcgtcgcgacagactctaggaaatttcacgatagaactagctttaggcgcttgagccttgccgtctttttggggtgtggcctgtctccgtctgccaaaggctttgagcttcctggtgttcatcgtacctccgcttggtcctgtcgtgactaaaccacgacagcaggaaaaaaaaaaaagcagctagccaagttgctgaggaattacggtgtgcagagccctcgcagctccttctcttgggaactcctggtctggttaggttctcagcgaggaaacagcctcccaccccgcccgattccgcctaattaactcaagggccagctccttttgctggcctccctgcttccacggagcagttaggcccgcctaaactcagcgagcgtttctggagcaccttgaggatagggaccaagtaacagagtccgggtgttaaggttatgatagtagttaacgttttcggaaagagactgtgtcaggctctgtgctaagaactttacatgaagtatttattcttcatgactgtgagctcctctaggacactgaaaaagcatcctaacatgctcaggacaggataggaaatggtcctctggcttgaaagactcagcatccagaagtagtacctcatacccactccctgtcttggagccccagggaccgcccttcccctgcagacatcctgtctaggactgtccggccaatggctcagccaggaacaagagcccagaagagacagtaggcagcagctgcctcccaaggggcctagaagaacccagaggcagtggagaaaatttgtacccagaccttgctgcttagaaatataaaatatatggctctgaagaaatcatttcatttatttggtcattagtctcctcatctaaaaaacaggaggcagtttagtatcatggctggtgccgatgaatagcgaggtgcggatgaatagcgaggtgccgatgaatagcgagtgccgatgatagcgaggtgccgatgatagcaggagtcctc

SEQ ID NO: 287750 - DNA, 488 bp, Homo sapiens
tgggactacaggtgcgcgccaccacgcccagctaatttttttatcccttttgttaccagtcaagtgtaatttatcaatccccagaaacccaatgccaaccattagaccagccccaactctctatgcctttccctgcctgagcccagctactccatccccaagcctgtctcaccaggccctacccacctgcctgggagctgcctgcctcttgatgtgctgacacctgctcctgctgctgctgctgctgctgctgctgttgctgctgctgctgctgttgccgttctctcaagggctggcggaactgagcagcccccaggacaacattccggagcttggcccagcgcagacgcccacctggtgtgccagacggccacttgctttccaacacagcctaccaagcacagtgcccatcaggatggcctacctcgacaccctaaccctgcctcatacccactccctgtcttggagccccagggaccgcccttccc

SEQ ID NO: 287751 - DNA, 1166 bp, Homo sapiens
  misc_feature (5)..(5): n is a, c, g, or t
  misc_feature (39)..(39): n is a, c, g, or t
  misc_feature (264)..(264): n is a, c, g, or t
  misc_feature (285)..(285): n is a, c, g, or t
ttcgntctagaggatccctcaacgcttatacttcctagntctagatgactacttttggactttatggttgtttttcttccttaaaaaccacttctccttacacagtacaattctttttaacttggggctttaaattttcggttaaggatagagaatgacacagaagcaccaaaataagattaatgaagatgagaatgatttcatatttgagtacatttaactgaagatctagacatgtctttaaagaaggtccaaagaaaattngcaacccaaataaaggctttnggtattagcagaacaccaccatcctttgattcaataaacatctaatatgcaccttccatgtaaaagatactaagaacaagaaacactaaaatgaaagacactttccctactctcaaggaaaacaggctagtagaaaacgcagactcaagagtgaagatatggaaaataaaataagtgataccaagaagaagcaggggatgaagaagaggagcaacagtgaagtggaagacgtgggaccaacaagtcataacagaaagaaggccaggtgggacactttagagcctttggataccggcctgtctttagcagaggatgaagagctggtgttacatctgctaagaagtcaaagctaaatacttcctgcgcctgccttctccttgaaaccttggttatgactgcgtaggcaagaagttgaaaaacagttgatttgggggcacttaggtaccatatgccccattcccaaagggcacatttctggatagaagcgatcgtatctccaagtccctctcacaggacatgctttgtgccatcactgagcatactcagatcgagggtggatgataccatttcctgaccccgttttccagcatgtgttctgttagatttttatccatgggttcctacgccttgtcattggaaacactgcctttgtcttactggcaagttctggagctcttgtgtcattgttagaaatccctgtcttgcttactgtacagaagtttctgttgctgttaaaattgctcatgatttcgacgtatttaatattttcaaagagactatgatggaccagccctgagaaagaatgagtatttttgaattgagatgatcaataataaacatatttcctataaaagaaagtattaatgtttgcattgtgtcca

SEQ ID NO: 287752 - DNA, 1215 bp, Homo sapiens
ccccgggaaggaaacacatcggctaggtacgaggctgggtggtgcagcatcaagaaaaaaatgaccaaagttgcagaagcaaaaaaagtaatgaagagaaattttaaagtgaataagaagataacatttactgatgaaggggagttggttcagcagtggccacaaatgcagaaatctgccatcaaggatgctgaggaagatgatgacacaggtggtatcaacttacataaagcaaaggaaagacttcaggaagaggacaaatttgacaaagaagaatataggaaaaaaattaaggcaaagcatcgggagaaaagactgaaagaaagggaagccagaagagaagccaacaagagacaagcaaaggccaaagatgaagaggaagcctttctggattggagtgatgatgatgatgatgatgatgatggatttgatccaagcacactcccagatccagataaatacagaagctctgaagattcagatagtgaagatatggaaaataaaataagtgataccaagaagaagcaggggatgaagaagaggagcaacagtgaagtggaagacgtgggaccaacaagtcataacagaaagaaggccaggtgggacactttagagcctttggataccggcctgtctttagcagaggatgaagagctggtgttacatctgctaagaagtcaaagctaaatacttcctgcgcctgccttctccttgaaaccttggttatgactgcgtaggcaagaagttgaaaaacagttgatttgggggcacttaggtaccatatgccccattcccaaagggcacatttctggatagaagcgatcgtatctccaagtccctctcacaggacatgctttgtgccatcactgagcatactcagatcgagggtggatgataccatttcctgaccccgttttccagcatgtgttctgttagatttttatccatgggttcctacgccttgtcattggaaacactgcctttgtcttactggcaagttctggagctcttgtgtcattgttagaaatccctgtcttgcttactgtacagaagtttctgttgctgttaaaattgctcatgatttcgacgtatttaatattttcaaagagactatgatggaccagccctgagaaagaatgagtatttttgaattgagatgatcaataataaacatatttcctataaaagaaagtattaatgtttgcattgtgtcca

SEQ ID NO: 287753 - DNA, 1497 bp, Homo sapiens
  misc_feature (21)..(21): n is a, c, g, or t
  misc_feature (25)..(25): n is a, c, g, or t
ggcacgagggtccaccctggngtantggaaaaagactcgaagggacagagcacagacaggataatgatactggtaatgaagaacaggagagaagaagaagacgatgaagaagaaatggaagagaaactggcaaaagcaaaaggatctcaagccccatctcttcctaacaccagtgaggcacagaagatcaaggaagttcctacacagttcttggacagagatgaggaggaagaggatgctgatttcttgaaggtgaagcggcataatgtgtttggattggaccttaaagacgagaaaacattacagaagaaagaaccttctaaatccagcatcaagaaaaaaatgaccaaagttgcagaagcaaaaaaagtaatgaagagaaattttaaagtgaataagaagataacatttactgatgaaggggagttggttcagcagtggccacaaatgcagaaatctgccatcaaggatgctgaggaagatgatgacacaggtggtatcaacttacataaagcaaaggaaagacttcaggaagaggacaaatttgacaaagaagaatataggaaaaaaattaaggcaaagcatcgggagaaaagactgaaagaaagggaagccagaagagaagccaacaagagacaagcaaaggccaaagatgaagaggaagcctttctggattggagtgatgatgatgatgatgatgatgatggatttgatccaagcacactcccagatccagataaatacagaagctctgaagattcagatagtgaagatatggaaaataaaataagtgataccaagaagaagcaggggatgaagaagaggagcaacagtgaagtggaagacgtgggaccaacaagtcataacagaaagaaggccaggtgggacactttagagcctttggataccggcctgtctttagcagaggatgaagagctggtgttacatctgctaagaagtcaaagctaaatacttcctgcgcctgccttctccttgaaaccttggttatgactgcgtaggcaagaagttgaaaaacagttgatttgggggcacttaggtaccatatgccccattcccaaagggcacatttctggatagaagcgatcgtatctccaagtccctctcacaggacatgctttgtgccatcactgagcatactcagatcgagggtggatgataccatttcctgaccccgttttccagcatgtgttctgttagatttttatccatgggttcctacgccttgtcattggaaacactgcctttgtcttactggcaagttctggagctcttgtgtcattgttagaaatccctgtcttgcttactgtacagaagtttctgttgctgttaaaattgctcatgatttcgacgtatttaatattttcaaagagactatgatggaccagccctgagaaagaatgagtatttttgaattgagatgatcaataataaacatatttcctataaaagaaagtattaatgtttgcattgtgtcca

SEQ ID NO: 287754 - DNA, 1434 bp, Homo sapiens
  misc_feature (1311)..(1311): n is a, c, g, or t
  misc_feature (1402)..(1402): n is a, c, g, or t
  misc_feature (1421)..(1421): n is a, c, g, or t
  misc_feature (1429)..(1429): n is a, c, g, or t
ccccgggaaggaaacacatcggctaggtacgaggctgggtggtgcagcatcaagaaaaaaatgaccaaagttgcagaagcaaaaaaagtaatgaagagaaattttaaagtgaataagaagataacatttactgatgaaggggagttggttcagcagtggccacaaatgcagaaatctgccatcaaggatgctgaggaagatgatgacacaggtggtatcaacttacataaagcaaaggaaagacttcaggaagaggacaaatttgacaaagaagaatataggaaaaaaattaaggcaaagcatcgggagaaaagactgaaagaaagggaagccagaagagaagccaacaagagacaagcaaaggccaaagatgaagaggaagcctttctggattggagtgatgatgatgatgatgatgatgatggatttgatccaagcacactcccagatccagataaatacagaagctctgaagattcagatagtgaagatatggaaaataaaataagtgataccaagaagaagcaggggatgaagaagaggagcaacagtgaagtggaagacgtgggaccaacaagtcataacagaaagaaggccaggtgggacactttagagcctttggataccggcctgtctttagcagaggatgaagagctggtgttacatctgctaagaagtcaaagctaaatacttcctgcgcctgccttctccttgaaaccttggttatgactgcgtaggcaagaagttgaaaaacagttgatttgggggcacttaggtaccatatgccccattcccaaagggcacatttctggatagaagcgatcgtatctccaagtccctctcacaggacatgctttgtgccatcactgagcatactcagatcgagggtggatgataccatttcctgaccccgttttccagcatgtgttctgttagatttttatccatgggttcctacgccttgtcattggaaacactgcctttgtcttactggcaagttctggagctcttgtgtcattgttagaaatccctgtcttgcttactgtacagaagtttctgttgctgttaaaattgctcatgatttcgacgtatttaatattttcaaagagactatgataacacaggcccaagatgatcttgggcctgtgttatccgaactagtctcaggcttcaacatcgaatacgccgcaggccccttcgccctattcttcatagccgaatacacaaacattattataataaacaccctcaccactacaatcttcctaggaacaacatatgacgcactctcccctgaactctacacaacanattttgtcaccaagaccctacttctaacctccctgttcttatgaattcgaacagcatacccccgataacacaggccggagatgaggggatnatctagagtgggccttcangaaggganttcaa

SEQ ID NO: 287755 - DNA, 937 bp, Homo sapiens
gaaaggagactcaaagtttaggtagaagggcattctgggtgcaaggaacattatcagtatggctggatgattgaagaccatgaaggccaaagatgaagaggaagcctttctggattggagtgatgatgatgatgatgatgatgatggatttgatccaagcacactcccagatccagataaatacagaagctctgaagattcagatagtgaagatatggaaaataaaataagtgataccaagaagaagcaggggatgaagaagaggagcaacagtgaagtggaagacgtgggaccaacaagtcataacagaaagaaggccaggtgggacactttagagcctttggataccggcctgtctttagcagaggatgaagagctggtgttacatctgctaagaagtcaaagctaaatacttcctgcgcctgccttctccttgaaaccttggttatgactgcgtaggcaagaagttgaaaaacagttgatttgggggcacttaggtaccatatgccccattcccaaagggcacatttctggatagaagcgatcgtatctccaagtccctctcacaggacatgctttgtgccatcactgagcatactcagatcgagggtggatgataccatttcctgaccccgttttccagcatgtgttctgttagatttttatccatgggttcctacgccttgtcattggaaacactgcctttgtcttactggcaagttctggagctcttgtgtcattgttagaaatccctgtcttgcttactgtacagaagtttctgttgctgttaaaattgctcatgatttcgacgtatttaatattttcaaagagactatgatggaccagccctgagaaagaatgagtatttttgaattgagatgatcaataataaacatatttcctataaaagaaagtattaatgtttgcattgtgtcca

SEQ ID NO: 287756 - DNA, 2752 bp, Homo sapiens
ccacttctgagcattttacagttcagtgtacttaactgtaaaggtatacaggctcaagtcgttgcatattcttcctgttttgatagaaattgcagggatttatgtactgaatcttattactccttagatatgtgacaactggaaagctccccaccaaaccctccagccttggttacttcttaatgatgtggtttggcacaatgaaaatgtcataggctttgtggtgaaactgacttctgcctccactcctgccaacacttattattagcctcttaagtccccgagcctgtttcagaggtaatctcacacaaaggctagagaattaaaaaacatgtagagagcctggcactaatacctacctcccccaccagcagctcttaattatgagatcaaccactattattttagaccagagttttgttggggattgggtttgtttcagaaggcactattttaaataagatgtgtagcttctatttagatatttgcctttaaagtcagctgagctattttcctattgtttgcaaatttacttttatttaaaaaaataaaatttcctaaagcagtgtttccccaatatgacagtcatcagaaaaaaccacctagagttttctaaacatagattccagtgattgtaaatcagaatctgagagtgggactagaaaatacttaattctatcctgtggtacaagctggtctcacacttgcatctttgcacctaagactagatcaaactggtactaatcctctggccccagcatcccatccttggggaaatagtctagtttagaggtagtcctggactggagcgctaagtccagcattcctcacctgcataacactacccacatgatcatatgtcccctgggctctcaagctgataggaaaaagtcgtcttgctaaatgaaatcccccaacctcttggtaatgtgaagaactgtactgcaaagctttgaagcaatcctatgttaggcatgcgggtgggaacggggccagacagagggaaaaaatggaatagaatgatccgagagtaaataattcttgctttattatgaaccaagtcacattttgtctcttccaacagatgcttgagccaaaaaagcaaacataggcagaaatacaattgagaatatcttcatgtttcaacctttaatctgacttgccttttactatcctttccccatttcttctaatctcttttgccttacaatatattaccttctaggtatcacctcatcctatagaatcccttctagtttaatgtcctgccccaaacaatactaacccattgaagataactatgaaacctttaaatggacagtggttccttttaaaagcagccttactgaaaattttatatacacttaaatcaagtaacagttaccgtgagttttctaaacttttgtgttaacagaaatgccagttcagcagtgtgactgttacttttaaatgtctgtcttgccgccctagagtgacagacatcccagttaaacatattaggaataagaaatacataaatccaatgaagactgtagaaaaagaattttagcacttgaaggaacttcagtcatttaacccaacccattcatgttatagattgagaccatagaaataaaagtagcctataggatacaaaagttagcggcagatctgagataaaaatccagctctttggatccccgcgtttttcaccacacttagctgtcgttcccatgtattacgaacaaagaatcaaatataatcaagtgcagcctcacttcacaggcaagaaaacagactagagtttaatatattgcccatgtttatcttaaggtgaaacatttactcttacaaccacagttgatgttaacctagttaataaaatatgaaaggtaattactaggggaattttaaacggcactacataagcaaacatgactcaaattactttttccatttctgcttcccaaattattggagttactgaagcaagctatgctgctttcaattccaatgataggcatattcccaaataaactcatttaaagagctcataaaatgaattatcctatttccaagtcagttgattagcaaattaagatacagctccaagttaccctactgcttaagggttttccggtccaatttgtaaggttttcggatttaaagattcagactgcataccaaaggtggacaaagacaacgcaagctgatttaggttgtcacgtggcacatactctagtttaaaccctcaactacaagaaaagaaatggtgtattgtcatttttgccaaagcaccccaaaatgaaatactttcttactcaatctaggttcttttttttcattctagtcccttaagctcctaggatttttagatgttgaaaatactccctgcgcccggcattcaatattgtatggttcattaggatctgttgtggctggctttggacattttttgttcactagtagaattagaagatcatgtgatgttggagtaggagggtttatcttggtgactttgggatgctggtttcattgtaggtataattatgcaaagcaaagaatccaggaaagaattgccagagaagaaattaaaaagaagatattatatgaaggtacccacctcgatcctgaaagaaaacacaacggcagcagcagcaattgaacaatcttgagcatagaagtcaatgtaaacgaagttaagatcaaccacataaaacatttcatgtgcaataagctctcaatcaagtaaataaagtttaagttgtagtca

SEQ ID NO: 287757 - DNA, 928 bp, Homo sapiens
  misc_feature (608)..(608): n is a, c, g, or t
tcacttatgtctaggtcgaggcctgggtgttatttcgatgcagaggctgtgtggtttaccaaatgccttaacttagcagtgaatgacaactgtcaaacacatgttgagggaaaatttttactgattcacaaaaaggaagacagtttgcccactcttagtggcacaaatcaaagctgcatgcactacattatccaaattagtcgtaaccaaatagttaaaaaattctgctgggcacggtggctcatacctgtaatcccagcactttgggaggccgaggcagttggatcacctgaggttaggagtttgagaccagcctggccaacagggtgaaaccctgtctcgtctaaaaatacaaaaattagccgggcgtggtggtgcatgcctgtagtcccaggtactcaggaggctgaggcaggagaatcacttgaacccgaggtggggcaggcggaggttgcagtaagccaagatcgcgccattgcactctagcctaggtgacagagtgagactccatctcaaaaaaaaaaaaaaaaaaaaaaaaaaaaaaaaaaaaaaaaaaaaaaaaaaaaaaaaaaaaaaaaaaaaaaaaaaaaaaaaaaaaaaaaaaaaanaaaaaaaaaaaaaaaaaaaggggggggggggggcggaaaaaaaccccgggggggggggaaagagacgtaccacccaccaatcattttaagaaaaaagcggcgccaaacaaggagggcaaataataaaagagagcacggccgagcgataaaacacggcgaggggagagcacagcctcgagtggagctgtagggaacaccacctcgtcgggggggaaaacagaggagacccaccacaagagaaaacgcgcgaggacaaacaacacgcgggtggagggcagcccagcctctggcgagaaagctgccagaatgaaaaaaataag

SEQ ID NO: 287758 - DNA, 1107 bp, Homo sapiens
  misc_feature (168)..(168): n is a, c, g, or t
  misc_feature (787)..(787): n is a, c, g, or t
agttgttgccttcccttttgggccccccgggtttttccttttatcttcgcggttggtattttgtgtaaattggaagggaatacatttccacaaaggacaaatgttatccattgtttccccaaggctaaattttacccttcttaaagggaacaaaagggggagctcccnccgggtgggcgcccggttatagaaaaagtgtatcccccgggctcaagaatttcgccaaaaggcgaattagtcttcatgccggccccgccgaagccgggtaagccaaagaaaagaaagtcccttaagctcctaggatttttagatgttgaaaatactccctgcgcccggcattcaatattgtatggttcattaggatctgttgtggctggctttggacattttttgttcactagtagaattagaagatcatgtgatgttggagtaggagggtttatcttggtgactttgggatgctggtttcattgtaggtataattatgcaaagcaaagaatccaggaaagaattgccagagaagaaattaaaaagaagatattatatgaaggtacccacctcgatcctgaaagaaaacacaacggcagcagcagcaattgaacaatcttgagcatagaagtcaatgtaaacgaagttaagatcaaccacataaaacatttcatgtgcaataagctctcaatcaagtaaataaagtttaagttgtagtcaaaaaaaaaaaaaaaaaaaaaaaaaaaaaaaaaaaaaaaaaaaaaaaaaaaaaaaaaaaaaaaaaaaaaaaaaaaaaaanaaaaaaaaaaaaaaaaaaaggggggggggggggcggaaaaaaaccccgggggggggggaaagagacgtaccacccaccaatcattttaagaaaaaagcggcgccaaacaaggagggcaaataataaaagagagcacggccgagcgataaaacacggcgaggggagagcacagcctcgagtggagctgtagggaacaccacctcgtcgggggggaaaacagaggagacccaccacaagagaaaacgcgcgaggacaaacaacacgcgggtggagggcagcccagcctctggcgagaaagctgccagaatgaaaaaaataag

SEQ ID NO: 287759 - DNA, 810 bp, Homo sapiens
  misc_feature (490)..(490): n is a, c, g, or t
ggccgaagtggagaagggttccatgtgaacttgagcatagaagtcaatgtaaacgaagttaagatcaaccacataaaacatttcatgtgcaataagctctcaatcaagtaaataaagtttaagttgtagtcatttttttcccacacttgtgtggaatgaaaacttgccagtttattctggccctgtgtctactgccaggatagcattcttacgtgttacatatagtggacttgtcatccttaaaatgtgaacagaatttattggcagtgtggcaaagaattataaaacatagtgtttaatgtacttggagtttccttgtagtagtaagtatagagtttgatgataagtaaacgtcccttaacaaaaacctcaaccttattactatcccattaaaaaacagcaaatacttacaaaaaaaaaaaaaaaaaaaaaaaaaaaaaaaaaaaaaaaaaaaaaaaaaaaaaaaaaaaaaaaaaaaaaaaaaaaaaanaaaaaaaaaaaaaaaaaaaggggggggggggggcggaaaaaaaccccgggggggggggaaagagacgtaccacccaccaatcattttaagaaaaaagcggcgccaaacaaggagggcaaataataaaagagagcacggccgagcgataaaacacggcgaggggagagcacagcctcgagtggagctgtagggaacaccacctcgtcgggggggaaaacagaggagacccaccacaagagaaaacgcgcgaggacaaacaacacgcgggtggagggcagcccagcctctggcgagaaagctgccagaatgaaaaaaataag

SEQ ID NO: 287760 - DNA, 303 bp, Homo sapiens
gcggccgctccaatatcagaatcctcgtgccgcctcgtgccgaattcggcacgagtgcatgaatgcgggaaaatgttgatgatcactaatcaataatctgatatttaacaaaatatggacaggccacttatgctcagttttaccttagttattccttggtatccacaggcccaagtccctttaaataaaataccctcatatttccatataatctacatacattctcccatatactttaaatcatctctagattacttataatgtctaatacaaaataaatgctatgtaaatgtaattaaaata

SEQ ID NO: 287761 - DNA, 262 bp, Homo sapiens
ctgcggaggcagaagcaggaagcaggtagaattagaagatcatgtgatgttggagtaggagggtttatcttggtgactttgggatgctggtttcattgtaggtataattatgcaaagcaaagaatccaggaaagaattgccagagaagaaattaaaaagaagatattatatgaaggtacccacctcgatcctgaaagaaaacacaacggcagcagcagcaattgaacaatacgcagggtttgtaggggcagaagcagtacgg

SEQ ID NO: 287762 - DNA, 5397 bp, Homo sapiens
ccacttctgagcattttacagttcagtgtacttaactgtaaaggtatacaggctcaagtcgttgcatattcttcctgttttgatagaaattgcagggatttatgtactgaatcttattactccttagatatgtgacaactggaaagctccccaccaaaccctccagccttggttacttcttaatgatgtggtttggcacaatgaaaatgtcataggctttgtggtgaaactgacttctgcctccactcctgccaacacttattattagcctcttaagtccccgagcctgtttcagaggtaatctcacacaaaggctagagaattaaaaaacatgtagagagcctggcactaatacctacctcccccaccagcagctcttaattatgagatcaaccactattattttagaccagagttttgttggggattgggtttgtttcagaaggcactattttaaataagatgtgtagcttctatttagatatttgcctttaaagtcagctgagctattttcctattgtttgcaaatttacttttatttaaaaaaataaaatttcctaaagcagtgtttccccaatatgacagtcatcagaaaaaaccacctagagttttctaaacatagattccagtgattgtaaatcagaatctgagagtgggactagaaaatacttaattctatcctgtggtacaagctggtctcacacttgcatctttgcacctaagactagatcaaactggtactaatcctctggccccagcatcccatccttggggaaatagtctagtttagaggtagtcctggactggagcgctaagtccagcattcctcacctgcataacactacccacatgatcatatgtcccctgggctctcaagctgataggaaaaagtcgtcttgctaaatgaaatcccccaacctcttggtaatgtgaagaactgtactgcaaagctttgaagcaatcctatgttaggcatgcgggtgggaacggggccagacagagggaaaaaatggaatagaatgatccgagagtaaataattcttgctttattatgaaccaagtcacattttgtctcttccaacagatgcttgagccaaaaaagcaaacataggcagaaatacaattgagaatatcttcatgtttcaacctttaatctgacttgccttttactatcctttccccatttcttctaatctcttttgccttacaatatattaccttctaggtatcacctcatcctatagaatcccttctagtttaatgtcctgccccaaacaatactaacccattgaagataactatgaaacctttaaatggacagtggttccttttaaaagcagccttactgaaaattttatatacacttaaatcaagtaacagttaccgtgagttttctaaacttttgtgttaacagaaatgccagttcagcagtgtgactgttacttttaaatgtctgtcttgccgccctagagtgacagacatcccagttaaacatattaggaataagaaatacataaatccaatgaagactgtagaaaaagaattttagcacttgaaggaacttcagtcatttaacccaacccattcatgttatagattgagaccatagaaataaaagtagcctataggatacaaaagttagcggcagatctgagataaaaatccagctctttggatccccgcgtttttcaccacacttagctgtcgttcccatgtattacgaacaaagaatcaaatataatcaagtgcagcctcacttcacaggcaagaaaacagactagagtttaatatattgcccatgtttatcttaaggtgaaacatttactcttacaaccacagttgatgttaacctagttaataaaatatgaaaggtaattactaggggaattttaaacggcactacataagcaaacatgactcaaattactttttccatttctgcttcccaaattattggagttactgaagcaagctatgctgctttcaattccaatgataggcatattcccaaataaactcatttaaagagctcataaaatgaattatcctatttccaagtcagttgattagcaaattaagatacagctccaagttaccctactgcttaagggttttccggtccaatttgtaaggttttcggatttaaagattcagactgcataccaaaggtggacaaagacaacgcaagctgatttaggttgtcacgtggcacatactctagtttaaaccctcaactacaagaaaagaaatggtgtattgtcatttttgccaaagcaccccaaaatgaaatactttcttactcaatctaggttcttttttttcattctagtcccttaagctcctaggatttttagatgttgaaaatactccctgcgcccggcattcaatattgtatggttcattaggatctgttgtggctggctttggacattttttgttcactagtgagtatctgtattttttatttctctatgtactaaaaaaagcatttctctacataatgaactatttttttttctaggtggagtaatgtatataacgtaattatattctaattaattgttatgcttatttttacaggtagaattagaagatcatgtgatgttggagtaggagggtttatcttggtgactttgggatgctggtatgtttgctaagtattcaagaacatccatgattatagtaggttatctaattcaaaaagcacatgctcttttcagagcagtctcccattgggagatcctcaccctcaatgaagaatcttgatttttcaggacattttcatggaaatcttaaaatgcttgaacagataaatgcatattagacatcccattaaaaagaaagctgtggtttttacacttcacttaggaaagcctcaaccatttcccttaccctaatacttatttcatccctgcttattcatatctgaaaatgctactttaagaatgtgtttacaactactgatgagtgaatataaaatatggatgaacctcaaatatttgccagacctaagagtatgatatgtatgtactatatggttatgtagacatagcattattatcccgttaaaaacgagagcaaatacttgtttcttataatagccaatgctatcagaagacttaaaaactaatggattttatcactttacaaattgttatgtagacatcctttttttcctaataaaaaaagaatgtgttgataggtattctgacaccaaaactgcccaaaaatagcactataaattagaacatatttttcagtctcagggtagtagtcatctgtatttaagttttgtgtgatttagagaaatttcataaattaatttctgtaggactttatattaacaatttattcatattcttttcttctaaggtttcattgtaggtataattatgcaaagcaaagaatccaggaaagaattgccagagaagaaattaaaaagaagatattatatgaaggtacccacctcgatcctgaaagaaaacacaacggcagcagcagcaattgaacaatcttgagcatagaagtcaatgtaaacgaagttaagatcaaccacataaaacatttcatgtgcaataagctctcaatcaagtaaataaagtttaagttgtagtcatttttttcccacacttgtgtggaatgaaaacttgccagtttattctggccctgtgtctactgccaggatagcattcttacgtgttacatatagtggacttgtcatccttaaaatgtgaacagaatttattggcagtgtggcaaagaattataaaacatagtgtttaatgtacttggagtttccttgtagtagtaagtatagagtttgatgataagtaaacgtcccttaacaaaaacctcaaccttattactatcccattaaaaaacagcaaatacttactgagttcttgtaagagctaatgtcattgtaagatttaaaactaagggcttttatcactttgcaaattattttttaaatgcattcatcatttgacagtgttctctcatttcttaaaatgcgagtcatcttccaaaagagttgtttttaactgccctaaacatttttggggaagtatgcagggtttaaatttttaagtataattagttctgaattaaaatatgcacatggaacttgtctggcagactgatgcaatagtaaaacaactgcagaattactattaatgtaaacaatccatttgaaagtcaatcagctgctcccattaaaatattatttaaaatacaatacccacagcatctaactaaatcctcaggatttattctccgggagaaattatccctttctaggaaaatgaagttatttctggttttaattcatacaatactttaagaaaatctgttaaatataacaaaacacaagctagatgcttaagaaatgcttaaagaaatattggggcgaaggtaacagcagtcaacaggattgtggccattactggtcctattattttgatgtaccatggaaggcacagaaatcgagcaaggaagaaaatattagttattttgatctacatctttttctaaagaaaagtggagcttgcctccagttcaattcacaagagcattttccctcccatgcccaccttttcttgtggctgtcgctaggaaggatgcagaggctgtgtggtttaccaaatgccttaacttagcagtgaatgacaactgtcaaacacatgttgagggaaaatttttactgattcacaaaaaggaagacagtttgcccactcttagtggcacaaatcaaagctgcatgcactacattatccaaattagtcgtaaccaaatagttaaaaaattctgctgggcacggtggctcatacctgtaatcccagcactttgggaggccgaggcagttggatcacctgaggttaggagtttgagaccagcctggccaacagggtgaaaccctgtctcgtctaaaaatacaaaaattagccgggcgtggtggtgcatgcctgtagtcccaggtactcaggaggctgaggcaggagaatcacttgaacccgaggtggggcaggcggaggttgcagtaagccaagatcgcgccattgcactctagcctaggtgacagagtgagactccatctcaaaaaaaaaaaaaaattccataggatgttcaaccatgttttcagaggccgcactgcatgaatgcgggaaaatgttgatgatcactaatcaataatctgatatttaacaaaatatggacaggccacttatgctcagttttaccttagttattccttggtatccacaggcccaagtccctttaaataaaataccctcatatttccatataatctacatacattctcccatatactttaaatcatctctagattacttataatgtctaatacaaaataaatgctatgtaaatgtaattaaaata

SEQ ID NO: 287763 - DNA, 5451 bp, Homo sapiens
ccacttctgagcattttacagttcagtgtacttaactgtaaaggtatacaggctcaagtcgttgcatattcttcctgttttgatagaaattgcagggatttatgtactgaatcttattactccttagatatgtgacaactggaaagctccccaccaaaccctccagccttggttacttcttaatgatgtggtttggcacaatgaaaatgtcataggctttgtggtgaaactgacttctgcctccactcctgccaacacttattattagcctcttaagtccccgagcctgtttcagaggtaatctcacacaaaggctagagaattaaaaaacatgtagagagcctggcactaatacctacctcccccaccagcagctcttaattatgagatcaaccactattattttagaccagagttttgttggggattgggtttgtttcagaaggcactattttaaataagatgtgtagcttctatttagatatttgcctttaaagtcagctgagctattttcctattgtttgcaaatttacttttatttaaaaaaataaaatttcctaaagcagtgtttccccaatatgacagtcatcagaaaaaaccacctagagttttctaaacatagattccagtgattgtaaatcagaatctgagagtgggactagaaaatacttaattctatcctgtggtacaagctggtctcacacttgcatctttgcacctaagactagatcaaactggtactaatcctctggccccagcatcccatccttggggaaatagtctagtttagaggtagtcctggactggagcgctaagtccagcattcctcacctgcataacactacccacatgatcatatgtcccctgggctctcaagctgataggaaaaagtcgtcttgctaaatgaaatcccccaacctcttggtaatgtgaagaactgtactgcaaagctttgaagcaatcctatgttaggcatgcgggtgggaacggggccagacagagggaaaaaatggaatagaatgatccgagagtaaataattcttgctttattatgaaccaagtcacattttgtctcttccaacagatgcttgagccaaaaaagcaaacataggcagaaatacaattgagaatatcttcatgtttcaacctttaatctgacttgccttttactatcctttccccatttcttctaatctcttttgccttacaatatattaccttctaggtatcacctcatcctatagaatcccttctagtttaatgtcctgccccaaacaatactaacccattgaagataactatgaaacctttaaatggacagtggttccttttaaaagcagccttactgaaaattttatatacacttaaatcaagtaacagttaccgtgagttttctaaacttttgtgttaacagaaatgccagttcagcagtgtgactgttacttttaaatgtctgtcttgccgccctagagtgacagacatcccagttaaacatattaggaataagaaatacataaatccaatgaagactgtagaaaaagaattttagcacttgaaggaacttcagtcatttaacccaacccattcatgttatagattgagaccatagaaataaaagtagcctataggatacaaaagttagcggcagatctgagataaaaatccagctctttggatccccgcgtttttcaccacacttagctgtcgttcccatgtattacgaacaaagaatcaaatataatcaagtgcagcctcacttcacaggcaagaaaacagactagagtttaatatattgcccatgtttatcttaaggtgaaacatttactcttacaaccacagttgatgttaacctagttaataaaatatgaaaggtaattactaggggaattttaaacggcactacataagcaaacatgactcaaattactttttccatttctgcttcccaaattattggagttactgaagcaagctatgctgctttcaattccaatgataggcatattcccaaataaactcatttaaagagctcataaaatgaattatcctatttccaagtcagttgattagcaaattaagatacagctccaagttaccctactgcttaagggttttccggtccaatttgtaaggttttcggatttaaagattcagactgcataccaaaggtggacaaagacaacgcaagctgatttaggttgtcacgtggcacatactctagtttaaaccctcaactacaagaaaagaaatggtgtattgtcatttttgccaaagcaccccaaaatgaaatactttcttactcaatctaggttcttttttttcattctagtcccttaagctcctaggatttttagatgttgaaaatactccctgcgcccggcattcaatattgtatggttcattaggatctgttgtggctggctttggacattttttgttcactagtgagtatctgtattttttatttctctatgtactaaaaaaagcatttctctacataatgaactatttttttttctaggtggagtaatgtatataacgtaattatattctaattaattgttatgcttatttttacaggtagaattagaagatcatgtgatgttggagtaggagggtttatcttggtgactttgggatgctggtatgtttgctaagtattcaagaacatccatgattatagtaggttatctaattcaaaaagcacatgctcttttcagagcagtctcccattgggagatcctcaccctcaatgaagaatcttgatttttcaggacattttcatggaaatcttaaaatgcttgaacagataaatgcatattagacatcccattaaaaagaaagctgtggtttttacacttcacttaggaaagcctcaaccatttcccttaccctaatacttatttcatccctgcttattcatatctgaaaatgctactttaagaatgtgtttacaactactgatgagtgaatataaaatatggatgaacctcaaatatttgccagacctaagagtatgatatgtatgtactatatggttccatttatacatgaatttctacagtgagctatttaaggtggtagaaatcatgttatgtagacatagcattattatcccgttaaaaacgagagcaaatacttgtttcttataatagccaatgctatcagaagacttaaaaactaatggattttatcactttacaaattgttatgtagacatcctttttttcctaataaaaaaagaatgtgttgataggtattctgacaccaaaactgcccaaaaatagcactataaattagaacatatttttcagtctcagggtagtagtcatctgtatttaagttttgtgtgatttagagaaatttcataaattaatttctgtaggactttatattaacaatttattcatattcttttcttctaaggtttcattgtaggtataattatgcaaagcaaagaatccaggaaagaattgccagagaagaaattaaaaagaagatattatatgaaggtacccacctcgatcctgaaagaaaacacaacggcagcagcagcaattgaacaatcttgagcatagaagtcaatgtaaacgaagttaagatcaaccacataaaacatttcatgtgcaataagctctcaatcaagtaaataaagtttaagttgtagtcatttttttcccacacttgtgtggaatgaaaacttgccagtttattctggccctgtgtctactgccaggatagcattcttacgtgttacatatagtggacttgtcatccttaaaatgtgaacagaatttattggcagtgtggcaaagaattataaaacatagtgtttaatgtacttggagtttccttgtagtagtaagtatagagtttgatgataagtaaacgtcccttaacaaaaacctcaaccttattactatcccattaaaaaacagcaaatacttactgagttcttgtaagagctaatgtcattgtaagatttaaaactaagggcttttatcactttgcaaattattttttaaatgcattcatcatttgacagtgttctctcatttcttaaaatgcgagtcatcttccaaaagagttgtttttaactgccctaaacatttttggggaagtatgcagggtttaaatttttaagtataattagttctgaattaaaatatgcacatggaacttgtctggcagactgatgcaatagtaaaacaactgcagaattactattaatgtaaacaatccatttgaaagtcaatcagctgctcccattaaaatattatttaaaatacaatacccacagcatctaactaaatcctcaggatttattctccgggagaaattatccctttctaggaaaatgaagttatttctggttttaattcatacaatactttaagaaaatctgttaaatataacaaaacacaagctagatgcttaagaaatgcttaaagaaatattggggcgaaggtaacagcagtcaacaggattgtggccattactggtcctattattttgatgtaccatggaaggcacagaaatcgagcaaggaagaaaatattagttattttgatctacatctttttctaaagaaaagtggagcttgcctccagttcaattcacaagagcattttccctcccatgcccaccttttcttgtggctgtcgctaggaaggatgcagaggctgtgtggtttaccaaatgccttaacttagcagtgaatgacaactgtcaaacacatgttgagggaaaatttttactgattcacaaaaaggaagacagtttgcccactcttagtggcacaaatcaaagctgcatgcactacattatccaaattagtcgtaaccaaatagttaaaaaattctgctgggcacggtggctcatacctgtaatcccagcactttgggaggccgaggcagttggatcacctgaggttaggagtttgagaccagcctggccaacagggtgaaaccctgtctcgtctaaaaatacaaaaattagccgggcgtggtggtgcatgcctgtagtcccaggtactcaggaggctgaggcaggagaatcacttgaacccgaggtggggcaggcggaggttgcagtaagccaagatcgcgccattgcactctagcctaggtgacagagtgagactccatctcaaaaaaaaaaaaaaattccataggatgttcaaccatgttttcagaggccgcactgcatgaatgcgggaaaatgttgatgatcactaatcaataatctgatatttaacaaaatatggacaggccacttatgctcagttttaccttagttattccttggtatccacaggcccaagtccctttaaataaaataccctcatatttccatataatctacatacattctcccatatactttaaatcatctctagattacttataatgtctaatacaaaataaatgctatgtaaatgtaattaaaata

SEQ ID NO: 287764 - DNA, 2640 bp, Homo sapiens
cgcgccggagacggttagaaatggcggttggggcggagcagggggctggcgcgggaagcggggctgtctggctcggttacgcccccacctcgccaggaatctaggagtcggtttgttttccgaacccatctccttccgctctcccgcccctgcaggctgtgtgccgagcttggaagaaagtgtgacccgttcgacggaacaaaggacatgacagcccggccccgtgcggccactgcggagcgttaggaacattccctaaaatggcggccggcgcgtcggaacagggcgggaggcggcggcgcgtgggggcgggacggggaggggcgcggccagccgggcttctgcttccgcgaccccggcggtgcagggcgggtggagtcgcggagtagtcctcatggccgccccgccggagcccggtgagcccgaggagaggaagtcccttaagctcctaggatttttagatgttgaaaatactccctgcgcccggcattcaatattgtatggttcattaggatctgttgtggctggctttggacattttttgttcactagtagaattagaagatcatgtgatgttggagtaggagggtttatcttggtgactttgggatgctggtttcattgtaggtataattatgcaaagcaaagaatccaggaaagaattgccagagaagaaattaaaaagaagatattatatgaaggtacccacctcgatcctgaaagaaaacacaacggcagcagcagcaattgaacaatcttgagcatagaagtcaatgtaaacgaagttaagatcaaccacataaaacatttcatgtgcaataagctctcaatcaagtaaataaagtttaagttgtagtcatttttttcccacacttgtgtggaatgaaaacttgccagtttattctggccctgtgtctactgccaggatagcattcttacgtgttacatatagtggacttgtcatccttaaaatgtgaacagaatttattggcagtgtggcaaagaattataaaacatagtgtttaatgtacttggagtttccttgtagtagtaagtatagagtttgatgataagtaaacgtcccttaacaaaaacctcaaccttattactatcccattaaaaaacagcaaatacttactgagttcttgtaagagctaatgtcattgtaagatttaaaactaagggcttttatcactttgcaaattattttttaaatgcattcatcatttgacagtgttctctcatttcttaaaatgcgagtcatcttccaaaagagttgtttttaactgccctaaacatttttggggaagtatgcagggtttaaatttttaagtataattagttctgaattaaaatatgcacatggaacttgtctggcagactgatgcaatagtaaaacaactgcagaattactattaatgtaaacaatccatttgaaagtcaatcagctgctcccattaaaatattatttaaaatacaatacccacagcatctaactaaatcctcaggatttattctccgggagaaattatccctttctaggaaaatgaagttatttctggttttaattcatacaatactttaagaaaatctgttaaatataacaaaacacaagctagatgcttaagaaatgcttaaagaaatattggggcgaaggtaacagcagtcaacaggattgtggccattactggtcctattattttgatgtaccatggaaggcacagaaatcgagcaaggaagaaaatattagttattttgatctacatctttttctaaagaaaagtggagcttgcctccagttcaattcacaagagcattttccctcccatgcccaccttttcttgtggctgtcgctaggaaggatgcagaggctgtgtggtttaccaaatgccttaacttagcagtgaatgacaactgtcaaacacatgttgagggaaaatttttactgattcacaaaaaggaagacagtttgcccactcttagtggcacaaatcaaagctgcatgcactacattatccaaattagtcgtaaccaaatagttaaaaaattctgctgggcacggtggctcatacctgtaatcccagcactttgggaggccgaggcagttggatcacctgaggttaggagtttgagaccagcctggccaacagggtgaaaccctgtctcgtctaaaaatacaaaaattagccgggcgtggtggtgcatgcctgtagtcccaggtactcaggaggctgaggcaggagaatcacttgaacccgaggtggggcaggcggaggttgcagtaagccaagatcgcgccattgcactctagcctaggtgacagagtgagactccatctcaaaaaaaaaaaaaaattccataggatgttcaaccatgttttcagaggccgcactgcatgaatgcgggaaaatgttgatgatcactaatcaataatctgatatttaacaaaatatggacaggccacttatgctcagttttaccttagttattccttggtatccacaggcccaagtccctttaaataaaataccctcatatttccatataatctacatacattctcccatatactttaaatcatctctagattacttataatgtctaatacaaaataaatgctatgtaaatgtaattaaaata

SEQ ID NO: 287765 - DNA, 2609 bp, Homo sapiens
gctggtaccggccggagatttatggatcggggctgtctggctcggttacgcccccacctcgccaggaatctaggagtcggtttgttttccgaacccatctccttccgctctcccgcccctgcaggctgtgtgccgagcttggaagaaagtgtgacccgttcgacggaacaaaggacatgacagcccggccccgtgcggccactgcggagcgttaggaacattccctaaaatggcggccggcgcgtcggaacagggcgggaggcggcggcgcgtgggggcgggacggggaggggcgcggccagccgggcttctgcttccgcgaccccggcggtgcagggcgggtggagtcgcggagtagtcctcatggccgccccgccggagcccggtgagcccgaggagaggaagtcccttaagctcctaggatttttagatgttgaaaatactccctgcgcccggcattcaatattgtatggttcattaggatctgttgtggctggctttggacattttttgttcactagtagaattagaagatcatgtgatgttggagtaggagggtttatcttggtgactttgggatgctggtttcattgtaggtataattatgcaaagcaaagaatccaggaaagaattgccagagaagaaattaaaaagaagatattatatgaaggtacccacctcgatcctgaaagaaaacacaacggcagcagcagcaattgaacaatcttgagcatagaagtcaatgtaaacgaagttaagatcaaccacataaaacatttcatgtgcaataagctctcaatcaagtaaataaagtttaagttgtagtcatttttttcccacacttgtgtggaatgaaaacttgccagtttattctggccctgtgtctactgccaggatagcattcttacgtgttacatatagtggacttgtcatccttaaaatgtgaacagaatttattggcagtgtggcaaagaattataaaacatagtgtttaatgtacttggagtttccttgtagtagtaagtatagagtttgatgataagtaaacgtcccttaacaaaaacctcaaccttattactatcccattaaaaaacagcaaatacttactgagttcttgtaagagctaatgtcattgtaagatttaaaactaagggcttttatcactttgcaaattattttttaaatgcattcatcatttgacagtgttctctcatttcttaaaatgcgagtcatcttccaaaagagttgtttttaactgccctaaacatttttggggaagtatgcagggtttaaatttttaagtataattagttctgaattaaaatatgcacatggaacttgtctggcagactgatgcaatagtaaaacaactgcagaattactattaatgtaaacaatccatttgaaagtcaatcagctgctcccattaaaatattatttaaaatacaatacccacagcatctaactaaatcctcaggatttattctccgggagaaattatccctttctaggaaaatgaagttatttctggttttaattcatacaatactttaagaaaatctgttaaatataacaaaacacaagctagatgcttaagaaatgcttaaagaaatattggggcgaaggtaacagcagtcaacaggattgtggccattactggtcctattattttgatgtaccatggaaggcacagaaatcgagcaaggaagaaaatattagttattttgatctacatctttttctaaagaaaagtggagcttgcctccagttcaattcacaagagcattttccctcccatgcccaccttttcttgtggctgtcgctaggaaggatgcagaggctgtgtggtttaccaaatgccttaacttagcagtgaatgacaactgtcaaacacatgttgagggaaaatttttactgattcacaaaaaggaagacagtttgcccactcttagtggcacaaatcaaagctgcatgcactacattatccaaattagtcgtaaccaaatagttaaaaaattctgctgggcacggtggctcatacctgtaatcccagcactttgggaggccgaggcagttggatcacctgaggttaggagtttgagaccagcctggccaacagggtgaaaccctgtctcgtctaaaaatacaaaaattagccgggcgtggtggtgcatgcctgtagtcccaggtactcaggaggctgaggcaggagaatcacttgaacccgaggtggggcaggcggaggttgcagtaagccaagatcgcgccattgcactctagcctaggtgacagagtgagactccatctcaaaaaaaaaaaaaaattccataggatgttcaaccatgttttcagaggccgcactgcatgaatgcgggaaaatgttgatgatcactaatcaataatctgatatttaacaaaatatggacaggccacttatgctcagttttaccttagttattccttggtatccacaggcccaagtccctttaaataaaataccctcatatttccatataatctacatacattctcccatatactttaaatcatctctagattacttataatgtctaatacaaaataaatgctatgtaaatgtaattaaaata

SEQ ID NO: 287766 - DNA, 4533 bp, Homo sapiens
ccacttctgagcattttacagttcagtgtacttaactgtaaaggtatacaggctcaagtcgttgcatattcttcctgttttgatagaaattgcagggatttatgtactgaatcttattactccttagatatgtgacaactggaaagctccccaccaaaccctccagccttggttacttcttaatgatgtggtttggcacaatgaaaatgtcataggctttgtggtgaaactgacttctgcctccactcctgccaacacttattattagcctcttaagtccccgagcctgtttcagaggtaatctcacacaaaggctagagaattaaaaaacatgtagagagcctggcactaatacctacctcccccaccagcagctcttaattatgagatcaaccactattattttagaccagagttttgttggggattgggtttgtttcagaaggcactattttaaataagatgtgtagcttctatttagatatttgcctttaaagtcagctgagctattttcctattgtttgcaaatttacttttatttaaaaaaataaaatttcctaaagcagtgtttccccaatatgacagtcatcagaaaaaaccacctagagttttctaaacatagattccagtgattgtaaatcagaatctgagagtgggactagaaaatacttaattctatcctgtggtacaagctggtctcacacttgcatctttgcacctaagactagatcaaactggtactaatcctctggccccagcatcccatccttggggaaatagtctagtttagaggtagtcctggactggagcgctaagtccagcattcctcacctgcataacactacccacatgatcatatgtcccctgggctctcaagctgataggaaaaagtcgtcttgctaaatgaaatcccccaacctcttggtaatgtgaagaactgtactgcaaagctttgaagcaatcctatgttaggcatgcgggtgggaacggggccagacagagggaaaaaatggaatagaatgatccgagagtaaataattcttgctttattatgaaccaagtcacattttgtctcttccaacagatgcttgagccaaaaaagcaaacataggcagaaatacaattgagaatatcttcatgtttcaacctttaatctgacttgccttttactatcctttccccatttcttctaatctcttttgccttacaatatattaccttctaggtatcacctcatcctatagaatcccttctagtttaatgtcctgccccaaacaatactaacccattgaagataactatgaaacctttaaatggacagtggttccttttaaaagcagccttactgaaaattttatatacacttaaatcaagtaacagttaccgtgagttttctaaacttttgtgttaacagaaatgccagttcagcagtgtgactgttacttttaaatgtctgtcttgccgccctagagtgacagacatcccagttaaacatattaggaataagaaatacataaatccaatgaagactgtagaaaaagaattttagcacttgaaggaacttcagtcatttaacccaacccattcatgttatagattgagaccatagaaataaaagtagcctataggatacaaaagttagcggcagatctgagataaaaatccagctctttggatccccgcgtttttcaccacacttagctgtcgttcccatgtattacgaacaaagaatcaaatataatcaagtgcagcctcacttcacaggcaagaaaacagactagagtttaatatattgcccatgtttatcttaaggtgaaacatttactcttacaaccacagttgatgttaacctagttaataaaatatgaaaggtaattactaggggaattttaaacggcactacataagcaaacatgactcaaattactttttccatttctgcttcccaaattattggagttactgaagcaagctatgctgctttcaattccaatgataggcatattcccaaataaactcatttaaagagctcataaaatgaattatcctatttccaagtcagttgattagcaaattaagatacagctccaagttaccctactgcttaagggttttccggtccaatttgtaaggttttcggatttaaagattcagactgcataccaaaggtggacaaagacaacgcaagctgatttaggttgtcacgtggcacatactctagtttaaaccctcaactacaagaaaagaaatggtgtattgtcatttttgccaaagcaccccaaaatgaaatactttcttactcaatctaggttcttttttttcattctagtcccttaagctcctaggatttttagatgttgaaaatactccctgcgcccggcattcaatattgtatggttcattaggatctgttgtggctggctttggacattttttgttcactagtagaattagaagatcatgtgatgttggagtaggagggtttatcttggtgactttgggatgctggtttcattgtaggtataattatgcaaagcaaagaatccaggaaagaattgccagagaagaaattaaaaagaagatattatatgaaggtacccacctcgatcctgaaagaaaacacaacggcagcagcagcaattgaacaatcttgagcatagaagtcaatgtaaacgaagttaagatcaaccacataaaacatttcatgtgcaataagctctcaatcaagtaaataaagtttaagttgtagtcatttttttcccacacttgtgtggaatgaaaacttgccagtttattctggccctgtgtctactgccaggatagcattcttacgtgttacatatagtggacttgtcatccttaaaatgtgaacagaatttattggcagtgtggcaaagaattataaaacatagtgtttaatgtacttggagtttccttgtagtagtaagtatagagtttgatgataagtaaacgtcccttaacaaaaacctcaaccttattactatcccattaaaaaacagcaaatacttactgagttcttgtaagagctaatgtcattgtaagatttaaaactaagggcttttatcactttgcaaattattttttaaatgcattcatcatttgacagtgttctctcatttcttaaaatgcgagtcatcttccaaaagagttgtttttaactgccctaaacatttttggggaagtatgcagggtttaaatttttaagtataattagttctgaattaaaatatgcacatggaacttgtctggcagactgatgcaatagtaaaacaactgcagaattactattaatgtaaacaatccatttgaaagtcaatcagctgctcccattaaaatattatttaaaatacaatacccacagcatctaactaaatcctcaggatttattctccgggagaaattatccctttctaggaaaatgaagttatttctggttttaattcatacaatactttaagaaaatctgttaaatataacaaaacacaagctagatgcttaagaaatgcttaaagaaatattggggcgaaggtaacagcagtcaacaggattgtggccattactggtcctattattttgatgtaccatggaaggcacagaaatcgagcaaggaagaaaatattagttattttgatctacatctttttctaaagaaaagtggagcttgcctccagttcaattcacaagagcattttccctcccatgcccaccttttcttgtggctgtcgctaggaaggatgcagaggctgtgtggtttaccaaatgccttaacttagcagtgaatgacaactgtcaaacacatgttgagggaaaatttttactgattcacaaaaaggaagacagtttgcccactcttagtggcacaaatcaaagctgcatgcactacattatccaaattagtcgtaaccaaatagttaaaaaattctgctgggcacggtggctcatacctgtaatcccagcactttgggaggccgaggcagttggatcacctgaggttaggagtttgagaccagcctggccaacagggtgaaaccctgtctcgtctaaaaatacaaaaattagccgggcgtggtggtgcatgcctgtagtcccaggtactcaggaggctgaggcaggagaatcacttgaacccgaggtggggcaggcggaggttgcagtaagccaagatcgcgccattgcactctagcctaggtgacagagtgagactccatctcaaaaaaaaaaaaaaattccataggatgttcaaccatgttttcagaggccgcactgcatgaatgcgggaaaatgttgatgatcactaatcaataatctgatatttaacaaaatatggacaggccacttatgctcagttttaccttagttattccttggtatccacaggcccaagtccctttaaataaaataccctcatatttccatataatctacatacattctcccatatactttaaatcatctctagattacttataatgtctaatacaaaataaatgctatgtaaatgtaattaaaata

SEQ ID NO: 287767 - DNA, 5264 bp, Homo sapiens
ccacttctgagcattttacagttcagtgtacttaactgtaaaggtatacaggctcaagtcgttgcatattcttcctgttttgatagaaattgcagggatttatgtactgaatcttattactccttagatatgtgacaactggaaagctccccaccaaaccctccagccttggttacttcttaatgatgtggtttggcacaatgaaaatgtcataggctttgtggtgaaactgacttctgcctccactcctgccaacacttattattagcctcttaagtccccgagcctgtttcagaggtaatctcacacaaaggctagagaattaaaaaacatgtagagagcctggcactaatacctacctcccccaccagcagctcttaattatgagatcaaccactattattttagaccagagttttgttggggattgggtttgtttcagaaggcactattttaaataagatgtgtagcttctatttagatatttgcctttaaagtcagctgagctattttcctattgtttgcaaatttacttttatttaaaaaaataaaatttcctaaagcagtgtttccccaatatgacagtcatcagaaaaaaccacctagagttttctaaacatagattccagtgattgtaaatcagaatctgagagtgggactagaaaatacttaattctatcctgtggtacaagctggtctcacacttgcatctttgcacctaagactagatcaaactggtactaatcctctggccccagcatcccatccttggggaaatagtctagtttagaggtagtcctggactggagcgctaagtccagcattcctcacctgcataacactacccacatgatcatatgtcccctgggctctcaagctgataggaaaaagtcgtcttgctaaatgaaatcccccaacctcttggtaatgtgaagaactgtactgcaaagctttgaagcaatcctatgttaggcatgcgggtgggaacggggccagacagagggaaaaaatggaatagaatgatccgagagtaaataattcttgctttattatgaaccaagtcacattttgtctcttccaacagatgcttgagccaaaaaagcaaacataggcagaaatacaattgagaatatcttcatgtttcaacctttaatctgacttgccttttactatcctttccccatttcttctaatctcttttgccttacaatatattaccttctaggtatcacctcatcctatagaatcccttctagtttaatgtcctgccccaaacaatactaacccattgaagataactatgaaacctttaaatggacagtggttccttttaaaagcagccttactgaaaattttatatacacttaaatcaagtaacagttaccgtgagttttctaaacttttgtgttaacagaaatgccagttcagcagtgtgactgttacttttaaatgtctgtcttgccgccctagagtgacagacatcccagttaaacatattaggaataagaaatacataaatccaatgaagactgtagaaaaagaattttagcacttgaaggaacttcagtcatttaacccaacccattcatgttatagattgagaccatagaaataaaagtagcctataggatacaaaagttagcggcagatctgagataaaaatccagctctttggatccccgcgtttttcaccacacttagctgtcgttcccatgtattacgaacaaagaatcaaatataatcaagtgcagcctcacttcacaggcaagaaaacagactagagtttaatatattgcccatgtttatcttaaggtgaaacatttactcttacaaccacagttgatgttaacctagttaataaaatatgaaaggtaattactaggggaattttaaacggcactacataagcaaacatgactcaaattactttttccatttctgcttcccaaattattggagttactgaagcaagctatgctgctttcaattccaatgataggcatattcccaaataaactcatttaaagagctcataaaatgaattatcctatttccaagtcagttgattagcaaattaagatacagctccaagttaccctactgcttaagggttttccggtccaatttgtaaggttttcggatttaaagattcagactgcataccaaaggtggacaaagacaacgcaagctgatttaggttgtcacgtggcacatactctagtttaaaccctcaactacaagaaaagaaatggtgtattgtcatttttgccaaagcaccccaaaatgaaatactttcttactcaatctaggttcttttttttcattctagtcccttaagctcctaggatttttagatgttgaaaatactccctgcgcccggcattcaatattgtatggttcattaggatctgttgtggctggctttggacattttttgttcactagtgagtatctgtattttttatttctctatgtactaaaaaaagcatttctctacataatgaactatttttttttctaggtggagtaatgtatataacgtaattatattctaattaattgttatgcttatttttacaggtagaattagaagatcatgtgatgttggagtaggagggtttatcttggtgactttgggatgctggtatgtttgctaagtattcaagaacatccatgattatagtaggttatctaattcaaaaagcacatgctcttttcagagcagtctcccattgggagatcctcaccctcaatgaagaatcttgatttttcaggacattttcatggaaatcttaaaatgcttgaacagataaatgcatattagacatcccattaaaaagaaagctgtggtttttacacttcacttaggaaagcctcaaccatttcccttaccctaatacttatttcatccctgcttattcatatctgaaaatgctactttaagaatgtgtttacaactactgatgagtgaatataaaatatggatgaacctcaaatatttgccagacctaagagtatgatatgtatgtactatatggttatgtagacatagcattattatcccgttaaaaacgagagcaaatacttgtttcttataatagccaatgctatcagaagacttaaaaactaatggattttatcactttacaaattgttatgtagacatcctttttttcctaataaaaaaagaatgtgttgataggtattctgacaccaaaactgcccaaaaatagcactataaattagaacatatttttcagtctcagggtagtagtcatctgtatttaagttttgtgtgatttagagaaatttcataaattaatttctgtaggactttatattaacaatttattcatattcttttcttctaaggtttcattgtaggtataattatgcaaagcaaagaatccaggaaagaattgccagagaagaaattaaaaagaagatattatatgaaggtacccacctcgatcctgaaagaaaacacaacggcagcagcagcaattgaacaatcttgagcatagaagtcaatgtaaacgaagttaagatcaaccacataaaacatttcatgtgcaataagctctcaatcaagtaaataaagtttaagttgtagtcatttttttcccacacttgtgtggaatgaaaacttgccagtttattctggccctgtgtctactgccaggatagcattcttacgtgttacatatagtggacttgtcatccttaaaatgtgaacagaatttattggcagtgtggcaaagaattataaaacatagtgtttaatgtacttggagtttccttgtagtagtaagtatagagtttgatgataagtaaacgtcccttaacaaaaacctcaaccttattactatcccattaaaaaacagcaaatacttactgagttcttgtaagagctaatgtcattgtaagatttaaaactaagggcttttatcactttgcaaattattttttaaatgcattcatcatttgacagtgttctctcatttcttaaaatgcgagtcatcttccaaaagagttgtttttaactgccctaaacatttttggggaagtatgcagggtttaaatttttaagtataattagttctgaattaaaatatgcacatggaacttgtctggcagactgatgcaatagtaaaacaactgcagaattactattaatgtaaacaatccatttgaaagtcaatcagctgctcccattaaaatattatttaaaatacaatacccacagcatctaactaaatcctcaggatttattctccgggagaaattatccctttctaggaaaatgaagttatttctggttttaattcatacaatactttaagaaaatctgttaaatataacaaaacacaagctagatgcttaagaaatgcttaaagaaatattggggcgaaggtaacagcagtcaacaggattgtggccattactggtcctattattttgatgtaccatggaaggcacagaaatcgagcaaggaagaaaatattagttattttgatctacatctttttctaaagaaaagtggagcttgcctccagttcaattcacaagagcattttccctcccatgcccaccttttcttgtggctgtcgctaggaaggatgcagaggctgtgtggtttaccaaatgccttaacttagcagtgaatgacaactgtcaaacacatgttgagggaaaatttttactgattcacaaaaaggaagacagtttgcccactcttagtggcacaaatcaaagctgcatgcactacattatccaaattagtcgtaaccaaatagttaaaaaattctgctgggcacggtggctcatacctgtaatcccagcagtactcaggaggctgaggcaggagaatcacttgaacccgaggtggggcaggcggaggttgcagtaagccaagatcgcgccattgcactctagcctaggtgacagagtgagactccatctcaaaaaaaaaaaaaaattccataggatgttcaaccatgttttcagaggccgcactgcatgaatgcgggaaaatgttgatgatcactaatcaataatctgatatttaacaaaatatggacaggccacttatgctcagttttaccttagttattccttggtatccacaggcccaagtccctttaaataaaataccctcatatttccatataatctacatacattctcccatatactttaaatcatctctagattacttataatgtctaatacaaaataaatgctatgtaaatgtaattaaaata

SEQ ID NO: 287768 - DNA, 4381 bp, Homo sapiens
  misc_feature (7)..(8): n is a, c, g, or t
  misc_feature (15)..(15): n is a, c, g, or t
  misc_feature (19)..(19): n is a, c, g, or t
  misc_feature (41)..(42): n is a, c, g, or t
  misc_feature (44)..(44): n is a, c, g, or t
  misc_feature (59)..(59): n is a, c, g, or t
aggcggnncgggggngganaatgattgcttgactggacccnncnttgagttgagaatcntggcctgggggaagaaagggaggcgatattatgaacttttttatattttgtctcttccaacagatgcttgagccaaaaaagcaaacataggcagaaatacaattgagaatatcttcatgtttcaacctttaatctgacttgccttttactatcctttccccatttatagaatcccttctagtttaatgtcctgccccaaacaatactaacccattgaagataactatgaaacctttaaatggacagtggttccttttaaaagcagccttactgaaaattttatatacacttaaatcaagtaacagttaccgtgagttttctaaacttttgtgttaacagaaatgccagttcagcagtgtgactgttacttttaaatgtctgtcttgccgccctagagtgacagacatcccagttaaacatattaggaataagaaatacataaatccaatgaagactgtagaaaaagaattttagcacttgaaggaacttcagtcatttaacccaacccattcatgttatagattgagaccatagaaataaaagtagcctataggatacaaaagttagcggcagatctgagataaaaatccagctctttggatccccgcgtttttcaccacacttagctgtcgttcccatgtattacgaacaaagaatcaaatataatcaagtgcagcctcacttcacaggcaagaaaacagactagagtttaatatattgcccatgtttatcttaaggtgaaacatttactcttacaaccacagttgatgttaacctagttaataaaatatgaaaggtaattactaggggaattttaaacggcactacataagcaaacatgactcaaattactttttccatttctgcttcccaaattattggagttactgaagcaagctatgctgctttcaattccaatgataggcatattcccaaataaactcatttaaagagctcataaaatgaattatcctatttccaagtcagttgattagcaaattaagatacagctccaagttaccctactgcttaagggttttccggtccaatttgtaaggttttcggatttaaagattcagactgcataccaaaggtggacaaagacaacgcaagctgatttaggttgtcacgtggcacatactctagtttaaaccctcaactacaagaaaagaaatggtgtattgtcatttttgccaaagcaccccaaaatgaaatactttcttactcaatctaggttcttttttttcattctagtcccttaagctcctaggatttttagatgttgaaaatactccctgcgcccggcattcaatattgtatggttcattaggatctgttgtggctggctttggacattttttgttcactagtgagtatctgtattttttatttctctatgtactaaaaaaagcatttctctacataatgaactatttttttttctaggtggagtaatgtatataacgtaattatattctaattaattgttatgcttatttttacaggtagaattagaagatcatgtgatgttggagtaggagggtttatcttggtgactttgggatgctggtatgtttgctaagtattcaagaacatccatgattatagtaggttatctaattcaaaaagcacatgctcttttcagagcagtctcccattgggagatcctcaccctcaatgaagaatcttgatttttcaggacattttcatggaaatcttaaaatgcttgaacagataaatgcatattagacatcccattaaaaagaaagctgtggtttttacacttcacttaggaaagcctcaaccatttcccttaccctaatacttatttcatccctgcttattcatatctgaaaatgctactttaagaatgtgtttacaactactgatgagtgaatataaaatatggatgaacctcaaatatttgccagacctaagagtatgatatgtatgtactatatggttatgtagacatagcattattatcccgttaaaaacgagagcaaatacttgtttcttataatagccaatgctatcagaagacttaaaaactaatggattttatcactttacaaattgttatgtagacatcctttttttcctaataaaaaaagaatgtgttgataggtattctgacaccaaaactgcccaaaaatagcactataaattagaacatatttttcagtctcagggtagtagtcatctgtatttaagttttgtgtgatttagagaaatttcataaattaatttctgtaggactttatattaacaatttattcatattcttttcttctaaggtttcattgtaggtataattatgcaaagcaaagaatccaggaaagaattgccagagaagaaattaaaaagaagatattatatgaaggtacccacctcgatcctgaaagaaaacacaacggcagcagcagcaattgaacaatcttgagcatagaagtcaatgtaaacgaagttaagatcaaccacataaaacatttcatgtgcaataagctctcaatcaagtaaataaagtttaagttgtagtcatttttttcccacacttgtgtggaatgaaaacttgccagtttattctggccctgtgtctactgccaggatagcattcttacgtgttacatatagtggacttgtcatccttaaaatgtgaacagaatttattggcagtgtggcaaagaattataaaacatagtgtttaatgtacttggagtttccttgtagtagtaagtatagagtttgatgataagtaaacgtcccttaacaaaaacctcaaccttattactatcccattaaaaaacagcaaatacttactgagttcttgtaagagctaatgtcattgtaagatttaaaactaagggcttttatcactttgcaaattattttttaaatgcattcatcatttgacagtgttctctcatttcttaaaatgcgagtcatcttccaaaagagttgtttttaactgccctaaacatttttggggaagtatgcagggtttaaatttttaagtataattagttctgaattaaaatatgcacatggaacttgtctggcagactgatgcaatagtaaaacaactgcagaattactattaatgtaaacaatccatttgaaagtcaatcagctgctcccattaaaatattatttaaaatacaatacccacagcatctaactaaatcctcaggatttattctccgggagaaattatccctttctaggaaaatgaagttatttctggttttaattcatacaatactttaagaaaatctgttaaatataacaaaacacaagctagatgcttaagaaatgcttaaagaaatattggggcgaaggtaacagcagtcaacaggattgtggccattactggtcctattattttgatgtaccatggaaggcacagaaatcgagcaaggaagaaaatattagttattttgatctacatctttttctaaagaaaagtggagcttgcctccagttcaattcacaagagcattttccctcccatgcccaccttttcttgtggctgtcgctaggaaggatgcagaggctgtgtggtttaccaaatgccttaacttagcagtgaatgacaactgtcaaacacatgttgagggaaaatttttactgattcacaaaaaggaagacagtttgcccactcttagtggcacaaatcaaagctgcatgcactacattatccaaattagtcgtaaccaaatagttaaaaaattctgctgggcacggtggctcatacctgtaatcccagcactttgggaggccgaggcagttggatcacctgaggttaggagtttgagaccagcctggccaacagggtgaaaccctgtctcgtctaaaaatacaaaaattagccgggcgtggtggtgcatgcctgtagtcccaggtactcaggaggctgaggcaggagaatcacttgaacccgaggtggggcaggcggaggttgcagtaagccaagatcgcgccattgcactctagcctaggtgacagagtgagactccatctcaaaaaaaaaaaaaaattccataggatgttcaaccatgttttcagaggccgcactgcatgaatgcgggaaaatgttgatgatcactaatcaataatctgatatttaacaaaatatggacaggccacttatgctcagttttaccttagttattccttggtatccacaggcccaagtccctttaaataaaataccctcatatttccatataatctacatacattctcccatatactttaaatcatctctagattacttataatgtctaatacaaaataaatgctatgtaaatgtaattaaaata

SEQ ID NO: 287769 - DNA, 2369 bp, Homo sapiens
tgattgcatttagacacactacttcataaacagccccaccaagaaaagaaaaatcgcgatcccgatataaaccattctaggtctaaatgcaatcatgattgcatttagacgggagtagtcctcatggccgccccgccggagcccggtgagcccgaggagaggaagtcccttaagctcctaggatttttagatgttgaaaatactccctgcgcccggcattcaatattgtatggttcattaggatctgttgtggctggctttggacattttttgttcactagtagaattagaagatcatgtgatgttggagtaggagggtttatcttggtgactttgggatgctggtttcattgtaggtataattatgcaaagcaaagaatccaggaaagaattgccagagaagaaattaaaaagaagatattatatgaaggtacccacctcgatcctgaaagaaaacacaacggcagcagcagcaattgaacaatcttgagcatagaagtcaatgtaaacgaagttaagatcaaccacataaaacatttcatgtgcaataagctctcaatcaagtaaataaagtttaagttgtagtcatttttttcccacacttgtgtggaatgaaaacttgccagtttattctggccctgtgtctactgccaggatagcattcttacgtgttacatatagtggacttgtcatccttaaaatgtgaacagaatttattggcagtgtggcaaagaattataaaacatagtgtttaatgtacttggagtttccttgtagtagtaagtatagagtttgatgataagtaaacgtcccttaacaaaaacctcaaccttattactatcccattaaaaaacagcaaatacttactgagttcttgtaagagctaatgtcattgtaagatttaaaactaagggcttttatcactttgcaaattattttttaaatgcattcatcatttgacagtgttctctcatttcttaaaatgcgagtcatcttccaaaagagttgtttttaactgccctaaacatttttggggaagtatgcagggtttaaatttttaagtataattagttctgaattaaaatatgcacatggaacttgtctggcagactgatgcaatagtaaaacaactgcagaattactattaatgtaaacaatccatttgaaagtcaatcagctgctcccattaaaatattatttaaaatacaatacccacagcatctaactaaatcctcaggatttattctccgggagaaattatccctttctaggaaaatgaagttatttctggttttaattcatacaatactttaagaaaatctgttaaatataacaaaacacaagctagatgcttaagaaatgcttaaagaaatattggggcgaaggtaacagcagtcaacaggattgtggccattactggtcctattattttgatgtaccatggaaggcacagaaatcgagcaaggaagaaaatattagttattttgatctacatctttttctaaagaaaagtggagcttgcctccagttcaattcacaagagcattttccctcccatgcccaccttttcttgtggctgtcgctaggaaggatgcagaggctgtgtggtttaccaaatgccttaacttagcagtgaatgacaactgtcaaacacatgttgagggaaaatttttactgattcacaaaaaggaagacagtttgcccactcttagtggcacaaatcaaagctgcatgcactacattatccaaattagtcgtaaccaaatagttaaaaaattctgctgggcacggtggctcatacctgtaatcccagcactttgggaggccgaggcagttggatcacctgaggttaggagtttgagaccagcctggccaacagggtgaaaccctgtctcgtctaaaaatacaaaaattagccgggcgtggtggtgcatgcctgtagtcccaggtactcaggaggctgaggcaggagaatcacttgaacccgaggtggggcaggcggaggttgcagtaagccaagatcgcgccattgcactctagcctaggtgacagagtgagactccatctcaaaaaaaaaaaaaaattccataggatgttcaaccatgttttcagaggccgcactgcatgaatgcgggaaaatgttgatgatcactaatcaataatctgatatttaacaaaatatggacaggccacttatgctcagttttaccttagttattccttggtatccacaggcccaagtccctttaaataaaataccctcatatttccatataatctacatacattctcccatatactttaaatcatctctagattacttataatgtctaatacaaaataaatgctatgtaaatgtaattaaaata

SEQ ID NO: 287770 - DNA, 2494 bp, Homo sapiens
gctggtaccggccggagatttatggatcggggctgtctggctcggttacgcccccacctcgccaggaatctaggagtcggtttgttttccgaacccatctccttccgctctcccgcccctgcaggctgtgtgccgagcttggaagaaagtgtgacccgttcgacggaacaaaggacatgacagcccggccccgtgcggccactgcggagcgttaggaacattccctaaaatggcggccggcgcgtcggaacagggcgggaggcggcggcgcgtgggggcgggacggggaggggcgcggccagccgggcttctgcttccgcgaccccggcggtgcagggcgggtggagtcgcggagtagtcctcatggccgccccgccggagcccggtgagcccgaggagaggaaggtagaattagaagatcatgtgatgttggagtaggagggtttatcttggtgactttgggatgctggtttcattgtaggtataattatgcaaagcaaagaatccaggaaagaattgccagagaagaaattaaaaagaagatattatatgaaggtacccacctcgatcctgaaagaaaacacaacggcagcagcagcaattgaacaatcttgagcatagaagtcaatgtaaacgaagttaagatcaaccacataaaacatttcatgtgcaataagctctcaatcaagtaaataaagtttaagttgtagtcatttttttcccacacttgtgtggaatgaaaacttgccagtttattctggccctgtgtctactgccaggatagcattcttacgtgttacatatagtggacttgtcatccttaaaatgtgaacagaatttattggcagtgtggcaaagaattataaaacatagtgtttaatgtacttggagtttccttgtagtagtaagtatagagtttgatgataagtaaacgtcccttaacaaaaacctcaaccttattactatcccattaaaaaacagcaaatacttactgagttcttgtaagagctaatgtcattgtaagatttaaaactaagggcttttatcactttgcaaattattttttaaatgcattcatcatttgacagtgttctctcatttcttaaaatgcgagtcatcttccaaaagagttgtttttaactgccctaaacatttttggggaagtatgcagggtttaaatttttaagtataattagttctgaattaaaatatgcacatggaacttgtctggcagactgatgcaatagtaaaacaactgcagaattactattaatgtaaacaatccatttgaaagtcaatcagctgctcccattaaaatattatttaaaatacaatacccacagcatctaactaaatcctcaggatttattctccgggagaaattatccctttctaggaaaatgaagttatttctggttttaattcatacaatactttaagaaaatctgttaaatataacaaaacacaagctagatgcttaagaaatgcttaaagaaatattggggcgaaggtaacagcagtcaacaggattgtggccattactggtcctattattttgatgtaccatggaaggcacagaaatcgagcaaggaagaaaatattagttattttgatctacatctttttctaaagaaaagtggagcttgcctccagttcaattcacaagagcattttccctcccatgcccaccttttcttgtggctgtcgctaggaaggatgcagaggctgtgtggtttaccaaatgccttaacttagcagtgaatgacaactgtcaaacacatgttgagggaaaatttttactgattcacaaaaaggaagacagtttgcccactcttagtggcacaaatcaaagctgcatgcactacattatccaaattagtcgtaaccaaatagttaaaaaattctgctgggcacggtggctcatacctgtaatcccagcactttgggaggccgaggcagttggatcacctgaggttaggagtttgagaccagcctggccaacagggtgaaaccctgtctcgtctaaaaatacaaaaattagccgggcgtggtggtgcatgcctgtagtcccaggtactcaggaggctgaggcaggagaatcacttgaacccgaggtggggcaggcggaggttgcagtaagccaagatcgcgccattgcactctagcctaggtgacagagtgagactccatctcaaaaaaaaaaaaaaattccataggatgttcaaccatgttttcagaggccgcactgcatgaatgcgggaaaatgttgatgatcactaatcaataatctgatatttaacaaaatatggacaggccacttatgctcagttttaccttagttattccttggtatccacaggcccaagtccctttaaataaaataccctcatatttccatataatctacatacattctcccatatactttaaatcatctctagattacttataatgtctaatacaaaataaatgctatgtaaatgtaattaaaata

SEQ ID NO: 287771 - DNA, 3359 bp, Homo sapiens
atccctcctttccatcaaatcaattggccaccaatggtactggacctacgagtacaccgactacggcggactaatcttcaactcctacatacttccccccttattcctagaaccaaggcgacctgtgactcgtggaaatgtccacgtggacatttccacgttgtcacgtggcacatactctagtttaaaccctcaactacaagaaaagaaatggtgtattgtcatttttgccaaagcaccccaaaatgaaatactttcttactcaatctaggttcttttttttcattctagtcccttaagctcctaggatttttagatgttgaaaatactccctgcgcccggcattcaatattgtatggttcattaggatctgttgtggctggctttggacattttttgttcactagtgagtatctgtattttttatttctctatgtactaaaaaaagcatttctctacataatgaactatttttttttctaggtggagtaatgtatataacgtaattatattctaattaattgttatgcttatttttacaggtagaattagaagatcatgtgatgttggagtaggagggtttatcttggtgactttgggatgctggtatgtttgctaagtattcaagaacatccatgattatagtaggttatctaattcaaaaagcacatgctcttttcagagcagtctcccattgggagatcctcaccctcaatgaagaatcttgatttttcaggacattttcatggaaatcttaaaatgcttgaacagataaatgcatattagacatcccattaaaaagaaagctgtggtttttacacttcacttaggaaagcctcaaccatttcccttaccctaatacttatttcatccctgcttattcatatctgaaaatgctactttaagaatgtgtttacaactactgatgagtgaatataaaatatggatgaacctcaaatatttgccagacctaagagtatgatatgtatgtactatatggttatgtagacatagcattattatcccgttaaaaacgagagcaaatacttgtttcttataatagccaatgctatcagaagacttaaaaactaatggattttatcactttacaaattgttatgtagacatcctttttttcctaataaaaaaagaatgtgttgataggtattctgacaccaaaactgcccaaaaatagcactataaattagaacatatttttcagtctcagggtagtagtcatctgtatttaagttttgtgtgatttagagaaatttcataaattaatttctgtaggactttatattaacaatttattcatattcttttcttctaaggtttcattgtaggtataattatgcaaagcaaagaatccaggaaagaattgccagagaagaaattaaaaagaagatattatatgaaggtacccacctcgatcctgaaagaaaacacaacggcagcagcagcaattgaacaatcttgagcatagaagtcaatgtaaacgaagttaagatcaaccacataaaacatttcatgtgcaataagctctcaatcaagtaaataaagtttaagttgtagtcatttttttcccacacttgtgtggaatgaaaacttgccagtttattctggccctgtgtctactgccaggatagcattcttacgtgttacatatagtggacttgtcatccttaaaatgtgaacagaatttattggcagtgtggcaaagaattataaaacatagtgtttaatgtacttggagtttccttgtagtagtaagtatagagtttgatgataagtaaacgtcccttaacaaaaacctcaaccttattactatcccattaaaaaacagcaaatacttactgagttcttgtaagagctaatgtcattgtaagatttaaaactaagggcttttatcactttgcaaattattttttaaatgcattcatcatttgacagtgttctctcatttcttaaaatgcgagtcatcttccaaaagagttgtttttaactgccctaaacatttttggggaagtatgcagggtttaaatttttaagtataattagttctgaattaaaatatgcacatggaacttgtctggcagactgatgcaatagtaaaacaactgcagaattactattaatgtaaacaatccatttgaaagtcaatcagctgctcccattaaaatattatttaaaatacaatacccacagcatctaactaaatcctcaggatttattctccgggagaaattatccctttctaggaaaatgaagttatttctggttttaattcatacaatactttaagaaaatctgttaaatataacaaaacacaagctagatgcttaagaaatgcttaaagaaatattggggcgaaggtaacagcagtcaacaggattgtggccattactggtcctattattttgatgtaccatggaaggcacagaaatcgagcaaggaagaaaatattagttattttgatctacatctttttctaaagaaaagtggagcttgcctccagttcaattcacaagagcattttccctcccatgcccaccttttcttgtggctgtcgctaggaaggatgcagaggctgtgtggtttaccaaatgccttaacttagcagtgaatgacaactgtcaaacacatgttgagggaaaatttttactgattcacaaaaaggaagacagtttgcccactcttagtggcacaaatcaaagctgcatgcactacattatccaaattagtcgtaaccaaatagttaaaaaattctgctgggcacggtggctcatacctgtaatcccagcactttgggaggccgaggcagttggatcacctgaggttaggagtttgagaccagcctggccaacagggtgaaaccctgtctcgtctaaaaatacaaaaattagccgggcgtggtggtgcatgcctgtagtcccaggtactcaggaggctgaggcaggagaatcacttgaacccgaggtggggcaggcggaggttgcagtaagccaagatcgcgccattgcactctagcctaggtgacagagtgagactccatctcaaaaaaaaaaaaaaattccataggatgttcaaccatgttttcagaggccgcactgcatgaatgcgggaaaatgttgatgatcactaatcaataatctgatatttaacaaaatatggacaggccacttatgctcagttttaccttagttattccttggtatccacaggcccaagtccctttaaataaaataccctcatatttccatataatctacatacattctcccatatactttaaatcatctctagattacttataatgtctaatacaaaataaatgctatgtaaatgtaattaaaata

SEQ ID NO: 287772 - DNA, 4015 bp, Homo sapiens
  misc_feature (3695)..(3695): n is a, c, g, or t
ccacttctgagcattttacagttcagtgtacttaactgtaaaggtatacaggctcaagtcgttgcatattcttcctgttttgatagaaattgcagggatttatgtactgaatcttattactccttagatatgtgacaactggaaagctccccaccaaaccctccagccttggttacttcttaatgatgtggtttggcacaatgaaaatgtcataggctttgtggtgaaactgacttctgcctccactcctgccaacacttattattagcctcttaagtccccgagcctgtttcagaggtaatctcacacaaaggctagagaattaaaaaacatgtagagagcctggcactaatacctacctcccccaccagcagctcttaattatgagatcaaccactattattttagaccagagttttgttggggattgggtttgtttcagaaggcactattttaaataagatgtgtagcttctatttagatatttgcctttaaagtcagctgagctattttcctattgtttgcaaatttacttttatttaaaaaaataaaatttcctaaagcagtgtttccccaatatgacagtcatcagaaaaaaccacctagagttttctaaacatagattccagtgattgtaaatcagaatctgagagtgggactagaaaatacttaattctatcctgtggtacaagctggtctcacacttgcatctttgcacctaagactagatcaaactggtactaatcctctggccccagcatcccatccttggggaaatagtctagtttagaggtagtcctggactggagcgctaagtccagcattcctcacctgcataacactacccacatgatcatatgtcccctgggctctcaagctgataggaaaaagtcgtcttgctaaatgaaatcccccaacctcttggtaatgtgaagaactgtactgcaaagctttgaagcaatcctatgttaggcatgcgggtgggaacggggccagacagagggaaaaaatggaatagaatgatccgagagtaaataattcttgctttattatgaaccaagtcacattttgtctcttccaacagatgcttgagccaaaaaagcaaacataggcagaaatacaattgagaatatcttcatgtttcaacctttaatctgacttgccttttactatcctttccccatttcttctaatctcttttgccttacaatatattaccttctaggtatcacctcatcctatagaatcccttctagtttaatgtcctgccccaaacaatactaacccattgaagataactatgaaacctttaaatggacagtggttccttttaaaagcagccttactgaaaattttatatacacttaaatcaagtaacagttaccgtgagttttctaaacttttgtgttaacagaaatgccagttcagcagtgtgactgttacttttaaatgtctgtcttgccgccctagagtgacagacatcccagttaaacatattaggaataagaaatacataaatccaatgaagactgtagaaaaagaattttagcacttgaaggaacttcagtcatttaacccaacccattcatgttatagattgagaccatagaaataaaagtagcctataggatacaaaagttagcggcagatctgagataaaaatccagctctttggatccccgcgtttttcaccacacttagctgtcgttcccatgtattacgaacaaagaatcaaatataatcaagtgcagcctcacttcacaggcaagaaaacagactagagtttaatatattgcccatgtttatcttaaggtgaaacatttactcttacaaccacagttgatgttaacctagttaataaaatatgaaaggtaattactaggggaattttaaacggcactacataagcaaacatgactcaaattactttttccatttctgcttcccaaattattggagttactgaagcaagctatgctgctttcaattccaatgataggcatattcccaaataaactcatttaaagagctcataaaatgaattatcctatttccaagtcagttgattagcaaattaagatacagctccaagttaccctactgcttaagggttttccggtccaatttgtaaggttttcggatttaaagattcagactgcataccaaaggtggacaaagacaacgcaagctgatttaggttgtcacgtggcacatactctagtttaaaccctcaactacaagaaaagaaatggtgtattgtcatttttgccaaagcaccccaaaatgaaatactttcttactcaatctaggttcttttttttcattctagtcccttaagctcctaggatttttagatgttgaaaatactccctgcgcccggcattcaatattgtatggttcattaggatctgttgtggctggctttggacattttttgttcactagtgagtatctgtattttttatttctctatgtactaaaaaaagcatttctctacataatgaactatttttttttctaggtggagtaatgtatataacgtaattatattctaattaattgttatgcttatttttacaggtagaattagaagatcatgtgatgttggagtaggagggtttatcttggtgactttgggatgctggtatgtttgctaagtattcaagaacatccatgattatagtaggttatctaattcaaaaagcacatgctcttttcagagcagtctcccattgggagatcctcaccctcaatgaagaatcttgatttttcaggacattttcatggaaatcttaaaatgcttgaacagataaatgcatattagacatcccattaaaaagaaagctgtggtttttacacttcacttaggaaagcctcaaccatttcccttaccctaatacttatttcatccctgcttattcatatctgaaaatgctactttaagaatgtgtttacaactactgatgagtgaatataaaatatggatgaacctcaaatatttgccagacctaagagtatgatatgtatgtactatatggttatgtagacatagcattattatcccgttaaaaacgagagcaaatacttgtttcttataatagccaatgctatcagaagacttaaaaactaatggattttatcactttacaaattgttatgtagacatcctttttttcctaataaaaaaagaatgtgttgataggtattctgacaccaaaactgcccaaaaatagcactataaattagaacatatttttcagtctcagggtagtagtcatctgtatttaagttttgtgtgatttagagaaatttcataaattaatttctgtaggactttatattaacaatttattcatattcttttcttctaaggtttcattgtaggtataattatgcaaagcaaagaatccaggaaagaattgccagagaagaaattaaaaagaagatattatatgaaggtacccacctcgatcctgaaagaaaacacaacggcagcagcagcaattgaacaatcttgagcatagaagtcaatgtaaacgaagttaagatcaaccacataaaacatttcatgtgcaataagctctcaatcaagtaaataaagtttaagttgtagtcaaaaaaaaaaaaaaaaaaaaaaaaaaaaaaaaaaaaaaaaaaaaaaaaaaaaaaaaaaaaaaaaaaaaaaaaaaaaaaanaaaaaaaaaaaaaaaaaaaggggggggggggggcggaaaaaaaccccgggggggggggaaagagacgtaccacccaccaatcattttaagaaaaaagcggcgccaaacaaggagggcaaataataaaagagagcacggccgagcgataaaacacggcgaggggagagcacagcctcgagtggagctgtagggaacaccacctcgtcgggggggaaaacagaggagacccaccacaagagaaaacgcgcgaggacaaacaacacgcgggtggagggcagcccagcctctggcgagaaagctgccagaatgaaaaaaataag

SEQ ID NO: 287773 - DNA, 2980 bp, Homo sapiens
  misc_feature (1)..(1): n is a, c, g, or t
  misc_feature (12)..(12): n is a, c, g, or t
  misc_feature (19)..(19): n is a, c, g, or t
naaaatactccntgcgccntggttcatgtgagtatctgtattttttatttctctatgtactaaaaaaagcatttctctacataatgaactatttttttttctaggtggagtaatgtatataacgtaattatattctaattaattgttatgcttatttttacaggtagaattagaagatcatgtgatgttggagtaggagggtttatcttggtgactttgggatgctggtatgtttgctaagtattcaagaacatccatgattatagtaggttatctaattcaaaaagcacatgctcttttcagagcagtctcccattgggagatcctcaccctcaatgaagaatcttgatttttcaggacattttcatggaaatcttaaaatgcttgaacagataaatgcatattagacatcccattaaaaagaaagctgtggtttttacacttcacttaggaaagcctcaaccatttcccttaccctaatacttatttcatccctgcttattcatatctgaaaatgctactttaagaatgtgtttacaactactgatgagtgaatataaaatatggatgaacctcaaatatttgccagacctaagagtatgatatgtatgtactatatggttatgtagacatagcattattatcccgttaaaaacgagagcaaatacttgtttcttataatagccaatgctatcagaagacttaaaaactaatggattttatcactttacaaattgttatgtagacatcctttttttcctaataaaaaaagaatgtgttgataggtattctgacaccaaaactgcccaaaaatagcactataaattagaacatatttttcagtctcagggtagtagtcatctgtatttaagttttgtgtgatttagagaaatttcataaattaatttctgtaggactttatattaacaatttattcatattcttttcttctaaggtttcattgtaggtataattatgcaaagcaaagaatccaggaaagaattgccagagaagaaattaaaaagaagatattatatgaaggtacccacctcgatcctgaaagaaaacacaacggcagcagcagcaattgaacaatcttgagcatagaagtcaatgtaaacgaagttaagatcaaccacataaaacatttcatgtgcaataagctctcaatcaagtaaataaagtttaagttgtagtcatttttttcccacacttgtgtggaatgaaaacttgccagtttattctggccctgtgtctactgccaggatagcattcttacgtgttacatatagtggacttgtcatccttaaaatgtgaacagaatttattggcagtgtggcaaagaattataaaacatagtgtttaatgtacttggagtttccttgtagtagtaagtatagagtttgatgataagtaaacgtcccttaacaaaaacctcaaccttattactatcccattaaaaaacagcaaatacttactgagttcttgtaagagctaatgtcattgtaagatttaaaactaagggcttttatcactttgcaaattattttttaaatgcattcatcatttgacagtgttctctcatttcttaaaatgcgagtcatcttccaaaagagttgtttttaactgccctaaacatttttggggaagtatgcagggtttaaatttttaagtataattagttctgaattaaaatatgcacatggaacttgtctggcagactgatgcaatagtaaaacaactgcagaattactattaatgtaaacaatccatttgaaagtcaatcagctgctcccattaaaatattatttaaaatacaatacccacagcatctaactaaatcctcaggatttattctccgggagaaattatccctttctaggaaaatgaagttatttctggttttaattcatacaatactttaagaaaatctgttaaatataacaaaacacaagctagatgcttaagaaatgcttaaagaaatattggggcgaaggtaacagcagtcaacaggattgtggccattactggtcctattattttgatgtaccatggaaggcacagaaatcgagcaaggaagaaaatattagttattttgatctacatctttttctaaagaaaagtggagcttgcctccagttcaattcacaagagcattttccctcccatgcccaccttttcttgtggctgtcgctaggaaggatgcagaggctgtgtggtttaccaaatgccttaacttagcagtgaatgacaactgtcaaacacatgttgagggaaaatttttactgattcacaaaaaggaagacagtttgcccactcttagtggcacaaatcaaagctgcatgcactacattatccaaattagtcgtaaccaaatagttaaaaaattctgctgggcacggtggctcatacctgtaatcccagcactttgggaggccgaggcagttggatcacctgaggttaggagtttgagaccagcctggccaacagggtgaaaccctgtctcgtctaaaaatacaaaaattagccgggcgtggtggtgcatgcctgtagtcccaggtactcaggaggctgaggcaggagaatcacttgaacccgaggtggggcaggcggaggttgcagtaagccaagatcgcgccattgcactctagcctaggtgacagagtgagactccatctcaaaaaaaaaaaaaaattccataggatgttcaaccatgttttcagaggccgcactgcatgaatgcgggaaaatgttgatgatcactaatcaataatctgatatttaacaaaatatggacaggccacttatgctcagttttaccttagttattccttggtatccacaggcccaagtccctttaaataaaataccctcatatttccatataatctacatacattctcccatatactttaaatcatctctagattacttataatgtctaatacaaaataaatgctatgtaaatgtaattaaaata

SEQ ID NO: 287774 - DNA, 3920 bp, Homo sapiens
ccacttctgagcattttacagttcagtgtacttaactgtaaaggtatacaggctcaagtcgttgcatattcttcctgttttgatagaaattgcagggatttatgtactgaatcttattactccttagatatgtgacaactggaaagctccccaccaaaccctccagccttggttacttcttaatgatgtggtttggcacaatgaaaatgtcataggctttgtggtgaaactgacttctgcctccactcctgccaacacttattattagcctcttaagtccccgagcctgtttcagaggtaatctcacacaaaggctagagaattaaaaaacatgtagagagcctggcactaatacctacctcccccaccagcagctcttaattatgagatcaaccactattattttagaccagagttttgttggggattgggtttgtttcagaaggcactattttaaataagatgtgtagcttctatttagatatttgcctttaaagtcagctgagctattttcctattgtttgcaaatttacttttatttaaaaaaataaaatttcctaaagcagtgtttccccaatatgacagtcatcagaaaaaaccacctagagttttctaaacatagattccagtgattgtaaatcagaatctgagagtgggactagaaaatacttaattctatcctgtggtacaagctggtctcacacttgcatctttgcacctaagactagatcaaactggtactaatcctctggccccagcatcccatccttggggaaatagtctagtttagaggtagtcctggactggagcgctaagtccagcattcctcacctgcataacactacccacatgatcatatgtcccctgggctctcaagctgataggaaaaagtcgtcttgctaaatgaaatcccccaacctcttggtaatgtgaagaactgtactgcaaagctttgaagcaatcctatgttaggcatgcgggtgggaacggggccagacagagggaaaaaatggaatagaatgatccgagagtaaataattcttgctttattatgaaccaagtcacattttgtctcttccaacagatgcttgagccaaaaaagcaaacataggcagaaatacaattgagaatatcttcatgtttcaacctttaatctgacttgccttttactatcctttccccatttcttctaatctcttttgccttacaatatattaccttctaggtatcacctcatcctatagaatcccttctagtttaatgtcctgccccaaacaatactaacccattgaagataactatgaaacctttaaatggacagtggttccttttaaaagcagccttactgaaaattttatatacacttaaatcaagtaacagttaccgtgagttttctaaacttttgtgttaacagaaatgccagttcagcagtgtgactgttacttttaaatgtctgtcttgccgccctagagtgacagacatcccagttaaacatattaggaataagaaatacataaatccaatgaagactgtagaaaaagaattttagcacttgaaggaacttcagtcatttaacccaacccattcatgttatagattgagaccatagaaataaaagtagcctataggatacaaaagttagcggcagatctgagataaaaatccagctctttggatccccgcgtttttcaccacacttagctgtcgttcccatgtattacgaacaaagaatcaaatataatcaagtgcagcctcacttcacaggcaagaaaacagactagagtttaatatattgcccatgtttatcttaaggtgaaacatttactcttacaaccacagttgatgttaacctagttaataaaatatgaaaggtaattactaggggaattttaaacggcactacataagcaaacatgactcaaattactttttccatttctgcttcccaaattattggagttactgaagcaagctatgctgctttcaattccaatgataggcatattcccaaataaactcatttaaagagctcataaaatgaattatcctatttccaagtcagttgattagcaaattaagatacagctccaagttaccctactgcttaagggttttccggtccaatttgtaaggttttcggatttaaagattcagactgcataccaaaggtggacaaagacaacgcaagctgatttaggttgtcacgtggcacatactctagtttaaaccctcaactacaagaaaagaaatggtgtattgtcatttttgccaaagcaccccaaaatgaaatactttcttactcaatctaggttcttttttttcattctagtcccttaagctcctaggatttttagatgttgaaaatactccctgcgcccggcattcaatattgtatggttcattaggatctgttgtggctggctttggacattttttgttcactagtgagtatctgtattttttatttctctatgtactaaaaaaagcatttctctacataatgaactatttttttttctaggtggagtaatgtatataacgtaattatattctaattaattgttatgcttatttttacaggtagaattagaagatcatgtgatgttggagtaggagggtttatcttggtgactttgggatgctggtatgtttgctaagtattcaagaacatccatgattatagtaggttatctaattcaaaaagcacatgctcttttcagagcagtctcccattgggagatcctcaccctcaatgaagaatcttgatttttcaggacattttcatggaaatcttaaaatgcttgaacagataaatgcatattagacatcccattaaaaagaaagctgtggtttttacacttcacttaggaaagcctcaaccatttcccttaccctaatacttatttcatccctgcttattcatatctgaaaatgctactttaagaatgtgtttacaactactgatgagtgaatataaaatatggatgaacctcaaatatttgccagacctaagagtatgatatgtatgtactatatggttccatttatacatgaatttctacagtgagctatttaaggtggtagaaatcatgttatgtagacatagcattattatcccgttaaaaacgagagcaaatacttgtttcttataatagccaatgctatcagaagacttaaaaactaatggattttatcactttacaaattgttatgtagacatcctttttttcctaataaaaaaagaatgtgttgataggtattctgacaccaaaactgcccaaaaatagcactataaattagaacatatttttcagtctcagggtagtagtcatctgtatttaagttttgtgtgatttagagaaatttcataaattaatttctgtaggactttatattaacaatttattcatattcttttcttctaaggtttcattgtaggtataattatgcaaagcaaagaatccaggaaagaattgccagagaagaaattaaaaagaagatattatatgaaggtacccacctcgatcctgaaagaaaacacaacggcagcagcagcaattgaacaatgaagcaggaagcggcagaagcaggaagcagccgggcggcagaagcaggaagcaggcagaagcaggaagcaggcagaagcaggaagcaagggtcttgggcagaagcaggaagcgcttcctgcttctgcccttcctgcttctgcttcctgcttctgcctcagggtcgtcaaaaaaaaccttccggtaacgcttccgcggtgttttctctcctttccaccactttttcatgtatttctgcttcctgcttctgcctggggcatggtgggttttgatcttcttccccttcttttcttccccttcttctttcctctttgatcttcgtgcttcctgcttctgccaggtctgtgacggacc

SEQ ID NO: 287775 - DNA, 2702 bp, Homo sapiens
gggagctggtatggctaagtaccagagcagtctcccattgggagatcctcaccctcaatgaagaatcttgatttttcaggacattttcatggaaatcttaaaatgcttgaacagataaatgcatattagacatcccattaaaaagaaagctgtggtttttacacttcacttaggaaagcctcaaccatttcccttaccctaatacttatttcatccctgcttattcatatctgaaaatgctactttaagaatgtgtttacaactactgatgagtgaatataaaatatggatgaacctcaaatatttgccagacctaagagtatgatatgtatgtactatatggttatgtagacatagcattattatcccgttaaaaacgagagcaaatacttgtttcttataatagccaatgctatcagaagacttaaaaactaatggattttatcactttacaaattgttatgtagacatcctttttttcctaataaaaaaagaatgtgttgataggtattctgacaccaaaactgcccaaaaatagcactataaattagaacatatttttcagtctcagggtagtagtcatctgtatttaagttttgtgtgatttagagaaatttcataaattaatttctgtaggactttatattaacaatttattcatattcttttcttctaaggtttcattgtaggtataattatgcaaagcaaagaatccaggaaagaattgccagagaagaaattaaaaagaagatattatatgaaggtacccacctcgatcctgaaagaaaacacaacggcagcagcagcaattgaacaatcttgagcatagaagtcaatgtaaacgaagttaagatcaaccacataaaacatttcatgtgcaataagctctcaatcaagtaaataaagtttaagttgtagtcatttttttcccacacttgtgtggaatgaaaacttgccagtttattctggccctgtgtctactgccaggatagcattcttacgtgttacatatagtggacttgtcatccttaaaatgtgaacagaatttattggcagtgtggcaaagaattataaaacatagtgtttaatgtacttggagtttccttgtagtagtaagtatagagtttgatgataagtaaacgtcccttaacaaaaacctcaaccttattactatcccattaaaaaacagcaaatacttactgagttcttgtaagagctaatgtcattgtaagatttaaaactaagggcttttatcactttgcaaattattttttaaatgcattcatcatttgacagtgttctctcatttcttaaaatgcgagtcatcttccaaaagagttgtttttaactgccctaaacatttttggggaagtatgcagggtttaaatttttaagtataattagttctgaattaaaatatgcacatggaacttgtctggcagactgatgcaatagtaaaacaactgcagaattactattaatgtaaacaatccatttgaaagtcaatcagctgctcccattaaaatattatttaaaatacaatacccacagcatctaactaaatcctcaggatttattctccgggagaaattatccctttctaggaaaatgaagttatttctggttttaattcatacaatactttaagaaaatctgttaaatataacaaaacacaagctagatgcttaagaaatgcttaaagaaatattggggcgaaggtaacagcagtcaacaggattgtggccattactggtcctattattttgatgtaccatggaaggcacagaaatcgagcaaggaagaaaatattagttattttgatctacatctttttctaaagaaaagtggagcttgcctccagttcaattcacaagagcattttccctcccatgcccaccttttcttgtggctgtcgctaggaaggatgcagaggctgtgtggtttaccaaatgccttaacttagcagtgaatgacaactgtcaaacacatgttgagggaaaatttttactgattcacaaaaaggaagacagtttgcccactcttagtggcacaaatcaaagctgcatgcactacattatccaaattagtcgtaaccaaatagttaaaaaattctgctgggcacggtggctcatacctgtaatcccagcactttgggaggccgaggcagttggatcacctgaggttaggagtttgagaccagcctggccaacagggtgaaaccctgtctcgtctaaaaatacaaaaattagccgggcgtggtggtgcatgcctgtagtcccaggtactcaggaggctgaggcaggagaatcacttgaacccgaggtggggcaggcggaggttgcagtaagccaagatcgcgccattgcactctagcctaggtgacagagtgagactccatctcaaaaaaaaaaaaaaattccataggatgttcaaccatgttttcagaggccgcactgcatgaatgcgggaaaatgttgatgatcactaatcaataatctgatatttaacaaaatatggacaggccacttatgctcagttttaccttagttattccttggtatccacaggcccaagtccctttaaataaaataccctcatatttccatataatctacatacattctcccatatactttaaatcatctctagattacttataatgtctaatacaaaataaatgctatgtaaatgtaattaaaata

SEQ ID NO: 287776 - DNA, 2801 bp, Homo sapiens
  misc_feature (15)..(15): n is a, c, g, or t
  misc_feature (23)..(23): n is a, c, g, or t
  misc_feature (29)..(29): n is a, c, g, or t
  misc_feature (34)..(35): n is a, c, g, or t
gtaaaaaaattttanaaagtggngttttnaaggnntgttatctaattcaaaaagcacatgctcttttcagagcagtctcccattgggagatcctcaccctcaatgaagaatcttgatttttcaggacattttcatggaaatcttaaaatgcttgaacagataaatgcatattagacatcccattaaaaagaaagctgtggtttttacacttcacttaggaaagcctcaaccatttcccttaccctaatacttatttcatccctgcttattcatatctgaaaatgctactttaagaatgtgtttacaactactgatgagtgaatataaaatatggatgaacctcaaatatttgccagacctaagagtatgatatgtatgtactatatggttccatttatacatgaatttctacagtgagctatttaaggtggtagaaatcatgttatgtagacatagcattattatcccgttaaaaacgagagcaaatacttgtttcttataatagccaatgctatcagaagacttaaaaactaatggattttatcactttacaaattgttatgtagacatcctttttttcctaataaaaaaagaatgtgttgataggtattctgacaccaaaactgcccaaaaatagcactataaattagaacatatttttcagtctcagggtagtagtcatctgtatttaagttttgtgtgatttagagaaatttcataaattaatttctgtaggactttatattaacaatttattcatattcttttcttctaaggtttcattgtaggtataattatgcaaagcaaagaatccaggaaagaattgccagagaagaaattaaaaagaagatattatatgaaggtacccacctcgatcctgaaagaaaacacaacggcagcagcagcaattgaacaatcttgagcatagaagtcaatgtaaacgaagttaagatcaaccacataaaacatttcatgtgcaataagctctcaatcaagtaaataaagtttaagttgtagtcatttttttcccacacttgtgtggaatgaaaacttgccagtttattctggccctgtgtctactgccaggatagcattcttacgtgttacatatagtggacttgtcatccttaaaatgtgaacagaatttattggcagtgtggcaaagaattataaaacatagtgtttaatgtacttggagtttccttgtagtagtaagtatagagtttgatgataagtaaacgtcccttaacaaaaacctcaaccttattactatcccattaaaaaacagcaaatacttactgagttcttgtaagagctaatgtcattgtaagatttaaaactaagggcttttatcactttgcaaattattttttaaatgcattcatcatttgacagtgttctctcatttcttaaaatgcgagtcatcttccaaaagagttgtttttaactgccctaaacatttttggggaagtatgcagggtttaaatttttaagtataattagttctgaattaaaatatgcacatggaacttgtctggcagactgatgcaatagtaaaacaactgcagaattactattaatgtaaacaatccatttgaaagtcaatcagctgctcccattaaaatattatttaaaatacaatacccacagcatctaactaaatcctcaggatttattctccgggagaaattatccctttctaggaaaatgaagttatttctggttttaattcatacaatactttaagaaaatctgttaaatataacaaaacacaagctagatgcttaagaaatgcttaaagaaatattggggcgaaggtaacagcagtcaacaggattgtggccattactggtcctattattttgatgtaccatggaaggcacagaaatcgagcaaggaagaaaatattagttattttgatctacatctttttctaaagaaaagtggagcttgcctccagttcaattcacaagagcattttccctcccatgcccaccttttcttgtggctgtcgctaggaaggatgcagaggctgtgtggtttaccaaatgccttaacttagcagtgaatgacaactgtcaaacacatgttgagggaaaatttttactgattcacaaaaaggaagacagtttgcccactcttagtggcacaaatcaaagctgcatgcactacattatccaaattagtcgtaaccaaatagttaaaaaattctgctgggcacggtggctcatacctgtaatcccagcactttgggaggccgaggcagttggatcacctgaggttaggagtttgagaccagcctggccaacagggtgaaaccctgtctcgtctaaaaatacaaaaattagccgggcgtggtggtgcatgcctgtagtcccaggtactcaggaggctgaggcaggagaatcacttgaacccgaggtggggcaggcggaggttgcagtaagccaagatcgcgccattgcactctagcctaggtgacagagtgagactccatctcaaaaaaaaaaaaaaattccataggatgttcaaccatgttttcagaggccgcactgcatgaatgcgggaaaatgttgatgatcactaatcaataatctgatatttaacaaaatatggacaggccacttatgctcagttttaccttagttattccttggtatccacaggcccaagtccctttaaataaaataccctcatatttccatataatctacatacattctcccatatactttaaatcatctctagattacttataatgtctaatacaaaataaatgctatgtaaatgtaattaaaata

SEQ ID NO: 287777 - DNA, 2589 bp, Homo sapiens
gctggtaccggccggagatttatggatcggggctgtctggctcggttacgcccccacctcgccaggaatctaggagtcggtttgttttccgaacccatctccttccgctctcccgcccctgcaggctgtgtgccgagcttggaagaaagtgtgacccgttcgacggaacaaaggacatgacagcccggccccgtgcggccactgcggagcgttaggaacattccctaaaatggcggccggcgcgtcggaacagggcgggaggcggcggcgcgtgggggcgggacggggaggggcgcggccagccgggcttctgcttccgcgaccccggcggtgcagggcgggtggagtcgcggagtagtcctcatggccgccccgccggagcccgtcccttaagctcctaggatttttagatgttgaaaatactccctgcgcccggcattcaatattgtatggttcattaggatctgttgtggctggctttggacattttttgttcactagtagaattagaagatcatgtgatgttggagtaggagggtttatcttggtgactttgggatgctggtttcattgtaggtataattatgcaaagcaaagaatccaggaaagaattgccagagaagaaattaaaaagaagatattatatgaaggtacccacctcgatcctgaaagaaaacacaacggcagcagcagcaattgaacaatcttgagcatagaagtcaatgtaaacgaagttaagatcaaccacataaaacatttcatgtgcaataagctctcaatcaagtaaataaagtttaagttgtagtcatttttttcccacacttgtgtggaatgaaaacttgccagtttattctggccctgtgtctactgccaggatagcattcttacgtgttacatatagtggacttgtcatccttaaaatgtgaacagaatttattggcagtgtggcaaagaattataaaacatagtgtttaatgtacttggagtttccttgtagtagtaagtatagagtttgatgataagtaaacgtcccttaacaaaaacctcaaccttattactatcccattaaaaaacagcaaatacttactgagttcttgtaagagctaatgtcattgtaagatttaaaactaagggcttttatcactttgcaaattattttttaaatgcattcatcatttgacagtgttctctcatttcttaaaatgcgagtcatcttccaaaagagttgtttttaactgccctaaacatttttggggaagtatgcagggtttaaatttttaagtataattagttctgaattaaaatatgcacatggaacttgtctggcagactgatgcaatagtaaaacaactgcagaattactattaatgtaaacaatccatttgaaagtcaatcagctgctcccattaaaatattatttaaaatacaatacccacagcatctaactaaatcctcaggatttattctccgggagaaattatccctttctaggaaaatgaagttatttctggttttaattcatacaatactttaagaaaatctgttaaatataacaaaacacaagctagatgcttaagaaatgcttaaagaaatattggggcgaaggtaacagcagtcaacaggattgtggccattactggtcctattattttgatgtaccatggaaggcacagaaatcgagcaaggaagaaaatattagttattttgatctacatctttttctaaagaaaagtggagcttgcctccagttcaattcacaagagcattttccctcccatgcccaccttttcttgtggctgtcgctaggaaggatgcagaggctgtgtggtttaccaaatgccttaacttagcagtgaatgacaactgtcaaacacatgttgagggaaaatttttactgattcacaaaaaggaagacagtttgcccactcttagtggcacaaatcaaagctgcatgcactacattatccaaattagtcgtaaccaaatagttaaaaaattctgctgggcacggtggctcatacctgtaatcccagcactttgggaggccgaggcagttggatcacctgaggttaggagtttgagaccagcctggccaacagggtgaaaccctgtctcgtctaaaaatacaaaaattagccgggcgtggtggtgcatgcctgtagtcccaggtactcaggaggctgaggcaggagaatcacttgaacccgaggtggggcaggcggaggttgcagtaagccaagatcgcgccattgcactctagcctaggtgacagagtgagactccatctcaaaaaaaaaaaaaaattccataggatgttcaaccatgttttcagaggccgcactgcatgaatgcgggaaaatgttgatgatcactaatcaataatctgatatttaacaaaatatggacaggccacttatgctcagttttaccttagttattccttggtatccacaggcccaagtccctttaaataaaataccctcatatttccatataatctacatacattctcccatatactttaaatcatctctagattacttataatgtctaatacaaaataaatgctatgtaaatgtaattaaaata

SEQ ID NO: 287778 - DNA, 2244 bp, Homo sapiens
ccaggcatcttgtacgtcgttacatttatcatattggaagtcccttaagctcctaggatttttagatgttgaaaatactccctgcgcccggcattcaatattgtatggttcattaggatctgttgtggctggctttggacattttttgttcactagtagaattagaagatcatgtgatgttggagtaggagggtttatcttggtgactttgggatgctggtttcattgtaggtataattatgcaaagcaaagaatccaggaaagaattgccagagaagaaattaaaaagaagatattatatgaaggtacccacctcgatcctgaaagaaaacacaacggcagcagcagcaattgaacaatcttgagcatagaagtcaatgtaaacgaagttaagatcaaccacataaaacatttcatgtgcaataagctctcaatcaagtaaataaagtttaagttgtagtcatttttttcccacacttgtgtggaatgaaaacttgccagtttattctggccctgtgtctactgccaggatagcattcttacgtgttacatatagtggacttgtcatccttaaaatgtgaacagaatttattggcagtgtggcaaagaattataaaacatagtgtttaatgtacttggagtttccttgtagtagtaagtatagagtttgatgataagtaaacgtcccttaacaaaaacctcaaccttattactatcccattaaaaaacagcaaatacttactgagttcttgtaagagctaatgtcattgtaagatttaaaactaagggcttttatcactttgcaaattattttttaaatgcattcatcatttgacagtgttctctcatttcttaaaatgcgagtcatcttccaaaagagttgtttttaactgccctaaacatttttggggaagtatgcagggtttaaatttttaagtataattagttctgaattaaaatatgcacatggaacttgtctggcagactgatgcaatagtaaaacaactgcagaattactattaatgtaaacaatccatttgaaagtcaatcagctgctcccattaaaatattatttaaaatacaatacccacagcatctaactaaatcctcaggatttattctccgggagaaattatccctttctaggaaaatgaagttatttctggttttaattcatacaatactttaagaaaatctgttaaatataacaaaacacaagctagatgcttaagaaatgcttaaagaaatattggggcgaaggtaacagcagtcaacaggattgtggccattactggtcctattattttgatgtaccatggaaggcacagaaatcgagcaaggaagaaaatattagttattttgatctacatctttttctaaagaaaagtggagcttgcctccagttcaattcacaagagcattttccctcccatgcccaccttttcttgtggctgtcgctaggaaggatgcagaggctgtgtggtttaccaaatgccttaacttagcagtgaatgacaactgtcaaacacatgttgagggaaaatttttactgattcacaaaaaggaagacagtttgcccactcttagtggcacaaatcaaagctgcatgcactacattatccaaattagtcgtaaccaaatagttaaaaaattctgctgggcacggtggctcatacctgtaatcccagcactttgggaggccgaggcagttggatcacctgaggttaggagtttgagaccagcctggccaacagggtgaaaccctgtctcgtctaaaaatacaaaaattagccgggcgtggtggtgcatgcctgtagtcccaggtactcaggaggctgaggcaggagaatcacttgaacccgaggtggggcaggcggaggttgcagtaagccaagatcgcgccattgcactctagcctaggtgacagagtgagactccatctcaaaaaaaaaaaaaaattccataggatgttcaaccatgttttcagaggccgcactgcatgaatgcgggaaaatgttgatgatcactaatcaataatctgatatttaacaaaatatggacaggccacttatgctcagttttaccttagttattccttggtatccacaggcccaagtccctttaaataaaataccctcatatttccatataatctacatacattctcccatatactttaaatcatctctagattacttataatgtctaatacaaaataaatgctatgtaaatgtaattaaaata

SEQ ID NO: 287779 - DNA, 3056 bp, Homo sapiens
ccacttctgagcattttacagttcagtgtacttaactgtaaaggtatacaggctcaagtcgttgcatattcttcctgttttgatagaaattgcagggatttatgtactgaatcttattactccttagatatgtgacaactggaaagctccccaccaaaccctccagccttggttacttcttaatgatgtggtttggcacaatgaaaatgtcataggctttgtggtgaaactgacttctgcctccactcctgccaacacttattattagcctcttaagtccccgagcctgtttcagaggtaatctcacacaaaggctagagaattaaaaaacatgtagagagcctggcactaatacctacctcccccaccagcagctcttaattatgagatcaaccactattattttagaccagagttttgttggggattgggtttgtttcagaaggcactattttaaataagatgtgtagcttctatttagatatttgcctttaaagtcagctgagctattttcctattgtttgcaaatttacttttatttaaaaaaataaaatttcctaaagcagtgtttccccaatatgacagtcatcagaaaaaaccacctagagttttctaaacatagattccagtgattgtaaatcagaatctgagagtgggactagaaaatacttaattctatcctgtggtacaagctggtctcacacttgcatctttgcacctaagactagatcaaactggtactaatcctctggccccagcatcccatccttggggaaatagtctagtttagaggtagtcctggactggagcgctaagtccagcattcctcacctgcataacactacccacatgatcatatgtcccctgggctctcaagctgataggaaaaagtcgtcttgctaaatgaaatcccccaacctcttggtaatgtgaagaactgtactgcaaagctttgaagcaatcctatgttaggcatgcgggtgggaacggggccagacagagggaaaaaatggaatagaatgatccgagagtaaataattcttgctttattatgaaccaagtcacattttgtctcttccaacagatgcttgagccaaaaaagcaaacataggcagaaatacaattgagaatatcttcatgtttcaacctttaatctgacttgccttttactatcctttccccatttcttctaatctcttttgccttacaatatattaccttctaggtatcacctcatcctatagaatcccttctagtttaatgtcctgccccaaacaatactaacccattgaagataactatgaaacctttaaatggacagtggttccttttaaaagcagccttactgaaaattttatatacacttaaatcaagtaacagttaccgtgagttttctaaacttttgtgttaacagaaatgccagttcagcagtgtgactgttacttttaaatgtctgtcttgccgccctagagtgacagacatcccagttaaacatattaggaataagaaatacataaatccaatgaagactgtagaaaaagaattttagcacttgaaggaacttcagtcatttaacccaacccattcatgttatagattgagaccatagaaataaaagtagcctataggatacaaaagttagcggcagatctgagataaaaatccagctctttggatccccgcgtttttcaccacacttagctgtcgttcccatgtattacgaacaaagaatcaaatataatcaagtgcagcctcacttcacaggcaagaaaacagactagagtttaatatattgcccatgtttatcttaaggtgaaacatttactcttacaaccacagttgatgttaacctagttaataaaatatgaaaggtaattactaggggaattttaaacggcactacataagcaaacatgactcaaattactttttccatttctgcttcccaaattattggagttactgaagcaagctatgctgctttcaattccaatgataggcatattcccaaataaactcatttaaagagctcataaaatgaattatcctatttccaagtcagttgattagcaaattaagatacagctccaagttaccctactgcttaagggttttccggtccaatttgtaaggttttcggatttaaagattcagactgcataccaaaggtggacaaagacaacgcaagctgatttaggttgtcacgtggcacatactctagtttaaaccctcaactacaagaaaagaaatggtgtattgtcatttttgccaaagcaccccaaaatgaaatactttcttactcaatctaggttcttttttttcattctagtcccttaagctcctaggatttttagatgttgaaaatactccctgcgcccggcattcaatattgtatggttcattaggatctgttgtggctggctttggacattttttgttcactagtgagtatctgtattttttatttctctatgtactaaaaaaagcatttctctacataatgaactatttttttttctaggtggagtaatgtatataacgtaattatattctaattaattgttatgcttatttttacaggtagaattagaagatcatgtgatgttggagtaggagggtttatcttggtgactttgggatgctggtttcattgtaggtataattatgcaaagcaaagaatccaggaaagaattgccagagaagaaattaaaaagaagatattatatgaaggtacccacctcgatcctgaaagaaaacacaacggcagcagcagcaattgaacaatacatcatgcatgatgtgattgttctgtttgttatagttagcctgtactccctttttttgttctttgtacttcccctttcattttgagtacatatatgtgtcatttgtaactgcagatttttccaattattcttcctcagtcttttcctttgggtaagtaactcagcatacataattcagccacctggtgattgtaactccaccatctctccaccaaaagaactgtagtagcatcaagctacatagcattaagttatctactatcacgatca

SEQ ID NO: 287780 - DNA, 2474 bp, Homo sapiens
gctggtaccggccggagatttatggatcggggctgtctggctcggttacgcccccacctcgccaggaatctaggagtcggtttgttttccgaacccatctccttccgctctcccgcccctgcaggctgtgtgccgagcttggaagaaagtgtgacccgttcgacggaacaaaggacatgacagcccggccccgtgcggccactgcggagcgttaggaacattccctaaaatggcggccggcgcgtcggaacagggcgggaggcggcggcgcgtgggggcgggacggggaggggcgcggccagccgggcttctgcttccgcgaccccggcggtgcagggcgggtggagtcgcggagtagtcctcatggccgccccgccggagcccggtagaattagaagatcatgtgatgttggagtaggagggtttatcttggtgactttgggatgctggtttcattgtaggtataattatgcaaagcaaagaatccaggaaagaattgccagagaagaaattaaaaagaagatattatatgaaggtacccacctcgatcctgaaagaaaacacaacggcagcagcagcaattgaacaatcttgagcatagaagtcaatgtaaacgaagttaagatcaaccacataaaacatttcatgtgcaataagctctcaatcaagtaaataaagtttaagttgtagtcatttttttcccacacttgtgtggaatgaaaacttgccagtttattctggccctgtgtctactgccaggatagcattcttacgtgttacatatagtggacttgtcatccttaaaatgtgaacagaatttattggcagtgtggcaaagaattataaaacatagtgtttaatgtacttggagtttccttgtagtagtaagtatagagtttgatgataagtaaacgtcccttaacaaaaacctcaaccttattactatcccattaaaaaacagcaaatacttactgagttcttgtaagagctaatgtcattgtaagatttaaaactaagggcttttatcactttgcaaattattttttaaatgcattcatcatttgacagtgttctctcatttcttaaaatgcgagtcatcttccaaaagagttgtttttaactgccctaaacatttttggggaagtatgcagggtttaaatttttaagtataattagttctgaattaaaatatgcacatggaacttgtctggcagactgatgcaatagtaaaacaactgcagaattactattaatgtaaacaatccatttgaaagtcaatcagctgctcccattaaaatattatttaaaatacaatacccacagcatctaactaaatcctcaggatttattctccgggagaaattatccctttctaggaaaatgaagttatttctggttttaattcatacaatactttaagaaaatctgttaaatataacaaaacacaagctagatgcttaagaaatgcttaaagaaatattggggcgaaggtaacagcagtcaacaggattgtggccattactggtcctattattttgatgtaccatggaaggcacagaaatcgagcaaggaagaaaatattagttattttgatctacatctttttctaaagaaaagtggagcttgcctccagttcaattcacaagagcattttccctcccatgcccaccttttcttgtggctgtcgctaggaaggatgcagaggctgtgtggtttaccaaatgccttaacttagcagtgaatgacaactgtcaaacacatgttgagggaaaatttttactgattcacaaaaaggaagacagtttgcccactcttagtggcacaaatcaaagctgcatgcactacattatccaaattagtcgtaaccaaatagttaaaaaattctgctgggcacggtggctcatacctgtaatcccagcactttgggaggccgaggcagttggatcacctgaggttaggagtttgagaccagcctggccaacagggtgaaaccctgtctcgtctaaaaatacaaaaattagccgggcgtggtggtgcatgcctgtagtcccaggtactcaggaggctgaggcaggagaatcacttgaacccgaggtggggcaggcggaggttgcagtaagccaagatcgcgccattgcactctagcctaggtgacagagtgagactccatctcaaaaaaaaaaaaaaattccataggatgttcaaccatgttttcagaggccgcactgcatgaatgcgggaaaatgttgatgatcactaatcaataatctgatatttaacaaaatatggacaggccacttatgctcagttttaccttagttattccttggtatccacaggcccaagtccctttaaataaaataccctcatatttccatataatctacatacattctcccatatactttaaatcatctctagattacttataatgtctaatacaaaataaatgctatgtaaatgtaattaaaata

SEQ ID NO: 287781 - DNA, 2205 bp, Homo sapiens
ctcacaagaccctgctacgtatctcgcacctgaaacaagctaacatgactaacacccttaattccatccaccctcctctccctaggaggcctgcccccgcggcagaagcaggaagcgtagaattagaagatcatgtgatgttggagtaggagggtttatcttggtgactttgggatgctggtttcattgtaggtataattatgcaaagcaaagaatccaggaaagaattgccagagaagaaattaaaaagaagatattatatgaaggtacccacctcgatcctgaaagaaaacacaacggcagcagcagcaattgaacaatcttgagcatagaagtcaatgtaaacgaagttaagatcaaccacataaaacatttcatgtgcaataagctctcaatcaagtaaataaagtttaagttgtagtcatttttttcccacacttgtgtggaatgaaaacttgccagtttattctggccctgtgtctactgccaggatagcattcttacgtgttacatatagtggacttgtcatccttaaaatgtgaacagaatttattggcagtgtggcaaagaattataaaacatagtgtttaatgtacttggagtttccttgtagtagtaagtatagagtttgatgataagtaaacgtcccttaacaaaaacctcaaccttattactatcccattaaaaaacagcaaatacttactgagttcttgtaagagctaatgtcattgtaagatttaaaactaagggcttttatcactttgcaaattattttttaaatgcattcatcatttgacagtgttctctcatttcttaaaatgcgagtcatcttccaaaagagttgtttttaactgccctaaacatttttggggaagtatgcagggtttaaatttttaagtataattagttctgaattaaaatatgcacatggaacttgtctggcagactgatgcaatagtaaaacaactgcagaattactattaatgtaaacaatccatttgaaagtcaatcagctgctcccattaaaatattatttaaaatacaatacccacagcatctaactaaatcctcaggatttattctccgggagaaattatccctttctaggaaaatgaagttatttctggttttaattcatacaatactttaagaaaatctgttaaatataacaaaacacaagctagatgcttaagaaatgcttaaagaaatattggggcgaaggtaacagcagtcaacaggattgtggccattactggtcctattattttgatgtaccatggaaggcacagaaatcgagcaaggaagaaaatattagttattttgatctacatctttttctaaagaaaagtggagcttgcctccagttcaattcacaagagcattttccctcccatgcccaccttttcttgtggctgtcgctaggaaggatgcagaggctgtgtggtttaccaaatgccttaacttagcagtgaatgacaactgtcaaacacatgttgagggaaaatttttactgattcacaaaaaggaagacagtttgcccactcttagtggcacaaatcaaagctgcatgcactacattatccaaattagtcgtaaccaaatagttaaaaaattctgctgggcacggtggctcatacctgtaatcccagcactttgggaggccgaggcagttggatcacctgaggttaggagtttgagaccagcctggccaacagggtgaaaccctgtctcgtctaaaaatacaaaaattagccgggcgtggtggtgcatgcctgtagtcccaggtactcaggaggctgaggcaggagaatcacttgaacccgaggtggggcaggcggaggttgcagtaagccaagatcgcgccattgcactctagcctaggtgacagagtgagactccatctcaaaaaaaaaaaaaaattccataggatgttcaaccatgttttcagaggccgcactgcatgaatgcgggaaaatgttgatgatcactaatcaataatctgatatttaacaaaatatggacaggccacttatgctcagttttaccttagttattccttggtatccacaggcccaagtccctttaaataaaataccctcatatttccatataatctacatacattctcccatatactttaaatcatctctagattacttataatgtctaatacaaaataaatgctatgtaaatgtaattaaaata

SEQ ID NO: 287782 - DNA, 2412 bp, Homo sapiens
  misc_feature (2397)..(2398): n is a, c, g, or t
  misc_feature (2406)..(2406): n is a, c, g, or t
ccacttctgagcattttacagttcagtgtacttaactgtaaaggtatacaggctcaagtcgttgcatattcttcctgttttgatagaaattgcagggatttatgtactgaatcttattactccttagatatgtgacaactggaaagctccccaccaaaccctccagccttggttacttcttaatgatgtggtttggcacaatgaaaatgtcataggctttgtggtgaaactgacttctgcctccactcctgccaacacttattattagcctcttaagtccccgagcctgtttcagaggtaatctcacacaaaggctagagaattaaaaaacatgtagagagcctggcactaatacctacctcccccaccagcagctcttaattatgagatcaaccactattattttagaccagagttttgttggggattgggtttgtttcagaaggcactattttaaataagatgtgtagcttctatttagatatttgcctttaaagtcagctgagctattttcctattgtttgcaaatttacttttatttaaaaaaataaaatttcctaaagcagtgtttccccaatatgacagtcatcagaaaaaaccacctagagttttctaaacatagattccagtgattgtaaatcagaatctgagagtgggactagaaaatacttaattctatcctgtggtacaagctggtctcacacttgcatctttgcacctaagactagatcaaactggtactaatcctctggccccagcatcccatccttggggaaatagtctagtttagaggtagtcctggactggagcgctaagtccagcattcctcacctgcataacactacccacatgatcatatgtcccctgggctctcaagctgataggaaaaagtcgtcttgctaaatgaaatcccccaacctcttggtaatgtgaagaactgtactgcaaagctttgaagcaatcctatgttaggcatgcgggtgggaacggggccagacagagggaaaaaatggaatagaatgatccgagagtaaataattcttgctttattatgaaccaagtcacattttgtctcttccaacagatgcttgagccaaaaaagcaaacataggcagaaatacaattgagaatatcttcatgtttcaacctttaatctgacttgccttttactatcctttccccatttcttctaatctcttttgccttacaatatattaccttctaggtatcacctcatcctatagaatcccttctagtttaatgtcctgccccaaacaatactaacccattgaagataactatgaaacctttaaatggacagtggttccttttaaaagcagccttactgaaaattttatatacacttaaatcaagtaacagttaccgtgagttttctaaacttttgtgttaacagaaatgccagttcagcagtgtgactgttacttttaaatgtctgtcttgccgccctagagtgacagacatcccagttaaacatattaggaataagaaatacataaatccaatgaagactgtagaaaaagaattttagcacttgaaggaacttcagtcatttaacccaacccattcatgttatagattgagaccatagaaataaaagtagcctataggatacaaaagttagcggcagatctgagataaaaatccagctctttggatccccgcgtttttcaccacacttagctgtcgttcccatgtattacgaacaaagaatcaaatataatcaagtgcagcctcacttcacaggcaagaaaacagactagagtttaatatattgcccatgtttatcttaaggtgaaacatttactcttacaaccacagttgatgttaacctagttaataaaatatgaaaggtaattactaggggaattttaaacggcactacataagcaaacatgactcaaattactttttccatttctgcttcccaaattattggagttactgaagcaagctatgctgctttcaattccaatgataggcatattcccaaataaactcatttaaagagctcataaaatgaattatcctatttccaagtcagttgattagcaaattaagatacagctccaagttaccctactgcttaagggttttccggtccaatttgtaaggttttcggatttaaagattcagactgcataccaaaggtggacaaagacaacgcaagctgatttaggttgtcacgtggcacatactctagtttaaaccctcaactacaagaaaagaaatggtgtattgtcatttttgccaaagcaccccaaaatgaaatactttcttactcaatctaggttcttttttttcattctagtcccttaagctcctaggatttttagatgttgaaaatactccctgcgccctcgcccaggttatcccagnncacgaacnttgtaa

SEQ ID NO: 287783 - DNA, 1982 bp, Homo sapiens
actatatgtaacacgtaagaatgctatcctggcagtagacacagggccagaataaactggcaagttttcaattaccccaagtgtgggaaaaaaatgaccttgagcatagaagtcaatgtaaacgaagttaagatcaaccacataaaacatttcatgtgcaataagctctcaatcaagtaaataaagtttaagttgtagtcatttttttcccacacttgtgtggaatgaaaacttgccagtttattctggccctgtgtctactgccaggatagcattcttacgtgttacatatagtggacttgtcatccttaaaatgtgaacagaatttattggcagtgtggcaaagaattataaaacatagtgtttaatgtacttggagtttccttgtagtagtaagtatagagtttgatgataagtaaacgtcccttaacaaaaacctcaaccttattactatcccattaaaaaacagcaaatacttactgagttcttgtaagagctaatgtcattgtaagatttaaaactaagggcttttatcactttgcaaattattttttaaatgcattcatcatttgacagtgttctctcatttcttaaaatgcgagtcatcttccaaaagagttgtttttaactgccctaaacatttttggggaagtatgcagggtttaaatttttaagtataattagttctgaattaaaatatgcacatggaacttgtctggcagactgatgcaatagtaaaacaactgcagaattactattaatgtaaacaatccatttgaaagtcaatcagctgctcccattaaaatattatttaaaatacaatacccacagcatctaactaaatcctcaggatttattctccgggagaaattatccctttctaggaaaatgaagttatttctggttttaattcatacaatactttaagaaaatctgttaaatataacaaaacacaagctagatgcttaagaaatgcttaaagaaatattggggcgaaggtaacagcagtcaacaggattgtggccattactggtcctattattttgatgtaccatggaaggcacagaaatcgagcaaggaagaaaatattagttattttgatctacatctttttctaaagaaaagtggagcttgcctccagttcaattcacaagagcattttccctcccatgcccaccttttcttgtggctgtcgctaggaaggatgcagaggctgtgtggtttaccaaatgccttaacttagcagtgaatgacaactgtcaaacacatgttgagggaaaatttttactgattcacaaaaaggaagacagtttgcccactcttagtggcacaaatcaaagctgcatgcactacattatccaaattagtcgtaaccaaatagttaaaaaattctgctgggcacggtggctcatacctgtaatcccagcactttgggaggccgaggcagttggatcacctgaggttaggagtttgagaccagcctggccaacagggtgaaaccctgtctcgtctaaaaatacaaaaattagccgggcgtggtggtgcatgcctgtagtcccaggtactcaggaggctgaggcaggagaatcacttgaacccgaggtggggcaggcggaggttgcagtaagccaagatcgcgccattgcactctagcctaggtgacagagtgagactccatctcaaaaaaaaaaaaaaattccataggatgttcaaccatgttttcagaggccgcactgcatgaatgcgggaaaatgttgatgatcactaatcaataatctgatatttaacaaaatatggacaggccacttatgctcagttttaccttagttattccttggtatccacaggcccaagtccctttaaataaaataccctcatatttccatataatctacatacattctcccatatactttaaatcatctctagattacttataatgtctaatacaaaataaatgctatgtaaatgtaattaaaata

SEQ ID NO: 287784 - DNA, 859 bp, Homo sapiens
cgcgccggagacggttagaaatggcggttggggcggagcagggggctggcgcgggaagcggggctgtctggctcggttacgcccccacctcgccaggaatctaggagtcggtttgttttccgaacccatctccttccgctctcccgcccctgcaggctgtgtgccgagcttggaagaaagtgtgacccgttcgacggaacaaaggacatgacagcccggccccgtgcggccactgcggagcgttaggaacattccctaaaatggcggccggcgcgtcggaacagggcgggaggcggcggcgcgtgggggcgggacggggaggggcgcggccagccgggcttctgcttccgcgaccccggcggtgcagggcgggtggagtcgcggagtagtcctcatggccgccccgccggagcccggtgagcccgaggagaggaagtcccttaagctcctaggatttttagatgttgaaaatactccctgcgcccggcattcaatattgtatggttcattaggatctgttgtggctggctttggacattttttgttcactagtagaattagaagatcatgtgatgttggagtaggagggtttatcttggtgactttgggatgctggtttcattgtaggtataattatgcaaagcaaagaatccaggaaagaattgccagagaagaaattaaaaagaagatattatatgaaggtacccacctcgatcctgaaagaaaacacaacggcagcagcagcaattgaacaatcttgagcatagaagtcaatgtaaacgaagttaagatcaaccacataaaacatttcatgtgcaataagctctcaatcaagtaaataaagtttaagttgtagtca

SEQ ID NO: 287785 - DNA, 713 bp, Homo sapiens
gctggtaccggccggagatttatggatcggggctgtctggctcggttacgcccccacctcgccaggaatctaggagtcggtttgttttccgaacccatctccttccgctctcccgcccctgcaggctgtgtgccgagcttggaagaaagtgtgacccgttcgacggaacaaaggacatgacagcccggccccgtgcggccactgcggagcgttaggaacattccctaaaatggcggccggcgcgtcggaacagggcgggaggcggcggcgcgtgggggcgggacggggaggggcgcggccagccgggcttctgcttccgcgaccccggcggtgcagggcgggtggagtcgcggagtagtcctcatggccgccccgccggagcccggtgagcccgaggagaggaaggtagaattagaagatcatgtgatgttggagtaggagggtttatcttggtgactttgggatgctggtttcattgtaggtataattatgcaaagcaaagaatccaggaaagaattgccagagaagaaattaaaaagaagatattatatgaaggtacccacctcgatcctgaaagaaaacacaacggcagcagcagcaattgaacaatcttgagcatagaagtcaatgtaaacgaagttaagatcaaccacataaaacatttcatgtgcaataagctctcaatcaagtaaataaagtttaagttgtagtca

SEQ ID NO: 287786 - DNA, 1283 bp, Homo sapiens
gctggtaccggccggagatttatggatcggggctgtctggctcggttacgcccccacctcgccaggaatctaggagtcggtttgttttccgaacccatctccttccgctctcccgcccctgcaggctgtgtgccgagcttggaagaaagtgtgacccgttcgacggaacaaaggacatgacagcccggccccgtgcggccactgcggagcgttaggaacattccctaaaatggcggccggcgcgtcggaacagggcgggaggcggcggcgcgtgggggcgggacggggaggggcgcggccagccgggcttctgcttccgcgaccccggcggtgcagggcgggtggagtcgcggagtagtcctcatggccgccccgccggagcccggtagaattagaagatcatgtgatgttggagtaggagggtttatcttggtgactttgggatgctggtttcattgtaggtataattatgcaaagcaaagaatccaggaaagaattgccagagaagaaattaaaaagaagatattatatgaaggtacccacctcgatcctgaaagaaaacacaacggcagcagcagcaattgaacaatcttgagcatagaagtcaatgtaaacgaagttaagatcaaccacataaaacatttcatgtgcaataagctctcaatcaagtaaataaagtttaagttgtagtcatttttttcccacacttgtgtggaatgaaaacttgccagtttattctggccctgtgtctactgccaggatagcattcttacgtgttacatatagtggacttgtcatccttaaaatgtgaacagaatttattggcagtgtggcaaagaattataaaacatagtgtttaatgtacttggagtttccttgtagtagtaagtatagagtttgatgataagtaaacgtcccttaacaaaaacctcaaccttattactatcccattaaaaaacagcaaatacttacactccatctcaaaaaaaaaaaaaaattccataggatgttcaaccatgttttcagaggccgcactgcatgaatgcgggaaaatgttgatgatcactaatcaataatctgatatttaacaaaatatggacaggccacttatgctcagttttaccttagttattccttggtatccacaggcccaagtccctttaaataaaataccctcatatttccatataatctacatacattctcccatatactttaaatcatctctagattacttataatgtctaatacaaaataaatgctatgtaaatgtaattaaaata

SEQ ID NO: 287787 - DNA, 859 bp, Homo sapiens
cgcgccggagacggttagaaatggcggttggggcggagcagggggctggcgcgggaagcggggctgtctggctcggttacgcccccacctcgccaggaatctaggagtcggtttgttttccgaacccatctccttccgctctcccgcccctgcaggctgtgtgccgagcttggaagaaagtgtgacccgttcgacggaacaaaggacatgacagcccggccccgtgcggccactgcggagcgttaggaacattccctaaaatggcggccggcgcgtcggaacagggcgggaggcggcggcgcgtgggggcgggacggggaggggcgcggccagccgggcttctgcttccgcgaccccggcggtgcagggcgggtggagtcgcggagtagtcctcatggccgccccgccggagcccggtgagcccgaggagaggaagtcccttaagctcctaggatttttagatgttgaaaatactccctgcgcccggcattcaatattgtatggttcattaggatctgttgtggctggctttggacattttttgttcactagtagaattagaagatcatgtgatgttggagtaggagggtttatcttggtgactttgggatgctggtttcattgtaggtataattatgcaaagcaaagaatccaggaaagaattgccagagaagaaattaaaaagaagatattatatgaaggtacccacctcgatcctgaaagaaaacacaacggcagcagcagcaattgaacaatcgagtagatcacactaacattatggcatagttcatagtataagtagtgatcaaaaaattggtccatatgctggcatccttgcgtggaactaagctacatcctc

SEQ ID NO: 287788 - DNA, 1220 bp, Homo sapiens
  misc_feature (728)..(729): n is a, c, g, or t
gctggtaccggccggagatttatggatcggggctgtctggctcggttacgcccccacctcgccaggaatctaggagtcggtttgttttccgaacccatctccttccgctctcccgcccctgcaggctgtgtgccgagcttggaagaaagtgtgacccgttcgacggaacaaaggacatgacagcccggccccgtgcggccactgcggagcgttaggaacattccctaaaatggcggccggcgcgtcggaacagggcgggaggcggcggcgcgtgggggcgggacggggaggggcgcggccagccgggcttctgcttccgcgaccccggcggtgcagggcgggtggagtcgcggagtagtcctcatggccgccccgccggagcccggtgagcccgaggagaggaaggtagaattagaagatcatgtgatgttggagtaggagggtttatcttggtgactttgggatgctggtttcattgtaggtataattatgcaaagcaaagaatccaggaaagaattgccagagaagaaattaaaaagaagatattatatgaaggtacccacctcgatcctgaaagaaaacacaacggcagcagcagcaattgaacaatattggcaatgcaaccgtcacttatccagtgaaccactatcagaaaagaagactctacctctctatagtaatctccctacaaatctccttagttataacattcaccacgtcacctggtnntactaactcatatttaatatcttcttcgaagaccaacaattttaatcccccaaacgctttggggggcgttaatttaatttcacacccccccgggagattttggaagggtgggacccacaaaaaagcctactcataagtgtccccaaaagttgtaaaacacacgcggggcccccgtgtgtaaaacaagcgccgtgtgacacagaggtgtggttgaccacaaacccaaaattttttttcaacaccaccgtttttatttcgacccgaccgatattaaaaaaatttttttcccacccgatttaaaaaagccaaaaaaacaccaccaacctcattttaaagaagagcattatatcagcaaggtgcaccaaaactttttacaccccacacacgtattttttttacaccacacaccaccacgactcatgtttataaaaaagcaccagttttttcccacaacaagtttttttcccgagggagatcagacacaaacaatc

SEQ ID NO: 287789 - DNA, 647 bp, Homo sapiens
gctggtaccggccggagatttatggatcggggctgtctggctcggttacgcccccacctcgccaggaatctaggagtcggtttgttttccgaacccatctccttccgctctcccgcccctgcaggctgtgtgccgagcttggaagaaagtgtgacccgttcgacggaacaaaggacatgacagcccggccccgtgcggccactgcggagcgttaggaacattccctaaaatggcggccggcgcgtcggaacagggcgggaggcggcggcgcgtgggggcgggacggggaggggcgcggccagccgggcttctgcttccgcgaccccggcggtgcagggcgggtggagtcgcggagtagtcctcatggccgccccgccggagcccggtgagcccgaggagaggaagtcccttaagctcctaggatttttagatgttgaaaatactccctgcgcccggcattcaatattgtatggttcattaggatctgttgtggctggctttggacattttttgttcactaaggattagaggatcatgttatgttgggagtagggaggtttatctgggcacttggggaatcctggttaaataggggtataattatacaaagcaaagactccaggaagatcaccaacgagtaattaaaa

SEQ ID NO: 287790 - DNA, 410 bp, Homo sapiens
ctattcctctcacgtgagtctgggttcctttgttgtggttgatgtttcttcatatgtgtgtggggtccttggtgagggtttttcctgtacatttttctccatagttgcaagcccatgatgccactttgaaatgcttgcctatgttatttaaaacctaggggtgctggccttggaagctctcagctgtcccttgtttaccttggtcctcatgagcctttatgggtgggaaggcgacatcagggatactttttctccatgaataatcagcatggggcatcctcaggagcgcgacagcagatgtaaagcccaggatgccagacttgtccatagttactaaagtggtgtatttctttacatttgccatgttgcagatcatttgttttgataagcatgacatgatggcttaatga

SEQ ID NO: 287791 - DNA, 328 bp, Homo sapiens
ggcctcatttattttttaaggtcttggtaaaacatcctgaaatgtgtcttcagtagtacgttgctaccttatttccaaggaaatcttgcaaattcaggtttagactaaaattttgtttggtgagactttttatttaaaaacaaaaactttaaagtggggagggaagaacagtcattaatcaccttcatcacgttttcacctgaagcaaatggagttctcctactcagttccacctccacctgctagttcacctttcctcggctgtttctgttttatgtggttcaatttttcaataaactacgtcatcttctactctatatatcatcaa

SEQ ID NO: 287792 - DNA, 2167 bp, Homo sapiens
gccacagcgaatacaggtgaccgtatcctgagccccgggcagaggcaggaccgagccgcaatctgaacagaaatccaggtccgactgaaagctggagcaagtattggcgaggtccatgacagacatgcggtcgggtctgaggagggagttggaagtttattaacaaaagagagaagagttcctgtcccagaggtcgtaactattctgtcccaggacctaggagtatataacccgaaccctcctgccacgcacgcctcctgcctctgcgaccaaggagccgaaacgcccggaattcccagacagcgtcgggtactaaaggacttggaaccctttccaggggccggtgagaggagttaaccaactccgtgggctagagcgccagctctgcgcccgcggcggggcagcgagatagagccggctagagcgtcaggctttcgcgttgacgattggctgtgacgtcataattaattgcgaaccgtgtctcgggagcgttagagatggagactaacgtcttccaagggagattgcgtctccactttcaccctggtactgagaggttgagcacaaaattggtaaccaatgctgcgcttccagcaaattttcccaccagcacccaatcctgggatatttattctctttgtctcacatcctacaggaacgcagtcgcggggtatatccccctgaaaaccgtacgttgccaaataatgatttctttggattagagaactacaactcccctgggtcctgagccggtatttcccttttgcggctgcaccgtagttaaaaacaaagctaagtgttctgggacgtatagttctagcgttccttgggtcccgctggcgagcgtgggctttctgcagctcgcaaccggcctcgtgctttgcggacggttcactgcgcttggaaagggattggcctggggtacatcatctaaagatcctaggattgctgcaggtcagcagtctccactggaaaaaaagatcttgaatctaggtggtgtgcatacaacagcagcaagacagttgataatgcagaaatatcaggaggagtgtgaaatactctgtagggagcaagctgtttctcttgactactggcttgccaaagcagagtcttattataataaaataatagtggaaatgatgaaagaagagacaggcaatgaaatctagaaaaaaatggaggagaaaacaacccagagcgtagaaggactaaaacagtactgtttggtacctgagagagagatgaaacacatagaaaggcacatacatcaaacaggaaaggctggagaatttaagaacaaaccatttagacaagtactacaaccccccaatgaaacaaaattaccaaaaattatgccagaagggcatggcatccagaacgcacagagaagaaagcaggtaaatgagagggaacagatgcagactaaggatcaccaggaacgcatgattcgagggagagaacttgcagaacaaagactcaaggagagaatcttgagaagaagccagagccagctacttacatatgagaagcatgagagagtaaaagagataaaggagtttgaaagagttattgcgtatcttcttttccaaccatgcagtagaagtcggattaaacatgtatttcaagtcctctgatgaatcatgtgatctactagaccctgaagatacagtgaagagcaaaagtaagatgctggcaatttgatgtttgcactgtcatgaaggagatgcacatttagcagaacttacaaagagaaatataaaattactgctgagctaagtgtggtgaagaaaagttcatggtaccatgaaagcagataaccaggagatctaacaggtccactaccactattctcaataatacctaaaagaaataataagatatggcatttataaatgatgaataggattttataaaattatatacaatcagagaaccaaaaagcactcttggaaatcaaaaagtgatcatttaaataagtatttcaatagatcacttggaagagtaaatttgtactaccactaaatattaaaaatggaaaaacaatgtcaagaaagacagaaaaactatacgaatactaggctatcagtcaaggatttcctgcaacttaataatacaaattctaaaagaatggaaagatagaaattatttaaaataaaaaaatttctcc

SEQ ID NO: 287793 - DNA, 1512 bp, Homo sapiens
gccacagcgaatacaggtgaccgtatcctgagccccgggcagaggcaggaccgagccgcaatctgaacagaaatccaggtccgactgaaagctggagcaagtattggcgaggtccatgacagacatgcggtcgggtctgaggagggagttggaagtttattaacaaaagagagaagagttcctgtcccagaggtcgtaactattctgtcccaggacctaggagtatataacccgaaccctcctgccacgcacgcctcctgcctctgcgaccaaggagccgaaacgcccggaattcccagacagcgtcgggtactaaaggacttggaaccctttccaggggccggtgagaggagttaaccaactccgtgggctagagcgccagctctgcgcccgcggcggggcagcgagatagagccggctagagcgtcaggctttcgcgttgacgattggctgtgacgtcataattaattgcgaaccgtgtctcgggagcgttagagatggagactaacgtcttccaagggagattgcgtctccactttcaccctggtactgagaggttgagcacaaaattggtaaccaatgctgcgcttccagcaaattttcccaccagcacccaatcctgggatatttattctctttgtctcacatcctacaggaacgcagtcgcggggtatatccccctgaaaaccgtacgttgccaaataatgatttctttggattagagaactacaactcccctgggtcctgagccggtatttcccttttgcggctgcaccgtagttaaaaacaaagctaagtgttctgggacgtatagttctagcgttccttgggtcccgctggcgagcgtgggctttctgcagctcgcaaccggcctcgtgctttgcggacggttcactgcgcttggaaagggattggcctggggtacatcatctaaagatcctaggattgctgcaggtcagcagtctccactggaaaaaaagatcttgcatgtatttcaagtcctctgatgaatcatgtgatctactagaccctgaagatacagtgaagagcaaaagaacacggatgaaatgagaaacaaaaacgatggagaaaaccaaaaaaggggacacatgggatccaggcaataggagagccagcataagagagaggcagagggatgcccaggatgaggtgaagacgatcttggaaatcagcccagatgtgcatgcaccagtccacgtgtggcaggaccaagggaagtgtcttcacaaagatgaggctttgatttgttggagaaactgttaccagaaaaacaggtcccgatcccgaccccaaaagagtattcttggatcttgcacaggaaggaattaaaggtctagctctgtctcctcagcacatgttctaggctctgactgcaagtgctgacttggctcccagccccaccagaccctctgttccatgaaagggccatctatgcaaagtgccccccaaatgccaaaggagccaataaaccaaggaacaagacagacaaat

SEQ ID NO: 287794 - DNA, 2592 bp, Homo sapiens
gccacagcgaatacaggtgaccgtatcctgagccccgggcagaggcaggaccgagccgcaatctgaacagaaatccaggtccgactgaaagctggagcaagtattggcgaggtccatgacagacatgcggtcgggtctgaggagggagttggaagtttattaacaaaagagagaagagttcctgtcccagaggtcgtaactattctgtcccaggacctaggagtatataacccgaaccctcctgccacgcacgcctcctgcctctgcgaccaaggagccgaaacgcccggaattcccagacagcgtcgggtactaaaggacttggaaccctttccaggggccggtgagaggagttaaccaactccgtgggctagagcgccagctctgcgcccgcggcggggcagcgagatagagccggctagagcgtcaggctttcgcgttgacgattggctgtgacgtcataattaattgcgaaccgtgtctcgggagcgttagagatggagactaacgtcttccaagggagattgcgtctccactttcaccctggtactgagaggttgagcacaaaattggtaaccaatgctgcgcttccagcaaattttcccaccagcacccaatcctgggatatttattctctttgtctcacatcctacaggaacgcagtcgcggggtatatccccctgaaaaccgtacgttgccaaataatgatttctttggattagagaactacaactcccctgggtcctgagccggtatttcccttttgcggctgcaccgtagttaaaaacaaagctaagtgttctgggacgtatagttctagcgttccttgggtcccgctggcgagcgtgggctttctgcagctcgcaaccggcctcgtgctttgcggacggttcactgcgcttggaaagggattggcctggggtacatcatctaaagatcctaggattgctgcaggtcagcagtctccactggaaaaaaagatcttggctttgatttgttggagaaactgttaccagaaaaacaggtcccgatcccgaccccaaaagagtattcttggatcttgcacaggaaggaattaaaggggtacactcctttggaaaccagaacctcgtatcctgcacagcccagtgttgggagataaaatatgcgaaataccccattgagtgaatctaagagattggacatggagccaaacctgcttccgccttttgatttctggacacacatgttcttcctattgagaacacagaactctagagacgtctctgattcaaacaatgcactgtgtcctgaaagatggcacccacccctcagagtgcttcctccaggctggcactgagttgtgcctgtagaagacctgtccagccttccttgtggctggcagctcctgggtagtgcagatggtgataggattagtggaacccacagccgtggaaacactgaaactttccctgcaaagtgggtccttcaggcagataatgggctaggagcactgcctagcctgcagaccaggaatgtcaacagcacccagagagtggtgctggctgtgtctgagagcaggacaggaaaacccacccatagaatcggtacctaaccctgtgaagatgaaactctggcccttccaggtggaagtagctaaatgtagtcaacttgttacttagtgggtagtcatgtaaagaaatagtgccccactagggcacatcatgggcctcaattgctgatgagttggacattcagaggtggcagcagctggatctgccttggtgtggggaagtcagtgctgctggccccttacggagcctcatgcctgccactgtggttgctccattcatgcactcatcctaccaggcctgggctgacccatggtgaaagctggctaactgccatttgtctgtttggtagttcagtgccacttcagacttgggtgttttctgtgggtgtcagcaagggattcaagctcaacccaggtggactgttttcacctgatgatgaatgctgttgggcctgtaccatctatgactttgtgggtcacacaggcacttggaaccccgtagttgcttggtatcccgtggtcaaacattctattgaatcaggacaaggaacactaaaagttgcttctaacagggggcatgtgtctctgctgtggatgacatgatcttactccagaatcccaggccctccactgtgactctcccactggtgcttggttcagctccatcctgtgtctttccccaccactggcaccaccagccccaggggtctgagggatggtggctgcttgtaccatggcctggatctgctgcagggtcctttcctgtgtaggccccacttgaagctggcatcctcctatgtcacctagactgtgggccaaagcaaaatgtctagatgtggaatgtggtgttgttataattcaaagaggctcaccaagcagtgtgcttccttgcttctggtgaggatgcaagatgcaacagtttttcttttaccttggaggggacacacctgcattcccctaaacacttggcacttgttcacccataaaacttcacttcagtgcccacctttgaagctgtataaggtttatcttcaccttgt

SEQ ID NO: 287795 - DNA, 2685 bp, Homo sapiens
gccacagcgaatacaggtgaccgtatcctgagccccgggcagaggcaggaccgagccgcaatctgaacagaaatccaggtccgactgaaagctggagcaagtattggcgaggtccatgacagacatgcggtcgggtctgaggagggagttggaagtttattaacaaaagagagaagagttcctgtcccagaggtcgtaactattctgtcccaggacctaggagtatataacccgaaccctcctgccacgcacgcctcctgcctctgcgaccaaggagccgaaacgcccggaattcccagacagcgtcgggtactaaaggacttggaaccctttccaggggccggtgagaggagttaaccaactccgtgggctagagcgccagctctgcgcccgcggcggggcagcgagatagagccggctagagcgtcaggctttcgcgttgacgattggctgtgacgtcataattaattgcgaaccgtgtctcgggagcgttagagatggagactaacgtcttccaagggagattgcgtctccactttcaccctggtactgagaggttgagcacaaaattggaacgcagtcgcggggtatatccccctgaaaaccgtacgttgccaaataatgatttctttggattagagaactacaactcccctgggtcctgagccggtatttcccttttgcggctgcaccgtagttaaaaacaaagctaagtgttctgggacgtatagttctagcgttccttgggtcccgctggcgagcgtgggctttctgcagctcgcaaccggcctcgtgctttgcggacggttcactgcgcttggaaagggattggcctggggtacatcatctaaagatcctaggattgctgcaggtcagcagtctccactggaaaaaaagatcttgcatgtatttcaagtcctctgatgaatcatgtgatctactagaccctgaagatacagtgaagagcaaaagaacacggatgaaatgagaaacaaaaacgatggagaaaaccaaaaaaggggacacatgggatccaggcaataggagagccagcataagagagaggcagagggatgcccaggatgaggtgaagacgatcttggaaatcagcccagatgtgcatgcaccagtccacgtgtggcaggaccaagggaagtgtcttcacaaagatgaggggtacactcctttggaaaccagaacctcgtatcctgcacagcccagtgttgggagataaaatatgcgaaataccccattgagtgaatctaagagattggacatggagccaaacctgcttccgccttttgatttctggacacacatgttcttcctattgagaacacagaactctagagacgtctctgattcaaacaatgcactgtgtcctgaaagatggcacccacccctcagagtgcttcctccaggctggcactgagttgtgcctgtagaagacctgtccagccttccttgtggctggcagctcctgggtagtgcagatggtgataggattagtggaacccacagccgtggaaacactgaaactttccctgcaaagtgggtccttcaggcagataatgggctaggagcactgcctagcctgcagaccaggaatgtcaacagcacccagagagtggtgctggctgtgtctgagagcaggacaggaaaacccacccatagaatcggtacctaaccctgtgaagatgaaactctggcccttccaggtggaagtagctaaatgtagtcaacttgttacttagtgggtagtcatgtaaagaaatagtgccccactagggcacatcatgggcctcaattgctgatgagttggacattcagaggtggcagcagctggatctgccttggtgtggggaagtcagtgctgctggccccttacggagcctcatgcctgccactgtggttgctccattcatgcactcatcctaccaggcctgggctgacccatggtgaaagctggctaactgccatttgtctgtttggtagttcagtgccacttcagacttgggtgttttctgtgggtgtcagcaagggattcaagctcaacccaggtggactgttttcacctgatgatgaatgctgttgggcctgtaccatctatgactttgtgggtcacacaggcacttggaaccccgtagttgcttggtatcccgtggtcaaacattctattgaatcaggacaaggaacactaaaagttgcttctaacagggggcatgtgtctctgctgtggatgacatgatcttactccagaatcccaggccctccactgtgactctcccactggtgcttggttcagctccatcctgtgtctttccccaccactggcaccaccagccccaggggtctgagggatggtggctgcttgtaccatggcctggatctgctgcagggtcctttcctgtgtaggccccacttgaagctggcatcctcctatgtcacctagactgtgggccaaagcaaaatgtctagatgtggaatgtggtgttgttataattcaaagaggctcaccaagcagtgtgcttccttgcttctggtgaggatgcaagatgcaacagtttttcttttaccttggaggggacacacctgcattcccctaaacacttggcacttgttcacccataaaacttcacttcagtgcccacctttgaagctgtataaggtttatcttcaccttgt

SEQ ID NO: 287796 - DNA, 8587 bp, Homo sapiens
  misc_feature (6276)..(6276): n is a, c, g, or t
  misc_feature (7105)..(7105): n is a, c, g, or t
  misc_feature (7834)..(7834): n is a, c, g, or t
gccacagcgaatacaggtgaccgtatcctgagccccgggcagaggcaggaccgagccgcaatctgaacagaaatccaggtccgactgaaagctggagcaagtattggcgaggtccatgacagacatgcggtcgggtctgaggagggagttggaagtttattaacaaaagagagaagagttcctgtcccagaggtcgtaactattctgtcccaggacctaggagtatataacccgaaccctcctgccacgcacgcctcctgcctctgcgaccaaggagccgaaacgcccggaattcccagacagcgtcgggtactaaaggacttggaaccctttccaggggccggtgagaggagttaaccaactccgtgggctagagcgccagctctgcgcccgcggcggggcagcgagatagagccggctagagcgtcaggctttcgcgttgacgattggctgtgacgtcataattaattgcgaaccgtgtctcgggagcgttagagatggagactaacgtcttccaagggagattgcgtctccactttcaccctggtactgagaggttgagcacaaaattggtaaccaatgctgcgcttccagcaaattttcccaccagcacccaatcctgggatatttattctctttgtctcacatcctacaggaacgcagtcgcggggtatatccccctgaaaaccgtacgttgccaaataatgatttctttggattagagaactacaactcccctgggtcctgagccggtatttcccttttgcggctgcaccgtagttaaaaacaaagctaagtgttctgggacgtatagttctagcgttccttgggtcccgctggcgagcgtgggctttctgcagctcgcaaccggcctcgtgctttgcggacggttcactgcgcttggaaaggggtgagtcggctttttgagggacagcaagtggtgagagtgaaggcccgaggaatgcttagtcccacgggacgaaaggaagcagggatgaagtggtacacttgagaaggggttcaggactttggaggtggtggaacagaggagcttggggcttcctctccttcgactcctgccagataagtgaggctagcagtagtcaagaaagctcattaagtaggatttcataagacttaggtcgagtttggcttttagttgtgcctgccgcctatcgaactcttaattcattatgtcatccgttaagtggacagctgacatttccctgatcttttataaaacatgagaataagtatctttgggaaatctttctattttcattaatctgtaacttatattccaagtagaaactttccctgaaggggcagcttgtagttgtttactagtttcctgctagccctcccaccaccatccactctgatagctgtgctaagttcattcatataaaagttctggagccatcactgttttctcctatgaaggacacaagctgtagtcttttcgctgggagaggctcccatctgcctttctctgtaataatggagagaacgccatagtgaaagggttaaaactcagcaaactgctgaagagtgacaagccctatcacttaactgtgaaattgcttgttattctgtcttacaaagggagacgtgttgttgagctgattgtcgtagacagtttttattctcacttatctgtgtgtctcctttgaaaatggaacttgaaattctaccctcctcagttttctgtttttaatttgaaaaacagccaacatcccctgtgaattgcagtaaaggaacaaagcattaaaaggcatatccttttcccaacaaaagctcacagtctaatcagtaaagatttattgagcaactatgccaggttttgagctgaggctgagcctgcaaagttgaaatctgtgttctctgacctcaaggaacatgaatgaataattagaatataataaaactgtgctagtaggtacaaaatgtgagagcccagaacatgcatataaagcaaacatatctgtaaacttcaaggaagactgggaaatggcttaataaaaatagatacaatgttatggcagatatttaaaaaagatgctcagatattatgtgtcaaggatcatcagcaatcagcaaatcattaattttgagaacttgggatcacagactctaatgttaagtattgtgctagaagccatgtacagagaagtaaaagtaagatgatcatacgtttacaatctcaaaataagcttacgtagacaaataagaatgttcctaagaggtcagtgagaccaaatatttgatatcagatcctttccaacaatatagaggcatcatatttgtagatataaattacagttttcattccttatgagcctaaatttcagcatcaaaatgttaaaagtgatatgtgaatacagatatcacagtgtaaaccacgattaattttcaaatgagttgtagaattaaaatatgtcaagtatttagaggaagggaagatcactgacagagtagactggaaagactttataatcaggagcttgacctgtgaaggacagatagatagaatttattgagaacttaccaagctctttacatctaattcatatttgttctttataaccctgagaggcagatttttgtcttacatctccattttatagatgagaaagctgacagaagttacttgccctgagtcacacacctaggaagtggtagaattagatttcagatctagctctgtcagactgtaaagaccatcctttgaactctaaatggtataaaagacatacagaggaaatgccaggcatcctcagtggcttaaatacgacatcacagtaaactcaggctagaccagggatgacacataaaagatgatagttttcatttgtgttgccatcagcctcctctataaataaacccagagtaaccacaaattgccatcctgaggggttcaacagggaatagtctcataatggatttagagtgaaggatgattggcattgttagtcaggcaagcagagggctgagcagtcaaataacagaatttcagaacaaaagattagagggcagaaatgctgtatgtgctgatagagtcagagagggcccggatcaagaaactgcaggaagagaaaactagaaacctagaatcgtctagaaaactagaacctacaatcgtctcagaacacaaaggaggcttgaggactgagcagactgacatagatgtacttggacaacacctcaccaaggagcatgtctcttcccactcacaatccccaatacgagattcacagtggttcacgctgagtccacaggaaaaattggcctggggtacatcatctaaagatcctaggattgctgcaggtcagcagtctccactggaaaaaaagatcttgaatctaggtggtgtgcatacaacagcagcaagacagttgataatgcagaaatatcaggaggagtgtgaaatactctgtagggagcaagctgtttctcttgactactggcttgccaaagcagagtcttattataataaaataatagtggaaatgatgaaagaagagacaggcaatgaaatctagaaaaaaatggaggagaaaacaacccagagcgtagaaggactaaaacagtactgtttggtacctgagagagagatgaaacacatagaaaggcacatacatcaaacaggaaaggctggagaatttaagaacaaaccatttagacaagtactacaaccccccaatgaaacaaaattaccaaaaattatgccagaagggcatggcatccagaacgcacagagaagaaagcaggtaaatgagagggaacagatgcagactaaggatcaccaggaacgcatgattcgagggagagaacttgcagaacaaagactcaaggagagaatcttgagaagaagccagagccagctacttacatatgagaagcatgagagagtaaaagagataaaggagtttgaaagagttattgcgtatcttcttttccaaccatgcagtagaagtcggattaaagtgagtattcttatggataagtctcagaatggagagaaggtgaatacaattgtgaaaccatatcaaagaaaattcttggcaatgccaccctttttaagaagtcaaataggaaaaataagagattaaagtttcaatgctgttatgataaaatcatatctcttaagtgaacccttttttttttcaaatgctcgttctctccagggttcagtgaatattcccatttgtatcagatacagatagatagttctgcacttgaaaattagcttaacttttttagttgacttgcatttgttcaagttgcatatcctttctagtgttcagtgtcctcatctttaaaatggcaataatatttgatggcatttatggaaggactgttttttttgtgaagtgtaggtatgtattagttgtttcataaatgttagtttccccacttggaaagaccggggttgggcaatggtggtgaataaagaattgttctaatctacttctcttattctccctgttcccagccctccaaggttattttgatgagattgctatagtttagtatatggtctttaatatcataccttcatcagataactactagccagcccctaaaagtgtaacttgctctgtacaatttatttgaatgagaaacttaattttgagagcctcctacatgctaggcattatgttagttactgaaggtgaataaagagaagtctctgcccttgaataattttcaactaatggcatagatcactctataaacagataatgtagtaaataaaggttacaatagaaaggtacagggtgctttacaaaggacggattctaacctggcccaggtgagcagggtgaaaaggaggaaggttagggaagggagtattatagtctgtcatgtttcttccagctttttttgtcacttcctatcacccacttaagcaagaccttcctaatgcttggatccactcagggataatcaaactcagcctttctcaaactcatgtttttggcactcattgataaatcagaaagcaaatttataaatttagtgagaattacagttgtcaagcagaatgaaatttgtgttttctagtcagtttattttcttcccagataccagaaagttgggaaagcaggggttcagagttggtaagcagagaagcaaataaatggaaatagatgccctcaggaatattatgcttaagttgtgataattctgatgcccaccttgctttactagcagaacaccctttaccctggatactgctaggtcagccactgatacaaatgttctgtgtctgtgctcctcagtacagtagcccttgctacacgtggctgttgaggcatttaaaatgtggctggtgcagctgtggaatggaatgtttaattgaatttcatttaaatttaaattgccacatgtggcaagtgactaccctgttgcacagtgtagcactggataaacataacttctgtgttctagattccagtcccaccattagctttctgtttttgacagtgtttgctggtatgataggtcactgttcattttacattactatcagtttagtttcctttgcatttcagaggctccctaatcccttaaagagatttaaaaatcaatgtagaccacttctgtgtgaaaataagatgactgaatttgctttgattggaattaggaactgacctctctttgctagttctggaatttggccaggatgcacatcaaaatctcattcctaccctcctgatttgcctcatggaaacttcgttgctgtgtctgttctctggtcctctattgctatgtctcagctttagattctatgttttgcatagaaatggatcatcagaatgcaacaggcagaagacttagaagtgcaaatcagtagggtaatgacaagccctttgagctgagtgggactgaaaagtaacctaacatataacctattagtaattgtttaccatgaaggttttcagtgctggacacataaattgctgagttcaactgccctctttcccctccaaatctagcataaaagcaactggtgctctcagggcaatttcacacctaatacggctaagaataaaagtctatgtttcaggaactcagtttgtccaaacctgcatccatcatctacctcaaattatatccaccttttcatttctttgcactgtgtctgcttaaatcttgagtcacacttaatgttttttttttggtcttttttctttttaatgtgaaatagaatatacaatacacaaatgaaaatgtatatttagaagaacaataataaatgtccaggtgccngttgctcagactgagaaatggaacattactacatcccaggagcctcgtatgctctcattcatatctctctcccctgcagccagaggcaaccactatcctgaattttgtataactgtcacctagcttttatagattttactgtctgtgtatccctaacagttgcttatttatagcctttatataaatagaattatactgtatatgactgactacttttgctcattattatttttggattcatccatgttgatgtgtgacactgtagttcatttccatgacatgaatatgccacaacttaattatatattctgttgatgtcatttagttgtttccagtttttgttttatttttcttttaaaaatgatacttagataaacattaacatgtttaatcttatgttctggtgactgtgtactagatatatgtatgatatataaattgtggtacatttatttgacaggcctgatcttgaagcctgttagatttctgttcctttgtggcattatgcctgtaagcctgttctgtagagtctggcacatgttagcctcttaatagatatttgttgaaagaaaggacatttgttaactgctggagacaggcccaaaatacataaatagctgataacagaccactttagctttttactcatcttgtccaggtacaatcatagtcaacctctgtttatgcttatatttcagttgaggtactaaaatatttgtttacttagttggttttcagtgagcttccagtacaggatttgtttctctttctgtcacttttcccaaaactttcactccactgccttctagaaaagatcacccacatgtcntctcctcaaggcacctgcagcacgaaagttttatttctgaacaaaagggtccccagagaaggagacaaggagtctcctttcagtacgaggttgctggagtccctagagggtcaaaggctgtgtaataacagttccttcttgtctgctggacaaaagcttctgagccctcaagcaccctgtgacttagttctgatagagtactgagtttggaaatggcagagtggggacccaaaacaaatcttccaattccaaattcagttttatccaccttttcaaataagattaaaaaatgttaatgtctgttgatttgtgtgtgttgaaccactcttgtatccctgggatgaatcccaattaattgtggtatatttttgatatgttgttggattcagtttgctaaaattttgttcaggatttttgtgtatattttcactaggaagattggcctgtaattttctttttttttgtattcttctctgcttttggtatcagggcaatgcaggcttcataaaatgagttaagaataattccttcctcttcagttttttttaaatattttgagaagtattggtattaatttttctttgtatgtatggtagaatttgacaggaaagccatctggtcctgggcttttctttattgagacacttttaattactgattcagtcttattactcattgttggtctgttcaagttttctatttgttcctggtgaaatgtctacaaaaatnacaaaaattagctgggtgtggtggcatgtgcatgtagtcccagctacttagggggctgaggcaggaggatcgcttgaacctcaggaggttaaggctgcagtgagctggtattgcgccactgtgttgcagcctgggtgacaaagtgagaccctatctcaaaaataaaaaaaattcatatggaaccacaaaagagccccatccaatagttaagctatagtaatagctttgtaactgttatagtagaaaccaaatcatcatggtaccggcctaaaacagacacatagaccaatggaaagaatagagaacccagaaataatttcatatacttacagccaactgactttcaacaaaggcaccaagaaaggacacccttttcaataaatggtgctgggaaaactggatatccatatgcagaagattgcagctaggctcatatctcttaccatattaaaaaatcaaccaaaaatggattaaaggcttaaatgatagatccgaaactatgaaactactaaaagagaatataggggaaatgctcaagaacattggtctaggcaaagattttatggttaagacatcaaaagcataggcaacaacaacaaaaaataggcaggtgggactatattaaactaaaaatctgcacagcaaagaaaacaacagagtgaagagaccaactgtagatgggaacaatattttcaaattatccaacaggggactaatatccagagtgtacaaggaacacaattcaacagtaaa

SEQ ID NO: 287797 - DNA, 7778 bp, Homo sapiens
  misc_feature (5467)..(5467): n is a, c, g, or t
  misc_feature (6296)..(6296): n is a, c, g, or t
  misc_feature (7025)..(7025): n is a, c, g, or t
gccacagcgaatacaggtgaccgtatcctgagccccgggcagaggcaggaccgagccgcaatctgaacagaaatccaggtccgactgaaagctggagcaagtattggcgaggtccatgacagacatgcggtcgggtctgaggagggagttggaagtttattaacaaaagagagaagagttcctgtcccagaggtcgtaactattctgtcccaggacctaggagtatataacccgaaccctcctgccacgcacgcctcctgcctctgcgaccaaggagccgaaacgcccggaattcccagacagcgtcgggtactaaaggacttggaaccctttccaggggccggtgagaggagttaaccaactccgtgggctagagcgccagctctgcgcccgcggcggggcagcgagatagagccggctagagcgtcaggctttcgcgttgacgattggctgtgacgtcataattaattgcgaaccgtgtctcgggagcgttagagatggagactaacgtcttccaagggagattgcgtctccactttcaccctggtactgagaggttgagcacaaaattggtaaccaatgctgcgcttccagcaaattttcccaccagcacccaatcctgggatatttattctctttgtctcacatcctacaggaacgcagtcgcggggtatatccccctgaaaaccgtacgttgccaaataatgatttctttggattagagaactacaactcccctgggtcctgagccggtatttcccttttgcggctgcaccgtagttaaaaacaaagctaagtgttctgggacgtatagttctagcgttccttgggtcccgctggcgagcgtgggctttctgcagctcgcaaccggcctcgtgctttgcggacggttcactgcgcttggaaaggggtgagtcggctttttgagggacagcaagtggtgagagtgaaggcccgaggaatgcttagtcccacgggacgaaaggaagcagggatgaagtggtacacttgagaaggggttcaggactttggaggtggtggaacagaggagcttggggcttcctctccttcgactcctgccagataagtgaggctagcagtagtcaagaaagctcattaagtaggatttcataagacttaggtcgagtttggcttttagttgtgcctgccgcctatcgaactcttaattcattatgtcatccgttaagtggacagctgacatttccctgatcttttataaaacatgagaataagtatctttgggaaatctttctattttcattaatctgtaacttatattccaagtagaaactttccctgaaggggcagcttgtagttgtttactagtttcctgctagccctcccaccaccatccactctgatagctgtgctaagttcattcatataaaagttctggagccatcactgttttctcctatgaaggacacaagctgtagtcttttcgctgggagaggctcccatctgcctttctctgtaataatggagagaacgccatagtgaaagggttaaaactcagcaaactgctgaagagtgacaagccctatcacttaactgtgaaattgcttgttattctgtcttacaaagggagacgtgttgttgagctgattgtcgtagacagtttttattctcacttatctgtgtgtctcctttgaaaatggaacttgaaattctaccctcctcagttttctgtttttaatttgaaaaacagccaacatccccaagctctttacatctaattcatatttgttctttataaccctgagaggcagatttttgtcttacatctccattttatagatgagaaagctgacagaagttacttgccctgagtcacacacctaggaagtggtagaattagatttcagatctagctctgtcagactgtaaagaccatcctttgaactctaaatggtataaaagacatacagaggaaatgccaggcatcctcagtggcttaaatacgacatcacagtaaactcaggctagaccagggatgacacataaaagatgatagttttcatttgtgttgccatcagcctcctctataaataaacccagagtaaccacaaattgccatcctgaggggttcaacagggaatagtctcataatggatttagagtgaaggatgattggcattgttagtcaggcaagcagagggctgagcagtcaaataacagaatttcagaacaaaagattagagggcagaaatgctgtatgtgctgatagagtcagagagggcccggatcaagaaactgcaggaagagaaaactagaaacctagaatcgtctagaaaactagaacctacaatcgtctcagaacacaaaggaggcttgaggactgagcagactgacatagatgtacttggacaacacctcaccaaggagcatgtctcttcccactcacaatccccaatacgagattcacagtggttcacgctgagtccacaggaaaaattggcctggggtacatcatctaaagatcctaggattgctgcaggtcagcagtctccactggaaaaaaagatcttgaatctaggtggtgtgcatacaacagcagcaagacagttgataatgcagaaatatcaggaggagtgtgaaatactctgtagggagcaagctgtttctcttgactactggcttgccaaagcagagtcttattataataaaataatagtggaaatgatgaaagaagagacaggcaatgaaatctagaaaaaaatggaggagaaaacaacccagagcgtagaaggactaaaacagtactgtttggtacctgagagagagatgaaacacatagaaaggcacatacatcaaacaggaaaggctggagaatttaagaacaaaccatttagacaagtactacaaccccccaatgaaacaaaattaccaaaaattatgccagaagggcatggcatccagaacgcacagagaagaaagcaggtaaatgagagggaacagatgcagactaaggatcaccaggaacgcatgattcgagggagagaacttgcagaacaaagactcaaggagagaatcttgagaagaagccagagccagctacttacatatgagaagcatgagagagtaaaagagataaaggagtttgaaagagttattgcgtatcttcttttccaaccatgcagtagaagtcggattaaagtgagtattcttatggataagtctcagaatggagagaaggtgaatacaattgtgaaaccatatcaaagaaaattcttggcaatgccaccctttttaagaagtcaaataggaaaaataagagattaaagtttcaatgctgttatgataaaatcatatctcttaagtgaacccttttttttttcaaatgctcgttctctccagggttcagtgaatattcccatttgtatcagatacagatagatagttctgcacttgaaaattagcttaacttttttagttgacttgcatttgttcaagttgcatatcctttctagtgttcagtgtcctcatctttaaaatggcaataatatttgatggcatttatggaaggactgttttttttgtgaagtgtaggtatgtattagttgtttcataaatgttagtttccccacttggaaagaccggggttgggcaatggtggtgaataaagaattgttctaatctacttctcttattctccctgttcccagccctccaaggttattttgatgagattgctatagtttagtatatggtctttaatatcataccttcatcagataactactagccagcccctaaaagtgtaacttgctctgtacaatttatttgaatgagaaacttaattttgagagcctcctacatgctaggcattatgttagttactgaaggtgaataaagagaagtctctgcccttgaataattttcaactaatggcatagatcactctataaacagataatgtagtaaataaaggttacaatagaaaggtacagggtgctttacaaaggacggattctaacctggcccaggtgagcagggtgaaaaggaggaaggttagggaagggagtattatagtctgtcatgtttcttccagctttttttgtcacttcctatcacccacttaagcaagaccttcctaatgcttggatccactcagggataatcaaactcagcctttctcaaactcatgtttttggcactcattgataaatcagaaagcaaatttataaatttagtgagaattacagttgtcaagcagaatgaaatttgtgttttctagtcagtttattttcttcccagataccagaaagttgggaaagcaggggttcagagttggtaagcagagaagcaaataaatggaaatagatgccctcaggaatattatgcttaagttgtgataattctgatgcccaccttgctttactagcagaacaccctttaccctggatactgctaggtcagccactgatacaaatgttctgtgtctgtgctcctcagtacagtagcccttgctacacgtggctgttgaggcatttaaaatgtggctggtgcagctgtggaatggaatgtttaattgaatttcatttaaatttaaattgccacatgtggcaagtgactaccctgttgcacagtgtagcactggataaacataacttctgtgttctagattccagtcccaccattagctttctgtttttgacagtgtttgctggtatgataggtcactgttcattttacattactatcagtttagtttcctttgcatttcagaggctccctaatcccttaaagagatttaaaaatcaatgtagaccacttctgtgtgaaaataagatgactgaatttgctttgattggaattaggaactgacctctctttgctagttctggaatttggccaggatgcacatcaaaatctcattcctaccctcctgatttgcctcatggaaacttcgttgctgtgtctgttctctggtcctctattgctatgtctcagctttagattctatgttttgcatagaaatggatcatcagaatgcaacaggcagaagacttagaagtgcaaatcagtagggtaatgacaagccctttgagctgagtgggactgaaaagtaacctaacatataacctattagtaattgtttaccatgaaggttttcagtgctggacacataaattgctgagttcaactgccctctttcccctccaaatctagcataaaagcaactggtgctctcagggcaatttcacacctaatacggctaagaataaaagtctatgtttcaggaactcagtttgtccaaacctgcatccatcatctacctcaaattatatccaccttttcatttctttgcactgtgtctgcttaaatcttgagtcacacttaatgttttttttttggtcttttttctttttaatgtgaaatagaatatacaatacacaaatgaaaatgtatatttagaagaacaataataaatgtccaggtgccngttgctcagactgagaaatggaacattactacatcccaggagcctcgtatgctctcattcatatctctctcccctgcagccagaggcaaccactatcctgaattttgtataactgtcacctagcttttatagattttactgtctgtgtatccctaacagttgcttatttatagcctttatataaatagaattatactgtatatgactgactacttttgctcattattatttttggattcatccatgttgatgtgtgacactgtagttcatttccatgacatgaatatgccacaacttaattatatattctgttgatgtcatttagttgtttccagtttttgttttatttttcttttaaaaatgatacttagataaacattaacatgtttaatcttatgttctggtgactgtgtactagatatatgtatgatatataaattgtggtacatttatttgacaggcctgatcttgaagcctgttagatttctgttcctttgtggcattatgcctgtaagcctgttctgtagagtctggcacatgttagcctcttaatagatatttgttgaaagaaaggacatttgttaactgctggagacaggcccaaaatacataaatagctgataacagaccactttagctttttactcatcttgtccaggtacaatcatagtcaacctctgtttatgcttatatttcagttgaggtactaaaatatttgtttacttagttggttttcagtgagcttccagtacaggatttgtttctctttctgtcacttttcccaaaactttcactccactgccttctagaaaagatcacccacatgtcntctcctcaaggcacctgcagcacgaaagttttatttctgaacaaaagggtccccagagaaggagacaaggagtctcctttcagtacgaggttgctggagtccctagagggtcaaaggctgtgtaataacagttccttcttgtctgctggacaaaagcttctgagccctcaagcaccctgtgacttagttctgatagagtactgagtttggaaatggcagagtggggacccaaaacaaatcttccaattccaaattcagttttatccaccttttcaaataagattaaaaaatgttaatgtctgttgatttgtgtgtgttgaaccactcttgtatccctgggatgaatcccaattaattgtggtatatttttgatatgttgttggattcagtttgctaaaattttgttcaggatttttgtgtatattttcactaggaagattggcctgtaattttctttttttttgtattcttctctgcttttggtatcagggcaatgcaggcttcataaaatgagttaagaataattccttcctcttcagttttttttaaatattttgagaagtattggtattaatttttctttgtatgtatggtagaatttgacaggaaagccatctggtcctgggcttttctttattgagacacttttaattactgattcagtcttattactcattgttggtctgttcaagttttctatttgttcctggtgaaatgtctacaaaaatnacaaaaattagctgggtgtggtggcatgtgcatgtagtcccagctacttagggggctgaggcaggaggatcgcttgaacctcaggaggttaaggctgcagtgagctggtattgcgccactgtgttgcagcctgggtgacaaagtgagaccctatctcaaaaataaaaaaaattcatatggaaccacaaaagagccccatccaatagttaagctatagtaatagctttgtaactgttatagtagaaaccaaatcatcatggtaccggcctaaaacagacacatagaccaatggaaagaatagagaacccagaaataatttcatatacttacagccaactgactttcaacaaaggcaccaagaaaggacacccttttcaataaatggtgctgggaaaactggatatccatatgcagaagattgcagctaggctcatatctcttaccatattaaaaaatcaaccaaaaatggattaaaggcttaaatgatagatccgaaactatgaaactactaaaagagaatataggggaaatgctcaagaacattggtctaggcaaagattttatggttaagacatcaaaagcataggcaacaacaacaaaaaataggcaggtgggactatattaaactaaaaatctgcacagcaaagaaaacaacagagtgaagagaccaactgtagatgggaacaatattttcaaattatccaacaggggactaatatccagagtgtacaaggaacacaattcaacagtaaa

SEQ ID NO: 287798 - DNA, 5863 bp, Homo sapiens
gccacagcgaatacaggtgaccgtatcctgagccccgggcagaggcaggaccgagccgcaatctgaacagaaatccaggtccgactgaaagctggagcaagtattggcgaggtccatgacagacatgcggtcgggtctgaggagggagttggaagtttattaacaaaagagagaagagttcctgtcccagaggtcgtaactattctgtcccaggacctaggagtatataacccgaaccctcctgccacgcacgcctcctgcctctgcgaccaaggagccgaaacgcccggaattcccagacagcgtcgggtactaaaggacttggaaccctttccaggggccggtgagaggagttaaccaactccgtgggctagagcgccagctctgcgcccgcggcggggcagcgagatagagccggctagagcgtcaggctttcgcgttgacgattggctgtgacgtcataattaattgcgaaccgtgtctcgggagcgttagagatggagactaacgtcttccaagggagattgcgtctccactttcaccctggtactgagaggttgagcacaaaattggtaaccaatgctgcgcttccagcaaattttcccaccagcacccaatcctgggatatttattctctttgtctcacatcctacaggaacgcagtcgcggggtatatccccctgaaaaccgtacgttgccaaataatgatttctttggattagagaactacaactcccctgggtcctgagccggtatttcccttttgcggctgcaccgtagttaaaaacaaagctaagtgttctgggacgtatagttctagcgttccttgggtcccgctggcgagcgtgggctttctgcagctcgcaaccggcctcgtgctttgcggacggttcactgcgcttggaaaggggtgagtcggctttttgagggacagcaagtggtgagagtgaaggcccgaggaatgcttagtcccacgggacgaaaggaagcagggatgaagtggtacacttgagaaggggttcaggactttggaggtggtggaacagaggagcttggggcttcctctccttcgactcctgccagataagtgaggctagcagtagtcaagaaagctcattaagtaggatttcataagacttaggtcgagtttggcttttagttgtgcctgccgcctatcgaactcttaattcattatgtcatccgttaagtggacagctgacatttccctgatcttttataaaacatgagaataagtatctttgggaaatctttctattttcattaatctgtaacttatattccaagtagaaactttccctgaaggggcagcttgtagttgtttactagtttcctgctagccctcccaccaccatccactctgatagctgtgctaagttcattcatataaaagttctggagccatcactgttttctcctatgaaggacacaagctgtagtcttttcgctgggagaggctcccatctgcctttctctgtaataatggagagaacgccatagtgaaagggttaaaactcagcaaactgctgaagagtgacaagccctatcacttaactgtgaaattgcttgttattctgtcttacaaagggagacgtgttgttgagctgattgtcgtagacagtttttattctcacttatctgtgtgtctcctttgaaaatggaacttgaaattctaccctcctcagttttctgtttttaatttgaaaaacagccaacatcccctgtgaattgcagtaaaggaacaaagcattaaaaggcatatccttttcccaacaaaagctcacagtctaatcagtaaagatttattgagcaactatgccaggttttgagctgaggctgagcctgcaaagttgaaatctgtgttctctgacctcaaggaacatgaatgaataattagaatataataaaactgtgctagtaggtacaaaatgtgagagcccagaacatgcatataaagcaaacatatctgtaaacttcaaggaagactgggaaatggcttaataaaaatagatacaatgttatggcagatatttaaaaaagatgctcagatattatgtgtcaaggatcatcagcaatcagcaaatcattaattttgagaacttgggatcacagactctaatgttaagtattgtgctagaagccatgtacagagaagtaaaagtaagatgatcatacgtttacaatctcaaaataagcttacgtagacaaataagaatgttcctaagaggtcagtgagaccaaatatttgatatcagatcctttccaacaatatagaggcatcatatttgtagatataaattacagttttcattccttatgagcctaaatttcagcatcaaaatgttaaaagtgatatgtgaatacagatatcacagtgtaaaccacgattaattttcaaatgagttgtagaattaaaatatgtcaagtatttagaggaagggaagatcactgacagagtagactggaaagactttataatcaggagcttgacctgtgaaggacagatagatagaatttattgagaacttaccaagctctttacatctaattcatatttgttctttataaccctgagaggcagatttttgtcttacatctccattttatagatgagaaagctgacagaagttacttgccctgagtcacacacctaggaagtggtagaattagatttcagatctagctctgtcagactgtaaagaccatcctttgaactctaaatggtataaaagacatacagaggaaatgccaggcatcctcagtggcttaaatacgacatcacagtaaactcaggctagaccagggatgacacataaaagatgatagttttcatttgtgttgccatcagcctcctctataaataaacccagagtaaccacaaattgccatcctgaggggttcaacagggaatagtctcataatggatttagagtgaaggatgattggcattgttagtcaggcaagcagagggctgagcagtcaaataacagaatttcagaacaaaagattagagggcagaaatgctgtatgtgctgatagagtcagagagggcccggatcaagaaactgcaggaagagaaaactagaaacctagaatcgtctagaaaactagaacctacaatcgtctcagaacacaaaggaggcttgaggactgagcagactgacatagatgtacttggacaacacctcaccaaggagcatgtctcttcccactcacaatccccaatacgagattcacagtggttcacgctgagtccacaggaaaaattggcctggggtacatcatctaaagatcctaggattgctgcaggtcagcagtctccactggaaaaaaagatcttgaatctaggtggtgtgcatacaacagcagcaagacagttgataatgcagaaatatcaggaggagtgtgaaatactctgtagggagcaagctgtttctcttgactactggcttgccaaagcagagtcttattataataaaataatagtggaaatgatgaaagaagagacaggcaatgaaatctagaaaaaaatggaggagaaaacaacccagagcgtagaaggactaaaacagtactgtttggtacctgagagagagatgaaacacatagaaaggcacatacatcaaacaggaaaggctggagaatttaagaacaaaccatttagacaagtactacaaccccccaatgaaacaaaattaccaaaaattatgccagaagggcatggcatccagaacgcacagagaagaaagcaggtaaatgagagggaacagatgcagactaaggatcaccaggaacgcatgattcgagggagagaacttgcagaacaaagactcaaggagagaatcttgagaagaagccagagccagctacttacatatgagaagcatgagagagtaaaagagataaaggagtttgaaagagttattgcgtatcttcttttccaaccatgcagtagaagtcggattaaacatgtatttcaagtcctctgatgaatcatgtgatctactagaccctgaagatacagtgaagagcaaaagaacacggatgaaatgagaaacaaaaacgatggagaaaaccaaaaaaggggacacatgggatccaggcaataggagagccagcataagagagaggcagagggatgcccaggatgaggtgaagacgatcttggaaatcagcccagatgtgcatgcaccagtccacgtgtggcaggaccaagggaagtgtcttcacaaagatgaggctttgatttgttggagaaactgttaccagaaaaacaggtcccgatcccgaccccaaaagagtattcttggatcttgcacaggaaggaattaaaggggtacactcctttggaaaccagaacctcgtatcctgcacagcccagtgttgggagataaaatatgcgaaataccccattgagtgaatctaagagattggacatggagccaaacctgcttccgccttttgatttctggacacacatgttcttcctattgagaacacagaactctagagacgtctctgattcaaacaatgcactgtgtcctgaaagatggcacccacccctcagagtgcttcctccaggctggcactgagttgtgcctgtagaagacctgtccagccttccttgtggctggcagctcctgggtagtgcagatggtgataggattagtggaacccacagccgtggaaacactgaaactttccctgcaaagtgggtccttcaggcagataatgggctaggagcactgcctagcctgcagaccaggaatgtcaacagcacccagagagtggtgctggctgtgtctgagagcaggacaggaaaacccacccatagaatcggtacctaaccctgtgaagatgaaactctggcccttccaggtggaagtagctaaatgtagtcaacttgttacttagtgggtagtcatgtaaagaaatagtgccccactagggcacatcatgggcctcaattgctgatgagttggacattcagaggtggcagcagctggatctgccttggtgtggggaagtcagtgctgctggccccttacggagcctcatgcctgccactgtggttgctccattcatgcactcatcctaccaggcctgggctgacccatggtgaaagctggctaactgccatttgtctgtttggtagttcagtgccacttcagacttgggtgttttctgtgggtgtcagcaagggattcaagctcaacccaggtggactgttttcacctgatgatgaatgctgttgggcctgtaccatctatgactttgtgggtcacacaggcacttggaaccccgtagttgcttggtatcccgtggtcaaacattctattgaatcaggacaaggaacactaaaagttgcttctaacagggggcatgtgtctctgctgtggatgacatgatcttactccagaatcccaggccctccactgtgactctcccactggtgcttggttcagctccatcctgtgtctttccccaccactggcaccaccagccccaggggtctgagggatggtggctgcttgtaccatggcctggatctgctgcagggtcctttcctgtgtaggccccacttgaagctggcatcctcctatgtcacctagactgtgggccaaagcaaaatgtctagatgtggaatgtggtgttgttataattcaaagaggctcaccaagcagtgtgcttccttgcttctggtgaggatgcaagatgcaacagtttttcttttaccttggaggggacacacctgcattcccctaaacacttggcacttgttcacccataaaacttcacttcagtgcccacctttgaagctgtataaggtttatcttcaccttgt

SEQ ID NO: 287799 - DNA, 2497 bp, Homo sapiens
gccacagcgaatacaggtgaccgtatcctgagccccgggcagaggcaggaccgagccgcaatctgaacagaaatccaggtccgactgaaagctggagcaagtattggcgaggtccatgacagacatgcggtcgggtctgaggagggagttggaagtttattaacaaaagagagaagagttcctgtcccagaggtcgtaactattctgtcccaggacctaggagtatataacccgaaccctcctgccacgcacgcctcctgcctctgcgaccaaggagccgaaacgcccggaattcccagacagcgtcgggtactaaaggacttggaaccctttccaggggccggtgagaggagttaaccaactccgtgggctagagcgccagctctgcgcccgcggcggggcagcgagatagagccggctagagcgtcaggctttcgcgttgacgattggctgtgacgtcataattaattgcgaaccgtgtctcgggagcgttagagatggagactaacgtcttccaagggagattgcgtctccactttcaccctggtactgagaggttgagcacaaaattggtaaccaatgctgcgcttccagcaaattttcccaccagcacccaatcctgggatatttattctctttgtctcacatcctacaggaacgcagtcgcggggtatatccccctgaaaaccgtacgttgccaaataatgatttctttggattagagaactacaactcccctgggtcctgagccggtatttcccttttgcggctgcaccgtagttaaaaacaaagctaagtgttctgggacgtatagttctagcgttccttgggtcccgctggcgagcgtgggctttctgcagctcgcaaccggcctcgtgctttgcggacggttcactgcgcttggaaagggattggcctggggtacatcatctaaagatcctaggattgctgcaggtcagcagtctccactggaaaaaaagatcttggggtacactcctttggaaaccagaacctcgtatcctgcacagcccagtgttgggagataaaatatgcgaaataccccattgagtgaatctaagagattggacatggagccaaacctgcttccgccttttgatttctggacacacatgttcttcctattgagaacacagaactctagagacgtctctgattcaaacaatgcactgtgtcctgaaagatggcacccacccctcagagtgcttcctccaggctggcactgagttgtgcctgtagaagacctgtccagccttccttgtggctggcagctcctgggtagtgcagatggtgataggattagtggaacccacagccgtggaaacactgaaactttccctgcaaagtgggtccttcaggcagataatgggctaggagcactgcctagcctgcagaccaggaatgtcaacagcacccagagagtggtgctggctgtgtctgagagcaggacaggaaaacccacccatagaatcggtacctaaccctgtgaagatgaaactctggcccttccaggtggaagtagctaaatgtagtcaacttgttacttagtgggtagtcatgtaaagaaatagtgccccactagggcacatcatgggcctcaattgctgatgagttggacattcagaggtggcagcagctggatctgccttggtgtggggaagtcagtgctgctggccccttacggagcctcatgcctgccactgtggttgctccattcatgcactcatcctaccaggcctgggctgacccatggtgaaagctggctaactgccatttgtctgtttggtagttcagtgccacttcagacttgggtgttttctgtgggtgtcagcaagggattcaagctcaacccaggtggactgttttcacctgatgatgaatgctgttgggcctgtaccatctatgactttgtgggtcacacaggcacttggaaccccgtagttgcttggtatcccgtggtcaaacattctattgaatcaggacaaggaacactaaaagttgcttctaacagggggcatgtgtctctgctgtggatgacatgatcttactccagaatcccaggccctccactgtgactctcccactggtgcttggttcagctccatcctgtgtctttccccaccactggcaccaccagccccaggggtctgagggatggtggctgcttgtaccatggcctggatctgctgcagggtcctttcctgtgtaggccccacttgaagctggcatcctcctatgtcacctagactgtgggccaaagcaaaatgtctagatgtggaatgtggtgttgttataattcaaagaggctcaccaagcagtgtgcttccttgcttctggtgaggatgcaagatgcaacagtttttcttttaccttggaggggacacacctgcattcccctaaacacttggcacttgttcacccataaaacttcacttcagtgcccacctttgaagctgtataaggtttatcttcaccttgt

SEQ ID NO: 287800 - DNA, 2780 bp, Homo sapiens
gccacagcgaatacaggtgaccgtatcctgagccccgggcagaggcaggaccgagccgcaatctgaacagaaatccaggtccgactgaaagctggagcaagtattggcgaggtccatgacagacatgcggtcgggtctgaggagggagttggaagtttattaacaaaagagagaagagttcctgtcccagaggtcgtaactattctgtcccaggacctaggagtatataacccgaaccctcctgccacgcacgcctcctgcctctgcgaccaaggagccgaaacgcccggaattcccagacagcgtcgggtactaaaggacttggaaccctttccaggggccggtgagaggagttaaccaactccgtgggctagagcgccagctctgcgcccgcggcggggcagcgagatagagccggctagagcgtcaggctttcgcgttgacgattggctgtgacgtcataattaattgcgaaccgtgtctcgggagcgttagagatggagactaacgtcttccaagggagattgcgtctccactttcaccctggtactgagaggttgagcacaaaattggaacgcagtcgcggggtatatccccctgaaaaccgtacgttgccaaataatgatttctttggattagagaactacaactcccctgggtcctgagccggtatttcccttttgcggctgcaccgtagttaaaaacaaagctaagtgttctgggacgtatagttctagcgttccttgggtcccgctggcgagcgtgggctttctgcagctcgcaaccggcctcgtgctttgcggacggttcactgcgcttggaaagggattggcctggggtacatcatctaaagatcctaggattgctgcaggtcagcagtctccactggaaaaaaagatcttgcatgtatttcaagtcctctgatgaatcatgtgatctactagaccctgaagatacagtgaagagcaaaagaacacggatgaaatgagaaacaaaaacgatggagaaaaccaaaaaaggggacacatgggatccaggcaataggagagccagcataagagagaggcagagggatgcccaggatgaggtgaagacgatcttggaaatcagcccagatgtgcatgcaccagtccacgtgtggcaggaccaagggaagtgtcttcacaaagatgaggctttgatttgttggagaaactgttaccagaaaaacaggtcccgatcccgaccccaaaagagtattcttggatcttgcacaggaaggaattaaaggggtacactcctttggaaaccagaacctcgtatcctgcacagcccagtgttgggagataaaatatgcgaaataccccattgagtgaatctaagagattggacatggagccaaacctgcttccgccttttgatttctggacacacatgttcttcctattgagaacacagaactctagagacgtctctgattcaaacaatgcactgtgtcctgaaagatggcacccacccctcagagtgcttcctccaggctggcactgagttgtgcctgtagaagacctgtccagccttccttgtggctggcagctcctgggtagtgcagatggtgataggattagtggaacccacagccgtggaaacactgaaactttccctgcaaagtgggtccttcaggcagataatgggctaggagcactgcctagcctgcagaccaggaatgtcaacagcacccagagagtggtgctggctgtgtctgagagcaggacaggaaaacccacccatagaatcggtacctaaccctgtgaagatgaaactctggcccttccaggtggaagtagctaaatgtagtcaacttgttacttagtgggtagtcatgtaaagaaatagtgccccactagggcacatcatgggcctcaattgctgatgagttggacattcagaggtggcagcagctggatctgccttggtgtggggaagtcagtgctgctggccccttacggagcctcatgcctgccactgtggttgctccattcatgcactcatcctaccaggcctgggctgacccatggtgaaagctggctaactgccatttgtctgtttggtagttcagtgccacttcagacttgggtgttttctgtgggtgtcagcaagggattcaagctcaacccaggtggactgttttcacctgatgatgaatgctgttgggcctgtaccatctatgactttgtgggtcacacaggcacttggaaccccgtagttgcttggtatcccgtggtcaaacattctattgaatcaggacaaggaacactaaaagttgcttctaacagggggcatgtgtctctgctgtggatgacatgatcttactccagaatcccaggccctccactgtgactctcccactggtgcttggttcagctccatcctgtgtctttccccaccactggcaccaccagccccaggggtctgagggatggtggctgcttgtaccatggcctggatctgctgcagggtcctttcctgtgtaggccccacttgaagctggcatcctcctatgtcacctagactgtgggccaaagcaaaatgtctagatgtggaatgtggtgttgttataattcaaagaggctcaccaagcagtgtgcttccttgcttctggtgaggatgcaagatgcaacagtttttcttttaccttggaggggacacacctgcattcccctaaacacttggcacttgttcacccataaaacttcacttcagtgcccacctttgaagctgtataaggtttatcttcaccttgt

SEQ ID NO: 287801 - DNA, 645 bp, Homo sapiens
gtaagtaaattatcttcacatcatacagtttggaactacacagagaaggaatcttaggtttaaaatccttctgcccaagtgacacattcaggtagtatgtctacactggcaaatgttacccagctatatccacagttgcaaaacaaagtatcatttttggaaacttccaacaccatacatttttaaacctagttactgatttgtggtggtgagtacttaatactttcagagctcccaggctcacctgggagtgatgggaataaaataacaactaagctaaagtaaagagcatgtagcttttcctggtgtcattagggagggtgggcttggctcctgtttaaatgtgttcaaaggaaaaagatgatcacattataaatttctgacttcattttgacagaatctaggtggtgtgcatacaacagcagcaagacagttgataatgcagaaatatcaggaggagtgtgaaatactctgtagggagcaagctgtttctcttgactactggcttgccaaagcagagtcttattataataaaataatagtggaaatgatgaaagaagagacaggcaatgaaatctagaaaaaaatggaggagaaaacaacccagagcgtagaaggactaaaacagtactgtttggtacctga

SEQ ID NO: 287802 - DNA, 1890 bp, Homo sapiens
tgtgggggagcatcgcgagagttacattaactgtggcggcgggaaggcggagcctgcagctggctgggcggttaggagggcccggggccgagacgatggctgaccacaaccctgacagcgactccacgccgcgcacgctgctgcgacgcgtgctggatacagcggacccgcgcaccccgcggcgaccccggagtgctcgggctggagcccggagagccctgcttgaaacggcttcccccaggaagttgagtggccaaacaaggacgatagccagagggcgttcccatggagccaggtctgttggcagatcggcccatattcaggccagtgggcacttggaggaacagacacctcggacgctgctgaagaacatcctactaactgccccagaatcttccatcctgatgcctgagtcggtagtgaagccagtgccagcaccgcaggcggtccaaccctccagacaagagagcagttgcggcagcctggagctgcaacttcctgagctcgagccccccacaaccctggctccaggtctgctggcccctggcaggaggaaacagaggctgagactgtcagtgtttcagcagggagtggaccaggggctgtctctctcccaagagcctcaagggaatgctgatgcctcttccctcaccagatccctcaacctgacctttgccacacctcttcagccacagtcagtgcagaggcctggcttggcccgcagacctccagcccgccgagctgtagacgtgggtgcctttttgcgggatctgcgagatacttccctggctcctccaaacattgtgttggaggacacccagccgttctctcagcccatggttggctcccccaacgtgtatcactccctgccctgcacgcctcacactggggctgaagacgctgagcaggctgccggtcgcaagacacagagcagtgggcctgggctgcagaagaatagcctgggaaaccagcccagtttctggcaggagaggcagaggaggtcaatgcctttgctctgggcttcctgagcaccagcagtggtgtctctggagaagatgaagtagagcccttacacgatggagttgaagaggcagagaaaaagatggaagaagaaggtgtgagtgtgagtgaaatggaggcaacaggagcacaaggacccagcagggtagaagaggctgagggacacacagaggtgacagaagcagagggatcccaggggactgctgaggctgacgggccaggagcatcttcaggggatgaggatgcctctggcagggcagcaagtccagagtcggcctccagcacccctgagtctctccaggccaggcgacatcatcagtttcttgagccagccccagcgcctggtgctgcagtcttatcttcagagcctgcagagcctctgttggtcaggcatccccctaggccccggaccaccggccccaggccccggcaagatccccacaaggctggactgagccactatgtgaaactctttagcttctatgccaagatgcccatggagaggaaggctcttgagatggtggagaagtgcctagataaatatttccagcatctttgtgatgatctggaggtatttgctgctcatgctggccgcaagactgtgaagccagaggacctggagctgctgatgcggcggcagggcctggtcactgaccaagtctcactgcacgtgctagtggagcggcacctgcccctggagtaccggcagctgctcatcccctgtgcatacagtggcaactctgtcttccctgcccagtagtggccaggcttcaacactttccctgtccccacctggggactcttgcccccacatatttctccaggtctcctccccacccccccagcatcaataaagtgtcataaacagaa

SEQ ID NO: 287803 - DNA, 2193 bp, Homo sapiens
tgtgggggagcatcgcgagagttacattaactgtggcggcgggaaggcggagcctgcagctggctgggcggttaggagggcccggggccgagacgatggctgaccacaaccctgacagcgactccacgccgcgcacgctgctgcgacgcgtgctggatacagcggacccgcgcaccccgcggcgaccccggagtgctcgggctggagcccggagagccctgcttgaaacggcttcccccaggaagttgagtggccaaacaaggacgatagccagagggcgttcccatggagccaggtctgttggcagatcggcccatattcaggccagtgggcacttggaggaacagacacctcggacgctgctgaagaacatcctactaactgccccagaatcttccatcctgatgcctgagtcggtagtgaagccagtgccagcaccgcaggcggtccaaccctccagacaagagagcagttgcggcagcctggagctgcaacttcctgagctcgagccccccacaaccctggctccaggtctgctggcccctggcaggaggaaacagaggctgagactgtcagtgtttcagcagggagtggaccaggggctgtctctctcccaagagcctcaagggaatgctgatgcctcttccctcaccagatccctcaacctgacctttgccacacctcttcagccacagtcagtgcagaggcctggcttggcccgcagacctccagcccgccgagctgtagacgtgggtgcctttttgcgggatctgcgagatacttccctggctcctccaaacattgtgttggaggacacccagccgttctctcagcccatggttggctcccccaacgtgtatcactccctgccctgcacgcctcacactggggctgaagacgctgagcaggctgccggtcgcaagacacagagcagtgggcctgggctgcagaagaatagtgagtgtgtggcactggtggcctggagccaaatttagcttgggtgagagttgacaatggtagttttccttcctcaagcccctctgtgcccctagagcaccctggctgtggctgcctccttcatccaagagcagagtccatgttgggccaggagacttcagatccatgtcctggtgctgcctctggctttgtctttcctcagtgggcaggactgggtctgctggtccatctttacccttctctgagctatgcagccttggcctgctgcgtctccggcctgtattctctccccttcactcaggcgcctgggaaaccagcccagtttctggcaggagaggcagaggaggtcaatgcctttgctctgggcttcctgagcaccagcagtggtgtctctggagaagatgaagtagagcccttacacgatggagttgaagaggcagagaaaaagatggaagaagaaggtgtgagtgtgagtgaaatggaggcaacaggagcacaaggacccagcagggtagaagaggctgagggacacacagaggtgacagaagcagagggatcccaggggactgctgaggctgacgggccaggagcatcttcaggggatgaggatgcctctggcagggcagcaagtccagagtcggcctccagcacccctgagtctctccaggccaggcgacatcatcagtttcttgagccagccccagcgcctggtgctgcagtcttatcttcagagcctgcagagcctctgttggtcaggcatccccctaggccccggaccaccggccccaggccccggcaagatccccacaaggctggactgagccactatgtgaaactctttagcttctatgccaagatgcccatggagaggaaggctcttgagatggtggagaagtgcctagataaatatttccagcatctttgtgatgatctggaggtatttgctgctcatgctggccgcaagactgtgaagccagaggacctggagctgctgatgcggcggcagggcctggtcactgaccaagtctcactgcacgtgctagtggagcggcacctgcccctggagtaccggcagctgctcatcccctgtgcatacagtggcaactctgtcttccctgcccagtagtggccaggcttcaacactttccctgtccccacctggggactcttgcccccacatatttctccaggtctcctccccacccccccagcatcaataaagtgtcataaacagaa

SEQ ID NO: 287804 - DNA, 1101 bp, Homo sapiens
  misc_feature (1093)..(1093): n is a, c, g, or t
tgtgggggagcatcgcgagagttacattaactgtggcggcgggaaggcggagcctgcagctggctgggcggttaggagggcccggggccgagacgatggctgaccacaaccctgacagcgactccacgccgcgcacgctgctgcgacgcgtgctggatacagcggacccgcgcaccccgcggcgaccccggagtgctcgggctggagcccggagagccctgcttgaaacggcttcccccaggaagttgagtggccaaacaaggacgatagccagagggcgttcccatggagccaggtctgttggcagatcggcccatattcaggccagtgggcacttggaggaacagacacctcggacgctgctgaagaacatcctactaactgccccagaatcttccatcctgatgcctgagtcggtagtgaagccagtgccagcaccgcaggcggtccaaccctccagacaagagagcagttgcggcagcctggagctgcaacttcctgagctcgagccccccacaaccctggctccaggtctgctggcccctggcaggaggaaacagaggctgagactgtcagtgtttcagcagggagtggaccaggggctgtctctctcccaagagcctcaagggaatgctgatgcctcttccctcaccagatccctcaacctgacctttgccacacctcttcagccacagtcagtgcagaggcctggcttggcccgcagacctccagcccgccgagctgtagacgtgggtgcctttttgcgggatctgcgagatacttccctggctcctccaaacattgtgttggaggacacccagccgttctctcagcccatggttggctcccccaacgtgtatcactccctgccctgcacgcctcacactggggctgaagacgctgagcaggctgccggtcgcaagacacagagcagtgggcctgggctgcagaagaatactggacagcatttgagaagaagagtatgttgttgtctgagaagagtgtgttgagagatgagtactaagatgatgaagaaaagtgaagagtattatatgagaagaaagacaagtaaagtagaaaatagagagatcangattagta

SEQ ID NO: 287805 - DNA, 2105 bp, Homo sapiens
tgtgggggagcatcgcgagagttacattaactgtggcggcgggaaggcggagcctgcagctggctgggcggttaggagggcccggggccgagacgatggctgaccacaaccctgacagcgactccacgccgcgcacgctgctgcgacgcgtgctggatacagcggacccgcgcaccccgcggcgaccccggagtgctcgggctggagcccggagagccctgcttgaaacggcttcccccaggaagttgagtggccaaacaaggacgatagccagagggcgttcccatggagccaggtctgttggcagatcggcccatattcaggccagtgggcacttggaggaacagacacctcggacgctgctgaagaacatcctactaactgccccagaatcttccatcctgatgcctgagtcggtagtgaagccagtgccagcaccgcaggcggtccaaccctccagacaagagagcagttgcggcagcctggagctgcaacttcctgagctcgagccccccacaaccctggctccaggtctgctggcccctggcaggaggaaacagaggctgagactgtcagtgtttcagcagggagtggaccaggggctgtctctctcccaagagcctcaagggaatgctgatgcctcttccctcaccagatccctcaacctgacctttgccacacctcttcagccacagtcagtgcagaggcctggcttggcccgcagacctccagcccgccgagctgtagacgtgggtgcctttttgcgggatctgcgagatacttccctggctcctccaaacattgtgttggaggacacccagccgttctctcagcccatggttggctcccccaacgtgtatcactccctgccctgcacgcctcacactggggctgaagacgctgagcaggctgccggtcgcaagacacagagcagtgggcctgggctgcagaagaatagtgagtgtgtggcactggtggcctggagccaaatttagcttgggtgagagttgacaatggtagttttccttcctcaagcccctctgtgcccctagagcaccctggctgtggctgcctccttcatccaagagcagagtccatctttacccttctctgagctatgcagccttggcctgctgcgtctccggcctgtattctctccccttcactcaggcgcctgggaaaccagcccagtttctggcaggagaggcagaggaggtcaatgcctttgctctgggcttcctgagcaccagcagtggtgtctctggagaagatgaagtagagcccttacacgatggagttgaagaggcagagaaaaagatggaagaagaaggtgtgagtgtgagtgaaatggaggcaacaggagcacaaggacccagcagggtagaagaggctgagggacacacagaggtgacagaagcagagggatcccaggggactgctgaggctgacgggccaggagcatcttcaggggatgaggatgcctctggcagggcagcaagtccagagtcggcctccagcacccctgagtctctccaggccaggcgacatcatcagtttcttgagccagccccagcgcctggtgctgcagtcttatcttcagagcctgcagagcctctgttggtcaggcatccccctaggccccggaccaccggccccaggccccggcaagatccccacaaggctggactgagccactatgtgaaactctttagcttctatgccaagatgcccatggagaggaaggctcttgagatggtggagaagtgcctagataaatatttccagcatctttgtgatgatctggaggtatttgctgctcatgctggccgcaagactgtgaagccagaggacctggagctgctgatgcggcggcagggcctggtcactgaccaagtctcactgcacgtgctagtggagcggcacctgcccctggagtaccggcagctgctcatcccctgtgcatacagtggcaactctgtcttccctgcccagtagtggccaggcttcaacactttccctgtccccacctggggactcttgcccccacatatttctccaggtctcctccccacccccccagcatcaataaagtgtcataaacagaa

SEQ ID NO: 287806 - DNA, 2115 bp, Homo sapiens
tgtgggggagcatcgcgagagttacattaactgtggcggcgggaaggcggagcctgcagctggctgggcggttaggagggcccggggccgagacgatggctgaccacaaccctgacagcgactccacgccgcgcacgctgctgcgacgcgtgctggatacagcggacccgcgcaccccgcggcgaccccggagtgctcgggctggagcccggagagccctgcttgaaacggcttcccccaggaagttgagtggccaaacaaggacgatagccagagggcgttcccatggagccaggtctgttggcagatcggcccatattcaggccagtgggcacttggaggaacagacacctcggacgctgctgaagaacatcctactaactgccccagaatcttccatcctgatgcctgagtcggtagtgaagccagtgccagcaccgcaggcggtccaaccctccagacaagagagcagttgcggcagcctggagctgcaacttcctgagctcgagccccccacaaccctggctccaggtctgctggcccctggcaggaggaaacagaggctgagactgtcagtgtttcagcagggagtggaccaggggctgtctctctcccaagagcctcaagggaatgctgatgcctcttccctcaccagatccctcaacctgacctttgccacacctcttcagccacagtcagtgcagaggcctggcttggcccgcagacctccagcccgccgagctgtagacgtgggtgcctttttgcgggatctgcgagatacttccctggctcctccaaacattgtgttggaggacacccagccgttctctcagcccatggttggctcccccaacgtgtatcactccctgccctgcacgcctcacactggggctgaagacgctgagcaggctgccggtcgcaagacacagagcagtgggcctgggctgcagaagaatacccctctgtgcccctagagcaccctggctgtggctgcctccttcatccaagagcagagtccatgttgggccaggagacttcagatccatgtcctggtgctgcctctggctttgtctttcctcagtgggcaggactgggtctgctggtccatctttacccttctctgagctatgcagccttggcctgctgcgtctccggcctgtattctctccccttcactcaggcgcctgggaaaccagcccagtttctggcaggagaggcagaggaggtcaatgcctttgctctgggcttcctgagcaccagcagtggtgtctctggagaagatgaagtagagcccttacacgatggagttgaagaggcagagaaaaagatggaagaagaaggtgtgagtgtgagtgaaatggaggcaacaggagcacaaggacccagcagggtagaagaggctgagggacacacagaggtgacagaagcagagggatcccaggggactgctgaggctgacgggccaggagcatcttcaggggatgaggatgcctctggcagggcagcaagtccagagtcggcctccagcacccctgagtctctccaggccaggcgacatcatcagtttcttgagccagccccagcgcctggtgctgcagtcttatcttcagagcctgcagagcctctgttggtcaggcatccccctaggccccggaccaccggccccaggccccggcaagatccccacaaggctggactgagccactatgtgaaactctttagcttctatgccaagatgcccatggagaggaaggctcttgagatggtggagaagtgcctagataaatatttccagcatctttgtgatgatctggaggtatttgctgctcatgctggccgcaagactgtgaagccagaggacctggagctgctgatgcggcggcagggcctggtcactgaccaagtctcactgcacgtgctagtggagcggcacctgcccctggagtaccggcagctgctcatcccctgtgcatacagtggcaactctgtcttccctgcccagtagtggccaggcttcaacactttccctgtccccacctggggactcttgcccccacatatttctccaggtctcctccccacccccccagcatcaataaagtgtcataaacagaa

SEQ ID NO: 287807 - DNA, 2139 bp, Homo sapiens
tgtgggggagcatcgcgagagttacattaactgtggcggcgggaaggcggagcctgcagctggctgggcggttaggagggcccggggccgagacgatggctgaccacaaccctgacagcgactccacgccgcgcacgctgctgcgacgcgtgctggatacagcggacccgcgcaccccgcggcgaccccggagtgctcgggctggagcccggagagccctgcttgaaacggcttcccccaggaagttgagtggccaaacaaggacgatagccagagggcgttcccatggagccaggtctgttggcagatcggcccatattcaggccagtgggcacttggaggaacagacacctcggacgctgctgaagaacatcctactaactgccccagaatcttccatcctgatgcctgagtcggtagtgaagccagtgccagcaccgcaggcggtccaaccctccagacaagagagcagttgcggcagcctggagctgcaacttcctgagctcgagccccccacaaccctggctccaggtctgctggcccctggcaggaggaaacagaggctgagactgtcagtgtttcagcagggagtggaccaggggctgtctctctcccaagagcctcaagggaatgctgatgcctcttccctcaccagatccctcaacctgacctttgccacacctcttcagccacagtcagtgcagaggcctggcttggcccgcagacctccagcccgccgagctgtagacgtgggtgcctttttgcgggatctgcgagatacttccctggctcctccaaacattgtgttggaggacacccagccgttctctcagcccatggttggctcccccaacgtgtatcactccctgccctgcacgcctcacactggggctgaagacgctgagcaggctgccggtcgcaagacacagagcagtgggcctgggctgcagaagaatagtgagtgtgtggcactggtggcctggagccaaatttagcttgggtgagagttgacaatggtagttttccttcctcaagcccctctgtgcccctagagcaccctggctgtggctgcctccttcatccaagagcagagtccatgttgggccaggagacttcagatccatgtcctggtgctgcctctggctttgtctttcctcagtgggcaggactgggtctgctggtccatctttacccttctctgagctatgcagccttggcctgctgcgtctccggcctgtattctctccccttcactcaggcgcctgggaaaccagcccagtttctggcaggagaggcagaggaggtcaatgcctttgctctgggcttcctgagcaccagcagtggtgtctctggagaagatgaagtagagcccttacacgatggagttgaagaggcagagaaaggacccagcagggtagaagaggctgagggacacacagaggtgacagaagcagagggatcccaggggactgctgaggctgacgggccaggagcatcttcaggggatgaggatgcctctggcagggcagcaagtccagagtcggcctccagcacccctgagtctctccaggccaggcgacatcatcagtttcttgagccagccccagcgcctggtgctgcagtcttatcttcagagcctgcagagcctctgttggtcaggcatccccctaggccccggaccaccggccccaggccccggcaagatccccacaaggctggactgagccactatgtgaaactctttagcttctatgccaagatgcccatggagaggaaggctcttgagatggtggagaagtgcctagataaatatttccagcatctttgtgatgatctggaggtatttgctgctcatgctggccgcaagactgtgaagccagaggacctggagctgctgatgcggcggcagggcctggtcactgaccaagtctcactgcacgtgctagtggagcggcacctgcccctggagtaccggcagctgctcatcccctgtgcatacagtggcaactctgtcttccctgcccagtagtggccaggcttcaacactttccctgtccccacctggggactcttgcccccacatatttctccaggtctcctccccacccccccagcatcaataaagtgtcataaacagaa

SEQ ID NO: 287808 - DNA, 2032 bp, Homo sapiens
tgtgggggagcatcgcgagagttacattaactgtggcggcgggaaggcggagcctgcagctggctgggcggttaggagggcccggggccgagacgatggctgaccacaaccctgacagcgactccacgccgcgcacgctgctgcgacgcgtgctggatacagcggacccgcgcaccccgcggcgaccccggagtgctcgggctggagcccggagagccctgcttgaaacggcttcccccaggaagttgagtggccaaacaaggacgatagccagagggcgttcccatggagccaggtctgttggcagatcggcccatattcaggccagtgggcacttggaggaacagacacctcggacgctgctgaagaacatcctactaactgccccagaatcttccatcctgatgcctgagtcggtagtgaagccagtgccagcaccgcaggcggtccaaccctccagacaagagagcagttgcggcagcctggagctgcaacttcctgagctcgagccccccacaaccctggctccaggtctgctggcccctggcaggaggaaacagaggctgagactgtcagtgtttcagcagggagtggaccaggggctgtctctctcccaagagcctcaagggaatgctgatgcctcttccctcaccagatccctcaacctgacctttgccacacctcttcagccacagtcagtgcagaggcctggcttggcccgcagacctccagcccgccgagctgtagacgtgggtgcctttttgcgggatctgcgagatacttccctggctcctccaaacattgtgttggaggacacccagccgttctctcagcccatggttggctcccccaacgtgtatcactccctgccctgcacgcctcacactggggctgaagacgctgagcaggctgccggtcgcaagacacagagcagtgggcctgggctgcagaagaatagtgagtgtgtggcactggtggcctggagccaaatttagcttgggtgagagttgacaatggtagttttccttcctcaagcccctctgtgcccctagagcaccctggctgtggctgcctccttcatccaagagcagagtccatgttgggccaggagacttcagatccatgtcctggtgctgcctctggctttgtctttcctcagtgggcaggactgggtctgctggtccatctttacccttctctgagctatgcagccttggcctgctgcgtctccggcctgtattctctccccttcactcaggcgcctgggaaaccagcccagtttctggcaggagaggcagaggaggtcaatgcctttgctctgggcttcctgagcaccagcagtggtgtctctggagaagatgaagtagagcccttacacgatggagttgaagaggcagagaaaaagatggaagaagaaggtgtcaagtccagagtcggcctccagcacccctgagtctctccaggccaggcgacatcatcagtttcttgagccagccccagcgcctggtgctgcagtcttatcttcagagcctgcagagcctctgttggtcaggcatccccctaggccccggaccaccggccccaggccccggcaagatccccacaaggctggactgagccactatgtgaaactctttagcttctatgccaagatgcccatggagaggaaggctcttgagatggtggagaagtgcctagataaatatttccagcatctttgtgatgatctggaggtatttgctgctcatgctggccgcaagactgtgaagccagaggacctggagctgctgatgcggcggcagggcctggtcactgaccaagtctcactgcacgtgctagtggagcggcacctgcccctggagtaccggcagctgctcatcccctgtgcatacagtggcaactctgtcttccctgcccagtagtggccaggcttcaacactttccctgtccccacctggggactcttgcccccacatatttctccaggtctcctccccacccccccagcatcaataaagtgtcataaacagaa

SEQ ID NO: 287809 - DNA, 2859 bp, Homo sapiens
tgtgggggagcatcgcgagagttacattaactgtggcggcgggaaggcggagcctgcagctggctgggcggttaggagggcccggggccgagacgatggctgaccacaaccctgacagcgactccacgccgcgcacgctgctgcgacgcgtgctggatacagcggacccgcgcaccccgcggcgaccccggagtgctcgggctggagcccggagagccctgcttgaaacggcttcccccaggaagttgagtggccaaacaaggacgatagccagagggcgttcccatggagccaggtctgttggcagatcggcccatattcaggccagtgggcacttggaggaacagacacctcggacgctgctgaagaacatcctactaactgccccagaatcttccatcctgatgcctgagtcggtagtgaagccagtgccagcaccgcaggcggtccaaccctccagacaagagagcagttgcggcagcctggagctgcaacttcctgagctcgagccccccacaaccctggctccaggtctgctggcccctggcaggaggaaacagaggctgagactgtcagtgtttcagcagggagtggaccaggggctgtctctctcccaagagcctcaagggaatgctgatgcctcttccctcaccagatccctcaacctgacctttgccacacctcttcagccacagtcagtgcagaggcctggcttggcccgcagacctccagcccgccgagctgtagacgtgggtgcctttttgcgggatctgcgagatacttccctggctcctccaagtaaggttgggttttcccctgctggcctttggggaaagctctccccgctatgacagataggaggtgatgctgagtcagggttgcacccctctcggtggggtcaaggacagcgagcaactctggtcagtgggtctacaaggaatttctgcttgctttctacagggggcctctttccttggtccctcggtgtctcccagggccccatatccttagactatagggctggaggttgtaaaggggtgtggtgtggtggccaaaacttgttgagaggggccaggtttcaggatcagctggccaattcaaactgacctgggagcctgattgcagaaaacaagttcaccagagtaagaagagggtttgggaagacggagcagaacaagcagcgaagaggtatttaagtgggcagctggtgggcgggcagctataggggcctgggactgccaggcagaggaacaggaaggtaagcaaggagggctgtaggcgataaggcctcgcgtgctaggtcgtcttctttctctgaaggccactcagggtggacccatgcagcccactgtccaggccctggcaacgctgagtagcagccggtgggcctggaatacgctgagagccagctggcccctgatctccaggtgacagcctcagaacctgttactactctgcccacagacattgtgttggaggacacccagccgttctctcagcccatggttggctcccccaacgtgtatcactccctgccctgcacgcctcacactggggctgaagacgctgagcaggctgccggtcgcaagacacagagcagtgggcctgggctgcagaagaatagtgagtgtgtggcactggtggcctggagccaaatttagcttgggtgagagttgacaatggtagttttccttcctcaagcccctctgtgcccctagagcaccctggctgtggctgcctccttcatccaagagcagagtccatgttgggccaggagacttcagatccatgtcctggtgctgcctctggctttgtctttcctcagtgggcaggactgggtctgctggtccatctttacccttctctgagctatgcagccttggcctgctgcgtctccggcctgtattctctccccttcactcaggcgcctgggaaaccagcccagtttctggcaggagaggcagaggaggtcaatgcctttgctctgggcttcctgagcaccagcagtggtgtctctggagaagatgaagtagagcccttacacgatggagttgaagaggcagagaaaaagatggaagaagaaggtgtgagtgtgagtgaaatggaggcaacaggagcacaaggacccagcagggtagaagaggctgagggacacacagaggtgacagaagcagagggatcccaggggactgctgaggctgacgggccaggagcatcttcaggggatgaggatgcctctggcagggcagcaagtccagagtcggcctccagcacccctgagtctctccaggccaggcgacatcatcagtttcttgagccagccccagcgcctggtgctgcagtcttatcttcagagcctgcagagcctctgttggtcaggcatccccctaggccccggaccaccggccccaggccccggcaagatccccacaaggctggactgagccactatgtgaaactctttagcttctatgccaagatgcccatggagaggaaggctcttgagatggtggagaagtgcctagataaatatttccagcatctttgtgatgatctggaggtatttgctgctcatgctggccgcaagactgtgaagccagaggacctggagctgctgatgcggcggcagggcctggtcactgaccaagtctcactgcacgtgctagtggagcggcacctgcccctggagtaccggcagctgctcatcccctgtgcatacagtggcaactctgtcttccctgcccagtagtggccaggcttcaacactttccctgtccccacctggggactcttgcccccacatatttctccaggtctcctccccacccccccagcatcaataaagtgtcataaacagaa

SEQ ID NO: 287810 - DNA, 2998 bp, Homo sapiens
tgtgggggagcatcgcgagagttacattaactgtggcggcgggaaggcggagcctgcagctggctgggcggttaggagggcccggggccgagacgatggctgaccacaaccctgacagcgactccacgccgcgcacgctgctgcgacgcgtgctggatacagcggacccgcgcaccccgcggcgaccccggagtgctcgggctggagcccggagagccctgcttgaaacggcttcccccaggaagttgagtggccaaacaaggacgatagccagagggcgttcccatggagccagggtaagtacccagcccactgaccccaaagggccctggctgcctcggggaggggggttgaggtctagctctgctctggagcccaccttgaggaaatctcaaggcagacggacagactggttgcttggtgctttgccgatagtctgttggcagatcggcccatattcaggccagtgggcacttggaggaacagacacctcggacgctgctgaagaacatcctactaactgccccagaatcttccatcctgatgcctgagtcggtagtgaagccagtgccagcaccgcaggcggtccaaccctccagacaagagagcagttgcggcagcctggagctgcaacttcctgagctcgagccccccacaaccctggctccaggtctgctggcccctggcaggaggaaacagaggctgagactgtcagtgtttcagcagggagtggaccaggggctgtctctctcccaagagcctcaagggaatgctgatgcctcttccctcaccagatccctcaacctgacctttgccacacctcttcagccacagtcagtgcagaggcctggcttggcccgcagacctccagcccgccgagctgtagacgtgggtgcctttttgcgggatctgcgagatacttccctggctcctccaagtaaggttgggttttcccctgctggcctttggggaaagctctccccgctatgacagataggaggtgatgctgagtcagggttgcacccctctcggtggggtcaaggacagcgagcaactctggtcagtgggtctacaaggaatttctgcttgctttctacagggggcctctttccttggtccctcggtgtctcccagggccccatatccttagactatagggctggaggttgtaaaggggtgtggtgtggtggccaaaacttgttgagaggggccaggtttcaggatcagctggccaattcaaactgacctgggagcctgattgcagaaaacaagttcaccagagtaagaagagggtttgggaagacggagcagaacaagcagcgaagaggtatttaagtgggcagctggtgggcgggcagctataggggcctgggactgccaggcagaggaacaggaaggtaagcaaggagggctgtaggcgataaggcctcgcgtgctaggtcgtcttctttctctgaaggccactcagggtggacccatgcagcccactgtccaggccctggcaacgctgagtagcagccggtgggcctggaatacgctgagagccagctggcccctgatctccaggtgacagcctcagaacctgttactactctgcccacagacattgtgttggaggacacccagccgttctctcagcccatggttggctcccccaacgtgtatcactccctgccctgcacgcctcacactggggctgaagacgctgagcaggctgccggtcgcaagacacagagcagtgggcctgggctgcagaagaatagtgagtgtgtggcactggtggcctggagccaaatttagcttgggtgagagttgacaatggtagttttccttcctcaagcccctctgtgcccctagagcaccctggctgtggctgcctccttcatccaagagcagagtccatgttgggccaggagacttcagatccatgtcctggtgctgcctctggctttgtctttcctcagtgggcaggactgggtctgctggtccatctttacccttctctgagctatgcagccttggcctgctgcgtctccggcctgtattctctccccttcactcaggcgcctgggaaaccagcccagtttctggcaggagaggcagaggaggtcaatgcctttgctctgggcttcctgagcaccagcagtggtgtctctggagaagatgaagtagagcccttacacgatggagttgaagaggcagagaaaaagatggaagaagaaggtgtgagtgtgagtgaaatggaggcaacaggagcacaaggacccagcagggtagaagaggctgagggacacacagaggtgacagaagcagagggatcccaggggactgctgaggctgacgggccaggagcatcttcaggggatgaggatgcctctggcagggcagcaagtccagagtcggcctccagcacccctgagtctctccaggccaggcgacatcatcagtttcttgagccagccccagcgcctggtgctgcagtcttatcttcagagcctgcagagcctctgttggtcaggcatccccctaggccccggaccaccggccccaggccccggcaagatccccacaaggctggactgagccactatgtgaaactctttagcttctatgccaagatgcccatggagaggaaggctcttgagatggtggagaagtgcctagataaatatttccagcatctttgtgatgatctggaggtatttgctgctcatgctggccgcaagactgtgaagccagaggacctggagctgctgatgcggcggcagggcctggtcactgaccaagtctcactgcacgtgctagtggagcggcacctgcccctggagtaccggcagctgctcatcccctgtgcatacagtggcaactctgtcttccctgcccagtagtggccaggcttcaacactttccctgtccccacctggggactcttgcccccacatatttctccaggtctcctccccacccccccagcatcaataaagtgtcataaacagaa

SEQ ID NO: 287811 - DNA, 1929 bp, Homo sapiens
tgtgggggagcatcgcgagagttacattaactgtggcggcgggaaggcggagcctgcagctggctgggcggttaggagggcccggggccgagacgatggctgaccacaaccctgacagcgactccacgccgcgcacgctgctgcgacgcgtgctggatacagcggacccgcgcaccccgcggcgaccccggagtgctcgggctggagcccggagagccctgcttgaaacggcttcccccaggaagttgagtggccaaacaaggacgatagccagagggcgttcccatggagccagggcagacggacagactggttgcttggtgctttgccgatagtctgttggcagatcggcccatattcaggccagtgggcacttggaggaacagacacctcggacgctgctgaagaacatcctactaactgccccagaatcttccatcctgatgcctgagtcggtagtgaagccagtgccagcaccgcaggcggtccaaccctccagacaagagagcagttgcggcagcctggagctgcaacttcctgagctcgagccccccacaaccctggctccaggtctgctggcccctggcaggaggaaacagaggctgagactgtcagtgtttcagcagggagtggaccaggggctgtctctctcccaagagcctcaagggaatgctgatgcctcttccctcaccagatccctcaacctgacctttgccacacctcttcagccacagtcagtgcagaggcctggcttggcccgcagacctccagcccgccgagctgtagacgtgggtgcctttttgcgggatctgcgagatacttccctggctcctccaaacattgtgttggaggacacccagccgttctctcagcccatggttggctcccccaacgtgtatcactccctgccctgcacgcctcacactggggctgaagacgctgagcaggctgccggtcgcaagacacagagcagtgggcctgggctgcagaagaatagcctgggaaaccagcccagtttctggcaggagaggcagaggaggtcaatgcctttgctctgggcttcctgagcaccagcagtggtgtctctggagaagatgaagtagagcccttacacgatggagttgaagaggcagagaaaaagatggaagaagaaggtgtgagtgtgagtgaaatggaggcaacaggagcacaaggacccagcagggtagaagaggctgagggacacacagaggtgacagaagcagagggatcccaggggactgctgaggctgacgggccaggagcatcttcaggggatgaggatgcctctggcagggcagcaagtccagagtcggcctccagcacccctgagtctctccaggccaggcgacatcatcagtttcttgagccagccccagcgcctggtgctgcagtcttatcttcagagcctgcagagcctctgttggtcaggcatccccctaggccccggaccaccggccccaggccccggcaagatccccacaaggctggactgagccactatgtgaaactctttagcttctatgccaagatgcccatggagaggaaggctcttgagatggtggagaagtgcctagataaatatttccagcatctttgtgatgatctggaggtatttgctgctcatgctggccgcaagactgtgaagccagaggacctggagctgctgatgcggcggcagggcctggtcactgaccaagtctcactgcacgtgctagtggagcggcacctgcccctggagtaccggcagctgctcatcccctgtgcatacagtggcaactctgtcttccctgcccagtagtggccaggcttcaacactttccctgtccccacctggggactcttgcccccacatatttctccaggtctcctccccacccccccagcatcaataaagtgtcataaacagaa

SEQ ID NO: 287812 - DNA, 1777 bp, Homo sapiens
  misc_feature (15)..(15): n is a, c, g, or t
  misc_feature (19)..(19): n is a, c, g, or t
  misc_feature (26)..(26): n is a, c, g, or t
ggggaataacaagancggnacccagncgtcaaacacctcggcgggacggaagccccccggtacgtagtctgctgagagcgtgtgtacgactcagcccggagagccctgcttgaaacggcttcccccaggaagttgagtggccaaacaaggacgatagccagagggcgttcccatggagccaggtctgttggcagatcggcccatattcaggccagtgggcacttggaggaacagacacctcggacgctgctgaagaacatcctactaactgccccagaatcttccatcctgatgcctgagtcggtagtgaagccagtgccagcaccgcaggcggtccaaccctccagacaagagagcagttgcggcagcctggagctgcaacttcctgagctcgagccccccacaaccctggctccaggtctgctggcccctggcaggaggaaacagaggctgagactgtcagtgtttcagcagggagtggaccaggggctgtctctctcccaagagcctcaagggaatgctgatgcctcttccctcaccagatccctcaacctgacctttgccacacctcttcagccacagtcagtgcagaggcctggcttggcccgcagacctccagcccgccgagctgtagacgtgggtgcctttttgcgggatctgcgagatacttccctggctcctccaaacattgtgttggaggacacccagccgttctctcagcccatggttggctcccccaacgtgtatcactccctgccctgcacgcctcacactggggctgaagacgctgagcaggctgccggtcgcaagacacagagcagtgggcctgggctgcagaagaatagcctgggaaaccagcccagtttctggcaggagaggcagaggaggtcaatgcctttgctctgggcttcctgagcaccagcagtggtgtctctggagaagatgaagtagagcccttacacgatggagttgaagaggcagagaaaaagatggaagaagaaggtgtgagtgtgagtgaaatggaggcaacaggagcacaaggacccagcagggtagaagaggctgagggacacacagaggtgacagaagcagagggatcccaggggactgctgaggctgacgggccaggagcatcttcaggggatgaggatgcctctggcagggcagcaagtccagagtcggcctccagcacccctgagtctctccaggccaggcgacatcatcagtttcttgagccagccccagcgcctggtgctgcagtcttatcttcagagcctgcagagcctctgttggtcaggcatccccctaggccccggaccaccggccccaggccccggcaagatccccacaaggctggactgagccactatgtgaaactctttagcttctatgccaagatgcccatggagaggaaggctcttgagatggtggagaagtgcctagataaatatttccagcatctttgtgatgatctggaggtatttgctgctcatgctggccgcaagactgtgaagccagaggacctggagctgctgatgcggcggcagggcctggtcactgaccaagtctcactgcacgtgctagtggagcggcacctgcccctggagtaccggcagctgctcatcccctgtgcatacagtggcaactctgtcttccctgcccagtagtggccaggcttcaacactttccctgtccccacctggggactcttgcccccacatatttctccaggtctcctccccacccccccagcatcaataaagtgtcataaacagaa

SEQ ID NO: 287813 - DNA, 2150 bp, Homo sapiens
tgtgggggagcatcgcgagagttacattaactgtggcggcgggaaggcggagcctgcagctggctgggcggttaggagggcccggggccgagacgatggctgaccacaaccctgacagcgactccacgccgcgcacgctgctgcgacgcgtgctggatacagcggacccgcgcaccccgcggcgaccccggagtgctcgggctggagcccggagagccctgcttgaaacggcttcccccaggaagttgagtggccaaacaaggacgatagccagagggcgttcccatggagccaggtctgttggcagatcggcccatattcaggccagtgggcacttggaggaacagacacctcggacgctgctgaagaacatcctactaactgccccagaatcttccatcctgatgcctgagtcggtagtgaagccagtgccagcaccgcaggcggtccaaccctccagacaagagagcagttgcggcagcctggagctgcaacttcctgagctcgagccccccacaaccctggctccaggtctgctggcccctggcaggaggaaacagaggctgagactgtcagtgtttcagcagggagtggaccaggggctgtctctctcccaagagcctcaagggaatgctgatgcctcttccctcaccagatccctcaacctgacctttgccacacctcttcagccacagtcagtgcagaggcctggcttggcccgcagacctccagcccgccgagctgtagacgtgggtgcctttttgcgggatctgcgagatacttccctggctcctccaaacattgtgttggaggacacccagccgttctctcagcccatggttggctcccccaacgtgtatcactccctgccctgcacgcctcacactggggctgaagacgctgagcaggctgccggtcgcaagacacagagcagtgggcctgggctgcagaagaatagtgagtgtgtggcactggtggcctggagccaaatttagcttgggtgagagttgacaatggtagttttccttcctcaagcccctctgtgcccctagagcaccctggctgtggctgcctccttcatccaagagcagagtccatgttgggccaggagacttcagatccatgtcctggtgctgcctctggctttgtctttcctcagtgggcaggactgggtctgctggtccatctttacccttctctgagctatgcagccttggcctgctgcgtctccggcctgtattctctccccttcactcaggcgcctgggaaaccagcccagtttctggcaggagaggcagaggaggtcaatgcctttgctctgggcttcctgagcaccagcagtggtgtctctggagaagatgaagtagagcccttacacgatggagttgaagaggcagagaaaaagatggaagaagaaggtgtgagtgtgagtgaaatggaggcaacaggagcacaaggacccagcagggtagaagaggctgagggacacacagaggtgacagaagcagagggatcccaggggactgctgaggctgacgggccaggagcatcttcaggggatgaggatgcctctggcagggcagcaagtccagagtcggcctccagcacccctgagtctctccaggccaggcgacatcatcagtttcttgagccagccccagcgcctggtgctgcagtcttatcttcagagcctgcagagcctctgttggtcaggcatccccctaggccccggaccaccggccccaggccccggcaagatccccacaaggctggactgagccactatgtgaaactctttagcttctatgccaagatgcccatggagaggaaggctcttgagatggtggagaagtgcctagataaatatttccagcatctttgtgatgatctggaggtatttgctgctcatgctggccgcaagactgtgaagccagaggacctggagctgctgatgcggcggcagggcctggtcactgaccaagtctcactgcacgtgctagtggagcggcacctgcccctggagtaccggcagctgctcatcccctgtgcatacagtggcaactctgtcttccctgcccagtagtggccaggcttcaacactttccctgtcccaccgtaactcgtggggggcgccaagcagtaaatgtttc

SEQ ID NO: 287814 - DNA, 1871 bp, Homo sapiens
tgtgggggagcatcgcgagagttacattaactgtggcggcgggaaggcggagcctgcagctggctgggcggttaggagggcccggggccgagacgatggctgaccacaaccctgacagcgactccacgccgcgcacgctgctgcgacgcgtgctggatacagcggacccgcgcaccccgcggcgaccccggagtgctcgggctggagcccggagagccctgcttgaaacggcttcccccaggaagttgagtggccaaacaaggacgatagccagagggcgttcccatggagccaggtctgttggcagatcggcccatattcaggccagtgggcacttggaggaacagacacctcggacgctgctgaagaacatcctactaactgccccagaatcttccatcctgatgcctgagtcggtagtgaagccagtgccagcaccgcaggcggtccaaccctccagacaagagagcagttgcggcagcctggagctgcaacttcctgagctcgagccccccacaaccctggctccaggtctgctggcccctggcaggaggaaacagaggctgagactgtcagtgtttcagcagggagtggaccaggggctgtctctctcccaagagcctcaagggaatgctgatgcctcttccctcaccagatccctcaacctgacctttgccacacctcttcagccacagtcagtgcagaggcctggcttggcccgcagacctccagcccgccgagctgtagacgtgggtgcctttttgcgggatctgcgagatacttccctggctcctccaaacattgtgttggaggacacccagccgttctctcagcccatggttggctcccccaacgtgtatcactccctgccctgcacgcctcacactggggctgaagacgctgagcaggctgccggtcgcaagacacagagcagtgggcctgggctgcagaagaatagcctgggaaaccagcccagtttctggcaggagaggcagaggaggtcaatgcctttgctctgggcttcctgagcaccagcagtggtgtctctggagaagatgaagtagagcccttacacgatggagttgaagaggcagagaaaaagatggaagaagaaggtgtgagtgtgagtgaaatggaggcaacaggagcacaaggacccagcagggtagaagaggctgagggacacacagaggtgacagaagcagagggatcccaggggactgctgaggctgacgggccaggagcatcttcaggggatgaggatgcctctggcagggcagcaagtccagagtcggcctccagcacccctgagtctctccaggccaggcgacatcatcagtttcttgagccagccccagcgcctggtgctgcagtcttatcttcagagcctgcagagcctctgttggtcaggcatccccctaggccccggaccaccggccccaggccccggcaagatccccacaaggctggactgagccactatgtgaaactctttagcttctatgccaagatgcccatggagaggaaggctcttgagatggtggagaagtgcatctttgtgatgatctggaggtatttgctgctcatgctggccgcaagactgtgaagccagaggacctggagctgctgatgcggcggcagggcctggtcactgaccaagtctcactgcacgtgctagtggagcggcacctgcccctggagtaccggcagctgctcatcccctgtgcatacagtggcaactctgtcttccctgcccagtagtggccaggcttcaacactttccctgtccccacctggggactcttgcccccacatatttctccaggtctcctccccacccccccagcatcaataaagtgtcataaacagaa

SEQ ID NO: 287815 - DNA, 1891 bp, Homo sapiens
  misc_feature (1531)..(1532): n is a, c, g, or t
  misc_feature (1535)..(1535): n is a, c, g, or t
tgtgggggagcatcgcgagagttacattaactgtggcggcgggaaggcggagcctgcagctggctgggcggttaggagggcccggggccgagacgatggctgaccacaaccctgacagcgactccacgccgcgcacgctgctgcgacgcgtgctggatacagcggacccgcgcaccccgcggcgaccccggagtgctcgggctggagcccggagagccctgcttgaaacggcttcccccaggaagttgagtggccaaacaaggacgatagccagagggcgttcccatggagccaggtctgttggcagatcggcccatattcaggccagtgggcacttggaggaacagacacctcggacgctgctgaagaacatcctactaactgccccagaatcttccatcctgatgcctgagtcggtagtgaagccagtgccagcaccgcaggcggtccaaccctccagacaagagagcagttgcggcagcctggagctgcaacttcctgagctcgagccccccacaaccctggctccaggtctgctggcccctggcaggaggaaacagaggctgagactgtcagtgtttcagcagggagtggaccaggggctgtctctctcccaagagcctcaagggaatgctgatgcctcttccctcaccagatccctcaacctgacctttgccacacctcttcagccacagtcagtgcagaggcctggcttggcccgcagacctccagcccgccgagctgtagacgtgggtgcctttttgcgggatctgcgagatacttccctggctcctccaaacattgtgttggaggacacccagccgttctctcagcccatggttggctcccccaacgtgtatcactccctgccctgcacgcctcacactggggctgaagacgctgagcaggctgccggtcgcaagacacagagcagtgggcctgggctgcagaagaatagcctgggaaaccagcccagtttctggcaggagaggcagaggaggtcaatgcctttgctctgggcttcctgagcaccagcagtggtgtctctggagaagatgaagtagagcccttacacgatggagttgaagaggcagagaaaaagatggaagaagaaggtgtgagtgtgagtgaaatggaggcaacaggagcacaaggacccagcagggtagaagaggctgagggacacacagaggtgacagaagcagagggatcccaggggactgctgaggctgacgggccaggagcatcttcaggggatgaggatgcctctggcagggcagcaagtccagagtcggcctccagcacccctgagtctctccaggccaggcgacatcatcagtttcttgagccagccccagcgcctggtgctgcagtcttatcttcagagcctgcagagcctctgttggtcaggcatccccctaggccccggaccaccggccccaggccccggcaagatccccacaaggctggactgagccactatgtgaaactctttagcttctatgccaaaataccaaataaaaaaaaaaannatnaaaatggagaaaaagtgcctagataaatatttccagcatctttgtgatgatctggaggtatttgctgctcatgctggccgcaagactgtgaagccagaggacctggagctgctgatgcggcggcagggcctggtcactgaccaagtctcactgcacgtgctagtggagcggcacctgcccctggagtaccggcagctgctcatcccctgtgcatacagtggcaactctgtcttccctgcccagtagtggccaggcttcaacactttccctgtccccacctggggactcttgcccccacatatttctccaggtctcctccccacccccccagcatcaataaagtgtcataaacagaa

SEQ ID NO: 287816 - DNA, 2219 bp, Homo sapiens
tgtgggggagcatcgcgagagttacattaactgtggcggcgggaaggcggagcctgcagctggctgggcggttaggagggcccggggccgagacgatggctgaccacaaccctgacagcgactccacgccgcgcacgctgctgcgacgcgtgctggatacagcggacccgcgcaccccgcggcgaccccggagtgctcgggctggagcccggagagccctgcttgaaacggcttcccccaggaagttgagtggccaaacaaggacgatagccagagggcgttcccatggagccaggtctgttggcagatcggcccatattcaggccagtgggcacttggaggaacagacacctcggacgctgctgaagaacatcctactaactgccccagaatcttccatcctgatgcctgagtcggtagtgaagccagtgccagcaccgcaggcggtccaaccctccagacaagagagcagttgcggcagcctggagctgcaacttcctgagctcgagccccccacaaccctggctccaggtctgctggcccctggcaggaggaaacagaggctgagactgtcagtgtttcagcagggagtggaccaggggctgtctctctcccaagagcctcaagggaatgctgatgcctcttccctcaccagatccctcaacctgacctttgccacacctcttcagccacagtcagtgcagaggcctggcttggcccgcagacctccagcccgccgagctgtagacgtgggtgcctttttgcgggatctgcgagatacttccctggctcctccaaacattgtgttggaggacacccagccgttctctcagcccatggttggctcccccaacgtgtatcactccctgccctgcacgcctcacactggggctgaagacgctgagcaggctgccggtcgcaagacacagagcagtgggcctgggctgcagaagaatagtgagtgtgtggcactggtggcctggagccaaatttagcttgggtgagagttgacaatggtagttttccttcctcaagcccctctgtgcccctagagcaccctggctgtggctgcctccttcatccaagagcagagtccatgttgggccaggagacttcagatccatgtcctggtgctgcctctggctttgtctttcctcagtgggcaggactgggtctgctggtccatctttacccttctctgagctatgcagccttggcctgctgcgtctccggcctgtattctctccccttcactcaggcgcctgggaaaccagcccagtttctggcaggagaggcagaggaggtcaatgcctttgctctgggcttcctgagcaccagcagtggtgtctctggagaagatgaagtagagcccttacacgatggagttgaagaggcagagaaaaagatggaagaagaaggtgtgagtgtgagtgaaatggaggcaacaggagcacaaggacccagcagggtagaagaggctgagggacacacagaggtgacagaagcagagggatcccaggggactgctgaggctgacgggccaggagcatcttcaggggatgaggatgcctctggcagggcagcaagtccagagtcggcctccagcacccctgagtctctccaggccaggcgacatcatcagtttcttgagccagccccagcgcctggtgctgcagtcttatcttcagagcctgcagagcctctgttggtcaggcatccccctaggccccggaccaccggccccaggccccggcaagatccccacaaggctggactgagccactatgtgaaactctttagcttctatgccaagatgcccatggagaggaaggctcttgagatggtggagaagtgcctgctctatccccaccttcttgacacctagataaatatttccagcatctttgtgatgatctggaggtatttgctgctcatgctggccgcaagactgtgaagccagaggacctggagctgctgatgcggcggcagggcctggtcactgaccaagtctcactgcacgtgctagtggagcggcacctgcccctggagtaccggcagctgctcatcccctgtgcatacagtggcaactctgtcttccctgcccagtagtggccaggcttcaacactttccctgtccccacctggggactcttgcccccacatatttctccaggtctcctccccacccccccagcatcaataaagtgtcataaacagaa

SEQ ID NO: 287817 - DNA, 1973 bp, Homo sapiens
tgtgggggagcatcgcgagagttacattaactgtggcggcgggaaggcggagcctgcagctggctgggcggttaggagggcccggggccgagacgatggctgaccacaaccctgacagcgactccacgccgcgcacgctgctgcgacgcgtgctggatacagcggacccgcgcaccccgcggcgaccccggagtgctcgggctggagcccggagagccctgcttgaaacggcttcccccaggaagttgagtggccaaacaaggacgatagccagagggcgttcccatggagccaggtctgttggcagatcggcccatattcaggccagtgggcacttggaggaacagacacctcggacgctgctgaagaacatcctactaactgccccagaatcttccatcctgatgcctgagtcggtagtgaagccagtgccagcaccgcaggcggtccaaccctccagacaagagagcagttgcggcagcctggagctgcaacttcctgagctcgagccccccacaaccctggctccaggtctgctggcccctggcaggaggaaacagaggctgagactgtcagtgtttcagcagggagtggaccaggggctgtctctctcccaagagcctcaagggaatgctgatgcctcttccctcaccagatccctcaacctgacctttgccacacctcttcagccacagtcagtgcagaggcctggcttggcccgcagacctccagcccgccgagctgtagacgtgggtgcctttttgcgggatctgcgagatacttccctggctcctccaaacattgtgttggaggacacccagccgttctctcagcccatggttggctcccccaacgtgtatcactccctgccctgcacgcctcacactggggctgaagacgctgagcaggctgccggtcgcaagacacagagcagtgggcctgggctgcagaagaatagcctgggaaaccagcccagtttctggcaggagaggcagaggaggtcaatgcctttgctctgggcttcctgagcaccagcagtggtgtctctggagaagatgaagtagagcccttacacgatggagttgaagaggcagagaaaaagatggaagaagaaggtgtgagtgtgagtgaaatggaggcaacaggagcacaaggacccagcagggtagaagaggctgagggacacacagaggtgacagaagcagagggatcccaggggactgctgaggctgacgggccaggagcatcttcaggggatgaggatgcctctggcagggcagcaagtccagagtcggcctccagcacccctgagtctctccaggccaggcgacatcatcagtttcttgagccagccccagcgcctggtgctgcagtcttatcttcagagcctgcagagcctctgttggtcaggcatccccctaggccccggaccaccggccccaggccccggcaagatccccacaaggctggactgagccactatgtgaaactctttagcttctatgccaagatgcccatggagaggaaggctcttgagatggtggagaagtgcctagataaatatttccagcatctttgtgatgatctggaggtatttgctgctcatgctggccgcaagactgtgaagccagaggacctggagctgctgatgcggcggtgagaaggcggaaggtgtgggggtgctggctgggggagttttggtgctgattctgcctgtcccttctcttcctccactgcaggcagggcctggtcactgaccaagtctcactgcacgtgctagtggagcggcacctgcccctggagtaccggcagctgctcatcccctgtgcatacagtggcaactctgtcttccctgcccagtagtggccaggcttcaacactttccctgtccccacctggggactcttgcccccacatatttctccaggtctcctccccacccccccagcatcaataaagtgtcataaacagaa

SEQ ID NO: 287818 - DNA, 1756 bp, Homo sapiens
tgtgggggagcatcgcgagagttacattaactgtggcggcgggaaggcggagcctgcagctggctgggcggttaggagggcccggggccgagacgatggctgaccacaaccctgacagcgactccacgccgcgcacgctgctgcgacgcgtgctggatacagcggacccgcgcaccccgcggcgaccccggagtgctcgggctggagcccggagagccctgcttgaaacggcttcccccaggaagttgagtggccaaacaaggacgatagccagagggcgttcccatggagccaggtctgttggcagatcggcccatattcaggccagtgggcacttggaggaacagacacctcggacgctgctgaagaacatcctactaactgccccagaatcttccatcctgatgcctgagtcggtagtgaagccagtgccagcaccgcaggcggtccaaccctccagacaagagagcagttgcggcagcctggagctgcaacttcctgagctcgagccccccacaaccctggctccaggtctgctggcccctggcaggaggaaacagaggctgagactgtcagtgtttcagcagggagtggaccaggggctgtctctctcccaagagcctcaagggaatgctgatgcctcttccctcaccagatccctcaacctgacctttgccacacctcttcagccacagtcagtgcagaggcctggcttggcccgcagacctccagcccgccgagctgtagacgtgggtgcctttttgcgggatctgcgagatacttccctggctcctccaaacattgtgttggaggacacccagccgttctctcagcccatggttggctcccccaacgtgtatcactccctgccctgcacgcctcacactggggctgaagacgctgagcaggctgccggtcgcaagacacagagcagtgggcctgggctgcagaagaatagcctgggaaaccagcccagtttctggcaggagaggcagaggaggtcaatgcctttgctctgggcttcctgagcaccagcagtggtgtctctggagaagatgaagtagagcccttacacgatggagttgaagaggcagagaaaaagatggaagaagaaggtgtgagtgtgagtgaaatggaggcaacaggagcacaaggacccagcagggtagaagaggctgagggacacacagaggtgacagaagcagagggatcccaggggactgctgaggctgacgggccaggagcatcttcaggggatgaggatgcctctggcagggcagcaagtccagagtcggcctccagcacccctgagtctctccaggccaggcgacatcatcagtttcttgagccagccccagcgcctggtgctgcagttctatgccaagatgcccatggagaggaaggctcttgagattgtggagaagtgcctagataaatatttccagcatctttgtgatgatctggaggtatttgctgctcatgctggccgcaagactgtgaagccagcaggtggtcagggctgctggtcctggctggccaagggccacgtggtccccagcctcagcagaagccagcaagacttgctcttgaataagagcctccttgaggcaagttcagccccctctgtccactgttgccctcagcttatcttcagagcctgcagagcctctgttggtcaggcatccccctaggccccggaccaccggccccaggccccggcaagatccccaccatcaataaagtgtcataaacagaa

SEQ ID NO: 287819 - DNA, 982 bp, Homo sapiens
  misc_feature (29)..(29): n is a, c, g, or t
gtgtagacgtggtgccttttgcggatctncagatacttcctgctcctccaaacattgtgttggaggacacccagccgttctctcagcccatggttggctcccccaacgtgtatcactccctgccctgcacgcctcacactggggctgaagacgctgagcaggctgccggtcgcaagacacagagcagtgggcctgggctgcagaagaatagcctgggaaaccagcccagtttctggcaggagaggcagaggaggtcaatgcctttgctctgggcttcctgagcaccagcagtggtgtctctggagaagatgaagtagagcccttacacgatggagttgaagaggcagagaaaaagatggaagaagaaggtgtcaagtccagagtcggcctccagcacccctgagtctctccaggccaggcgacatcatcagtttcttgagccagccccagcgcctggtgctgcagtcttatcttcagagcctgcagagcctctgttggtcaggcatccccctaggccccggaccaccggccccaggccccggcaagatccccacaaggctggactgagccactatgtgaaactctttagcttctatgccaagatgcccatggagaggaaggctcttgagatggtggagaagtgcctagataaatatttccagcatctttgtgatgatctggaggtatttgctgctcatgctggccgcaagactgtgaagccagaggacctggagctgctgatgcggcggcagggcctggtcactgaccaagtctcactgcacgtgctagtggagcggcacctgcccctggagtaccggcagctgctcatcccctgtgcatacagtggcaactctgtcttccctgcccagtagtggccaggcttcaacactttccctgtccccacctggggactcttgcccccacatatttctccaggtctcctccccacccccccagcatcaataaagtgtcataaacagaa

SEQ ID NO: 287820 - DNA, 825 bp, Homo sapiens
agctgtgttcaggccctagcacacagaaaggccttgtctgggttgtgtttccgggcactggtggtggtagggggtcagggagacactgaggggcacctgcttggctggagctaggtggggcccaccagaaacaggacagaaatactgtggctgtgctggcctgggtgagatggtcaggcctggaatccctgtgaccccacccttcttctttgtagcaagtccagagtcggcctccagcacccctgagtctctccaggccaggcgacatcatcagtttcttgagccagccccagcgcctggtgctgcagtcttatcttcagagcctgcagagcctctgttggtcaggcatccccctaggccccggaccaccggccccaggccccggcaagatccccacaaggctggactgagccactatgtgaaactctttagcttctatgccaagatgcccatggagaggaaggctcttgagatggtggagaagtgcctagataaatatttccagcatctttgtgatgatctggaggtatttgctgctcatgctggccgcaagactgtgaagccagaggacctggagctgctgatgcggcggcagggcctggtcactgaccaagtctcactgcacgtgctagtggagcggcacctgcccctggagtaccggcagctgctcatcccctgtgcatacagtggcaactctgtcttccctgcccagtagtggccaggcttcaacactttccctgtccccacctggggactcttgcccccacatatttctccaggtctcctccccacccccccagcatcaataaagtgtcataaacagaa

SEQ ID NO: 287821 - DNA, 1082 bp, Homo sapiens
accccattcctcatgggcctcttgggaagggagcattgggtatgctgtgtacatagggtcctcccccttcctacgggtatgcagatgattacccagcagggcagcttcagctgggctggggagagctcaccaagagcacccctgccatcctggtgcctgcctccacggcttagaggagcctgggtgaggggaaagtatgtggttggtttgtagtcagaaaaggcttcctggaagacgattagcagaatcgggaaaggcagcagtagagtaaggagagagactatccattctaaggcctggagtcatggacccaagcaggtaccaatatagataataagtctgaaccaggatgtcgagtcgactgtggagggacagagccccagggaaagactggcctctatgtggccccctgacccaactgcccctcagcaggtggtcagggctgctggtcctggctggccaagggccacgtggtccccagcctcagcagaagccagcaagacttgctcttgaataagagcctccttgaggcaagttcagccccctctgtccactgttgccctcagcttatcttcagagcctgcagagcctctgttggtcaggcatccccctaggccccggaccaccggccccaggccccggcaagatccccacaaggctggactgagccactatgtgaaactctttagcttctatgccaagatgcccatggagaggaaggctcttgagatggtggagaagtgcctagataaatatttccagcatctttgtgatgatctggaggtatttgctgctcatgctggccgcaagactgtgaagccagaggacctggagctgctgatgcggcggcagggcctggtcactgaccaagtctcactgcacgtgctagtggagcggcacctgcccctggagtaccggcagctgctcatcccctgtgcatacagtggcaactctgtcttccctgcccagtagtggccaggcttcaacactttccctgtccccacctggggactcttgcccccacatatttctccaggtctcctccccacccccccagcatcaataaagtgtcataaacagaa

SEQ ID NO: 287822 - DNA, 1021 bp, Homo sapiens
  misc_feature (30)..(30): n is a, c, g, or t
gccacgagctcgtgccgaattcggcagagntatgaggctgagggacacacagaggtgacagaagcagagggatcccaggggactgctgaggctgacgggccaggagcatcttcaggggatgaggatgcctctggcagggcagcaagtccagagtcggcctccagcacccctgagtctctccaggccaggcgacatcatcagtttcttgagccagccccagcgcctggtgctgcagttctatgccaagatgcccatggagaggaaggctcttgagattgtggagaagtgcctagataaatatttccagcatctttgtgatgatctggaggtatttgctgctcatgctggccgcaagactgtgaagccagcaggtggtcagggctgctggtcctggctggccaagggccacgtggtccccagcctcagcagaagccagcaagacttgctcttgaataagagcctccttgaggcaagttcagccccctctgtccactgttgccctcagcttatcttcagagcctgcagagcctctgttggtcaggcatccccctaggccccggaccaccggccccaggccccggcaagatccccacaaggctggactgagccactatgtgaaactctttagcttctatgccaagatgcccatggagaggaaggctcttgagatggtggagaagtgcctagataaatatttccagcatctttgtgatgatctggaggtatttgctgctcatgctggccgcaagactgtgaagccagaggacctggagctgctgatgcggcggcagggcctggtcactgaccaagtctcactgcacgtgctagtggagcggcacctgcccctggagtaccggcagctgctcatcccctgtgcatacagtggcaactctgtcttccctgcccagtagtggccaggcttcaacactttccctgtccccacctggggactcttgcccccacatatttctccaggtctcctccccacccccccagcatcaataaagtgtcataaacagaa

SEQ ID NO: 287823 - DNA, 1197 bp, Homo sapiens
  misc_feature (153)..(153): n is a, c, g, or t
  misc_feature (158)..(158): n is a, c, g, or t
  misc_feature (210)..(210): n is a, c, g, or t
  misc_feature (240)..(240): n is a, c, g, or t
  misc_feature (259)..(259): n is a, c, g, or t
  misc_feature (261)..(261): n is a, c, g, or t
atacatatactatatatacacaacaaacatcatatatcacactactacattctaaaatatattaaatacacttttcaactagattacttctacatctactactcacttacaatataatctctcccactcacccactactgtctttcgattcantctcntcctcacatttgaaacacgcttaccatgtgtccactatatcctccctcaccntcacactgggctaaacgctagcagctccgntcgcagacacagacagtgncntggctcagaaaataccctgaaagcctgggaaaccagcccagtttctggcaggagaggcagaggaggtcaatgcctttgctctgggcttcctgagcaccagcagtggtgtctctggagaagatgaagtagagcccttacacgatggagttgaagaggcagagaaaaagatggaagaagaaggtgtgagtgtgagtgaaatggaggcaacaggagcacaaggacccagcagggtagaagaggctgagggacacacagaggtgacagaagcagagggatcccaggggactgctgaggctgacgggccaggagcatcttcaggggatgaggatgcctctggcagggcagcaagtccagagtcggcctccagcacccctgagtctctccaggccaggcgacatcatcagtttcttgagccagccccagcgcctggtgctgcagtcttatcttcagagcctgcagagcctctgttggtcaggcatccccctaggccccggaccaccggccccaggccccggcaagatccccacaaggctggactgagccactatgtgaaactctttagcttctatgccaagatgcccatggagaggaaggctcttgagatggtggagaagtgcatctttgtgatgatctggaggtatttgctgctcatgctggccgcaagactgtgaagccagaggacctggagctgctgatgcggcggcagggcctggtcactgaccaagtctcactgcacgtgctagtggagcggcacctgcccctggagtaccggcagctgctcatcccctgtgcatacagtggcaactctgtcttccctgcccagtagtggccaggcttcaacactttccctgtccccacctggggactcttgcccccacatatttctccaggtctcctccccacccccccagcatcaataaagtgtcataaacagaa

SEQ ID NO: 287824 - DNA, 1165 bp, Homo sapiens
accccattcctcatgggcctcttgggaagggagcattgggtatgctgtgtacatagggtcctcccccttcctacgggtatgcagatgattacccagcagggcagcttcagctgggctggggagagctcaccaagagcacccctgccatcctggtgcctgcctccacggcttagaggagcctgggtgaggggaaagtatgtggttggtttgtagtcagaaaaggcttcctggaagacgattagcagaatcgggaaaggcagcagtagagtaaggagagagactatccattctaaggcctggagtcatggacccaagcaggtaccaatatagataataagtctgaaccaggatgtcgagtcgactgtggagggacagagccccagggaaagactggcctctatgtggccccctgacccaactgcccctcagcaggtggtcagggctgctggtcctggctggccaagggccacgtggtccccagcctcagcagaagccagcaagacttgctcttgaataagagcctccttgaggcaagttcagccccctctgtccactgttgccctcagcttatcttcagagcctgcagagcctctgttggtcaggcatccccctaggccccggaccaccggccccaggccccggcaagatccccacaaggctggactgagccactatgtgaaactctttagcttctatgccaagatgcccatggagaggaaggctcttgagatggtggagaagtgcctagataaatatttccagcatctttgtgatgatctggaggtatttgctgctcatgctggccgcaagactgtgaagccagaggacctggagctgctgatgcggcggtgagaaggcggaaggtgtgggggtgctggctgggggagttttggtgctgattctgcctgtcccttctcttcctccactgcaggcagggcctggtcactgaccaagtctcactgcacgtgctagtggagcggcacctgcccctggagtaccggcagctgctcatcccctgtgcatacagtggcaactctgtcttccctgcccagtagtggccaggcttcaacactttccctgtccccacctggggactcttgcccccacatatttctccaggtctcctccccacccccccagcatcaataaagtgtcataaacagaa

SEQ ID NO: 287825 - DNA, 680 bp, Homo sapiens
tgtgggggagcatcgcgagagttacattaactgtggcggcgggaaggcggagcctgcagctggctgggcggttaggagggcccggggccgagacgatggctgaccacaaccctgacagcgactccacgccgcgcacgctgctgcgacgcgtgctggatacagcggacccgcgcaccccgcggcgaccccggagtgctcgggctggagcccggagagccctgcttgaaacggcttcccccaggaagttgagtggccaaacaaggacgatagccagagggcgttcccatggagccaggtctgttggcagatcggcccatattcaggccagtgggcacttggaggaacagacacctcggacgctgctgaagaacatcctactaactgccatctcccaggcagtcgctattctaccccctttacccaagatccccactccaagcatctcccctgtggctgcatgtgctccactggtggtcctccctaggtatgtaggtgggagtactagaggagacagtctggcactgcactgagctttaacctaaggctccacccgggggataccaatcttatatcccctttccatctccctgccttccggctggacttgccaatgttcctgctgctgaccccgccttcactctgtggatctctctctctctctctctctctctctgtcgtat

SEQ ID NO: 287826 - DNA, 651 bp, Homo sapiens
tggagattgagttgtaacccaacccattgacttcatcacagctttcttccatgtagaataacgaatttcactttctagaattagaaggtagaaaaaacacataacgaaaggtagtttgctgagatgttcttagtaccatacttatgatcactcaacattcttgacaaattattgcacacattaaactgcagtagggctttagcaggactcagatttgaaagcacatggttgctgatgactgccagtgactggaagacatgcttgcttggaagttggagtgaaacaggacacagggaggctgggtgtagtggctcatgcctgtaatcccagcattttgggagggtgaggagggaggatggcttgacctcaggagtttgagaccagcttgagcaatgtggtaaaaccctgcctgtagtaccagctacctgggaggctgaagcaggaggatcatttgagcctgggagccagtaaatgagggctctactcttggttagttagttagtattaatctactagcaggctgttgaaacctctcaatacatcacattatttctctacaaaatggagattgggctacgtgattgctcaagttcattagtactttgctattattgccattattaagaaatgactaatatattcttccaatag

SEQ ID NO: 287827 - DNA, 2896 bp, Homo sapiens
agcagccggcacggggacagccggccgcacaacggatctgcaggcgcggagcaaaatgcacccgccgcgccgcgcggtcctgcagccccgccacggccccgcggcccgcacccccccggggcgacagtgagcctctcccgccaccaccgggggccgagcggagggctctcgggtgggagagcgggaccagatctcgacagctgttcatttccaggaagccaccgcagccagagcgaaaggggaccttctgccaccagcggggcatcagccagcggcgcgcatggatttatgaagacactcatgcaagaagtgggcaggacttggacaaacttttccaccggctccgcgtccgccgctccccgcgcctcgtctcctttcccctcctctcccggcggccgccgctgcccgcgatggtggccgcgctgctgggcggcggcggcgaggcccgcggggggacagtgccgggcgcctggctgtgcctgatggcgctgctgcagctgctgggctcggcgccgcggggatcggggctggcgcacggccgccgcctcatctgctggcaggcgctgctgcagtgccagggggagccggagtgcagctacgcctacaaccagtacgccgaggcgtgcgcgccggtgctggcgcagcacggcgggggcgacgcgcccggggccgccgccgccgctttcccggcctcggccgcctctttctcgtcgcgctggcgctgcccgagtcactgcatctcggccctcattcagctcaaccacacgcgccgcgggcccgccctggaggactgtgactgcgcgcaggacgagaactgcaagtccaccaagcgcgccattgagccgtgcctgccccggacgagcggcggcggcgcgggcggccccggcgcgggcggggtcatgggctgcaccgaggcccggcggcgctgcgaccgcgacagccgctgcaacctggcgctgagccgctacctgacctactgcggcaaagtcttcaacgggctgcgctgcacggacgaatgccgcaccgtcattgaggacatgctggctatgcccaaggtggcgctgctcaacgactgcgtgtgcgacggcctcgagcggcccatctgcgagtcggtcaaggagaacatggcccgcctgtgcttcggcgccgagctgggcaacggccccggcagcagcggctcggacgggggcctggacgactactacgatgaggactacgatgacgagcagcgcaccgggggcgcgggtggtgagcagccgctggacgacgacgacggcgtcccgcacccaccgcgcccgggcagcggcgctgctgcatcgggcggccgcggggacctgccctatgggcctgggcgcaggagcagcggcggcggcggccgcttggcgccccggggcgcctggaccccactcgcctccatcttgctgctgctgcttgggccgctcttttagccctcgcgccccccgccgttggctgcgggagagcccgcgtcccactcccgtgctcgcctcgaccccgcgccgggcacctgtggcttgggacagatagaagggatggttggggatacttcccaaaactttttccaagtcaacttggtgtagccggttccccggccacgactctgggcacttcccctgaagctcctctccggagcttgacttcttggacctcctcccccgccccaattccaagctccagaaactcccaactcgtctgccgtccagaaagctagctgcagtgttcaggacgtccgggaggaagcaagcatgtgggggacagaacagtagtcctggactcgaaagggaaggtgctgaccagtggggccttagcaatttgaagggttgggaaggaggaattatatttgcaaaggggctgtctattagcatatttcctttgagggggcaaaaaaaagtgccagtatcgacttttacagattgtggccagtgaggatattataatcctatgtaaacagaaaagtcccacttaccgattcattctttcactgtttgtatctgcgcccagaattctcagtgacgtgggggtgagggtgggtggcgattgccttagagggaacccctaaattggttttggataagtttgagcccttgaccttaatttcattgctaccactctgatctcttagcacatttcttaggattaagggtccaaaaatgctgatctaaggggttgccatggtgttgaacaatgcaactttttatttaaaaaagctctgcactgccatgtatgaaagtctctttatgatgtttgtttttttgtcatttttgttctttacatcaagaaattttatgtttaaatatgcggagaatgtatattgcctctgctcctatcagggttgctaaaccctggtacatcgtatataaaatgtattaaaactggggtttgttaccagttgctgtactttgtatatagaatttttataaattgtatgcttcagaaataatttatttttaaaaagaaattaaaagttttaaactcacatccatattacacctttcccccctgaaatgtatagaatccatttgtcatcaggaatcaaaacccacagtccattgtgaagtgtgctatatttagaacagtcttaaaatgtacagtgtattttatagaattgaagttaacattcttattttcaagagaatttatggacgttgtagaaatgtacaaatgcatttccaaactgccttaaacgttgtatttttatagacatgttttttaaaaatcctaagtttttaaataactatggatttgtgtattttttttggttatttgttttattaaaacatgtacatcagtaaagagttttaaacaatgaaaacacatagtaaaaagaataaaaaaaaaatttgggggcttgggctagaaagttatacaacttgttggg

SEQ ID NO: 287828 - DNA, 2844 bp, Homo sapiens
agcagccggcacggggacagccggccgcacaacggatctgcaggcgcggagcaaaatgcacccgccgcgccgcgcggtcctgcagccccgccacggccccgcggcccgcacccccccggggcgacagtgagcctctcccgccaccaccgggggccgagcggagggctctcgggtgggagagcgggaccagatctcgacagctgttcatttccaggaagccaccgcagccagagcgaaaggggaccttctgccaccagcggggcatcagccagcggcgcgcatggatttatgaagacactcatgcaagaagtgggcaggacttggacaaacttttccaccggctccgcgtccgccgctccccgcgcctcgtctcctttcccctcctctcccggcggccgccgctgcccgcgatggtggccgcgctgctgggcggcggcggcgaggcccgcggggggacagtgccgggcgcctggctgtgcctgatggcgctgctgcagctgctgggctcggcgccgcggggatcggggctggcgcacggccgccgcctcatctgctggcaggcgctgctgcagtgccagggggagccggagtgcagctacgcctacaaccagtacgccgaggcgtgcgcgccggtgctggcgcagcacggcgggggcgacgcgcccggggccgccgccgccgctttcccggcctcggccgcctctttctcgtcgcgctggcgctgcccgagtcactgcatctcggccctcattcagctcaaccacacgcgccgcgggcccgccctggaggactgtgactgcgcgcaggacgagaactgcaagtccaccaagcgcgccattgagccgtgcctgccccggacgagcggcggcggcgcgggcggccccggcgcgggcggggtcatgggctgcaccgaggcccggcggcgctgcgaccgcgacagccgctgcaacctggcgctgagccgctacctgacctactgcggcaaagtcttcaacgggctgcgctgcacggacgaatgccgcaccgtcattgaggacatgctggctatgcccaaggtggcgctgctcaacgactgcgtgtgcgacggcctcgagcggcccatctgcgagtcggtcaaggagaacatggcccgcctgtgcttcggcgccgagctgggcaacggccccggcagcagcggctcggacgggggcctggacgactactacgatgaggactacgatgacgagcagcgcaccgggggcgcgggtggtgagcagccgctggacgacgacgacggcgtcccgcacccaccgcgcccgggcagcggcgctgctgcatcgggcggccgcggggacctgccctatgggcctgggcgcaggagcagcggcggcggcggccgcttggcgccccggggcgcctggaccccactcgcctccatcttgctgctgctgcttgggccgctcttttagccctcgcgccccccgcgccgggcacctgtggcttgggacagatagaagggatggttggggatacttcccaaaactttttccaagtcaacttggtgtagccggttccccggccacgactctgggcacttcccctgaagctcctctccggagcttgacttcttggacctcctcccccgccccaattccaagctccagaaactcccaactcgtctgccgtccagaaagctagctgcagtgttcaggacgtccgggaggaagcaagcatgtgggggacagaacagtagtcctggactcgaaagggaaggtgctgaccagtggggccttagcaatttgaagggttgggaaggaggaattatatttgcaaaggggctgtctattagcatatttcctttgagggggcaaaaaaaagtgccagtatcgacttttacagattgtggccagtgaggatattataatcctatgtaaacagaaaagtcccacttaccgattcattctttcactgtttgtatctgcgcccagaattctcagtgacgtgggggtgagggtgggtggcgattgccttagagggaacccctaaattggttttggataagtttgagcccttgaccttaatttcattgctaccactctgatctcttagcacatttcttaggattaagggtccaaaaatgctgatctaaggggttgccatggtgttgaacaatgcaactttttatttaaaaaagctctgcactgccatgtatgaaagtctctttatgatgtttgtttttttgtcatttttgttctttacatcaagaaattttatgtttaaatatgcggagaatgtatattgcctctgctcctatcagggttgctaaaccctggtacatcgtatataaaatgtattaaaactggggtttgttaccagttgctgtactttgtatatagaatttttataaattgtatgcttcagaaataatttatttttaaaaagaaattaaaagttttaaactcacatccatattacacctttcccccctgaaatgtatagaatccatttgtcatcaggaatcaaaacccacagtccattgtgaagtgtgctatatttagaacagtcttaaaatgtacagtgtattttatagaattgaagttaacattcttattttcaagagaatttatggacgttgtagaaatgtacaaatgcatttccaaactgccttaaacgttgtatttttatagacatgttttttaaaaatcctaagtttttaaataactatggatttgtgtattttttttggttatttgttttattaaaacatgtacatcagtaaagagttttaaacaatgaaaacacatagtaaaaagaataaaaaaaaaatttgggggcttgggctagaaagttatacaacttgttggg

SEQ ID NO: 287829 - DNA, 1004 bp, Homo sapiens
gatccctggtcatcttgtctacatatcgacttttacagattgtggccagtgaggatattataatcctatgtaaacagaaaagtcccacttaccgattcattctttcactgtttgtatctgcgcccagaattctcagtgacgtgggggtgagggtgggtggcgattgccttagagggaacccctaaattggttttggataagtttgagcccttgaccttaatttcattgctaccactctgatctcttagcacatttcttaggattaagggtccaaaaatgctgatctaaggggttgccatggtgttgaacaatgcaactttttatttaaaaaagctctgcactgccatgtatgaaagtctctttatgatgtttgtttttttgtcatttttgttctttacatcaagaaattttatgtttaaatatgcggagaatgtatattgcctctgctcctatcagggttgctaaaccctggtacatcgtatataaaatgtattaaaactggggtttgttaccagttgctgtactttgtatatagaatttttataaattgtatgcttcagaaataatttatttttaaaaagaaattaaaagttttaaactcacatccatattacacctttcccccctgaaatgtatagaatccatttgtcatcaggaatcaaaacccacagtccattgtgaagtgtgctatatttagaacagtcttaaaatgtacagtgtattttatagaattgaagttaacattcttattttcaagagaatttatggacgttgtagaaatgtacaaatgcatttccaaactgccttaaacgttgtatttttatagacatgttttttaaaaatcctaagtttttaaataactatggatttgtgtattttttttggttatttgttttattaaaacatgtacatcagtaaagagttttaaacaatgaaaacacatagtaaaaagaataaaaaaaaaatttgggggcttgggctagaaagttatacaacttgttggg

SEQ ID NO: 287830 - DNA, 545 bp, Homo sapiens
ttaaatatgcggagaatgtatattgcctctgctcctatcagggttgctaaaccctggtacatcgtatataaaatgtattaaaactggggtttgttaccagttgctgtactttgtatatagaatttttataaattgtatgcttcagaaataatttatttttaaaaagaaattaaaagttttaaactcacatccatattacacctttcccccctgaaatgtatagaatccatttgtcatcaggaatcaaaacccacagtccattgtgaagtgtgctatatttagaacagtcttaaaatgtacagtgtattttatagaattgaagttaacattcttattttcaagagaatttatggacgttgtagaaatgtacaaatgcatttccaaactgccttaaacgttgtatttttatagacatgttttttaaaaatcctaagtttttaaataactatggatttgtgtattttttttggttatttgttttattaaaacatgtacatcagtaaagagttttaaacaatgaatatggtgtagttactttccagagt

SEQ ID NO: 287831 - DNA, 380 bp, Homo sapiens
gccctcgcgccccccgccgttggctgcgggagagcccgcgtcccactcccgtgctcgcctcgaccccgcgccgggcacctgtggcttgggacagatagaagggatggttggggatacttcccaaaactttttccaagtcaacttggtgtagccggttccccggccacgactctgggcacttcccctgaagctcctctccggagcttgacttcttggacctcctcccccgccccaattccaagctccagaaactcccaactcgtctgccgtccagaaagctagctgcagtgttcaggacgtccgggaggaagcaagcatgtgggggacagaacagtagtcctggactcgaaagggaaggtgctgaccagtggggccttagc

SEQ ID NO: 287832 - DNA, 1477 bp, Homo sapiens
agcagccggcacggggacagccggccgcacaacggatctgcaggcgcggagcaaaatgcacccgccgcgccgcgcggtcctgcagccccgccacggccccgcggcccgcacccccccggggcgacagtgagcctctcccgccaccaccgggggccgagcggagggctctcgggtgggagagcgggaccagatctcgacagctgttcattcccctgaagctcctctccggagcttgacttcttggacctcctcccccgccccaattccaagctccagaaactcccaactcgtctgccgtccagaaagctagctgcagtgttcaggacgtccgggaggaagcaagcatgtgggggacagaacagtagtcctggactcgaaagggaaggtgctgaccagtggggccttagcaatttgaagggttgggaaggaggaattatatttgcaaaggggctgtctattagcatatttcctttgagggggcaaaaaaaagtgccagtatcgacttttacagattgtggccagtgaggatattataatcctatgtaaacagaaaagtcccacttaccgattcattctttcactgtttgtatctgcgcccagaattctcagtgacgtgggggtgagggtgggtggcgattgccttagagggaacccctaaattggttttggataagtttgagcccttgaccttaatttcattgctaccactctgatctcttagcacatttcttaggattaagggtccaaaaatgctgatctaaggggttgccatggtgttgaacaatgcaactttttatttaaaaaagctctgcactgccatgtatgaaagtctctttatgatgtttgtttttttgtcatttttgttctttacatcaagaaattttatgtttaaatatgcggagaatgtatattgcctctgctcctatcagggttgctaaaccctggtacatcgtatataaaatgtattaaaactggggtttgttaccagttgctgtactttgtatatagaatttttataaattgtatgcttcagaaataatttatttttaaaaagaaattaaaagttttaaactcacatccatattacacctttcccccctgaaatgtatagaatccatttgtcatcaggaatcaaaacccacagtccattgtgaagtgtgctatatttagaacagtcttaaaatgtacagtgtattttatagaattgaagttaacattcttattttcaagagaatttatggacgttgtagaaatgtacaaatgcatttccaaactgccttaaacgttgtatttttatagacatgttttttaaaaatcctaagtttttaaataactatggatttgtgtattttttttggttatttgttttattaaaacatgtacatcagtaaagagttttaaacaatgaaaacacatagtaaaaagaataaaaaaaaaatttgggggcttgggctagaaagttatacaacttgttggg

SEQ ID NO: 287833 - DNA, 2053 bp, Homo sapiens
tgcaacatgaggacataggactctttaattccaaaggctcttccaacccagagaacccatctgcccccatgaccttctcccagagcttgagacatggcctgagccccctgctgccataggacttggggcctatctgccattgcaggacctgatttaacagctctcttcttccaatactgggcagtagagtttcggaaactgacaaatgtgtggtctcttcagtgcccagtgtgtaacctggcatggtttgggtgtgctaggagtttgtgaaatgaatgttttcaagacgcaaacgctgctatgcccatcaggtgtgcacagcaggcctgaggatcatgatgagactccctttttatgcagcaaagcacaaagtgtgacagtcgtggccttcctggtggccagacttctagcaactttagccacccaccaaatgacatcacatacagaaggcctcagaaagggaggaggtcgtaaggacacacagctgatgaagggtcagtgctcagctatcaaggtcatcttctggcctggttgcctcccacagcccaggatgcattcaaggctgcacatcaggagcataaataagggtggtcagctcaggcccactggctgcaacaagtagccactgacagggagtctggggccatttggtgcagaacaacccccaacccagtggccatcttcacaactgcagcacagtgctggccctaatgccaggtgagcgtgcaaagtcctgtttctttgtctttacatagggaccgggcgatgcgctttagagaaattccctattatttcacaggaaaggaggctgtgaaaaggagagggcaggttttggagccaagtcgacctggcatcaggtcctggctgccttttttttttttttttttttttaaagacatacatggtcttgctttgtcgcccaggctggagtgcagtggcagtgtcatggctcactgcagcctcaacctgctgggctcaagcaatcctcccacctcagcccgagttgctgggatgacaggcacacgccaccatacccagctaatttttatattttttatagaaaccaggtctcactatgttgcccaggccggtcttaaactttgcccaggccagtcttgaactcctgagctcaagcaatcctcctgcctcagcctcccaaagtgctaggattacaggcgtgagccacttacccggcctctgcctcttgttaatttgaccacatcatgtacctgctgtgcccgttccttcctccgtagaagagggtgctggtcctgcccttttgaggcctccatgagggccaaatgtgccatgggacacttagtgccatgcctgcgcagacctgtggaataaacagcaattctgagcaggctcattttaaagggacttgcaaatttgggcgttccttgtgtgccttcctcataaaacccactcctcccagaatatgcttagaggtgctgctgtatttacctgagagctatgcttttcatcgaaaacctaaacgtgatcatctcttggatgaggtgtggccctgcaccctcgcctgctcgtggaaggagtctgggccagcagtgacccatgcgctagggtctctgctgaggaagtggcaggtgtgtggccctgccctggccccgtagtgagtgtggggcccacctgtgccctcatgggcagctgaagggggagctttctaccccaggttcctttccttactgaaaagtcttgagcaaacagttgccgctctccaccccctgctttttaaaaaaaattttttctcacgtaagaaaatgttatctgtgtgctggggaaaattttgaaaataacaaaaaccagaatacaaacacccataatcaatcacagagataaccactgttcataattccttccagtcttcttacttggcacatatacatttgtctttctttatatatgacatatggatattttacaaagttaggatcctactctatgcactgcttggtgatcggatctattcaatgtacaaaatattttgaaagtttctgtgattaaatgttctttgaaaacataaaatttagca

SEQ ID NO: 287834 - DNA, 556 bp, Homo sapiens
gactgggtcatcgccccccaaggctactcagcctattactgtgagggggagtgctccttcccgctggactcctgcatgaacgccaccaaccacgccatcctgcagtccctggtgcacctgatgaagccaaacgcagtccccaaggcgtgctgtgcacccaccaagctgagcgccacctctgtgctctactatgacagcagcaacaacgtcatcctgcgcaagcaccgcaacatggtggtcaaggcctgcggctgccactgagtcagcccgcccagccctactgcagccacccttctcatctggatcgggccctgcagaggcagaaaacccttaaatgctgtcacagtcaagcaatcctcccacctcagcccgagttgctgggatgacaggcacacgccaccatacccagctaatttttatattttttatagaaaccaggtctcactatgttgcccaggccggtcttaaactttgcccaggccagtcttgaactcctgagctcaagcaatcctcctgcactccagcctgggcaacagagcaagactccgtctcaaaa

SEQ ID NO: 287835 - DNA, 440 bp, Homo sapiens
tgctgggattacaagtgtgagccaccacgcccagccatattggaagattattgagtcctgtttatcggttttatccagcaaagagaccttttagaagatttttgttgcaggtgcttaaagctctacccccaagccattagaaataaaactggttctggatacctgagaatgccctttctgttctagaaaataatgctttaaattctgaaaatagctgttttgaaagatgggcgcagtcaactggtggtagcaataaagaaattattgtatactaccttacctttccaaggcatagtagagcaaggtaagatagagcatcagtttcagatagattatcttgacattacattgaatatgattttccttgcttgcttccaggatcgagatttagagagacttcgtagaaaatggctaaatgcattaacaaaacgtcaggagta

SEQ ID NO: 287836 - DNA, 1008 bp, Homo sapiens
agctagtggaaaaacaagagaagggaagtcaaaaggctacttgctgtcagctaaagccagacaacctctcctgtttcatctcctggcaacagaatgcatcctccttttgggaaactgcctctttccccactcctcagagtaaatcttgctgctgctcactctttgggtctgcactgcccataagagctgtagcactcaccgcgaaggtctgcagcttcactcttgaaaccagagagaccacgaacctaccgggagaaatgaacaaattccggacgcaccatctttaagaactgtaacactcactgcgaggatctgcggcttcattctttaagtctgtgagaccaagaacccaccaattccggcacactaatatgctgttggaaactggctatatggaaaggctatgtggaagaaaacaaacaccccagccaacataatggagctcccagctgacagctgacatctagctgattgccaaccactttggaaactgatcttcaaaacccacttgagctatgtcaagagaagccacctgtgacacagaagcagaaggatccaagtcaaaggagtttatttgggaggaaatagcacgagagaatgtgatacttgggaaaattatgtagagagagagattaaagatgcaagctataaaaggaattgataatataaaagctcctgagaagattggaagaatacatataagagaccctgatccttgataggatggaccttttctagaactaccatcaccctggaagctgaagaaaatcattcgtaactgaggcacacttgccttttgcaactaagctctactgaattccaaagctatagaaatatccatcttgacctggaaagtctgtttctttgctagtccagaaggttttttttaacatgaacaagatcctctcaagcactgtttgctttggactcctaactttgttatccgtgttgagttttttacaatctgtgcatggacgaccatatcttacccaaggtacgtgcatatca

SEQ ID NO: 287837 - DNA, 718 bp, Homo sapiens
ggcgccgagcggggccccgagcgcagcagcagcgccggacgcggcgcaaagtccggccggcagggctcgcaggccggagaacggagcgggtcgggcgggcaggggctggtgaccaaagcagcgggagacggtccccgaggcaccaagctggcggcccagctgccccgccgcggccacctgctccgcgtccccggccccaatcgataccaaatatccggagcccggaaatggaccggggccgtccaaggagagatggtagatggccataaaaaccccaaatacaacgtacagaatgaagagcagctgataaaattctgggccagtttggagtagagtgtgtacacaatcagctgggagaactgagtcattcattcatcaaaatcgcatgaatgtgtctaccaagtgtgatgttagacaacctctcctgtttcatctcctggcaacagaatgcatcctccttttgggaaactgcctctttccccactcctcagagatctgcctctaggagatgatgaggccaaactgaagacagaagcaaagagaagagaaagggagatgaagagggcatgttctgatgttaccacagtagcaaagcaggatatccccagagcagctggcatttcagcaactcctggattctgggatctacaacccgcaaactctcaacttatcctcagttttgcttaagctagtaatagttgattttctgtcactcaca

SEQ ID NO: 287838 - DNA, 819 bp, Homo sapiens
aggtctgtaaccgcaattgcgagtggctggcgagcgaagatcagcgcccgctgccgcctcgctgttgtctcctttgtgctcagtgacgcgccgcctgaggctggggccccgctgtgctcccgcccccgggccctgcccccctcctacgggagggtcgcgtctttaggtgggggccttgtatcctaaaggcctcaacaaaaaggccacacgggtcacctaaaacatagtctttcccgtgagcggtgtagtcagcattctgtggtctggttctgggattgagattaacacaggatgtttactgcatgcttgcctctctctcatacactctttttgcacccggaattagaggagagatggtagatggccataaaaaccccaaatacaacgtacagaatgaagagcagctgataaaattctgggccagtttggagtagagtgtgtacacaatcagctgggagaactgagtcattcattcatcaaaatcgcatgaatgtgtctaccaagtgtgatgttagacaacctctcctgtttcatctcctggcaacagaatgcatcctccttttgggaaactgcctctttccccactcctcagagatctgcctctaggagatgatgaggccaaactgaagacagaagcaaagagaagagaaagggagatgaagagggcatgttctgatgttaccacagtagcaaagcaggatatccccagagcagctggcatttcagcaactcctggattctgggatctacaacccgcaaactctcaacttatcctcagttttgcttaagctagtaatagttgattttctgtcactcaca

SEQ ID NO: 287839 - DNA, 460 bp, Homo sapiens
cgcgtcgacccagccccgggccagcctttttagccataagaaagtggctgtccggggctggagccgcctggcgggcgccacgtatcggggtgtctacggcaccagcctcctgcgccacgccaaggtcgtctgggagatgctcaagtttgaagtggcgctcaggctggagaccttggccatgcggctgaccgccctcctggctcgtgctctggtccacctgagcctcgtgcccccagcggaggagctctaccagtacctggagacctagggtgcagccgcccagggccggcggggcccttttcaccttgggctgacggaggtggcggggctagaggtgtagacaccccgagccccgtgggcactcgcactggggggctgtgacagcagctgggccaggaggccgtgtaatgaccacacactcctctcaagcaaaaaaaaaaagtcgacgcggccgcgaatt

SEQ ID NO: 287840 - DNA, 967 bp, Homo sapiens
cggcgggctggtgctgtgtccactgcaatgcctctcctctccccagatagcagaaaagctcatcaaggcctttgctgagcagatattttacaccggcttcatccactcggacccacatcctggcaacgttctggtgcggaaaggcccggacgggaaagcggagctggtgctgctggaccacgggctctaccagttcctggaggagaaggaccgcgcagccctctgccagctgtggcgggccatcatcctgcgggacgacgccgccatgagggcgcacgcagccgcactgggggtgcaagactacctcctgttcgccgagatgctcatgcagcgccccgtgcgcctggggcagctgtggggctcgcacctactgagccgcgaagaggcggcctacatggtggacatggcccgcgagcgcttcgaggccgtcatggcggtgctcagggagctgccgcggcccatgctgctggtgctgcgcaacatcaacaccgtgcgcgctatcaacgtggccctcggcgcccccgtggaccgctacttccttatggctaaaagggctgtccggggctggagccgcctggcgggcgccacgtatcggggtgtctacggcaccagcctcctgcgccacgccaaggtcgtctgggagatgctcaagtttgaagtggcgctcaggctggagaccttggccatgcggctgaccgccctcctggctcgtgctctggtccacctgagcctcgtgcccccagcggaggagctctaccagtacctggagacctagggtgcagccgcccagggccggcggggcccttttcaccttgggctgacggaggtggcggggctagaggtgtagacaccccgagccccgtgggcactcgcactggggggctgtgacagcagctgggccaggaggccgtgtaatgaccacacactcctctcaagcaaaaaaaaaaagtcgacgcggccgcgaatt

SEQ ID NO: 287841 - DNA, 945 bp, Homo sapiens
gagccaggggtggcagtgcatgacatagcagaaaagctcatcaaggcctttgctgagcagatattttacaccggcttcatccactcggacccacatcctggcaacgttctggtgcggaaaggcccggacgggaaagcggagctggtgctgctggaccacgggctctaccagttcctggaggagaaggaccgcgcagccctctgccagctgtggcgggccatcatcctgcgggacgacgccgccatgagggcgcacgcagccgcactgggggtgcaagactacctcctgttcgccgagatgctcatgcagcgccccgtgcgcctggggcagctgtggggctcgcacctactgagccgcgaagaggcggcctacatggtggacatggcccgcgagcgcttcgaggccgtcatggcggtgctcagggagctgccgcggcccatgctgctggtgctgcgcaacatcaacaccgtgcgcgctatcaacgtggccctcggcgcccccgtggaccgctacttccttatggctaaaagggctgtccggggctggagccgcctggcgggcgccacgtatcggggtgtctacggcaccagcctcctgcgccacgccaaggtcgtctgggagatgctcaagtttgaagtggcgctcaggctggagaccttggccatgcggctgaccgccctcctggctcgtgctctggtccacctgagcctcgtgcccccagcggaggagctctaccagtacctggagacctagggtgcagccgcccagggccggcggggcccttttcaccttgggctgacggaggtggcggggctagaggtgtagacaccccgagccccgtgggcactcgcactggggggctgtgacagcagctgggccaggaggccgtgtaatgaccacacactcctctcaagcaaaaaaaaaaagtcgacgcggccgcgaatt

SEQ ID NO: 287842 - DNA, 843 bp, Homo sapiens
ttttttttttttggtgctgtgcttttgaagcccagtgtgttttatgtattacagcacatcttggtttggacagaccacatagtggccagtggctgccatattggacagcactggtgtaagagggtccatctctcactcccacatcaatgtccaatggtttctcattcaactggaaagtgaaattggaaatcttgtgaaagatgaagaattatgaatgtggtacgttgaactgctgggcccacccacaagacatcaacaaatgaaggtgtggaagggttaaaccagttaacgttgaacaaaggacaatggatatgatgagttacaagctgagttgtatccctccacaattcacatgttgaagtcctaacctttagtacttcagggtgtaacttatttggaaactagatcattatagaagttaaaacgaggtcataagggtgggccctaatcttactaacctgtccctataaaagggaaatttgaacacagtgacacccagagggaagatgatgtgaagacagagagagaagacagccatcagcaagccaaggagagaagtctggaatggatcctcccctcacagccctcagaaggaaccaagccagccagcctctcaatctcacacttttagcctccagatctgtgagacaataagtttatgttgtttaagccctccagtctgtggtactttgtaatgtagccccagcaaactaaaacatgggttggctggtggcattagaacaagttgcccatgaaaaggttacaggcagcctataggacaattgaagatgcattctactttctgcctgcactgtgcatctagtgaagaaaaaaaaaaaaaac

SEQ ID NO: 287843 - DNA, 854 bp, Homo sapiens
accgcctggcggtactttgaagaaagacttctcgacgccgagacactgctggtggtactcgatgtcacatcttggtttggacagaccacatagtggccagtggctgccatattggacagcactggtgtaagagggtccatctctcactcccacatcaatgtccaatggtttctcattcaactggaaagtgaaattggaaatcttgtgaaagatgaagaattatgaatgtggtacgttgaactgctgggcccacccacaagacatcaacaaatgaaggtgtggaagggttaaaccagttaacgttgaacaaaggacaatggatatgatgagttacaagctgagttgtatccctccacaattcacatgttgaagtcctaacctttagtacttcagggtgtaacttatttggaaactagatcattatagaagttaaaacgaggtcataagggtgggccctaatcttactaacctgtccctataaaagggaaatttgaacacagtgacacccagagggaagatgatgtgaagacagagagagaagacagccatcagcaagccaaggagagaagtctggaatggatcctcccctcacagccctcagaaggaaccaagccagccagcctctcaatctcacacttttagcctccagatctgtgagacaataagtttatgttgtttaagccctccagtctgtggtactttgtaatgtagccccagcaaactaaaacatgggttggctggtggcattagaacaagttgcccatgaaaaggttacaggcagcctataggacaattgaagatgcattctactttctgcctgcactgtgcatctagtgaagaaaaaaaaaaaaaac

SEQ ID NO: 287844 - DNA, 1007 bp, Homo sapiens
accgcctggcggtactttgaagaaagacttctcgacgccgagacactgctggtggtactcgatgtatcacgtggatggcaggagcagtggcaaaggactttcaactgacagacaagcatgagatggtggtcagctacctcccactcagccatattgcagcacagatgatggacatctgggtacccataaagattggggcgctcacatactttgctcaagcagatgctctcaaggggtgactggcaaccatgccgtgaagacactcaagcaattctgtggagaaggccatggaatgaggagctgagacttcctgccaacaaccagtcatctaggtcagaaattcagacagggcacatctgggacagcttgaagtcatgatgtgctggagctggcatgtatcaaccgcatgagtcagagccaattgcatgcatctcttctcagcttcacattcagtggtatcacatctgtaccttgaaatcagccacaggggagtatttacaccacaggaatggcaaacactgcaaatcagcgccccatgccactcaagagccagtttattaaactatttatcagaacataacgtgctttaaagaattatttaaaattctcaacaaatataaagggacatgtattattaaatccttagggatggtcccaccaaaatcccatatacagtaattattagcaagactccaaatgtacttagatttgctaaaattctcaaatgcattagtaaggtaagagaacagaatctcactcattggccagggccagagggtgaccatagtcaaacgtagaccgtgaattcccgaggcacaagagcaaacgacccagccgacgagcactccggagtagaggaacacaagaggtgcacacaaccaatcacgtggcaaagtgtcgataagaggacgacgggcaaaggcccagccggaggcgagaacacaggagccaggagagccccgacaagaaccaaaaggagaacggcacacaccggaacacgcacacgg

SEQ ID NO: 287845 - DNA, 584 bp, Homo sapiens
accgcctggcggtactttgaagaaagacttctcgacgccgagacactgctggtggtactcgatgtcacatcttggtttggacagaccacatagtggccagtggctgccatattggacagcactggtgtaagagggtccatctctcactcccacatcaatgtccaatggtttctcattcaactggaaagtgaaattggaaatcttgtgaaagatgaagaattatgaatgtgtgacacccagagggaagatgatgtgaagacagagagagaagacagccatcagcaagccaaggagagaagtctggaatggatcctcccctcacagccctcagaaggaaccaagccagccagcctctcaatctcacacttttagcctccagatctgtgagacaataagtttatgttgtttaagccctccagtctgtggtactttgtaatgtagccccagcaaactaaaacatgggttggctggtggcattagaacaagttgcccatgaaaaggttacaggcagcctataggacaattgaagatgcattctactttctgcctgcactgtgcatctagtgaagaaaaaaaaaaaaaac

SEQ ID NO: 287846 - DNA, 625 bp, Homo sapiens
accgcctggcggtactttgaagaaagacttctcgacgccgagacactgctggtggtactcgatgtatcacgtggatggcaggagcagtggcaaaggactttcaactgacagacaagcatgagatggtggtcagctacctcccactcagccatattgcagcacagatgatggacatctgggtacccataaagattggggcgctcacatactttgctcaagcagatgctctcaaggggtgactggcaaccatgccgtgaagacactcaagcaattctgtggagaaggccatggaatgaggagctgagacttcctgccaacaaccagtcatctaggtaagtaagcttggaagtgaagcctccagccccagttgagccttcagatgagatagccccagctgatagcttggctgcaacctcatgagagacctggagccagaagaacccaatttcaaagtagctcctaaattctcaatccacagaaactgtgagatgataaatgtttgtcatttcaagtcactatattttgggataatttgttatgcagcagcaactaacaaaaacatagagatagtatgttagggacaaatgcaagatgcagaaccatgggtgtagtaggctattatgtg

SEQ ID NO: 287847 - DNA, 406 bp, Homo sapiens
accgcctggcggtactttgaagaaagacttctcgacgccgagacactgctggtggtactcgatgtaggtgagcaggtggcagctgttggagccgggcgcgatgttgttggcgtacttgatggccgtgctcgcgaccatgtcgtgcacagtgaggagtgtcttgttgctaacttagtccttgctgagccgcagtcgcgcctccccgtcgcgctccgtggtccgagtagctcagcctgcggacaggcgggtcagcggcggccggagacccccagatggacctagagagaggcgagcaggtggcgtgtcaggggcaaaaccagggagagatgggagcacaggcaggagcgtggcactgagagatggcagacggaggaggcgtggtgtatgaagtggattgccaagggag

SEQ ID NO: 287848 - DNA, 2237 bp, Homo sapiens
gggctttattctgtcatacggtagcaagaactggcctattggcatcgtattcctggcattgagctgtattgaccctgaatgtgtcctcctgaggtttttgagggtgacctgggagaaagggtctgaaaaagcattgggatccaagtgactttaaatctgcccgtggcatttcctgctgagaggcgagaaactagcatctctcccaacaggctcacatccgccaggaaggacagagcccaaaacgggggtagactttgtgggaaattcgccagttagtccgctgagattttaatctgcctcaagcacaggatgctgacaagaaaggtagaccactcccccgatcccagacaaaccccaggggtgacaacttctccatcagtatcctgagaagcaacatcaaatgcttaccaagtcagcacgtttactgagtgagtactctgacggaataaaccagcatttggagctgaacttgagaacacagggccctctgacagcagcttagggaaacacccatcccttccagattggcagaatccttccatttcatgtccttcggagacgctgtattctctttacaaatcattcatgaaactgaagctcagtctcccaggggtaagtcctgggccacgtgcaaacaatggcaaatccagctcttccatgatagagaaggcaaacacacccaccttcatcctgagcctaaaaggccacctctgagcacttgggcagccactcctctgggcctcagagggccatgagcttggccaggtaggcacagcggcggggaagtcacagctgtcaggtaccggccatggtgcaggtgggaataggagatgccagagctgctttagctgaggaaagcaaacagtcagcagtgctcaaaggagcaaaacttcgaatgtgcacattgacccctgacacctgcaagcataacacagatcctaagactagagtgaagtaggaagaagaattagaaaatccagtggatgtcctgagtatagggaaccagggccgttgaaaatcagtaaaggttgattacctggggcgagaccgggtgactgtggcagtgcaggtgaaggtaccctggaccttctcagttcgctggcacataaggctccgccaataaagcgtggttctctctgtcatacacacacacacacacacacacacacacacacacacaatgattggagggctatatgatccagcattagcttcctggtgtgccaagcatgcttgatcgggaatttttttttattattattattttttagctgtagctgaaggcatttctcggatgtggagaggagaatggaaatcgcagaaccaaatcagtttgccctgccatatttggctgtggtctgtcattgggcatttctgatgtgcttttctggattcaggaagagctgattgtcctccgagggttgaaaaaaaaaaacagtttcagaaacctgaatccagggccttatagttctcctcattatctatcttcttctcccttccctcgcccaagggagtgggggaaacacttttcactgcagagtttgctttaaagttttcccatcttgcgtgcattatcccttgatattaaaattattttctcagtttaatccaactcctgctgagaagctgtgtgagatttaggctgtggggtttttttcttgtactcttttggatggtgttgcatttttcactcttaacccgagggtgtgtttcagcttatgttcgttctgtttcatgcaggtttatagcacggtagagtagaaggcggcttctgatttttagggtatttttagaattcattcctgagtgaggggttcagacacccagtctcctcggaacaggggtgaggggtcgactgagctttgttgagaagcctccagttaggcttcgggcgggtctccatgttatattgtgtgtttactgagcttcccactggtagaagatgacacatttgtccatcgtcctgtgtatctgctttccagaggacaccggagcattctcctggggtcactcccacatggctgcctcacatagctgttttgcaacagcctttattgccaacacccttggaagaacatctcctgtagaagtacaagttttgcaatatggactttggaagtggttttgtgatgttcgaattttctgttagcctattgctcaagcactacagaatgtacatagtccctttggccatcctctcaccccagaatatcctaataaacattgttttctttttt

SEQ ID NO: 287849 - DNA, 2302 bp, Homo sapiens
gggctttattctgtcatacggtagcaagaactggcctattggcatcgtattcctggcattgagctgtattgaccctgaatgtgtcctcctgaggtttttgagggtgacctgggagaaagggtctgaaaaagcattgggatccaagtgactttaaatctgcccgtggcatttcctgctgagaggcgagaaactagcatctctcccaacaggctcacatccgccaggaaggacagagcccaaaacgggggtagactttgtgggaaattcgccagttagtccgctgagattttaatctgcctcaagcacaggatgctgacaagaaaggtagaccactcccccgatcccagacaaaccccaggggtgacaacttctccatcagtatcctgagaagcaacatcaaatgcttaccaagtcagcacgtttactgagtgagtactctgacggaataaaccagcatttggagctgaacttgagaacacagggccctctgacagcagcttagggaaacacccatcccttccagattggcagaatccttccatttcatgtccttcggagacgctgtattctctttacaaatcattcatgaaactgaagctcagtctcccaggggtaagtcctgggccacgtgcaaacaatggcaaatccagctcttccatgatagagaaggcaaacacacccaccttcatcctgagcctaaaaggccacctctgagcacttgggcagccactcctctgggcctcagagggccatgagcttggccaggtaggcacagcggcggggaagtcacagctgtcaggtaccggccatggtgcaggtgggaataggagatgccagagctgctttagctgaggaaagcaaacagtcagcagtgctcaaaggagcaaaacttcgaatgtgcacattgacccctgacacctgcaagcataacacagatcctaagactagagtgaagtaggaagaagaattagaaaatccagtggatgtcctgagtatagggaaccagggccgttgaaaatcagtaaaggttgattacctggggcgagaccgggtgactgtggcagtgcaggtgaaggtaccctggaccttctcagttcgctggcacataaggctccgccaataaagcgtggttctctctgtcatacacacacacacacacacacacacacacacacacacaatgattggagggctatatgatccagcattagcttcctggtgtgccaagcatgcttgatcgggaatttttttttattattattattttttagctgtagctgaaggcatttctcggatgtggagaggagaatggaaatcgcagaaccaaatcagtttgccctgccatatttggctgtggtctgtcattgggcatttctgatgtgcttttctggattcaggaagagctgattgtcctccgagggttgaaaaaaaaaaacagtttcagaaacctgaatccagggccttatagttctcctcattatctatcttcttctcccttccctcgcccaagggagtgggggaaacacttttcactgcagagtttgctttaaagttttcccatcttgcgtgcattatcccttgatattaaaattattttctcagtttaatccaactcctgctgagaagctgtgtgagatttaggctgtggggtttttttcttgtactcttttggatggtgttgcatttttcactcttaacccgagggtgtgtttcagcttatgttcgttctgtttcatgcaggtttatagcacggtagagtagaaggcggcttctgatttttagggtatttttagaattcattcctgagtgaggggttcagacacccagtctcctcggaacaggggtgaggggtcgactgagctttgttgagaagcctccagttaggcttcgggcgggtctccatgttatattgtgtgtttactgagcttcccactggtagaagatgacacatttgtccatcgtcctgtgtatctgctttccagaggacaccggagcattctcctggggtcactcccacatggctgcctcacatagctgttttgcaacagcctttattgccaacacccttggaagaacatctcctgtagaagtacaagttttgcaatatggactttggaagtggttttgtgatgttcgaattttctgttagcctattgctcaagcactacagaatgtacatagtccctttggccatcctctcaccccagaatatcctaataaacattgttttcttttttaaagaagatagtataatgacactcctgaaggggaaaaaaaacgcggggactagaggggggggaaa

SEQ ID NO: 287850 - DNA, 1194 bp, Homo sapiens
  misc_feature (28)..(28): n is a, c, g, or t
  misc_feature (38)..(38): n is a, c, g, or t
acttcgggaacagcgctgtacatacaanattacaatanactgattagctgtagactaataaaacatttaagacttcacacacacacacacacacacacacacacacacacacacacacacacacacacacacacacaatgattggagggctatatgatccagcattagcttcctggtgtgccaagcatgcttgatcgggaatttttttttattattattattttttagctgtagctgaaggcatttctcggatgtggagaggagaatggaaatcgcagaaccaaatcagtttgccctgccatatttggctgtggtctgtcattgggcatttctgatgtgcttttctggattcaggaagagctgattgtcctccgagggttgaaaaaaaaaaacagtttcagaaacctgaatccagggccttatagttctcctcattatctatcttcttctcccttccctcgcccaagggagtgggggaaacacttttcactgcagagtttgctttaaagttttcccatcttgcgtgcattatcccttgatattaaaattattttctcagtttaatccaactcctgctgagaagctgtgtgagatttaggctgtggggtttttttcttgtactcttttggatggtgttgcatttttcactcttaacccgagggtgtgtttcagcttatgttcgttctgtttcatgcaggtttatagcacggtagagtagaaggcggcttctgatttttagggtatttttagaattcattcctgagtgaggggttcagacacccagtctcctcggaacaggggtgaggggtcgactgagctttgttgagaagcctccagttaggcttcgggcgggtctccatgttatattgtgtgtttactgagcttcccactggtagaagatgacacatttgtccatcgtcctgtgtatctgctttccagaggacaccggagcattctcctggggtcactcccacatggctgcctcacatagctgttttgcaacagcctttattgccaacacccttggaagaacatctcctgtagaagtacaagttttgcaatatggactttggaagtggttttgtgatgttcgaattttctgttagcctattgctcaagcactacagaatgtacatagtccctttggccatcctctcaccccagaatatcctaataaacattgttttctttttt

SEQ ID NO: 287851 - DNA, 942 bp, Homo sapiens
gacgagaaggagactgggcacacactaggatcccagccccggccctgccccccgggacacattggcacttgggcattctcacgggtcacggcaaggccagcttgaccaagaggtcaaaggcgactggcgtcccactgaccgctgggggtttggcctcaaacttcaggtgaacccacaattccggaatagcgggaccggcacccgggcccttctcacgtggcagcaccggcaaggggctgggggaagagcccacgccagcctacgtcacgcaggaagggagccagtggccaccccaaacacacctctcctcctcacacctggcctacgtccaactctccacggctctgcccagaaggctgcacgtacaacacacacagaggcgggcatttccctgacgactcgtgtgtgccgtgggggagcggtagatggcccagccccaagtgttccgatcttcctgcccaaacatattctgtgacggaaagcctatgttgacctcgtccggcactcaaggcgtgggcagcggcctaacgtctgctgcgggaacacagtcgcgttgaatgctattctcaagacagacaaaacagtgggaagacactacgccaagctgctaactccctggccattgccggactctttcacccccatggactttccgctggcattttaaacaacatagtttcttttctctgtctctttctctttctctctctctttctctttctctctctctctctctctctctgtcaatctcataatttctctctctcgtgccacgttcccacccaacgctctctcgcccacttctactggggcccacttcctctcctgctctctctgtctcaacgtgattgactttcttgtgctgcccaggacttcttgcccacgtgcgccttcaaaacggtaagagctgcaactgaacgtgtgagacatggtgcagatagg

SEQ ID NO: 287852 - DNA, 1648 bp, Homo sapiens
aattcggcacgagccggctgctgcggacctcctcggacccggacccagccccagcccggccccagccagccccgacggcgccatgcggggtccgagcggggctctgtggctgctcctggctctgcgcaccgtgctcggtggcatggaggtgcggtggtgcgccacctcggacccagagcagcacaagtgcggcaacatgagcgaggccttccgggaagcgggcatccagccctccctcctctgcgtccggggcacctccgccgaccactgcgtccagctcatcgcggcccaggaggctgacgccatcactctggatggaggagccatctatgaggcgggaaaggagcacggcctgaagccggtggtgggcgaagtgtacgatcaagaggtcggtacctcctattacgccgtggctgtggtcaggaggagctcccatgtgaccattgacaccctgaaaggcgtgaagtcctgccacacgggcatcaatcgcacagtgggctggaacgtgcccgtgggctacctggtggagagcggccgcctctcggtgatgggctgcgatgtactcaaagctgtcagcgactattttgggggcagctgcgtcccgggggcaggagagaccagttactctgagtccctctgtcgcctctgcaggggtgacagctctggggaaggggtgtgtgacaagagccccctggagagatactacgactacagcggggccttccggtgcctggcggaaggggcaggggacgtggcttttgtgaagcacagcacggtactggagaacacggatgaaagtccatcacgaaggcaaacatggaccagatctgaggaggaagaaggcgagtgccctgcacacgaggaagcacgtaggacgatgcgctctagtgctgggcaagcctggaaatgggctcccgttcacaggccccaggacgagtctgacaaaggagaatttggaaaacgggcaaagagtagggatatgttgggttaagaatcagctctttcaaacttggggttttttttgggatgggggtctcaccatgttgcccaggctggtctcaaacccccagcctcaactgatcctcgcatctcagcctcctgagtagctgggatgacaggcgtgcacctggcagctttttcaaagtgttgatggtaatctgaggcaatctaagggagtcattttttaagtgactttatacagaaagattggtaagagccaaggggtagaagtggcataaatgtctaaagcagggaagtgacaggactttcattgttcttggctgaggagaagcgggagtggctgatggaagcacctaaatgatgcctttgtctgtgggaaggcaaatgatgccccagagctctaaccaaaggttttgcagccgccgaaaaacaggaaagttgggaagcgggggtaggactacactgaatcattaacagtgctgtaaactaccatgtggccattaacaatgacctttagggagttttcctaaacgatcactctggtgcgggtgtttggttttgttttaaaatagctttgcagtgaaagctttcatgaccatacaaattatcttttttcttcctatttccttgtagaggtttttttcctccttgtcttaaggtcataaaaatattgttatgtgggaccatc

SEQ ID NO: 287853 - DNA, 2390 bp, Homo sapiens
aattcggcacgagccggctgctgcggacctcctcggacccggacccagccccagcccggccccagccagccccgacggcgccatgcggggtccgagcggggctctgtggctgctcctggctctgcgcaccgtgctcggtggcatggaggtgcggtggtgcgccacctcggacccagagcagcacaagtgcggcaacatgagcgaggccttccgggaagcgggcatccagccctccctcctctgcgtccggggcacctccgccgaccactgcgtccagctcatcgcggcccaggaggctgacgccatcactctggatggaggagccatctatgaggcgggaaaggagcacggcctgaagccggtggtgggcgaagtgtacgatcaagaggtcggtacctcctattacgccgtggctgtggtcaggaggagctcccatgtgaccattgacaccctgaaaggcgtgaagtcctgccacacgggcatcaatcgcacagtgggctggaacgtgcccgtgggctacctggtggagagcggccgcctctcggtgatgggctgcgatgtactcaaagctgtcagcgactattttgggggcagctgcgtcccgggggcaggagagaccagttactctgagtccctctgtcgcctctgcaggggtgacagctctggggaaggggtgtgtgacaagagccccctggagagatactacgactacagcggggccttccggtgcctggcggaaggggcaggggacgtggcttttgtgaagcacagcacggtactggagaacacggatgggaagacgcttccctcctggggccaggccctgctgtcacaggacttcgagctgctgtgccgggatggtagccgggccgatgtcaccgagtggaggcagtgccatctggcccgggtgcctgctcacgccgtggtggtccgggccgacacagatgggggcctcatcttccggctgctcaacgaaggccagcgtctgttcagccacgagggcagcagcttccagatgttcagctctgaggcctatggccagaaggatctactcttcaaagactctacctcggagcttgtgcccatcgccacacagacctatgaggcgtggctgggccatgagtacctgcacgccatgaagggtctgctctgtgaccccaaccggctgcccccctacctgcgctggtgtgtgctctccactcccgagatccagaagtgtggagacatggccgtggccttccgccggcagcgcctcaagccagagatccagtgcgtgtcagccaagtccccccaacactgcatggagcggatccaggctgagcaggtcgacgctgtgaccctaagtggcgaggacatttacacggcggggaagaagtacggcctggttcccgcagccggcgagcactatgccccggaagacagcagcaactcgtactacgtggtggccgtggtgagacgggacagctcccacgccttcaccttggatgagcttcggggcaagcgctcctgccacgccggtttcggcagccctgcaggctgggatgtccccgtgggtgcccttattcagagaggcttcatccggcccaaggactgtgacgtcctcacagcagtgagcgagttcttcaatgccagctgcgtgcccgtgaacaaccccaagaactacccctcctcgctgtgtgcactgtgcgtgggggacgagcagggccgcaacaagtgtgtgggcaacagccaggagcggtattacggctaccgcggcgccttcaggtgcctggtggagaatgcgggtgacgttgccttcgtcaggcacacaaccgtctttgacaacacaaacggccacaattccgagccctgggctgctgagctcaggtcagaggactatgaactgctgtgccccaacggggcccgagccgaggtgtcccagtttgcagcctgcaacctggcacagataccaccccacgccgtgatggtccggcccgacaccaacatcttcaccgtgtatggactgctggacaaggcccaggacctgtttggagacgaccacaataagaacgggttcaaaatgttcgactcctccaactatcatggccaagacctgcttttcaaggatgccaccgtccgggcggtgcctgtcggagagaaaaccacctaccgcggctggctggggctggactacgtggcggcgctggaagggatgtcgtctcagcagtgctcgggcgcagcggccccggcgcccggggcgcccctgctcccgctgctgctgcccgccctcgccgcccgcctgctcccgcccgccctctgagcccggccgccccgccccagagctccgatgcccgcccggggagtttccgcggcggcctctcgcgctgcggaatccagaaggaagctcgcga

SEQ ID NO: 287854 - DNA, 1781 bp, Homo sapiens
aattcggcacgagccggctgctgcggacctcctcggacccggacccagccccagcccggccccagccagccccgacggcgccatgcggggtccgagcggggctctgtggctgctcctggctctgcgcaccgtgctcggtggcatggaggtgcggtggtgcgccacctcggacccagagcagcacaagtgcggcaacatgagcgaggccttccgggaagcgggcatccagccctccctcctctgcgtccggggcacctccgccgaccactgcgtccagctcatcgcggcccaggaggctgacgccatcactctggatggaggagccatctatgaggcgggaaaggagcacggcctgaagccggtggtgggcgaagtgtacgatcaagaggtcggtacctcctattacgccgtggctgtggtcaggaggagctcccatgtgaccattgacaccctgaaaggcgtgaagtcctgccacacgggcatcaatcgcacagtgggctggaacgtgcccgtgggctacctggtggagagcggccgcctctcggtgatgggctgcgatgtactcaaagctgtcagcgactattttgggggcagctgcgtcccgggggcaggagagaccagttactctgagtccctctgtcgcctctgcaggggtgacagctctggggaaggggtgtgtgacaagagccccctggagagatactacgactacagcggggccttccggtgcctggcggaaggggcaggggacgtggcttttgtgaagcacagcacggtactggagaacacggatgggaagacgcttccctcctggggccaggccctgctgtcacaggacttcgagctgctgtgccgggatggtagccgggccgatgtcaccgagtggaggcagtgccatctggcccgggtgcctgctcacgccgtggtggtccgggccgacacagatgggggcctcatcttccggctgctcaacgaaggccagcgtctgttcagccacgagggcagcagcttccagatgttcagctctgaggcctatggccagaaggatctactcttcaaagactctacctcggagcttgtgcccatcgccacacagacctatgaggcgtggctgggccatgagtacctgcacgccatgaagggtctgctctgtgaccccaaccggctgcccccctacctgcgctggtgtgtgctctccactcccgagatccagaagtgtggagacatggccgtggccttccgccggcagcgcctcaagccagagatccagtgcgtgtcagccaagtccccccaacactgcatggagcggatccaggtgggagtcacgcaggtgcagcgtgggccaggtgggcgggtggtggcagtgcctgggcagttcttactacccacaccccctgctgcctggggaagaggagagtgtctactgcaacaagcccacagagacgggtggggaggagcgaccgcaggggccagcacccaccccaggggacagagacaggcggggaggagcgaccgcaggggccagcacccaccccaggggacaggcagataggggtgagtcccctggagagcctgggagctcctcactaagtgggggtgccaggagcagaagaagcgctggcccagctgggcactgacgccctgtagcctggggcaagccccttcccctttctgaatctcagccttcccttgtgcaatagagagtgggcgtggatcattgttcgactttttttttcttttttcctgatttttctaaatagacaaataataattgtgcatat

SEQ ID NO: 287855 - DNA, 1495 bp, Homo sapiens
ttaggctaggtacgaggctgggtttgaatcggccgagggggccctgcggtgtgactcgcgggctcagctggtccggccgtagcacctccgcgccgtcgccatgtcgcggtttttcaccaccggttcggacagcgagtccgagtcgtccttgtccggggaggagctcgtcaccaaacctgtcggaggcaactatggcaaacagccattgttgctgagcgaggatgaagaagataccaagagagttgtccgcagtgccaaggacaagaggtttgaggagctgaccaaccttatccggaccatccgtaatgccatgaagattcgtgatgtcaccaagtgcctggaagagtttgagctcctgggaaaagcacatgtgccatcctctgccacatctaccaccatgctctgcactcgcgctggtaccaggcccgcgacctcatgctcatgagccacttgcaggacaacattcagcatgcagacccgccagtgcagatcctttacaaccgcaccatggtgcagctgggcatctgtgccttccgccaaggcctgaccaaggacgcacacaacgccctgctggacatccagtcgagtggccgagccaaggagcttctgggccagggcctgctgctgcgcagcctgcaggagcgcaaccaggagcaggagaaggtggagcggcgccgtcaggtccccttccacctgcacatcaacctggagctgctggagtgtgtctacctggtgtctgcatgctcctggagatcccctacatggccgcccatgagagcgatgcccgccgacgcatgatcagcaagcagttccaccaccagctgcgcgtgggcgagcgacagcccctgctgggtccccctgagtccatgcgggaacatgtggtcgctgcctccaaggccatgaagatgggtgactggaagacctgtcacagttttatcatcaatgagaagatgaatgggaaagtgtgggaccttttccccgaggctgacaaagtccgcaccatgctggttaggaagatccaggaagagtcactgaggacctacctcttcacctacagcagtgtctatgactccatcagcatggagacgctgtcagacatgtttgagctggatctgcccactgtgcactccatcatcagcaaaatgatcattaatgaggagctgatggcctccctggaccagccaacacagacagtggtgatgcaccgcactgagcccactgcccagcagaacctggctctgcagctggccgagaagctgggcagcctggtggagaacaacgaacgggtgtttgaccacaagcagggcacctacgggggctacttccgagaccagaaggacggctaccgcaaaaacgagggctacatgcgccgcggtggctaccgccagcagcagtctcagacggcctactgagctctccactctgtttcccgcctgggccatccaaccttgaagtcctaaaccacacctcagtcactaaaggtctgtttaaagtt

SEQ ID NO: 287856 - DNA, 1853 bp, Homo sapiens
agaacgcagaccagcccaagctgacagcttgagtatgccttcttctgctgcctggttttgggggctgtatgacgtactggtcggtagtaaagattaatatgtaagaaatgtggagctaggatcaagtcatactccacagcctgcctggcaaactatgttttacttctgactttgctctctcgctgagaacattaatctgtcaagctggcgggctcctttgatagcaactttcccaggggcatgatgtggcaatgccacctctcagcccaggactaccgctattaccccgtggacggctactccctgcttaaacgcttccctcttcatcctcttacaggacccagatgccctgtccaaacagtgggacaatggttggaaagcattgggctacctcagtacgagaaccacctgatggctaatggatttgacaatgtgcagtttatgggaagcaatgttatggaagatcaggatttgttggaaattggaatccttaattctgggcacagacaaagaattctacaggcaatccagctccttccaaagatgagacccattgggcatgatggctaccatcccacctctgtagctgagtggctggattccattgaactgggcgactacaccaaagcctttctaattaatggctacacttcgatggacctgttgaaaaaaatctgggaggttgaacttattaatgttttaaaaatcaatttgattggccacaggaaacgtattttggcatctctgggagacaggctgcacgacgatcccccacagaagccccctcggtccatcaccctcaggacaggagactggggagaaccttccattaccttgcgacctccgaatgaagccacagcctctaccccggtacagtactggcagcatcacccagaaaagcttatcttccagtcgtgtgattacaaagctttttatttaggttctatgctgataaaagagcttagggggacagaatcaacccaagatgcttgtgcaaaaatgcgggctaactgtcagaagtctacagagcaaatgaagaaggtccctactattattctttctgtctcatataaaggagtcaaatttattgatgcaacaaataagaacataattgctgagcatgaaattcgtaatatctcctgtgctgcccaggacccagaagacctctcaacatttgcctatatcacaaaagatttgaagtctaatcaccactactgtcatgtgtttactgcctttgatgtgaatttagcctatgaaatcatcctaaccctgggacaggcattcgaagtcgcttaccagctagcactacaagcaagaaaagggggacactcctccacacttccagaaagctttgaaaacaaaccctccaaacccatccccaagccccgcgttagcattcgcaagtccgtggatcttcttcatgccagccataccgggcaggaaccatcagagagacacactgaggaggcactcagaaaattttgatagaattgaatttacatatagctgataaagcctaaatagaaaggttgatgtatttagcttgaatccttcactttagtggtctaatcaacagataaatgacaagcaaagaatgaaacaatccaaaaatgtttttcaaaacaattttgtgaattttatttttacaaaaattttttaaattcatattttaaaatgtataccaaggcaaaaaaatcatataagctatatcataaatacaagagtttcaaaacatacaagagacatataatgtaaaaaaaaattatatatatgaagtccaatgtaatttataatacaaaaaaatacagcaagggaaaatgctttagaaatgctcatctgcaaactacaaaaca

SEQ ID NO: 287857 - DNA, 3002 bp, Homo sapiens
  misc_feature (174)..(174): n is a, c, g, or t
ctcgaagagcctgtacaggaagatgcaacacaagaaacacacatttcatctcctgttgagtctccttcccaaaagaccaaaagtgaaaccgtcactggagaattatcaaaactcttggatgaaataaaactctgtcaagaaaaggattattcgtttgaagacttgtgccacacnatatcagaccactacttagataatttgagcaagatttcagaggaagaacttgggaaaaatggaagccagagtgtaagaacctcatctacaatcaatttgtcaccaggagaagtggaagaagaggatgatgatgaaaatacgtgtgggccatcaggactttgggaagcattaactccgtgtaatggatgtaggaaccttggcttccccatgcttgcccaggagtcctatccaaagaagagaaattacactatggaaattgtaccatctgcttctctggatacatttccttcagaaaatgagaactttctgtgtgatctcatggacacagctgttacaaagaaaccttgctccttagaaattgcaagggcaccttccccaagaactgataatgcctctgaggtagcagttactactccaggaactagtaaccatagaaacagctcaacaggcccaacacctgattgttcacctccatcccctgatactgccctcaaaaatattgtaaaagtcattcgaccccagcctaaacagcgaacatccattgtgtcttctctggattttcaccgaatgaatcacaaccaagaatattttgaaatcaacacatctacagggtgcacaagctttactgccagtcctcctgctagtccacccacctcttctgtgggaaccacagaagtcaagaatgagggaactaaccatacagatgacctctcccgacaggatgacaatgatcccccaaaagaatatgatcctgggcaatttgcaggcctgctccatggatcctctccagcctgtgagtcccctgaaaatccatttcatctctatgggaaaagagaacaatgtgaaaaaggacaagatgaagtcagtttggcaaacagtcctttgcctttcaagcagtctccaatagaaaataactcagaacctttggtaaagaaaattaaacccaaagtggtcagtagaacaatttttcacaaaaaaagcaaccaactcgaaaaccataccattgttggcacaagatcaaccaggagtggatctcggaatggggaccagtgggttatgaacgcagggggatttgtggagagagcctgtactctggggagaataaggtcattgcctaaagccttgatcgacatgcatttgtcaaaaagtgtctctaaatctgattctgatctcattgcctatccttccaatgagaaaacatcaagagttaactggagtgaatcttccactgctgaacacagttctaaagggaattctgaaagaacaccatccttcacatcggaatgggaagaaattgacaaaataatgagttccatagatgttggaatcaacaacgaacttaaagagatgaatggtgagaccacaagacccagatgccctgtccaaacagtgggacaatggttggaaagcattgggctacctcagtacgagaaccacctgatggctaatggatttgacaatgtgcagtttatgggaagcaatgttatggaagatcaggatttgttggaaattggaatccttaattctgggcacagacaaagaattctacaggcaatccagctccttccaaagatgagacccattgggcatgatggctaccatcccacctctgtagctgagtggctggattccattgaactgggcgactacaccaaagcctttctaattaatggctacacttcgatggacctgttgaaaaaaatctgggaggttgaacttattaatgttttaaaaatcaatttgattggccacaggaaacgtattttggcatctctgggagacaggctgcacgacgatcccccacagaagccccctcggtccatcaccctcagggaacccagtggtaatcacactcctcctcagttgtctccatcacttagccaaagcacttacaccactggtggctccctagacgttcctcacattatcatgcagggcgatgcaaggaggagaagaaatgaaaactactttgatgatattccccgatcaaaactggagaggcagatggctcagacaggagactggggagaaccttccattaccttgcgacctccgaatgaagccacagcctctaccccggtacagtactggcagcatcacccagaaaagcttatcttccagtcgtgtgattacaaagctttttatttaggttctatgctgataaaagagcttagggggacagaatcaacccaagatgcttgtgcaaaaatgcgggctaactgtcagaagtctacagagcaaatgaagaaggtccctactattattctttctgtctcatataaaggagtcaaatttattgatgcaacaaataagaacataattgctgagcatgaaattcgtaatatctcctgtgctgcccaggacccagaagacctctcaacatttgcctatatcacaaaagatttgaagtctaatcaccactactgtcatgtgtttactgcctttgatgtgaatttagcctatgaaatcatcctaaccctgggacaggcattcgaagtcgcttaccagctagcactacaagcaagaaaagggggacactcctccacacttccagaaagctttgaaaacaaaccctccaaacccatccccaagccccgcgttagcattcgcaagtccgtggatcttcttcatgccagccataccgggcaggaaccatcagagagacacactgaggaggcactcagaaaattttgatagaattgaatttacatatagctgataaagcctaaatagaaaggttgatgtatttagcttgaatccttcactttagtggtctaatcaacagataaatgacaagcaaagaatgaaacaatccaaaaatgtttttc

SEQ ID NO: 287858 - DNA, 995 bp, Homo sapiens
  misc_feature (951)..(951): n is a, c, g, or t
ggcagaggggggcgcgcgcgcgggcctggggagctcgcggggagagcccggcgctcggcgcagcgcggcgcggccaagctccgcgcctctcccgcccttcctcggcgcgctcgccctcgcctcgccgctcgcattcgctgggggcgcccagaaagatgcacagaggcaacggctaggggagcggaggttcaagccacatgtctgcgtcctcgggggccagagcccgccagccctcgcggatcccggctcgcggccagcccgagcggctcgggttttaaaaatcaatttgattggccacaggaaacgtattttggcatctctgggagacaggctgcacgacgatcccccacagaagccccctcggtccatcaccctcagggaacccagtggtaatcacactcctcctcagttgtctccatcacttagccaaagcacttacaccactggtggctccctagacgttcctcacattatcatgcagggcgatgcaaggaggagaagaaatgaaaactactttgatgatattccccgatcaaaactggagaggcagatggctcagcagtcgtctgtctgtgaaatatggacgaatcagaacgcaggatttcctttctcagcgatccatcaggttcataatacaggagactggggagaaccttccattaccttgcgacctccgaatgaagccacagcctctaccccggtacagtactggcagcatcacccagaaaagcttatcttccagtcgtgtgattacaaagctttttatttaggttctatgctgataaaagagcttagggggacagaatcaacccaagatgcttgtgcaaaaatgcgggctaactgtcagaagtctacagagcaaatgaagaaggtccctactattattctttctgtctcatataaaggagtcaaatttattgatgcaacaaataagaaccatattggtgggcntgaaacatccggaatattcctggggggccagagccagaagaacc

SEQ ID NO: 287859 - DNA, 1354 bp, Homo sapiens
agaacgcagaccagcccaagctgacagcttgagtatgccttcttctgctgcctggttttgggggctgtatgacgtactggtcggtagtaaagattaatatgtaagaaatgtggagctaggatcaagtcatactccacagcctgcctggcaaactatgttttacttctgactttgctctctcgctgagaacattaatctgtcaagctggcgggctcctttgatagcaactttcccaggggcatgatgtggcaatgccacctctcagcccaggactaccgctattaccccgtggacggctactccctgcttaaacgcttccctcttcatcctcttacaggacccagatgccctgtccaaacagtgggacaatggttggaaagcattgggctacctcagtacgagaaccacctgatggctaatggatttgacaatgtgcagtttatgggaagcaatgttatggaagatcaggatttgttggaaattggaatccttaattctgggcacagacaaagaattctacaggcaatccagctccttccaaagatgagacccattgggcatgatggctaccatcccacctctgtagctgagtggctggattccattgaactgggcgactacaccaaagcctttctaattaatggctacacttcgatggacctgttgaaaaaaatctgggaggttgaacttattaatgttttaaaaatcaatttgattggccacaggaaacgtattttggcatctctgggagacaggctgcacgacgatcccccacagaagccccctcggtccatcaccctcagggtaagtgccaagcacattcatctggttctctgcccttatcttaagaactatttgtttgagaccagcctggccaacatggtgagaccctgcctctactgaaaacagaaaaaatttagccaggtgtggttgtgcctgtctgtagtcccagctactccggaggctgagacatgaaaatcacttgaacccagaaggcggagcattgcagtgagcagagatcgcaccactgcactccagcctgggcaacagagtaagaaaataaaagaattattttatgtagttttataggttttataaacgtgcactttatacaactgaagcaatagatcaggaagtgctggctcttttctatgaagtttaccatatctgtgtagaaaacaatctgtcttttgattgtttgacacaatcaaaacaacaagatttgtttttctagattggttaaatatatatttttgagatttagatatccatctataatggaattcagcctgacaaaccactacctttaaagaaccactccctcacctcccatcccacaccccatctacgccaa

SEQ ID NO: 287860 - DNA, 749 bp, Homo sapiens
gcatagctcacttcctcacatctttcaggtctgtacaagtgtcagcttctgaaagagccagtccatctaaaaccgtaaccccttcccctccgcttgtacataccaccaaattcactatagattttacttatttactttttctgcctctccctggcccttaactgcagtagagcaagacttttgttttgctcactcctgtgttcccaatacctaccacaatgccaggcacatggtacatctcaatatttattaaacaaatgcatgaacaaactaagtgaataaataaatgaattctcttttttacaggatcttcttcatgccagccataccgggcaggaaccatcagagagacacactgaggaggcactcagaaaattttgatagaattgaatttacatatagctgataaagcctaaatagaaaggttgatgtatttagcttgaatccttcactttagtggtctaatcaacagataaatgacaagcaaagaatgaaacaatccaaaaatgtttttcaaaacaattttgtgaattttatttttacaaaaattttttaaattcatattttaaaatgtataccaaggcaaaaaaatcatataagctatatcataaatacaagagtttcaaaacatacaagagacatataatgtaaaaaaaaattatatatatgaagtccaatgtaatttataatacaaaaaaatacagcaagggaaaatgctttagaaatgctcatctgcaaactacaaaaca

SEQ ID NO: 287861 - DNA, 2986 bp, Homo sapiens
ggcagaggggggcgcgcgcgcgggcctggggagctcgcggggagagcccggcgctcggcgcagcgcggcgcggccaagctccgcgcctctcccgcccttcctcggcgcgctcgccctcgcctcgccgctcgcattcgctgggggcgcccagaaagatgcacagaggcaacggctaggggagcggaggttcaagccacatgtctgcgtcctcgggggccagagcccgccagccctcgcggatcccggctcgcggccagcccgagcggctcgggttttaaaaatcaatttgattggccacaggaaacgtattttggcatctctgggagacaggctgcacgacgatcccccacagaagccccctcggtccatcaccctcagggaacccagtggtaatcacactcctcctcagttgtctccatcacttagccaaagcacttacaccactggtggctccctagacgttcctcacattatcatgcagggcgatgcaaggaggagaagaaatgaaaactactttgatgatattccccgatcaaaactggagaggcagatggctcagacaggagactggggagaaccttccattaccttgcgacctccgaatgaagccacagcctctaccccggtacagtactggcagcatcacccagaaaagcttatcttccagtcgtgtgattacaaagctttttatttaggttctatgctgataaaagagcttagggggacagaatcaacccaagatgcttgtgcaaaaatgcgggctaactgtcagaagtctacagagcaaatgaagaaggtccctactattattctttctgtctcatataaaggagtcaaatttattgatgcaacaaataagaacataattgctgagcatgaaattcgtaatatctcctgtgctgcccaggacccagaagacctctcaacatttgcctatatcacaaaagatttgaagtctaatcaccactactgtcatgtgtttactgcctttgatgtgaatttagcctatgaaatcatcctaaccctgggacaggcattcgaagtcgcttaccagctagcactacaagcaagaaaagggggacactcctccacacttccagaaagctttgaaaacaaaccctccaaacccatccccaagccccgcgttagcattcgcaagtccgtgagatcgacccatctgagcaaaagactctggccaatctaccgtggattgtggagccgggccaagaagccaagaggggcattaataccaagtatgaaaccacgattttctgatactcgccgtcctcctgtcctcgcggtgccttgctcgccaagcggtcccggagcaggctttccttcgcgcctccgcgtccacccagcccaggaggaagactgctctgagcgtgcggccttgttacgggcgaaaggccactggccattcctggggaagttctttctgcaccagtgatggaaaacgcaagactttccagtcgcaacccctgagaggcgtgagttgagatgggttttccctgatgctcccgactcccctccccaccacctcccaaggtatttctgatgactccgccccagtacttgctttgcttcatttggggaaaataataccttttctttaaaaaaaaaaaaaaaaaaaaaagtaaaggggatctctaatactgcctaaaagtatgctttcactgtcagcagttttaaaggtgaaatcagagcagcactacccctcccacctccaaagcatctgtaaaatcattctatcattgagtatcgtttaatgcaaaaggacaaaaacaactcccgtgatatgattgccaggagattctgtttccccatttctatatttgtggattttatatgtaatcacctatgtcagagaaagaaaacctttcaaccaaatgattggttcaaaaggaaagaatgattcaaagcagaggaatttattatgcacagcaaaatgtgtcttgtattaaatatttttattaaaagaatgtttcattaatgcattgataagaaaactaggttagttgcgagggatgtttctggtttcatttcaaataattaaatttctactgctactaccaagaggactggctcagtggtggcaaaatactggtgatgctccctagagcaggaggcccggaagtgctgacgcagccatcagcctgccaagattgttttttaatcttcacagtgttttaaagaacatgttaaaaaaaaaaaaaaatctagtgctcctgctgtcaagatttctgtcatggaaaccttgtttgagaaaggtgttaataaaattctattgcaaaaatttctttttctagaaaaaataaatacaaaaaaaaaaaagaagaaattccaaagtaataaaacttttcttgagacaaacaaaaaaaaagtttgcttactatttgattaaataaaatttacttacatttctttaaggtattttaattttttaatgtctctgtggagtatttgtatgataccataatgtatatttatgtagaatcaaattatataaacagtaccaatatcattatagaaaaattcattatagcgatattgataaattgtggaattgtcttaatgtttttttattaactgacattattttaaacctaactgagatgatcagttacattcatcagttggtgagttttgaagaataactacattttatttcaaactaacaaatgtatacggttttagttcagtgttgaagaattttaatacaatattaaattacttgaactgaacagttccttgtatatattttgcctattcactgttgatatgtatgtagcaaaatgagagttaaataacactaaaatatggtaccaggaggcaattgtataggagcaaagttaataggagctttgctgaaacagaagcatatgtgtaaataagcttgggcttccagttataaattttgtaatttttgtcattatttatatcctataaaaaaagcacacaaaaataaaacagaagttgtacagca

SEQ ID NO: 287862 - DNA, 2926 bp, Homo sapiens
ggcagaggggggcgcgcgcgcgggcctggggagctcgcggggagagcccggcgctcggcgcagcgcggcgcggccaagctccgcgcctctcccgcccttcctcggcgcgctcgccctcgcctcgccgctcgcattcgctgggggcgcccagaaagatgcacagaggcaacggctaggggagcggaggttcaagccacatgtctgcgtcctcgggggccagagcccgccagccctcgcggatcccggctcgcggccagcccgagcggctcgggttttaaaaatcaatttgattggccacaggaaacgtattttggcatctctgggagacaggctgcacgacgatcccccacagaagccccctcggtccatcaccctcagggaacccagtggtaatcacactcctcctcagttgtctccatcacttagccaaagcacttacaccactggtggctccctagacgttcctcacattatcatgcagggcgatgcaaggaggagaagaaatgaaaactactttgatgatattccccgatcaaaactggagaggcagatggctcagacaggagactggggagaaccttccattaccttgcgacctccgaatgaagccacagcctctaccccggtacagtactggcagcatcacccagaaaagcttatcttccagtcgtgtgattacaaagctttttatttaggttctatgctgataaaagagcttagggggacagaatcaacccaagatgcttgtgcaaaaatgcgggctaactgtcagaagtctacagagcaaatgaagaaggtccctactattattctttctgtctcatataaaggagtcaaatttattgatgcaacaaataagaacataattgctgagcatgaaattcgtaatatctcctgtgctgcccaggacccagaagacctctcaacatttgcctatatcacaaaagatttgaagtctaatcaccactactgtcatgtgtttactgcctttgatgtgaatttagcctatgaaatcatcctaaccctgggacaggcattcgaagtcgcttaccagctagcactacaagcaagaaaagggggacactcctccacacttccagaaagctttgaaaacaaaccctccaaacccatccccaagccccgcgttagcattcgcaagtccgtgagatcgacccatctgagcaaaagactctggccaatctaccgtggattgtggagccgggccaagaagccaagaggggcattaataccaagtatgaaaccacgattttctgatactcgccgtcctcctgtcctcgcggtgccttgctcgccaagcggtcccggagcaggctttccttcgcgcctccgcgtccacccagcccaggaggaagactgctctgagcgtgcggccttgttacgggcgaaaggccactggccattcctggggaagttctttctgcaccagtgatggaaaacgcaagactttccagtcgcaacccctgagaggcgtgagttgagatgggttttccctgatgctcccgactcccctccccaccacctcccaaggtatttctgatgactccgccccagtacttgctttgcttcatttggggaaaataataccttttctttaaaaaaaaaaaattttaaaggtgaaatcagagcagcactacccctcccacctccaaagcatctgtaaaatcattctatcattgagtatcgtttaatgcaaaaggacaaaaacaactcccgtgatatgattgccaggagattctgtttccccatttctatatttgtggattttatatgtaatcacctatgtcagagaaagaaaacctttcaaccaaatgattggttcaaaaggaaagaatgattcaaagcagaggaatttattatgcacagcaaaatgtgtcttgtattaaatatttttattaaaagaatgtttcattaatgcattgataagaaaactaggttagttgcgagggatgtttctggtttcatttcaaataattaaatttctactgctactaccaagaggactggctcagtggtggcaaaatactggtgatgctccctagagcaggaggcccggaagtgctgacgcagccatcagcctgccaagattgttttttaatcttcacagtgttttaaagaacatgttaaaaaaaaaaaaaaatctagtgctcctgctgtcaagatttctgtcatggaaaccttgtttgagaaaggtgttaataaaattctattgcaaaaatttctttttctagaaaaaataaatacaaaaaaaaaaaagaagaaattccaaagtaataaaacttttcttgagacaaacaaaaaaaaagtttgcttactatttgattaaataaaatttacttacatttctttaaggtattttaattttttaatgtctctgtggagtatttgtatgataccataatgtatatttatgtagaatcaaattatataaacagtaccaatatcattatagaaaaattcattatagcgatattgataaattgtggaattgtcttaatgtttttttattaactgacattattttaaacctaactgagatgatcagttacattcatcagttggtgagttttgaagaataactacattttatttcaaactaacaaatgtatacggttttagttcagtgttgaagaattttaatacaatattaaattacttgaactgaacagttccttgtatatattttgcctattcactgttgatatgtatgtagcaaaatgagagttaaataacactaaaatatggtaccaggaggcaattgtataggagcaaagttaataggagctttgctgaaacagaagcatatgtgtaaataagcttgggcttccagttataaattttgtaatttttgtcattatttatatcctataaaaaaagcacacaaaaataaaacagaagttgtacagca

SEQ ID NO: 287863 - DNA, 3411 bp, Homo sapiens
agaacgcagaccagcccaagctgacagcttgagtatgccttcttctgctgcctggttttgggggctgtatgacgtactggtcggtagtaaagattaatatgtaagaaatgtggagctaggatcaagtcatactccacagcctgcctggcaaactatgttttacttctgactttgctctctcgctgagaacattaatctgtcaagctggcgggctcctttgatagcaactttcccaggggcatgatgtggcaatgccacctctcagcccaggactaccgctattaccccgtggacggctactccctgcttaaacgcttccctcttcatcctcttacaggacccagatgccctgtccaaacagtgggacaatggttggaaagcattgggctacctcagtacgagaaccacctgatggctaatggatttgacaatgtgcagtttatgggaagcaatgttatggaagatcaggatttgttggaaattggaatccttaattctgggcacagacaaagaattctacaggcaatccagctccttccaaagatgagacccattgggcatgatggctaccatcccacctctgtagctgagtggctggattccattgaactgggcgactacaccaaagcctttctaattaatggctacacttcgatggacctgttgaaaaaaatctgggaggttgaacttattaatgttttaaaaatcaatttgattggccacaggaaacgtattttggcatctctgggagacaggctgcacgacgatcccccacagaagccccctcggtccatcaccctcagggaacccagtggtaatcacactcctcctcagttgtctccatcacttagccaaagcacttacaccactggtggctccctagacgttcctcacattatcatgcagggcgatgcaaggaggagaagaaatgaaaactactttgatgatattccccgatcaaaactggagaggcagatggctcagacaggagactggggagaaccttccattaccttgcgacctccgaatgaagccacagcctctaccccggtacagtactggcagcatcacccagaaaagcttatcttccagtcgtgtgattacaaagctttttatttaggttctatgctgataaaagagcttagggggacagaatcaacccaagatgcttgtgcaaaaatgcgggctaactgtcagaagtctacagagcaaatgaagaaggtccctactattattctttctgtctcatataaaggagtcaaatttattgatgcaacaaataagaacataattgctgagcatgaaattcgtaatatctcctgtgctgcccaggacccagaagacctctcaacatttgcctatatcacaaaagatttgaagtctaatcaccactactgtcatgtgtttactgcctttgatgtgaatttagcctatgaaatcatcctaaccctgggacaggcattcgaagtcgcttaccagctagcactacaagcaagaaaagggggacactcctccacacttccagaaagctttgaaaacaaaccctccaaacccatccccaagccccgcgttagcattcgcaagtccgtgagatcgacccatctgagcaaaagactctggccaatctaccgtggattgtggagccgggccaagaagccaagaggggcattaataccaagtatgaaaccacgattttctgatactcgccgtcctcctgtcctcgcggtgccttgctcgccaagcggtcccggagcaggctttccttcgcgcctccgcgtccacccagcccaggaggaagactgctctgagcgtgcggccttgttacgggcgaaaggccactggccattcctggggaagttctttctgcaccagtgatggaaaacgcaagactttccagtcgcaacccctgagaggcgtgagttgagatgggttttccctgatgctcccgactcccctccccaccacctcccaaggtatttctgatgactccgccccagtacttgctttgcttcatttggggaaaataataccttttctttaaaaaaaaaaaaaaaaaaaaaagtaaaggggatctctaatactgcctaaaagtatgctttcactgtcagcagttttaaaggtgaaatcagagcagcactacccctcccacctccaaagcatctgtaaaatcattctatcattgagtatcgtttaatgcaaaaggacaaaaacaactcccgtgatatgattgccaggagattctgtttccccatttctatatttgtggattttatatgtaatcacctatgtcagagaaagaaaacctttcaaccaaatgattggttcaaaaggaaagaatgattcaaagcagaggaatttattatgcacagcaaaatgtgtcttgtattaaatatttttattaaaagaatgtttcattaatgcattgataagaaaactaggttagttgcgagggatgtttctggtttcatttcaaataattaaatttctactgctactaccaagaggactggctcagtggtggcaaaatactggtgatgctccctagagcaggaggcccggaagtgctgacgcagccatcagcctgccaagattgttttttaatcttcacagtgttttaaagaacatgttaaaaaaaaaaaaaaatctagtgctcctgctgtcaagatttctgtcatggaaaccttgtttgagaaaggtgttaataaaattctattgcaaaaatttctttttctagaaaaaataaatacaaaaaaaaaaaagaagaaattccaaagtaataaaacttttcttgagacaaacaaaaaaaaagtttgcttactatttgattaaataaaatttacttacatttctttaaggtattttaattttttaatgtctctgtggagtatttgtatgataccataatgtatatttatgtagaatcaaattatataaacagtaccaatatcattatagaaaaattcattatagcgatattgataaattgtggaattgtcttaatgtttttttattaactgacattattttaaacctaactgagatgatcagttacattcatcagttggtgagttttgaagaataactacattttatttcaaactaacaaatgtatacggttttagttcagtgttgaagaattttaatacaatattaaattacttgaactgaacagttccttgtatatattttgcctattcactgttgatatgtatgtagcaaaatgagagttaaataacactaaaatatggtaccaggaggcaattgtataggagcaaagttaataggagctttgctgaaacagaagcatatgtgtaaataagcttgggcttccagttataaattttgtaatttttgtcattatttatatcctataaaaaaagcacacaaaaataaaacagaagttgtacagca

SEQ ID NO: 287864 - DNA, 3061 bp, Homo sapiens
ggcagaggggggcgcgcgcgcgggcctggggagctcgcggggagagcccggcgctcggcgcagcgcggcgcggccaagctccgcgcctctcccgcccttcctcggcgcgctcgccctcgcctcgccgctcgcattcgctgggggcgcccagaaagatgcacagaggcaacggctaggggagcggaggttcaagccacatgtctgcgtcctcgggggccagagcccgccagccctcgcggatcccggctcgcggccagcccgagcggctcgggttttaaaaatcaatttgattggccacaggaaacgtattttggcatctctgggagacaggctgcacgacgatcccccacagaagccccctcggtccatcaccctcagggaacccagtggtaatcacactcctcctcagttgtctccatcacttagccaaagcacttacaccactggtggctccctagacgttcctcacattatcatgcagggcgatgcaaggaggagaagaaatgaaaactactttgatgatattccccgatcaaaactggagaggcagatggctcagcagtcgtctgtctgtgaaatatggacgaatcagaacgcaggatttcctttctcagcgatccatcaggttcataatacaggagactggggagaaccttccattaccttgcgacctccgaatgaagccacagcctctaccccggtacagtactggcagcatcacccagaaaagcttatcttccagtcgtgtgattacaaagctttttatttaggttctatgctgataaaagagcttagggggacagaatcaacccaagatgcttgtgcaaaaatgcgggctaactgtcagaagtctacagagcaaatgaagaaggtccctactattattctttctgtctcatataaaggagtcaaatttattgatgcaacaaataagaacataattgctgagcatgaaattcgtaatatctcctgtgctgcccaggacccagaagacctctcaacatttgcctatatcacaaaagatttgaagtctaatcaccactactgtcatgtgtttactgcctttgatgtgaatttagcctatgaaatcatcctaaccctgggacaggcattcgaagtcgcttaccagctagcactacaagcaagaaaagggggacactcctccacacttccagaaagctttgaaaacaaaccctccaaacccatccccaagccccgcgttagcattcgcaagtccgtgagatcgacccatctgagcaaaagactctggccaatctaccgtggattgtggagccgggccaagaagccaagaggggcattaataccaagtatgaaaccacgattttctgatactcgccgtcctcctgtcctcgcggtgccttgctcgccaagcggtcccggagcaggctttccttcgcgcctccgcgtccacccagcccaggaggaagactgctctgagcgtgcggccttgttacgggcgaaaggccactggccattcctggggaagttctttctgcaccagtgatggaaaacgcaagactttccagtcgcaacccctgagaggcgtgagttgagatgggttttccctgatgctcccgactcccctccccaccacctcccaaggtatttctgatgactccgccccagtacttgctttgcttcatttggggaaaataataccttttctttaaaaaaaaaaaaaaaaaaaaaagtaaaggggatctctaatactgcctaaaagtatgctttcactgtcagcagttttaaaggtgaaatcagagcagcactacccctcccacctccaaagcatctgtaaaatcattctatcattgagtatcgtttaatgcaaaaggacaaaaacaactcccgtgatatgattgccaggagattctgtttccccatttctatatttgtggattttatatgtaatcacctatgtcagagaaagaaaacctttcaaccaaatgattggttcaaaaggaaagaatgattcaaagcagaggaatttattatgcacagcaaaatgtgtcttgtattaaatatttttattaaaagaatgtttcattaatgcattgataagaaaactaggttagttgcgagggatgtttctggtttcatttcaaataattaaatttctactgctactaccaagaggactggctcagtggtggcaaaatactggtgatgctccctagagcaggaggcccggaagtgctgacgcagccatcagcctgccaagattgttttttaatcttcacagtgttttaaagaacatgttaaaaaaaaaaaaaaatctagtgctcctgctgtcaagatttctgtcatggaaaccttgtttgagaaaggtgttaataaaattctattgcaaaaatttctttttctagaaaaaataaatacaaaaaaaaaaaagaagaaattccaaagtaataaaacttttcttgagacaaacaaaaaaaaagtttgcttactatttgattaaataaaatttacttacatttctttaaggtattttaattttttaatgtctctgtggagtatttgtatgataccataatgtatatttatgtagaatcaaattatataaacagtaccaatatcattatagaaaaattcattatagcgatattgataaattgtggaattgtcttaatgtttttttattaactgacattattttaaacctaactgagatgatcagttacattcatcagttggtgagttttgaagaataactacattttatttcaaactaacaaatgtatacggttttagttcagtgttgaagaattttaatacaatattaaattacttgaactgaacagttccttgtatatattttgcctattcactgttgatatgtatgtagcaaaatgagagttaaataacactaaaatatggtaccaggaggcaattgtataggagcaaagttaataggagctttgctgaaacagaagcatatgtgtaaataagcttgggcttccagttataaattttgtaatttttgtcattatttatatcctataaaaaaagcacacaaaaataaaacagaagttgtacagca

SEQ ID NO: 287865 - DNA, 2806 bp, Homo sapiens
ggcagaggggggcgcgcgcgcgggcctggggagctcgcggggagagcccggcgctcggcgcagcgcggcgcggccaagctccgcgcctctcccgcccttcctcggcgcgctcgccctcgcctcgccgctcgcattcgctgggggcgcccagaaagatgcacagaggcaacggctaggggagcggaggttcaagccacatgtctgcgtcctcgggggccagagcccgccagccctcgcggatcccggctcgcggccagcccgagcggctcgggttttaaaaatcaatttgattggccacaggaaacgtattttggcatctctgggagacaggctgcacgacgatcccccacagaagccccctcggtccatcaccctcaggacaggagactggggagaaccttccattaccttgcgacctccgaatgaagccacagcctctaccccggtacagtactggcagcatcacccagaaaagcttatcttccagtcgtgtgattacaaagctttttatttaggttctatgctgataaaagagcttagggggacagaatcaacccaagatgcttgtgcaaaaatgcgggctaactgtcagaagtctacagagcaaatgaagaaggtccctactattattctttctgtctcatataaaggagtcaaatttattgatgcaacaaataagaacataattgctgagcatgaaattcgtaatatctcctgtgctgcccaggacccagaagacctctcaacatttgcctatatcacaaaagatttgaagtctaatcaccactactgtcatgtgtttactgcctttgatgtgaatttagcctatgaaatcatcctaaccctgggacaggcattcgaagtcgcttaccagctagcactacaagcaagaaaagggggacactcctccacacttccagaaagctttgaaaacaaaccctccaaacccatccccaagccccgcgttagcattcgcaagtccgtgagatcgacccatctgagcaaaagactctggccaatctaccgtggattgtggagccgggccaagaagccaagaggggcattaataccaagtatgaaaccacgattttctgatactcgccgtcctcctgtcctcgcggtgccttgctcgccaagcggtcccggagcaggctttccttcgcgcctccgcgtccacccagcccaggaggaagactgctctgagcgtgcggccttgttacgggcgaaaggccactggccattcctggggaagttctttctgcaccagtgatggaaaacgcaagactttccagtcgcaacccctgagaggcgtgagttgagatgggttttccctgatgctcccgactcccctccccaccacctcccaaggtatttctgatgactccgccccagtacttgctttgcttcatttggggaaaataataccttttctttaaaaaaaaaaaaaaaaaaaaaagtaaaggggatctctaatactgcctaaaagtatgctttcactgtcagcagttttaaaggtgaaatcagagcagcactacccctcccacctccaaagcatctgtaaaatcattctatcattgagtatcgtttaatgcaaaaggacaaaaacaactcccgtgatatgattgccaggagattctgtttccccatttctatatttgtggattttatatgtaatcacctatgtcagagaaagaaaacctttcaaccaaatgattggttcaaaaggaaagaatgattcaaagcagaggaatttattatgcacagcaaaatgtgtcttgtattaaatatttttattaaaagaatgtttcattaatgcattgataagaaaactaggttagttgcgagggatgtttctggtttcatttcaaataattaaatttctactgctactaccaagaggactggctcagtggtggcaaaatactggtgatgctccctagagcaggaggcccggaagtgctgacgcagccatcagcctgccaagattgttttttaatcttcacagtgttttaaagaacatgttaaaaaaaaaaaaaaatctagtgctcctgctgtcaagatttctgtcatggaaaccttgtttgagaaaggtgttaataaaattctattgcaaaaatttctttttctagaaaaaataaatacaaaaaaaaaaaagaagaaattccaaagtaataaaacttttcttgagacaaacaaaaaaaaagtttgcttactatttgattaaataaaatttacttacatttctttaaggtattttaattttttaatgtctctgtggagtatttgtatgataccataatgtatatttatgtagaatcaaattatataaacagtaccaatatcattatagaaaaattcattatagcgatattgataaattgtggaattgtcttaatgtttttttattaactgacattattttaaacctaactgagatgatcagttacattcatcagttggtgagttttgaagaataactacattttatttcaaactaacaaatgtatacggttttagttcagtgttgaagaattttaatacaatattaaattacttgaactgaacagttccttgtatatattttgcctattcactgttgatatgtatgtagcaaaatgagagttaaataacactaaaatatggtaccaggaggcaattgtataggagcaaagttaataggagctttgctgaaacagaagcatatgtgtaaataagcttgggcttccagttataaattttgtaatttttgtcattatttatatcctataaaaaaagcacacaaaaataaaacagaagttgtacagca

SEQ ID NO: 287866 - DNA, 3153 bp, Homo sapiens
agaacgcagaccagcccaagctgacagcttgagtatgccttcttctgctgcctggttttgggggctgtatgacgtactggacccagatgccctgtccaaacagtgggacaatggttggaaagcattgggctacctcagtacgagaaccacctgatggctaatggatttgacaatgtgcagtttatgggaagcaatgttatggaagatcaggatttgttggaaattggaatccttaattctgggcacagacaaagaattctacaggcaatccagctccttccaaagatgagacccattgggcatgatggctaccatcccacctctgtagctgagtggctggattccattgaactgggcgactacaccaaagcctttctaattaatggctacacttcgatggacctgttgaaaaaaatctgggaggttgaacttattaatgttttaaaaatcaatttgattggccacaggaaacgtattttggcatctctgggagacaggctgcacgacgatcccccacagaagccccctcggtccatcaccctcagggaacccagtggtaatcacactcctcctcagttgtctccatcacttagccaaagcacttacaccactggtggctccctagacgttcctcacattatcatgcagggcgatgcaaggaggagaagaaatgaaaactactttgatgatattccccgatcaaaactggagaggcagatggctcagacaggagactggggagaaccttccattaccttgcgacctccgaatgaagccacagcctctaccccggtacagtactggcagcatcacccagaaaagcttatcttccagtcgtgtgattacaaagctttttatttaggttctatgctgataaaagagcttagggggacagaatcaacccaagatgcttgtgcaaaaatgcgggctaactgtcagaagtctacagagcaaatgaagaaggtccctactattattctttctgtctcatataaaggagtcaaatttattgatgcaacaaataagaacataattgctgagcatgaaattcgtaatatctcctgtgctgcccaggacccagaagacctctcaacatttgcctatatcacaaaagatttgaagtctaatcaccactactgtcatgtgtttactgcctttgatgtgaatttagcctatgaaatcatcctaaccctgggacaggcattcgaagtcgcttaccagctagcactacaagcaagaaaagggggacactcctccacacttccagaaagctttgaaaacaaaccctccaaacccatccccaagccccgcgttagcattcgcaagtccgtgagatcgacccatctgagcaaaagactctggccaatctaccgtggattgtggagccgggccaagaagccaagaggggcattaataccaagtatgaaaccacgattttctgatactcgccgtcctcctgtcctcgcggtgccttgctcgccaagcggtcccggagcaggctttccttcgcgcctccgcgtccacccagcccaggaggaagactgctctgagcgtgcggccttgttacgggcgaaaggccactggccattcctggggaagttctttctgcaccagtgatggaaaacgcaagactttccagtcgcaacccctgagaggcgtgagttgagatgggttttccctgatgctcccgactcccctccccaccacctcccaaggtatttctgatgactccgccccagtacttgctttgcttcatttggggaaaataataccttttctttaaaaaaaaaaaaaaaaaaaaaagtaaaggggatctctaatactgcctaaaagtatgctttcactgtcagcagttttaaaggtgaaatcagagcagcactacccctcccacctccaaagcatctgtaaaatcattctatcattgagtatcgtttaatgcaaaaggacaaaaacaactcccgtgatatgattgccaggagattctgtttccccatttctatatttgtggattttatatgtaatcacctatgtcagagaaagaaaacctttcaaccaaatgattggttcaaaaggaaagaatgattcaaagcagaggaatttattatgcacagcaaaatgtgtcttgtattaaatatttttattaaaagaatgtttcattaatgcattgataagaaaactaggttagttgcgagggatgtttctggtttcatttcaaataattaaatttctactgctactaccaagaggactggctcagtggtggcaaaatactggtgatgctccctagagcaggaggcccggaagtgctgacgcagccatcagcctgccaagattgttttttaatcttcacagtgttttaaagaacatgttaaaaaaaaaaaaaaatctagtgctcctgctgtcaagatttctgtcatggaaaccttgtttgagaaaggtgttaataaaattctattgcaaaaatttctttttctagaaaaaataaatacaaaaaaaaaaaagaagaaattccaaagtaataaaacttttcttgagacaaacaaaaaaaaagtttgcttactatttgattaaataaaatttacttacatttctttaaggtattttaattttttaatgtctctgtggagtatttgtatgataccataatgtatatttatgtagaatcaaattatataaacagtaccaatatcattatagaaaaattcattatagcgatattgataaattgtggaattgtcttaatgtttttttattaactgacattattttaaacctaactgagatgatcagttacattcatcagttggtgagttttgaagaataactacattttatttcaaactaacaaatgtatacggttttagttcagtgttgaagaattttaatacaatattaaattacttgaactgaacagttccttgtatatattttgcctattcactgttgatatgtatgtagcaaaatgagagttaaataacactaaaatatggtaccaggaggcaattgtataggagcaaagttaataggagctttgctgaaacagaagcatatgtgtaaataagcttgggcttccagttataaattttgtaatttttgtcattatttatatcctataaaaaaagcacacaaaaataaaacagaagttgtacagca

SEQ ID NO: 287867 - DNA, 2926 bp, Homo sapiens
agcgggggtaatgaaggggagcgagcgagggggagcaaggagcatggagctgcatactgatgagtgacccagatgccctgtccaaacagtgggacaatggttggaaagcattgggctacctcagtacgagaaccacctgatggctaatggatttgacaatgtgcagtttatgggaagcaatgttatggaagatcaggatttgttggaaattggaatccttaattctgggcacagacaaagaattctacaggcaatccagctccttccaaagatgagacccattgggcatgatggctaccatcccacctctgtagctgagtggctggattccattgaactgggcgactacaccaaagcctttctaattaatggctacacttcgatggacctgttgaaaaaaatctgggaggttgaacttattaatcagtcgtctgtctgtgaaatatggacgaatcagaacgcaggatttcctttctcagcgatccatcaggttcataatacaggagactggggagaaccttccattaccttgcgacctccgaatgaagccacagcctctaccccggtacagtactggcagcatcacccagaaaagcttatcttccagtcgtgtgattacaaagctttttatttaggttctatgctgataaaagagcttagggggacagaatcaacccaagatgcttgtgcaaaaatgcgggctaactgtcagaagtctacagagcaaatgaagaaggtccctactattattctttctgtctcatataaaggagtcaaatttattgatgcaacaaataagaacataattgctgagcatgaaattcgtaatatctcctgtgctgcccaggacccagaagacctctcaacatttgcctatatcacaaaagatttgaagtctaatcaccactactgtcatgtgtttactgcctttgatgtgaatttagcctatgaaatcatcctaaccctgggacaggcattcgaagtcgcttaccagctagcactacaagcaagaaaagggggacactcctccacacttccagaaagctttgaaaacaaaccctccaaacccatccccaagccccgcgttagcattcgcaagtccgtgagatcgacccatctgagcaaaagactctggccaatctaccgtggattgtggagccgggccaagaagccaagaggggcattaataccaagtatgaaaccacgattttctgatactcgccgtcctcctgtcctcgcggtgccttgctcgccaagcggtcccggagcaggctttccttcgcgcctccgcgtccacccagcccaggaggaagactgctctgagcgtgcggccttgttacgggcgaaaggccactggccattcctggggaagttctttctgcaccagtgatggaaaacgcaagactttccagtcgcaacccctgagaggcgtgagttgagatgggttttccctgatgctcccgactcccctccccaccacctcccaaggtatttctgatgactccgccccagtacttgctttgcttcatttggggaaaataataccttttctttaaaaaaaaaaaaaaaaaaaaaagtaaaggggatctctaatactgcctaaaagtatgctttcactgtcagcagttttaaaggtgaaatcagagcagcactacccctcccacctccaaagcatctgtaaaatcattctatcattgagtatcgtttaatgcaaaaggacaaaaacaactcccgtgatatgattgccaggagattctgtttccccatttctatatttgtggattttatatgtaatcacctatgtcagagaaagaaaacctttcaaccaaatgattggttcaaaaggaaagaatgattcaaagcagaggaatttattatgcacagcaaaatgtgtcttgtattaaatatttttattaaaagaatgtttcattaatgcattgataagaaaactaggttagttgcgagggatgtttctggtttcatttcaaataattaaatttctactgctactaccaagaggactggctcagtggtggcaaaatactggtgatgctccctagagcaggaggcccggaagtgctgacgcagccatcagcctgccaagattgttttttaatcttcacagtgttttaaagaacatgttaaaaaaaaaaaaaaatctagtgctcctgctgtcaagatttctgtcatggaaaccttgtttgagaaaggtgttaataaaattctattgcaaaaatttctttttctagaaaaaataaatacaaaaaaaaaaaagaagaaattccaaagtaataaaacttttcttgagacaaacaaaaaaaaagtttgcttactatttgattaaataaaatttacttacatttctttaaggtattttaattttttaatgtctctgtggagtatttgtatgataccataatgtatatttatgtagaatcaaattatataaacagtaccaatatcattatagaaaaattcattatagcgatattgataaattgtggaattgtcttaatgtttttttattaactgacattattttaaacctaactgagatgatcagttacattcatcagttggtgagttttgaagaataactacattttatttcaaactaacaaatgtatacggttttagttcagtgttgaagaattttaatacaatattaaattacttgaactgaacagttccttgtatatattttgcctattcactgttgatatgtatgtagcaaaatgagagttaaataacactaaaatatggtaccaggaggcaattgtataggagcaaagttaataggagctttgctgaaacagaagcatatgtgtaaataagcttgggcttccagttataaattttgtaatttttgtcattatttatatcctataaaaaaagcacacaaaaataaaacagaagttgtacagca

SEQ ID NO: 287868 - DNA, 3041 bp, Homo sapiens
ttctctgaggttgacttgaatattatagatttgaagattattaacattattcaacttctgctccttctccaaaaggaagcaatgttatggaagatcaggatttgttggaaattggaatccttaattctgggcacagacaaagaattctacaggcaatccagctccttccaaagatgagacccattgggcatgatggctaccatcccacctctgtagctgagtggctggattccattgaactgggcgactacaccaaagcctttctaattaatggctacacttcgatggacctgttgaaaaaaatctgggaggttgaacttattaatgttttaaaaatcaatttgattggccacaggaaacgtattttggcatctctgggagacaggctgcacgacgatcccccacagaagccccctcggtccatcaccctcagggaacccagtggtaatcacactcctcctcagttgtctccatcacttagccaaagcacttacaccactggtggctccctagacgttcctcacattatcatgcagggcgatgcaaggaggagaagaaatgaaaactactttgatgatattccccgatcaaaactggagaggcagatggctcagacaggagactggggagaaccttccattaccttgcgacctccgaatgaagccacagcctctaccccggtacagtactggcagcatcacccagaaaagcttatcttccagtcgtgtgattacaaagctttttatttaggttctatgctgataaaagagcttagggggacagaatcaacccaagatgcttgtgcaaaaatgcgggctaactgtcagaagtctacagagcaaatgaagaaggtccctactattattctttctgtctcatataaaggagtcaaatttattgatgcaacaaataagaacataattgctgagcatgaaattcgtaatatctcctgtgctgcccaggacccagaagacctctcaacatttgcctatatcacaaaagatttgaagtctaatcaccactactgtcatgtgtttactgcctttgatgtgaatttagcctatgaaatcatcctaaccctgggacaggcattcgaagtcgcttaccagctagcactacaagcaagaaaagggggacactcctccacacttccagaaagctttgaaaacaaaccctccaaacccatccccaagccccgcgttagcattcgcaagtccgtgagatcgacccatctgagcaaaagactctggccaatctaccgtggattgtggagccgggccaagaagccaagaggggcattaataccaagtatgaaaccacgattttctgatactcgccgtcctcctgtcctcgcggtgccttgctcgccaagcggtcccggagcaggctttccttcgcgcctccgcgtccacccagcccaggaggaagactgctctgagcgtgcggccttgttacgggcgaaaggccactggccattcctggggaagttctttctgcaccagtgatggaaaacgcaagactttccagtcgcaacccctgagaggcgtgagttgagatgggttttccctgatgctcccgactcccctccccaccacctcccaaggtatttctgatgactccgccccagtacttgctttgcttcatttggggaaaataataccttttctttaaaaaaaaaaaaaaaaaaaaaagtaaaggggatctctaatactgcctaaaagtatgctttcactgtcagcagttttaaaggtgaaatcagagcagcactacccctcccacctccaaagcatctgtaaaatcattctatcattgagtatcgtttaatgcaaaaggacaaaaacaactcccgtgatatgattgccaggagattctgtttccccatttctatatttgtggattttatatgtaatcacctatgtcagagaaagaaaacctttcaaccaaatgattggttcaaaaggaaagaatgattcaaagcagaggaatttattatgcacagcaaaatgtgtcttgtattaaatatttttattaaaagaatgtttcattaatgcattgataagaaaactaggttagttgcgagggatgtttctggtttcatttcaaataattaaatttctactgctactaccaagaggactggctcagtggtggcaaaatactggtgatgctccctagagcaggaggcccggaagtgctgacgcagccatcagcctgccaagattgttttttaatcttcacagtgttttaaagaacatgttaaaaaaaaaaaaaaatctagtgctcctgctgtcaagatttctgtcatggaaaccttgtttgagaaaggtgttaataaaattctattgcaaaaatttctttttctagaaaaaataaatacaaaaaaaaaaaagaagaaattccaaagtaataaaacttttcttgagacaaacaaaaaaaaagtttgcttactatttgattaaataaaatttacttacatttctttaaggtattttaattttttaatgtctctgtggagtatttgtatgataccataatgtatatttatgtagaatcaaattatataaacagtaccaatatcattatagaaaaattcattatagcgatattgataaattgtggaattgtcttaatgtttttttattaactgacattattttaaacctaactgagatgatcagttacattcatcagttggtgagttttgaagaataactacattttatttcaaactaacaaatgtatacggttttagttcagtgttgaagaattttaatacaatattaaattacttgaactgaacagttccttgtatatattttgcctattcactgttgatatgtatgtagcaaaatgagagttaaataacactaaaatatggtaccaggaggcaattgtataggagcaaagttaataggagctttgctgaaacagaagcatatgtgtaaataagcttgggcttccagttataaattttgtaatttttgtcattatttatatcctataaaaaaagcacacaaaaataaaacagaagttgtacagca

SEQ ID NO: 287869 - DNA, 2956 bp, Homo sapiens
ggcagaggggggcgcgcgcgcgggcctggggagctcgcggggagagcccggcgctcggcgcagcgcggcgcggccaagctccgcgcctctcccgcccttcctcggcgcgctcgccctcgcctcgccgctcgcattcgctgggggcgcccagaaagatgcacagaggcaacggctaggggagcggaggttcaagccacatgtctgcgtcctcgggggccagagcccgccagccctcgcggatcccggctcgcggccagcccgagcggctcgggttttaaaaatcaatttgattggccacaggaaacgtattttggcatctctgggagacaggctgcacgacgatcccccacagaagccccctcggtccatcaccctcaggttgtctccatcacttagccaaagcacttacaccactggtggctccctagacgttcctcacattatcatgcagggcgatgcaaggaggagaagaaatgaaaactactttgatgatattccccgatcaaaactggagaggcagatggctcagacaggagactggggagaaccttccattaccttgcgacctccgaatgaagccacagcctctaccccggtacagtactggcagcatcacccagaaaagcttatcttccagtcgtgtgattacaaagctttttatttaggttctatgctgataaaagagcttagggggacagaatcaacccaagatgcttgtgcaaaaatgcgggctaactgtcagaagtctacagagcaaatgaagaaggtccctactattattctttctgtctcatataaaggagtcaaatttattgatgcaacaaataagaacataattgctgagcatgaaattcgtaatatctcctgtgctgcccaggacccagaagacctctcaacatttgcctatatcacaaaagatttgaagtctaatcaccactactgtcatgtgtttactgcctttgatgtgaatttagcctatgaaatcatcctaaccctgggacaggcattcgaagtcgcttaccagctagcactacaagcaagaaaagggggacactcctccacacttccagaaagctttgaaaacaaaccctccaaacccatccccaagccccgcgttagcattcgcaagtccgtgagatcgacccatctgagcaaaagactctggccaatctaccgtggattgtggagccgggccaagaagccaagaggggcattaataccaagtatgaaaccacgattttctgatactcgccgtcctcctgtcctcgcggtgccttgctcgccaagcggtcccggagcaggctttccttcgcgcctccgcgtccacccagcccaggaggaagactgctctgagcgtgcggccttgttacgggcgaaaggccactggccattcctggggaagttctttctgcaccagtgatggaaaacgcaagactttccagtcgcaacccctgagaggcgtgagttgagatgggttttccctgatgctcccgactcccctccccaccacctcccaaggtatttctgatgactccgccccagtacttgctttgcttcatttggggaaaataataccttttctttaaaaaaaaaaaaaaaaaaaaaagtaaaggggatctctaatactgcctaaaagtatgctttcactgtcagcagttttaaaggtgaaatcagagcagcactacccctcccacctccaaagcatctgtaaaatcattctatcattgagtatcgtttaatgcaaaaggacaaaaacaactcccgtgatatgattgccaggagattctgtttccccatttctatatttgtggattttatatgtaatcacctatgtcagagaaagaaaacctttcaaccaaatgattggttcaaaaggaaagaatgattcaaagcagaggaatttattatgcacagcaaaatgtgtcttgtattaaatatttttattaaaagaatgtttcattaatgcattgataagaaaactaggttagttgcgagggatgtttctggtttcatttcaaataattaaatttctactgctactaccaagaggactggctcagtggtggcaaaatactggtgatgctccctagagcaggaggcccggaagtgctgacgcagccatcagcctgccaagattgttttttaatcttcacagtgttttaaagaacatgttaaaaaaaaaaaaaaatctagtgctcctgctgtcaagatttctgtcatggaaaccttgtttgagaaaggtgttaataaaattctattgcaaaaatttctttttctagaaaaaataaatacaaaaaaaaaaaagaagaaattccaaagtaataaaacttttcttgagacaaacaaaaaaaaagtttgcttactatttgattaaataaaatttacttacatttctttaaggtattttaattttttaatgtctctgtggagtatttgtatgataccataatgtatatttatgtagaatcaaattatataaacagtaccaatatcattatagaaaaattcattatagcgatattgataaattgtggaattgtcttaatgtttttttattaactgacattattttaaacctaactgagatgatcagttacattcatcagttggtgagttttgaagaataactacattttatttcaaactaacaaatgtatacggttttagttcagtgttgaagaattttaatacaatattaaattacttgaactgaacagttccttgtatatattttgcctattcactgttgatatgtatgtagcaaaatgagagttaaataacactaaaatatggtaccaggaggcaattgtataggagcaaagttaataggagctttgctgaaacagaagcatatgtgtaaataagcttgggcttccagttataaattttgtaatttttgtcattatttatatcctataaaaaaagcacacaaaaataaaacagaagttgtacagca

SEQ ID NO: 287870 - DNA, 2483 bp, Homo sapiens
agggaatgaactttgctgactgctcatattgcctctagaataaatgtcattttcagacaggagactggggagaaccttccattaccttgcgacctccgaatgaagccacagcctctaccccggtacagtactggcagcatcacccagaaaagcttatcttccagtcgtgtgattacaaagctttttatttaggttctatgctgataaaagagcttagggggacagaatcaacccaagatgcttgtgcaaaaatgcgggctaactgtcagaagtctacagagcaaatgaagaaggtccctactattattctttctgtctcatataaaggagtcaaatttattgatgcaacaaataagaacataattgctgagcatgaaattcgtaatatctcctgtgctgcccaggacccagaagacctctcaacatttgcctatatcacaaaagatttgaagtctaatcaccactactgtcatgtgtttactgcctttgatgtgaatttagcctatgaaatcatcctaaccctgggacaggcattcgaagtcgcttaccagctagcactacaagcaagaaaagggggacactcctccacacttccagaaagctttgaaaacaaaccctccaaacccatccccaagccccgcgttagcattcgcaagtccgtgagatcgacccatctgagcaaaagactctggccaatctaccgtggattgtggagccgggccaagaagccaagaggggcattaataccaagtatgaaaccacgattttctgatactcgccgtcctcctgtcctcgcggtgccttgctcgccaagcggtcccggagcaggctttccttcgcgcctccgcgtccacccagcccaggaggaagactgctctgagcgtgcggccttgttacgggcgaaaggccactggccattcctggggaagttctttctgcaccagtgatggaaaacgcaagactttccagtcgcaacccctgagaggcgtgagttgagatgggttttccctgatgctcccgactcccctccccaccacctcccaaggtatttctgatgactccgccccagtacttgctttgcttcatttggggaaaataataccttttctttaaaaaaaaaaaaaaaaaaaaaagtaaaggggatctctaatactgcctaaaagtatgctttcactgtcagcagttttaaaggtgaaatcagagcagcactacccctcccacctccaaagcatctgtaaaatcattctatcattgagtatcgtttaatgcaaaaggacaaaaacaactcccgtgatatgattgccaggagattctgtttccccatttctatatttgtggattttatatgtaatcacctatgtcagagaaagaaaacctttcaaccaaatgattggttcaaaaggaaagaatgattcaaagcagaggaatttattatgcacagcaaaatgtgtcttgtattaaatatttttattaaaagaatgtttcattaatgcattgataagaaaactaggttagttgcgagggatgtttctggtttcatttcaaataattaaatttctactgctactaccaagaggactggctcagtggtggcaaaatactggtgatgctccctagagcaggaggcccggaagtgctgacgcagccatcagcctgccaagattgttttttaatcttcacagtgttttaaagaacatgttaaaaaaaaaaaaaaatctagtgctcctgctgtcaagatttctgtcatggaaaccttgtttgagaaaggtgttaataaaattctattgcaaaaatttctttttctagaaaaaataaatacaaaaaaaaaaaagaagaaattccaaagtaataaaacttttcttgagacaaacaaaaaaaaagtttgcttactatttgattaaataaaatttacttacatttctttaaggtattttaattttttaatgtctctgtggagtatttgtatgataccataatgtatatttatgtagaatcaaattatataaacagtaccaatatcattatagaaaaattcattatagcgatattgataaattgtggaattgtcttaatgtttttttattaactgacattattttaaacctaactgagatgatcagttacattcatcagttggtgagttttgaagaataactacattttatttcaaactaacaaatgtatacggttttagttcagtgttgaagaattttaatacaatattaaattacttgaactgaacagttccttgtatatattttgcctattcactgttgatatgtatgtagcaaaatgagagttaaataacactaaaatatggtaccaggaggcaattgtataggagcaaagttaataggagctttgctgaaacagaagcatatgtgtaaataagcttgggcttccagttataaattttgtaatttttgtcattatttatatcctataaaaaaagcacacaaaaataaaacagaagttgtacagca

SEQ ID NO: 287871 - DNA, 2820 bp, Homo sapiens
gaggaggcccccgcgcgccggcaacccccagtgctaggcgccctgcagcccccgcgcgccgcgcctgggcccgcatcgctctcgcagtgagggtccgcccgagcggttttaaaaatcaatttgattggccacaggaaacgtattttggcatctctgggagacaggctgcacgacgatcccccacagaagccccctcggtccatcaccctcagggaacccagtggtaatcacactcctcctcagttgtctccatcacttagccaaagcacttacaccactggtggctccctagacgttcctcacattatcatgcagggcgatgcaaggaggagaagaaatgaaaactactttgatgatattccccgatcaaaactggagaggcagatggctcagacaggagactggggagaaccttccattaccttgcgacctccgaatgaagccacagcctctaccccggtacagtactggcagcatcacccagaaaagcttatcttccagtcgtgtgattacaaagctttttatttaggttctatgctgataaaagagcttagggggacagaatcaacccaagatgcttgtgcaaaaatgcgggctaactgtcagaagtctacagagcaaatgaagaaggtccctactattattctttctgtctcatataaaggagtcaaatttattgatgcaacaaataagaacataattgctgagcatgaaattcgtaatatctcctgtgctgcccaggacccagaagacctctcaacatttgcctatatcacaaaagatttgaagtctaatcaccactactgtcatgtgtttactgcctttgatgtgaatttagcctatgaaatcatcctaaccctgggacaggcattcgaagtcgcttaccagctagcactacaagcaagaaaagggggacactcctccacacttccagaaagctttgaaaacaaaccctccaaacccatccccaagccccgcgttagcattcgcaagtccgtgagatcgacccatctgagcaaaagactctggccaatctaccgtggattgtggagccgggccaagaagccaagaggggcattaataccaagtatgaaaccacgattttctgatactcgccgtcctcctgtcctcgcggtgccttgctcgccaagcggtcccggagcaggctttccttcgcgcctccgcgtccacccagcccaggaggaagactgctctgagcgtgcggccttgttacgggcgaaaggccactggccattcctggggaagttctttctgcaccagtgatggaaaacgcaagactttccagtcgcaacccctgagaggcgtgagttgagatgggttttccctgatgctcccgactcccctccccaccacctcccaaggtatttctgatgactccgccccagtacttgctttgcttcatttggggaaaataataccttttctttaaaaaaaaaaaaaaaaaaaaaagtaaaggggatctctaatactgcctaaaagtatgctttcactgtcagcagttttaaaggtgaaatcagagcagcactacccctcccacctccaaagcatctgtaaaatcattctatcattgagtatcgtttaatgcaaaaggacaaaaacaactcccgtgatatgattgccaggagattctgtttccccatttctatatttgtggattttatatgtaatcacctatgtcagagaaagaaaacctttcaaccaaatgattggttcaaaaggaaagaatgattcaaagcagaggaatttattatgcacagcaaaatgtgtcttgtattaaatatttttattaaaagaatgtttcattaatgcattgataagaaaactaggttagttgcgagggatgtttctggtttcatttcaaataattaaatttctactgctactaccaagaggactggctcagtggtggcaaaatactggtgatgctccctagagcaggaggcccggaagtgctgacgcagccatcagcctgccaagattgttttttaatcttcacagtgttttaaagaacatgttaaaaaaaaaaaaaaatctagtgctcctgctgtcaagatttctgtcatggaaaccttgtttgagaaaggtgttaataaaattctattgcaaaaatttctttttctagaaaaaataaatacaaaaaaaaaaaagaagaaattccaaagtaataaaacttttcttgagacaaacaaaaaaaaagtttgcttactatttgattaaataaaatttacttacatttctttaaggtattttaattttttaatgtctctgtggagtatttgtatgataccataatgtatatttatgtagaatcaaattatataaacagtaccaatatcattatagaaaaattcattatagcgatattgataaattgtggaattgtcttaatgtttttttattaactgacattattttaaacctaactgagatgatcagttacattcatcagttggtgagttttgaagaataactacattttatttcaaactaacaaatgtatacggttttagttcagtgttgaagaattttaatacaatattaaattacttgaactgaacagttccttgtatatattttgcctattcactgttgatatgtatgtagcaaaatgagagttaaataacactaaaatatggtaccaggaggcaattgtataggagcaaagttaataggagctttgctgaaacagaagcatatgtgtaaataagcttgggcttccagttataaattttgtaatttttgtcattatttatatcctataaaaaaagcacacaaaaataaaacagaagttgtacagca

SEQ ID NO: 287872 - DNA, 2260 bp, Homo sapiens
gtcacggtgaggagttcgggttttgttctgactgactgtgatggaaaccactggagagtgagagccggggagtggcatgcctgattcacctcctccaggaagcccccctggctcccaaggtgtgtgtgcccacatggtgccctctcttcccctcgtatctcacctctcagcactgaaatccgcctctgtctgctccccgtctgtgtgctcacaagggcaagggctgtgccttattcaccgtcaccctcagggtgccctgcagagagtcggtatgcggtaaatgtgtgtccaaagagcgagcccgcgagccgcctagaccagcatcgccgccccgcgcctggggcgaggggcctcgcgtgggttcgccagcggcgtccgcgtgcatgcgcgcacccgcgcggcgaccgtataacaggcatcagcctttctgttttaaagcagatcgacccatctgagcaaaagactctggccaatctaccgtggattgtggagccgggccaagaagccaagaggggcattaataccaagtatgaaaccacgattttctgatactcgccgtcctcctgtcctcgcggtgccttgctcgccaagcggtcccggagcaggctttccttcgcgcctccgcgtccacccagcccaggaggaagactgctctgagcgtgcggccttgttacgggcgaaaggccactggccattcctggggaagttctttctgcaccagtgatggaaaacgcaagactttccagtcgcaacccctgagaggcgtgagttgagatgggttttccctgatgctcccgactcccctccccaccacctcccaaggtatttctgatgactccgccccagtacttgctttgcttcatttggggaaaataataccttttctttaaaaaaaaaaaaaaaaaaaaaagtaaaggggatctctaatactgcctaaaagtatgctttcactgtcagcagttttaaaggtgaaatcagagcagcactacccctcccacctccaaagcatctgtaaaatcattctatcattgagtatcgtttaatgcaaaaggacaaaaacaactcccgtgatatgattgccaggagattctgtttccccatttctatatttgtggattttatatgtaatcacctatgtcagagaaagaaaacctttcaaccaaatgattggttcaaaaggaaagaatgattcaaagcagaggaatttattatgcacagcaaaatgtgtcttgtattaaatatttttattaaaagaatgtttcattaatgcattgataagaaaactaggttagttgcgagggatgtttctggtttcatttcaaataattaaatttctactgctactaccaagaggactggctcagtggtggcaaaatactggtgatgctccctagagcaggaggcccggaagtgctgacgcagccatcagcctgccaagattgttttttaatcttcacagtgttttaaagaacatgttaaaaaaaaaaaaaaatctagtgctcctgctgtcaagatttctgtcatggaaaccttgtttgagaaaggtgttaataaaattctattgcaaaaatttctttttctagaaaaaataaatacaaaaaaaaaaaagaagaaattccaaagtaataaaacttttcttgagacaaacaaaaaaaaagtttgcttactatttgattaaataaaatttacttacatttctttaaggtattttaattttttaatgtctctgtggagtatttgtatgataccataatgtatatttatgtagaatcaaattatataaacagtaccaatatcattatagaaaaattcattatagcgatattgataaattgtggaattgtcttaatgtttttttattaactgacattattttaaacctaactgagatgatcagttacattcatcagttggtgagttttgaagaataactacattttatttcaaactaacaaatgtatacggttttagttcagtgttgaagaattttaatacaatattaaattacttgaactgaacagttccttgtatatattttgcctattcactgttgatatgtatgtagcaaaatgagagttaaataacactaaaatatggtaccaggaggcaattgtataggagcaaagttaataggagctttgctgaaacagaagcatatgtgtaaataagcttgggcttccagttataaattttgtaatttttgtcattatttatatcctataaaaaaagcacacaaaaataaaacagaagttgtacagca

SEQ ID NO: 287873 - DNA, 1933 bp, Homo sapiens
ggcagaggggggcgcgcgcgcgggcctggggagctcgcggggagagcccggcgctcggcgcagcgcggcgcggccaagctccgcgcctctcccgcccttcctcggcgcgctcgccctcgcctcgccgctcgcattcgctgggggcgcccagaaagatgcacagaggcaacggctaggggagcggaggttcaagccacatgtctgcgtcctcgggggccagagcccgccagccctcgcggatcccggctcgcggccagcccgagcggctcgggttttaaaaatcaatttgattggccacaggaaacgtattttggcatctctgggagacaggctgcacgacgatcccccacagaagccccctcggtccatcaccctcagggaacccagtggtaatcacactcctcctcagttgtctccatcacttagccaaagcacttacaccactggtggctccctagacgttcctcacattatcatgcagggcgatgcaaggaggagaagaaatgaaaactactttgatgatattccccgatcaaaactggagaggcagatggctcagacaggagactggggagaaccttccattaccttgcgacctccgaatgaagccacagcctctaccccggtacagtactggcagcatcacccagaaaagcttatcttccagtcgtgtgattacaaagctttttatttaggttctatgctgataaaagagcttagggggacagaatcaacccaagatgcttgtgcaaaaatgcgggctaactgtcagaagtctacagagcaaatgaagaaggtccctactattattctttctgtctcatataaaggagtcaaatttattgatgcaacaaataagaacataattgctgagcatgaaattcgtaatatctcctgtgctgcccaggacccagaagacctctcaacatttgcctatatcacaaaagatttgaagtctaatcaccactactgtcatgtgtttactgcctttgatgtgaatttagcctatgaaatcatcctaaccctgggacaggcattcgaagtcgcttaccagctagcactacaagcaagaaaagggggacactcctccacacttccagaaagctttgaaaacaaaccctccaaacccatccccaagccccgcgttagcattcgcaagtccgtgagatcgacccatctgagcaaaagactctggccaatctaccgtggattgtggagccgggccaagaagccaagaggggcattaataccaagtatgaaaccacgattttctgatactcgccgtcctcctgtcctcgcggtgccttgctcgccaagcggtcccggagcaggctttccttcgcgcctccgcgtccacccagcccaggaggaagactgctctgagcgtgcggccttgttacgggcgaaaggccactggccattcctggggaagttctttctgcaccagtgatggaaaacgcaagactttccagtcgcaacccctgagaggcgatcttcttcatgccagccataccgggcaggaaccatcagagagacacactgaggaggcactcagaaaattttgatagaattgaatttacatatagctgataaagcctaaatagaaaggttgatgtatttagcttgaatccttcactttagtggtctaatcaacagataaatgacaagcaaagaatgaaacaatccaaaaatgtttttcaaaacaattttgtgaattttatttttacaaaaattttttaaattcatattttaaaatgtataccaaggcaaaaaaatcatataagctatatcataaatacaagagtttcaaaacatacaagagacatataatgtaaaaaaaaattatatatatgaagtccaatgtaatttataatacaaaaaaatacagcaagggaaaatgctttagaaatgctcatctgcaaactacaaaaca

SEQ ID NO: 287874 - DNA, 1591 bp, Homo sapiens
ggcagaggggggcgcgcgcgcgggcctggggagctcgcggggagagcccggcgctcggcgcagcgcggcgcggccaagctccgcgcctctcccgcccttcctcggcgcgctcgccctcgcctcgccgctcgcattcgctgggggcgcccagaaagatgcacagaggcaacggctaggggagcggaggttcaagccacatgtctgcgtcctcgggggccagagcccgccagccctcgcggatcccggctcgcggccagcccgagcggctcgggttttaaaaatcaatttgattggccacaggaaacgtattttggcatctctgggagacaggctgcacgacgatcccccacagaagccccctcggtccatcaccctcagggaacccagtggtaatcacactcctcctcagttgtctccatcacttagccaaagcacttacaccactggtggctccctagacgttcctcacattatcatgcagggcgatgcaaggaggagaagaaatgaaaactactttgatgatattccccgatcaaaactggagaggcagatggctcagacaggagactggggagaaccttccattaccttgcgacctccgaatgaagccacagcctctaccccggtacagtactggcagcatcacccagaaaagcttatcttccagtcgtgtgattacaaagctttttatttaggttctatgctgataaaagagcttagggggacagaatcaacccaagatgcttgtgcaaaaatgcgggctaactgtcagaagtctacagagcaaatgaagaaggtccctactattattctttctgtctcatataaaggagtcaaatttattgatgcaacaaataagaacataattgctgagcatgaaattcgtaatatctcctgtgctgcccaggacccagaagacctctcaacatttgcctatatcacaaaagatttgaagtctaatcaccactactgtcatgtgtttactgcctttgatgtgaatttagcctatgaaatcatcctaaccctgggacaggcattcgaagtcgcttaccagctagcactacaagcaagaaaagggggacactcctccacacttccagaaagctttgaaaacaaaccctccaaacccatccccaagccccgcgttagcattcgcaagtccgtgagatcgacccatctgagcaaaagactctggccaatctaccgtggattgtggagccgggccaagaagccaagaggggcattaataccaagtatgaaaccacgattttctgatactcgccgtcctcctgtcctcgcggtgccttgctcgccaagcggtcccggagcaggctttccttcgcgcctccgcgtccacccagcccaggaggaagactgctctgagcgtgcggccttgttacgggcgaaaggccactggccattcctggggaagttctttctgcaccagtgatggaaaacgcaagactttccagtcgcaacccctgagaggcgtgagttgagatgggttttccctgatgctcccgactcccctccccaccacctcccaaggtatttttctttctttctctctctttttttttttttttttttt

SEQ ID NO: 287875 - DNA, 1055 bp, Homo sapiens
ggcagaggggggcgcgcgcgcgggcctggggagctcgcggggagagcccggcgctcggcgcagcgcggcgcggccaagctccgcgcctctcccgcccttcctcggcgcgctcgccctcgcctcgccgctcgcattcgctgggggcgcccagaaagatgcacagaggcaacggctaggggagcggaggttcaagccacatgtctgcgtcctcgggggccagagcccgccagccctcgcggatcccggctcgcggccagcccgagcggctcgggttttaaaaatcaatttgattggccacaggaaacgtattttggcatctctgggagacaggctgcacgacgatcccccacagaagccccctcggtccatcaccctcagggaacccagtggtaatcacactcctcctcagttgtctccatcacttagccaaagcacttacaccactggtggctccctagacgttcctcacattatcatgcagggcgatgcaaggaggagaagaaatgaaaactactttgatgatattccccgatcaaaactggagaggcagatggctcagacaggagactggggagaaccttccattaccttgcgacctccgaatgaagccacagcctctaccccggtacagtactggcagcatcacccagaaaagcttatcttccagtcgtgtgattacaaagctttttatttaggttctatgctgataaaagagcttagggggacagaatcaacccaagatgcttgtgcaaaaatgcgggctaactgtcagaagtctacagagcaaatgaagaaggtccctactattattctttctgtctcatataaaggagtcaaatttattgatgcaacaaataagaacataattgctgagcatgaaattcgtaatatctcctgtgctgcccaggacccagaagacctctcaacatttgcctatatcacaaaagatttgaagtctaatcaccactactgtcatgtgtttactgcctttgatgtggtgagtacccaccccctttcaacagattaaagactttgcagaatgggcctggactgta

SEQ ID NO: 287876 - DNA, 1088 bp, Homo sapiens
ggcagaggggggcgcgcgcgcgggcctggggagctcgcggggagagcccggcgctcggcgcagcgcggcgcggccaagctccgcgcctctcccgcccttcctcggcgcgctcgccctcgcctcgccgctcgcattcgctgggggcgcccagaaagatgcacagaggcaacggctaggggagcggaggttcaagccacatgtctgcgtcctcgggggccagagcccgccagccctcgcggatcccggctcgcggccagcccgagcggctcgggttttaaaaatcaatttgattggccacaggaaacgtattttggcatctctgggagacaggctgcacgacgatcccccacagaagccccctcggtccatcaccctcagggaacccagtggtaatcacactcctcctcagttgtctccatcacttagccaaagcacttacaccactggtggctccctagacgttcctcacattatcatgcagggcgatgcaaggaggagaagaaatgaaaactactttgatgatattccccgatcaaaactggagaggcagatggctcagacaggagactggggagaaccttccattaccttgcgacctccgaatgaagccacagcctctaccccggtacagtactggcagcatcacccagaaaagcttatcttccagtcgtgtgattacaaagctttttatttaggttctatgctgataaaagagcttagggggacagaatcaacccaagatgcttgtgcaaaaatgcgggctaactgtcagaagtctacagagcaaatgaagaaggtccctactattattctttctgtctcatataaaggagtcaaatttattgatgcaacaaataagaacataattgctgagcatgaaattcgtaatatctcctgtgctgcccaggacccagaagacctctcaacatttgcctatatcacaaaagatttgaagtctaatcaccactactgtcatgtgtttactgcctttgatgtgaagttagcccgcatttttgcacaagcatcttgggttgattctgtccccctaagctcttttatcagcatagaacctctgcaaggaacccacg

SEQ ID NO: 287877 - DNA, 1060 bp, Homo sapiens
ggcagaggggggcgcgcgcgcgggcctggggagctcgcggggagagcccggcgctcggcgcagcgcggcgcggccaagctccgcgcctctcccgcccttcctcggcgcgctcgccctcgcctcgccgctcgcattcgctgggggcgcccagaaagatgcacagaggcaacggctaggggagcggaggttcaagccacatgtctgcgtcctcgggggccagagcccgccagccctcgcggatcccggctcgcggccagcccgagcggctcgggttttaaaaatcaatttgattggccacaggaaacgtattttggcatctctgggagacaggctgcacgacgatcccccacagaagccccctcggtccatcaccctcagggaacccagtggtaatcacactcctcctcagttgtctccatcacttagccaaagcacttacaccactggtggctccctagacgttcctcacattatcatgcagggcgatgcaaggaggagaagaaatgaaaactactttgatgatattccccgatcaaaactggagaggcagatggctcagacaggagactggggagaaccttccattaccttgcgacctccgaatgaagccacagcctctaccccggtacagtactggcagcatcacccagaaaagcttatcttccagtcgtgtgattacaaagctttttatttaggttctatgctgataaaagagcttagggggacagaatcaacccaagatgcttgtgcaaaaatgcgggctaactgtcagaagtctacagagcaaatgaagaaggtccctactattattctttctgtctcatataaaggagtcaaatttattgatgcaacaaataagaacataattgctgagcatgaaattcgtaatatctcctgtgctgcccaggacccagaaggtccaggtatgccagaaggtccaggtatgccggaaggtccaggtatgccagaaggtccaggtatgccagaaggtccaggtatgccagaaggtccaggtatgcagaaggtccaggtatgccagaagtccagaatgccggtccgc

SEQ ID NO: 287878 - DNA, 468 bp, Homo sapiens
ctttaggaaaacagaacctgactcttgatatttcagacctttgacctgaaatacttaggggaaaaacgtattgactagatcatgccattaataaagtggtggaatgtcattcattccttggctgttgcttcaaaagcgactccccacccccacagtttgtcttgtcagtatttcacaattttgaaaccaaaggttagccacagaacatggtatttatttcatgatgtatttccattcaggaacccagtggtaatcacactcctcctcagttgtctccatcacttagccaaagcacttacaccactggtggctccctagacgttcctcacattatcatgcagggcgatgcaaggaggagaagaaatgaaaactactttgatgatattccccgatcaaaactggagaggcagatggctcaggtaaggtgttataagcctttgtgatatttttcaaccatatcaggtaatg

SEQ ID NO: 287879 - DNA, 464 bp, Homo sapiens
tataaacagtaccaatatcattatagaaaaaaataacattttaatgtatattgttctaacaatcatattgtgaatcattttgaagttcattatagcgatattgataaattgtggaattgtcttaatgtttttttattaactgacattattttaaacctaactgagatgatcagttacattcatcagttggtgagttttgaagaataactacattttatttcaaactaacaaatgtatacggttttagttcagtgttgaagaattttaatacaatattaaattacttgaactgaacagttccttgtatatattttgcctattcactgttgatatgtatgtagcaaaatgagagttaaataacactaaaatatggtaccaggaggcaattgtataggagcaaagttaataggagctttgctgaaacagaagcatatgtgtaaataagcttgggcttccagttataa

SEQ ID NO: 287880 - DNA, 1466 bp, Homo sapiens
  misc_feature (1394)..(1394): n is a, c, g, or t
  misc_feature (1427)..(1427): n is a, c, g, or t
ttttttttttatagctgctgttaccttttattgagtacccacaatgtgctaggcaactgtgctagatacttttacataatctcatttaatttaaccctcacaacaaccctgtgaggtaggtatttgctccattttacaaatggagaaatcgaggcacaaaagattaaacatcttaccaaagtctgcacagccacttatatgctggagctagaatttgaacccaggtgtgcctccactttttaatactagaccaatcttttcacgggggaagtttcctagattaacaccctcacatcttttaagaccattccaaaacctgcgttctgttttgcagaagccctcactgtgtttctgctgccctgaaacagtggaggcagacaaaggtgagtgccaagtgaggaaccataagaagtggtagatctctgtggagtgccataagaaccctcaagagccttaacaaaggtagttgggggagaggggaagaggtgtttcagcagctctgctcccagcagccatttcctctctccagggcaaaggggtggggctgcgaggccagctgaccaagaaacccctccagctcctccagtccaagtccagcatctttcctacaactattctgccttccacttcgtcttcttccttgcctcactctatgtcatggttacccttaccaactggttcaggtaagatggagtgggccttagatactctcctgaagagctagctattttaaggaaagagcaattcaaggccattccagacacacatgggtctgccattatatttggtgaggaggtagaacaggtctaaaagctaaggcccttcatattctctaaccagagcctttggttacacagctatgagggagcagaactggaaaagaccttcatcaagggtagctgggccaccttctgggtcaaggttgcctcatgctgggcctgcgtactcctctatctggggctgttactggcaccactctgttggccccccacccagaaaccccagccccttatcttgaggcgccgccgccaccgcatcatatccccagataacaaatatcctccagtctaagtccttttcacaaactggggttcccctgacattgtactcctagagttggctcaaggggagctgtccagcccagctcaatacctcaaggacacacagggagttatctccgtttgggctgaagtcaatactatgaactggaagaagtggtcaaacacagtctaatgtgctgggcagagtgtctgactcactggagctactgttacatctgcatcccagctcaagagcctaacacccaaatcagcagctcaaagaaccaccgctgatcccagcagacagtgtggcaccagccctttcctggctcttgggcttcttatatccgtgtnccagggctgaactccttattttcctttctccanaggcagagccgagtcttcagtccctgttggtctttcccc

SEQ ID NO: 287881 - DNA, 1541 bp, Homo sapiens
  misc_feature (1469)..(1469): n is a, c, g, or t
  misc_feature (1502)..(1502): n is a, c, g, or t
ttgtgtgcccacctgtttggcctctctgactgtccagtgctcagtggctctggggctgtgtaccgagtatgtgcaggaaccgccaccttccacctgctgcaggctgtgttgctggtccacctccactcccccaccagcccgcgggcacagctgcataatagcatggcattacattggcatctgtggaggctttgcattcatcctactgcagttggtgcttattacagcttttgcccattcctggaacaagaactgagcaaccccgctctggcctcctacaagcttctgtcatcagctgctatatcatgtatctgactttctctgcactgtccagccgtcctccagagagagtaatccttcaaggacagaatcacaccctgtgcctgcctggcctgagtaaaatggaaccccaaacaccagatatctctctagcaatgctgagtgctagcatcatgtatgcttgtgtgctttttgcttgcaatgaggcctcctacctggctgaggtatttggacccctgtggattgtcaaggtttacagctatgagtttcagaagccctcactgtgtttctgctgccctgaaacagtggaggcagacaaaggtgaggcaaaggggtggggctgcgaggccagctgaccaagaaacccctccagctcctccagtccaagtccagcatctttcctacaactattctgccttccacttcgtcttcttccttgcctcactctatgtcatggttacccttaccaactggttcaggtaagatggagtgggccttagatactctcctgaagagctagctattttaaggaaagagcaattcaaggccattccagacacacatgggtctgccattatatttggtgaggaggtagaacaggtctaaaagctaaggcccttcatattctctaaccagagcctttggttacacagctatgagggagcagaactggaaaagaccttcatcaagggtagctgggccaccttctgggtcaaggttgcctcatgctgggcctgcgtactcctctatctggggctgttactggcaccactctgttggccccccacccagaaaccccagccccttatcttgaggcgccgccgccaccgcatcatatccccagataacaaatatcctccagtctaagtccttttcacaaactggggttcccctgacattgtactcctagagttggctcaaggggagctgtccagcccagctcaatacctcaaggacacacagggagttatctccgtttgggctgaagtcaatactatgaactggaagaagtggtcaaacacagtctaatgtgctgggcagagtgtctgactcactggagctactgttacatctgcatcccagctcaagagcctaacacccaaatcagcagctcaaagaaccaccgctgatcccagcagacagtgtggcaccagccctttcctggctcttgggcttcttatatccgtgtnccagggctgaactccttattttcctttctccanaggcagagccgagtcttcagtccctgttggtctttcccc

SEQ ID NO: 287882 - DNA, 1145 bp, Homo sapiens
  misc_feature (1073)..(1073): n is a, c, g, or t
  misc_feature (1106)..(1106): n is a, c, g, or t
ttgtgtgcccacctgtttggcctctctgactgtccagtgctcagtggctctggggctgtgtaccgagtatgtgcaggaaccgccaccttccacctgctgcaggctgtgttgctggtccacctccactcccccaccagcccgcgggcacagctgcataatagcatggcattacattggcatctgtggaggctttgcattcatcctactgcagttggtgcttattacagcttttgcccattcctggaacaagaactgcaatgaggcctcctacctggctgaggtatttggacccctgtggattgtcaaggtttacagctatgagtttcagaagccctcactgtgtttctgctgccctgaaacagtggaggcagacaaaggtgaggcaaaggggtggggctgcgaggccagctgaccaagaaacccctccagctcctccagtccaagtccagcatctttcctacaactattctgccttccacttcgtcttcttccttgcctcactctatgtcatggttacccttaccaactggttcaggctatgagggagcagaactggaaaagaccttcatcaagggtagctgggccaccttctgggtcaaggttgcctcatgctgggcctgcgtactcctctatctggggctgttactggcaccactctgttggccccccacccagaaaccccagccccttatcttgaggcgccgccgccaccgcatcatatccccagataacaaatatcctccagtctaagtccttttcacaaactggggttcccctgacattgtactcctagagttggctcaaggggagctgtccagcccagctcaatacctcaaggacacacagggagttatctccgtttgggctgaagtcaatactatgaactggaagaagtggtcaaacacagtctaatgtgctgggcagagtgtctgactcactggagctactgttacatctgcatcccagctcaagagcctaacacccaaatcagcagctcaaagaaccaccgctgatcccagcagacagtgtggcaccagccctttcctggctcttgggcttcttatatccgtgtnccagggctgaactccttattttcctttctccanaggcagagccgagtcttcagtccctgttggtctttcccc

SEQ ID NO: 287883 - DNA, 786 bp, Homo sapiens
  misc_feature (10)..(10): n is a, c, g, or t
  misc_feature (41)..(41): n is a, c, g, or t
  misc_feature (714)..(714): n is a, c, g, or t
  misc_feature (747)..(747): n is a, c, g, or t
cggtcagganaggcaggcacagggtgtgattctgtccttgnaaggattactctctctggaggacggctggagtaaaatggaaccccaaacaccagatatctctctagcaatgctgagtgctagcatcatgtatgcttgtgtgctttttgcttgcaatgaggcctcctacctggctgaggtatttggacccctgtggattgtcaaggtttacagctatgagtttcagaagccctcactgtgtttctgctgccctgaaacagtggaggcagacaaaggtgaggcaaaggggtggggctgcgaggccagctgaccaagaaacccctccagctcctccagtccaagtccagcatctttcctacaactattctgccttccacttcgtcttcttccttgcctcactctatgtcatggttacccttaccaactggttcaggagttggctcaaggggagctgtccagcccagctcaatacctcaaggacacacagggagttatctccgtttgggctgaagtcaatactatgaactggaagaagtggtcaaacacagtctaatgtgctgggcagagtgtctgactcactggagctactgttacatctgcatcccagctcaagagcctaacacccaaatcagcagctcaaagaaccaccgctgatcccagcagacagtgtggcaccagccctttcctggctcttgggcttcttatatccgtgtnccagggctgaactccttattttcctttctccanaggcagagccgagtcttcagtccctgttggtctttcccc

SEQ ID NO: 287884 - DNA, 176 bp, Homo sapiens
agtaacaatttgacatttttccactggtgcccatcttgcagcatggcattacattggcatctgtggaggctttgcattcatcctactgcagttggtgcttattacagcttttgcccattcctggaacaagaactggtaaggggcacataaccctaaagcttttcctggggagtttc

SEQ ID NO: 287885 - DNA, 210 bp, Homo sapiens
caatttgacatttttccactggtgcccatcttgcagcatggcattacattggcatctgtggaggctttgcattcatcctactgcagttggtgcttattacagcttttgcccattcctggaacaagaactggtaaggggcacataaccctaaagcttttcctggggagtttctagtattactacatggaaagggctgggcaaaaggcacgg

SEQ ID NO: 287886 - DNA, 340 bp, Homo sapiens
ggaaaaggtgagtgggaaaaataattttcctttttagaaattattgagggtgggggccgggcacggtggctcacgcctatgatcccagcacttcagaaggccaaggcgggtggattacctgaggtcaggagttcaagaccagccttgctaacaaggtgaaaccctgtctctactaaaaatacaaaaattagccaggtgtggtggcacacccctgtaatcccagctactcgggaggctgaggcaggagaattgcttgagcccgggaggcagaggttgcagtgagtcgagatcgtgccactgcactccagcctggctgacagagcgagactgtctcaaaaaa

SEQ ID NO: 287887 - DNA, 536 bp, Homo sapiens
ttgaaatactctttcttcacctagggtctcttctcagaaaacaaagaaaaactgatcaataatgccataacagcattactgtcccaagaaggggatgtcgttgcttcaaatgcggaacttgagagtcagttccaggctgtgaggaggcttgtggcatccaaagctggtttcctggctttcactcagcttccaaagtttcgcgagcgtctaggggtgaaggtagtaaaagcactcaaaagaagcaacaacggaataatccatgcagcagttgatatgctttgtgcccttatgtgtcccatgcatgatgactatgacttaagacaagaacagttgaacaaagcttctcttctctcgtcaaagaagtttctggaaaacttactggagaaatttaattcccatgtggatcatgggactggtgccctagttattagttcgctcttggacttccttacctttgccctctgtgctccatatagtgagacaactgaagggcagcagtttgatatgctcttggagatggtagcatccaatggaag

SEQ ID NO: 287888 - DNA, 2553 bp, Homo sapiens
ctaaaggccttgcacaacatcagagagttcatactggagagaaccttacacatttcacgagtatggaaagacctttgctcaaaattcagcccttgtaatgcataaggcaattcatactggaaagaaaccttacacatgtaatgaatgtggcaaggtttttagtagaaaagcacaccttgcatgtcatcatagacttcatactgtctaaggtttctaatcaacaatcaaaccttgcacaacatcagagagtttatactggagagaaaccttacaagtgtaatgagtggggcaaagccttaagtgggaagtcgtcacttttttatcatcaagcaatccatggtgtagggaaactttgcaaatgtaatgattgtcacaaagtcttcagtaatgctacaaccattgcaaatcactggagaatccataatgaagacagatcttacaagtgtaataaatgtggtaaaattttcagacatcgatcatatcttgcagtttatcagcgaactcatactggagagaaaccttacaaatatcatgactgtggcaaggtcttcagtcaagcttcatcctatgcaaaacataggagaattcatacaggagagaaacctcacaagtgtgatgattgtggcaaagtcttgacttcacgttcacacctcattagacatcagagaatccatactggacagaaatcttacaaatgtcttaagtgtggcaaggtcttcagtctgtgggcactccatgcagaacatcagaaaattcatttttgagataactgttccaaatacagtgactatagaagatcataaagctttaattgacattagagccaaataggcattgacttgagattgagttgacttaaccttgagtttaagaattaatttacattaaagtgtttatgttaagaagattgggccaggtgggattacaggcgcgagcaccgcgcccggcccctaagttaatatttcaaacaatcgaaggtaaaacaacatattgtgttgggccacctgtactgaacgctgaatcgtttttcctcttaagttgaaaatggttttaatgcaaagcgcctttttttgagcaggtagagtcacgcatccggcaggcggggcgagctcccctctgtctggggcagggtgggggagaggggcagggacctcggtaaaggggtggagtggcgcgctggttgccgcgggcactggcaattagaagggattattaaactaagcaaggtcctgggttgtttgagtggataatggaaactgaaaggtgacgtgcaaaactgcctattactcccaggagtggaggataatttcatatttcatggaaataaactcagggcccggagcggtggctcacacctgtaatcccagcactttgagaggccaaggagggaggatcgcttaagcccaggaattcgaaatcagcctaggcaacatagtaagacctcatctctactaaaaataaaaaaaaacagccaggtgtgttagtccacacctgtggtcccagctgcctcagcttcccgagtagctgggattacaggtatgaaccactatgcccggctaactttgttttttttttttagaaattaaaccttttttcagcttaatgacccaggggtgtatttttgaaggacttgggagctctctttgaaaggcaaacaacaagggaaacagtacctttatctcagtaggaaattaaataattcaaacatcaaataacttcaatttaaggctatggactttgagataattctgagccttgagaggaatgtggtcaggcaacctgagtccagtggaatgcaggtgcaacttctaagagttttcctgtaagtaattaagaagactaagtagccccagagataagacctcctcggatcattgtcccttcttatgtagtgataaagtaaccttccttgaagtgtatctatccgtaatcaatcaagttgctgcagcctatgcactggcccagaataaaaaacgtggtgattctgctaaagcttctctgtctttccctgtgtgtgaaatcttaacgtctctacttgggaacgctgatcccattcatttagagttgatgtttccacgtggctatttccaagctttgccttcaaataaattctgtacttaatcatatattctaaattttattatttactgctgacatcagtttctgtcggattgtaggagcctcaccagagagggcccctgtcgccatgttgtaaaactcacacttgccaaaagttgtgggttagggtttctccccctccctcaggatgacgctagttagctgacacagatggtcacctccattaccaagtagagtcaggatgaactatgtgtgactgttcaactatgtgtcctcttccctgaggactgattagtgtttatcttgaaaacatgtccttaatgggttgtatagaacactgaagcatctgatttcaaactcttagctcttttcctctatttcccatcacattctggtctaaggcttatttattaataaaatgatttttatttctttaaacaaaaaaaactttagagcacactggggtaccggatc

SEQ ID NO: 287889 - DNA, 4263 bp, Homo sapiens
acacatccgcgcagaccaggaagcggatcccgtggattgaaggtcgcaccgcggcggattgacttctaaagacttggtacgtgaggaaaaaacacggaagaggaagaggaaagcaaaggagtcagggatggctcttcctcagggtctactgacattcagggatgtggccatagaattctctcaggaggagtggaaatgcctggaccctgctcagaggactctatacagagacgtgatgctggagaattataggaacctggtctccctggatacctcttccaaatgcatgatgaagatgttctcatcaacaggacaaggcaatacagaagtggtccacacagggacattgcaaatacatgcaagtcatcacattggagatacttgcttccaggaaattgagaaagatattcatgactttgtgtttcagtggcaagaaaatgaaacaaatggccatgaagcactcatgacaaaaatcaaaaagttgatgagtagtacagagcgacatgatcaaaggcatgctggaaacaaacctattaaaaatgagcttggatcaagctttcattcgcatctgcctgaagtgcacatatttcaccccgaagggaaaattggtaatcaagttgagaaggccatcaacgatgctttctcagtttcagcatcccaacgaatttcctgtaggccaaaaactcgtatttctaataagtataggaataatttcctccagtcttcattactcacacaaaaacgggaagtacacacaagagaaaaatctttccaacgtaatgagagtggcaaagcctttaatggtagctcactcttaaaaaaacatcagataatccatttaggagacaaacagtataaatgtgatgtatgcggcaaggactttcatcagaagcgataccttgcatgccatagatgtcacactggtgagaatccttacaagtgtaatgagtgtggcaagacattcagtcacaattcagccctgttagttcacaaggcaattcatactggagagaaaccttacaagtgtaatgaatgtggcaaggtttttaatcaacaatcaaaccttgcacgtcatcatagagttcatactggagagaaaccttacaaatgtgaagaatgtgacaaagttttcagtcgcaaatcacaccttgaaagacataggagaattcacactggagagaaaccatacaaatgtaaggtttgtgacaaggctttcagacgtgattcacacctggcacaacatactgtaattcacactggagagaaaccttacaagtgtaatgagtgtggcaagacctttgttcaaaattcatctcttgtaatgcataaggtcattcatactggagagaaacgttacaagtgtaatgaatgtggcaaggtttttaatcacaaatcaaaccttgcatgtcatcatagacttcatactggagagaaaccttacaagtgtaatgaatgtggcaaggtttttaatcgaaaatcaaaccttgaacgtcatcatagacttcatactggaaagaaatcttagaagtgtaaatttgcaaggtttttaggcaacagtcaaaccttgcatgtcatcatagactttatactggagagaaaccttacaaatgtgaagaatgtgacaaaagttttcaatttcaaatcactccttgaaatacataggagagttcatactggagagaaaccatacaaatgtaaggtttgtgacaaggatttcgggtgtgattcacacctggcccaacatactggaattcacactggaaaggaactgtacaagtgtaatgagtgtggcagagcctttggtggtcagtcaacacttactcaccatcaagcaatccatggtatagggaaacttgactaatgtaatgattgtcacaaagtcttcagtaatattacagccattgcaaaacattggagaatccataatgaaggaggtcttacaagtgtaataaatgtggcaagtttttcagacatcattcataacttgcagttcattggcgatcttatacaggagagaaatcttacaaatgtgatgattgtggcaaggtcttcagtcaagcttcatcttttgcaaaacgggagaattcatacaggagagaaacctcacaagtgtgatgattgtgagcaaagcctttacttcacgttcacaccacattagatatcagaggatccatactggacagaaatcttacaaacgtcctatgtgtggcaaggtcttcagtccgaggttactccttgcagaatatcataacgttcatttttgaggtaatagttacaaatgcggtgagcacagcaaaccatcaaggattgacagtagagtcaattcagaattgacttgagtttgagttgacttaaaacattcagttgaagcattaattgacattaaagtgtttatgttaagaggattgggccaggcgtgtggctcacgcctgtaaacccagcactttaggagcccaaggtggatagatcacttgaggtcatgagtttgagatcagcctggccaacagacgtgagtcacttttcccagcctgctttttgtttctttaacaaaaaccaataggggtttttataggtattgtgttgaatctgaatcacattggcttatataataacaatattgatttttccaaaccatcaatgtgggttgtatatatatgtttttaatcattttggttaatgtttgtagatttcaaggtgtgaaattctcagtttttttatgtttattcctaagtatttcttactttaagatctctagcaaatggaagtgttttttaattttcgtttaaattttttattgtttatggaaattcaattaatttttggtgctgctattgcattgtgcaaatccactgaatgtgttgattagttccagctgcttggggtgctgaggtgggaggatcacttgagccagaaagttggaggctgcagtgagctctgatcttgccaccacactccagcctgggtgaaaaagctagaccctgtctcaaacaagcaaataaatgagaggtataagtcctcctttaaaagtaaaggaagagatttttctttccttttgtctcttagaacattcaattagaaaatttgtaaattcattgtctctgtcttctgaggtttttttttttagacagagtttttctcttgttacccaggcttgagtgcaagccacgatctcgcctcaccacaacctccgtctcccgagttcaagcgattctcctgcctcagcttcccgagtagctgggattacaggtatgaaccactatgcccggctaactttgttttttttttttagaaattaaaccttttttcagcttaatgacccaggggtgtatttttgaaggacttgggagctctctttgaaaggcaaacaacaagggaaacagtacctttatctcagtaggaaattaaataattcaaacatcaaataacttcaatttaaggctatggactttgagataattctgagccttgagaggaatgtggtcaggcaacctgagtccagtggaatgcaggtgcaacttctaagagttttcctgtaagtaattaagaagactaagtagccccagagataagacctcctcggatcattgtcccttcttatgtagtgataaagtaaccttccttgaagtgtatctatccgtaatcaatcaagttgctgcagcctatgcactggcccagaataaaaaacgtggtgattctgctaaagcttctctgtctttccctgtgtgtgaaatcttaacgtctctacttgggaacgctgatcccattcatttagagttgatgtttccacgtggctatttccaagctttgccttcaaataaattctgtacttaatcatatattctaaattttattatttactgctgacatcagtttctgtcggattgtaggagcctcaccagagagggcccctgtcgccatgttgtaaaactcacacttgccaaaagttgtgggttagggtttctccccctccctcaggatgacgctagttagctgacacagatggtcacctccattaccaagtagagtcaggatgaactatgtgtgactgttcaactatgtgtcctcttccctgaggactgattagtgtttatcttgaaaacatgtccttaatgggttgtatagaacactgaagcatctgatttcaaactcttagctcttttcctctatttcccatcacattctggtctaaggcttatttattaataaaatgatttttatttctttaaacaaaaaaaactttagagcacactggggtaccggatc

SEQ ID NO: 287890 - DNA, 827 bp, Homo sapiens
tactgcaatgtaagaagtgcttttcacctcctgccatgattctgaggcctccccagccatgtggaactgttcaatttctggttggtaattggcaatgatggaatgactgtccggagtaaagaagcctctctttgttcttgtgccatgatttcccagccaggcagtgcttgcagttcactggactgatcattttctttcacactctgtgcctttgcaaatattattcttttgtctgaaaattgcctgctcccaacccttcattatcatccccactaactctcacccaccctccccagcttgttgacttggaaactccttctttttttaccagctgcaattcaagcaacacctcctctggggagccttttcaactctgccttagtcttttttggccctagtttttgcatctctccagattcactgggctttctctgctttctgggtcacttgttcagtgaagaacccctaccccatcatcaccacaactcttaaccctaccacccttagccctttccagatgagggctgtgctctagcatggctccttcatactcaccatgatgggactgcaaagaccctggtgtctggggcctgaacccactgggcccctgaagttcagcttcctgcagcattcccagaatctgaggaagcaccgtgaaccgaggtctgggctctgacttccctgatcctggagccaggtcatccaatctgtaaatgtaaaggatggaattatttttaccaatgaggaacagctggaggcctcagatatgaatattcaggattggtgaaagaactcaacaatttgactgagtgtcataattgtggcac

SEQ ID NO: 287891 - DNA, 1393 bp, Homo sapiens
tactgcaatgtaagaagtgcttttcacctcctgccatgattctgaggcctccccagccatgtggaactgttcaatttctggttggtaattggcaatgatggaatgactgtccggagtaaagaagcctctctttgttcttgtgccatgatttcccagccaggcagtgcttgcagttcactggactgatcattttctttcacactctgtgcctttgcaaatattattcttttgtctgaaaattgcctgctcccaacccttcattatcatccccactaactctcacccaccctccccagcttgttgacttggaaactccttctttttttaccagctgcaattcaagcaacacctcctctggggagccttttcaactctgccttagtcttttttggccctagtttttgcatctctccagattcactgggctttctctgctttctgggtcacttgttcagtgaagaacccctaccccatcatcaccacaactcttaaccctaccacccttagccctttccagatgagggctgtgctctagcatggctccttcatactcaccatgatgggactgcaaagaccctggtgtctggggcctgaacccactgggcccctgaagttcagcttcctgcagcattcccagaatctgaggaagcaccgtgaaccgaggtctgggctctgacttccctgatcctggagccaggtcatccaatctgtaaatgtaaaggatggaattatttttaccaatgaggaacaggtagactcttacgcctttctccccatgccctatccccaccctttacagactgtgaaagcacacagatttctacttacagactgttctgaagcacatcgatttccacacgactgactggagacatctagtgtgatcgagacctcagctgtgtgttataatcaatgtgccacctttgcttccccctctgctctcattcttgctgctcaataacaccggaactctgctccaggttctcatttctatgcaagtgtagaaatcctctacaatctcctagcaacacaggcataccgctaccctagcttgaaataacctgagtcatgattgttagtttactttaacagagattcttgattgcagaggaactttttttcagtggtctcattacttagcaccatgttgggaacatagcaggtgactcaatcaacagtttttaattaattaatggctttaacattaaataattatagaacacatttaaaacaaaaagagctcttagacatttttgctttaattctctgtgtgatatggagaaactgcctgaggccaggagaattaaggtactttccagagtcatgcagctattgagtagccagactggagatggcatattggtttcctgatcacacagcactattctctttt

SEQ ID NO: 287892 - DNA, 400 bp, Homo sapiens
gcaggagcctgtcatcagtaagagttgatggatgtttgagtggagaggggcagtgaggggtggacaaggggactggagcgggaggcattgtggcactgagccggccaggcctgctgactagctcttcctgtgtacttatgtctgtctgtggctggtttccctccagcacagacctttcctgtctcaggaaatagcactgttgtgcccccagggctgagcttctgcctggcacatggttagcacttagtgaacgtttctgaatgaatgggaaaatgctctccctttggaggagtggccagagtgagttggccacgtctctgtcctgagggaaagacggcggcaaggctgactcctgaggtcccatcgatcccgcctgcgtttcccatttgttcttatttat

SEQ ID NO: 287893 - DNA, 2248 bp, Homo sapiens
  misc_feature (2)..(3): n is a, c, g, or t
  misc_feature (1921)..(1921): n is a, c, g, or t
  misc_feature (2246)..(2246): n is a, c, g, or t
tnngtagcgctcccttttgggatcaacgagctgtgtggcgcctgtgcggcttctgagagaccggctggtggcgcttggcggcttcctgccaatccacccttctcctcccgcgcaagggggcaatcccaatcccaccaccgggaacacccaggccaaaagaacgggagttacactcaaagtcttcccccttcttatcactcctgccgatttccctcttcctttttgcacgcctccactcttccccaccggaaacgccgccccttcctcctacagttcctcccagcagtccctcaacgcctgtcttccctcgcgcgtagagagtgactcgaaggaccccctctcctcttcgctgcagcccctccccatgcacgctgggagactcttggaggggataaggtggggcccggagaggaagagaagacaatcggattggataggcagctgccatggcaactggaggctgtggttatattgtcatagtaaccgatgtgtgcggacagggtcaccctccccttggccaatggattcccaggaaaccacccagggttccccgttggcttcccttccatctaaaggcctcccccaagttaggaatcgatatagttctccccggtggtgaagtccacttcctcctcccttcccacttcccacagcaactggggggacaccccgaggcattcaccatgggcttttccacccgcctgcgagcgggaaccacctccgtagtttcctctcagagccgggcgtggagagggctgggcctgcgaagaggatgcatggcctggaggctggcgggcggcgggctggagtcgggagggcgaggcgacagcgccaagcggcgaggaagggcaaggggtttccccacaactgccttgggctctgggaggcgggatcccgcctggacggggtccctgagggaggagagcggcacacgacagccgcgatgccttccctgccgacggggatagccgacttctggcgagtcgacccctcccccaaatccaccccacccgcgtactccctcctgacctagctgtcgcgagcctgccgcgaggaggccagggtgagggtgggaacacatcctagaaggctaacacgtggttttctatcatttaagccggggacaagccggaaggctgactagcgccatcactctgataggcaccccgcagtggggatcctgcttgattattaaaggcagacctccaagttcctccctgctctgcaacctttctcttctcacgggtctgcagtgttttaaaagtcgtcattctgtgtcgttgagttagagaggaaaacatcggataaaagaggatcaagaagaacgaaccctagatacatctgtctggtgaaaggagtctaggaaaagaagtttcattcttagaacaaatctttttggatatttattatgtgtgttttgtgtcaggtttcgggccaaaaagctgaaataaagaacgaagtcaataataatatgaagtgtatgagaaatagctggaaaattcatcatccatgacttgaagaaattgacgttttacaagttatattttcggttcgtattgtggagtcacttaaggagctatcccaaagtactttaggatatgtaactatataaaaccttccaagaatgcagccctcataggatagttaaaataaggattttaatgggctattttgatttggtttggtctggtttggctacctgattcctgctgtctttttctacgccaggtgaagaggcactttcaagatccttctctgagacctgcaccaataagactataccaatgttcagttgaaacatcaggtataagtttagcggaaacgaaagtacaacctgctttgaaataaattccaaggacagattgtcattaacgaaatagaaagtggactatgcccctcatgctgccagcgcctggtatgntgcggcgtgacacgcagcgcttgcggcagtacaatgcccccaatcacccgccccgccccgacgcgccgcccactcacggcaaagagagccacctagtgagggattattctcatttccgcggtggggttctgcttttctttctaccatgagcgcccaaggatagacactcctactacctattacctcaaatagcctacatttctttccgaaaatttattggttagatatttttctttttttttttaatttaaagaccagtgtgatcgtgtattggttagattttttaattggttagatttcaaccagaataaaaattgtaataatnac

SEQ ID NO: 287894 - DNA, 2602 bp, Homo sapiens
  misc_feature (2)..(3): n is a, c, g, or t
tnngtagcgctcccttttgggatcaacgagctgtgtggcgcctgtgcggcttctgagagaccggctggtggcgcttggcggcttcctgccaatccacccttctcctcccgcgcaagggggcaatcccaatcccaccaccgggaacacccaggccaaaagaacgggagttacactcaaagtcttcccccttcttatcactcctgccgatttccctcttcctttttgcacgcctccactcttccccaccggaaacgccgccccttcctcctacagttcctcccagcagtccctcaacgcctgtcttccctcgcgcgtagagagtgactcgaaggaccccctctcctcttcgctgcagcccctccccatgcacgctgggagactcttggaggggataaggtggggcccggagaggaagagaagacaatcggattggataggcagctgccatggcaactggaggctgtggttatattgtcatagtaaccgatgtgtgcggacagggtcaccctccccttggccaatggattcccaggaaaccacccagggttccccgttggcttcccttccatctaaaggcctcccccaagttaggaatcgatatagttctccccggtggtgaagtccacttcctcctcccttcccacttcccacagcaactggggggacaccccgaggcattcaccatgggcttttccacccgcctgcgagcgggaaccacctccgtagtttcctctcagagccgggcgtggagagggctgggcctgcgaagaggatgcatggcctggaggctggcgggcggcgggctggagtcgggagggcgaggcgacagcgccaagcggcgaggaagggcaaggggtttccccacaactgccttgggctctgggaggcgggatcccgcctggacggggtccctgagggaggagagcggcacacgacagccgcgatgccttccctgccgacggggatagccgacttctggcgagtcgacccctcccccaaatccaccccacccgcgtactccctcctgacctagctgtcgcgagcctgccgcgaggaggccagggtgagggtgggaacacatcctagaaggctaacacgtggttttctatcatttaagccggggacaagccggaaggctgactagcgccatcactctgataggcaccccgcagtggggatcctgcttgattattaaaggcagacctccaagttcctccctgctctgcaacctttctcttctcacgggtctgcagtgttttaaaagtcgtcattctgtgtcgttgagttagagaggaaaacatcggataaaagaggatcaagaagaacgaaccctagatacatctgtctggtgaaaggagtctaggaaaagaagtttcattcttagaacaaatctttttggatatttattatgtgtgttttgtgtcaggtttcgggccaaaaagctgaaataaagaacgaagtcaataataatatgaagtgtatgagaaatagctggaaaattcatcatccatgacttgaagaaattgacgttttacaagttatattttcggttcgtattgtggagtcacttaaggagctatcccaaagtactttaggatatgtaactatataaaaccttccaagaatgcagccctcataggatagttaaaataaggattttaatgggctattttgatttggtttggtctggtttggctacctgattcctgctgtctttttctacgccaggtgaagaggcactttcaagatccttctctgagacctgcaccaataagactataccaatgttcagttgaaacatcagacactgttctggttatgatggacaccacagtgaaagagacctggtccctgccttgaggaaacccaactgctggtagagagctcagagtaatgattaggatgcaatatgagggatgcagtaattgggatctacttctgggaaccgtcacagcctgagaaagatggcatgccctgaatggaattcacagagaattattttaagtcatgctactggccccgcccagttatgtaacaacttgcatttcctcaattctctggaatgtggccagtcaggaacttccacatttggttttttttttttcccccatttgtgggtaagaaagtaaaagaggcaggaaaactgaattgagaaagaagaaagaataggggaagagagaaagaaaaaagaaaaccatgaagcctggaagaggagaaagaagagatagatgagcaaagaagcacattgcctggtggtagtaatagttgtcagacacccatctattataatctgttttccatgggagattttaagaagaggctagatccccagtctgtcttaaaatcaagaaaagggactctgttgcctctaaagtatacttccagactcagcaatctctaaattctgagtggggcatccctagttttgctgcctaaaatctatgacagttggaaatgattccatttaagatccagttcaagaagctatacaccctgaggaactttatattgccatttagaggaccgatattctccagattgcttgagcccaggagtttgagaccagcctgggcaacatggcaaaactccatctctaccaaaa

SEQ ID NO: 287895 - DNA, 2026 bp, Homo sapiens
  misc_feature (2)..(3): n is a, c, g, or t
tnngtagcgctcccttttgggatcaacgagctgtgtggcgcctgtgcggcttctgagagaccggctggtggcgcttggcggcttcctgccaatccacccttctcctcccgcgcaagggggcaatcccaatcccaccaccgggaacacccaggccaaaagaacgggagttacactcaaagtcttcccccttcttatcactcctgccgatttccctcttcctttttgcacgcctccactcttccccaccggaaacgccgccccttcctcctacagttcctcccagcagtccctcaacgcctgtcttccctcgcgcgtagagagtgactcgaaggaccccctctcctcttcgctgcagcccctccccatgcacgctgggagactcttggaggggataaggtggggcccggagaggaagagaagacaatcggattggataggcagctgccatggcaactggaggctgtggttatattgtcatagtaaccgatgtgtgcggacagggtcaccctccccttggccaatggattcccaggaaaccacccagggttccccgttggcttcccttccatctaaaggcctcccccaagttaggaatcgatatagttctccccggtggtgaagtccacttcctcctcccttcccacttcccacagcaactggggggacaccccgaggcattcaccatgggcttttccacccgcctgcgagcgggaaccacctccgtagtttcctctcagagccgggcgtggagagggctgggcctgcgaagaggatgcatggcctggaggctggcgggcggcgggctggagtcgggagggcgaggcgacagcgccaagcggcgaggaagggcaaggggtttccccacaactgccttgggctctgggaggcgggatcccgcctggacggggtccctgagggaggagagcggcacacgacagccgcgatgccttccctgccgacggggatagccgacttctggcgagtcgacccctcccccaaatccaccccacccgcgtactccctcctgacctagctgtcgcgagcctgccgcgaggaggccagggtgagggtgggaacacatcctagaaggctaacacgtggttttctatcatttaagccggggacaagccggaaggctgactagcgccatcactctgataggcaccccgcagtggggatcctgcttgattattaaaggcagacctccaagttcctccctgctctgcaacctttctcttctcacgggtctgcagtgttttaaaagtcgtcattctgtgtcgttgagttagagaggaaaacatcggataaaagaggatcaagaagaacgaaccctagatacatctgtctggtgaaaggagtctaggaaaagaagtttcattcttagaacaaatctttttggatatttattatgtgtgttttgtgtcaggtttcgggccaaaaagctgaaataaagaacgaagtcaataataatatgaagtgtatgagaaatagctggaaaattcatcatccatgacttgaagaaattgacgttttacaagttatattttcggttcgtattgtggagtcacttaaggagctatcccaaagtactttaggatatgtaactatataaaaccttccaagaatgcagccctcataggatagttaaaataaggattttaatgggctattttgatttggtttggtctggtttggctacctgattcctgctgtctttttctacgccaggtgaagaggcactttcaagatccttctctgagacctgcaccaataagactataccaatgttcagttgaaacatcagacactgttctggttatgatggacaccacagtgaaagagacctggtccctgccttgaggaaacccaactgctggtagagagctcagagtaatgattaggatgcaatatgagggatgcagtaattgggatctacttctgggaaccgtcacagcctgagaaagatggcatgccctgaatggaattcacagagaattattttaagtaaaagaagtttaaagttaaa

SEQ ID NO: 287896 - DNA, 1583 bp, Homo sapiens
  misc_feature (2)..(3): n is a, c, g, or t
tnngtagcgctcccttttgggatcaacgagctgtgtggcgcctgtgcggcttctgagagaccggctggtggcgcttggcggcttcctgccaatccacccttctcctcccgcgcaagggggcaatcccaatcccaccaccgggaacacccaggccaaaagaacgggagttacactcaaagtcttcccccttcttatcactcctgccgatttccctcttcctttttgcacgcctccactcttccccaccggaaacgccgccccttcctcctacagttcctcccagcagtccctcaacgcctgtcttccctcgcgcgtagagagtgactcgaaggaccccctctcctcttcgctgcagcccctccccatgcacgctgggagactcttggaggggataaggtggggcccggagaggaagagaagacaatcggattggataggcagctgccatggcaactggaggctgtggttatattgtcatagtaaccgatgtgtgcggacagggtcaccctccccttggccaatggattcccaggaaaccacccagggttccccgttggcttcccttccatctaaaggcctcccccaagtttcgggccaaaaagctgaaataaagaacgaagtcaataataatatgaagtgtatgagaaatagctggaaaattcatcatccatgacttgaagaaattgacgttttacaagttatattttcggtgaagaggcactttcaagatccttctctgagacctgcaccaataagactataccaatgttcagttgaaacatcagacactgttctggttatgatggacaccacagtgaaagagacctggtccctgccttgaggaaacccaactgctggtagagagctcagagtaatgattaggatgcaatatgagggatgcagtaattgggatctacttctgggaaccgtcacagcctgagaaagatggcatgccctgaatggaattcacagagaattattttaagtcatgctactggccccgcccagttatgtaacaacttgcatttcctcaattctctggaatgtggccagtcaggaacttccacatttggttttttttttttcccccatttgtgggtaagaaagtaaaagaggcaggaaaactgaattgagaaagaagaaagaataggggaagagagaaagaaaaaagaaaaccatgaagcctggaagaggagaaagaagagatagatgagcaaagaagcacattgcctggtggtagtaatagttgtcagacacccatctattataatctgttttccatgggagattttaagaagaggctagatccccagtctgtcttaaaatcaagaaaagggactctgttgcctctaaagtatacttccagactcagcaatctctaaattctgagtggggcatccctagttttgctgcctaaaatctatgacagttggaaatgattccatttaagatccagttcaagaagctatacaccctgaggaactttatattgccatttagaggaccgatattctccagattgcttgagcccaggagtttgagaccagcctgggcaacatggcaaaactccatctctaccaaaa

SEQ ID NO: 287897 - DNA, 2135 bp, Homo sapiens
gccagcaggacgtggctcagtttgccgatttccgggaagtgctgactacaagggcaacccagctctcagaggaactggcccagctccgggatgcctatcagaagcagaaggagcagctgcggcaacaactagaagcccctccaagccagagggatgggcactttctccaggaaagccggcgactctctgcccagtttgaaaatctcatggcagagagccgccaggacctggaggaggagtatgagcctcagttcctgcggctcctagagaggaaagaagctgggaccaaagctctgcagagaacccaggctgagatccaggaaatgaaggaggctctgagacccctgcaagcagaggcccggcagctccgcctgcaaaacaggaacctggaggaccagatcgcacttgtgaggcaaaaacgagatgaagaggtgcagcagtacagggaacagctggaggaaatggaagaacgccagaggcagttaagaaatggggtgcaactccagcaacagaagaacaaagagatggaacagctaaggctcagtcttgctgaagagctctctacttataaggctatgctactacccaagagcctggaacaggctgatgctcccacttctcaggcaggtggaatggagacacagtctcaaggggctgtttagaaatatatggccaaatctgtaacccggaaacagcaaaaaacttcttagcaaaggatcactaagtaccctttggatgtactcttccaaccagacaagagtgccagaaacttggcaagcaattcatcctgtggaagttgcaaatactggctgacctgcttaaaaagattctagagttggccggaggcagaacatgtcaactctttgctggattctatttcatctgctgttgatactgatctcaatgcaccaaggaaaggaaagatgagcctcctgtcttccagcaacaaccctcacatatgcactgagtaaaggatgaatgtatggacacatctgggagtattttaaagaatgtatcttgccttgtgttgacccaaaccaaaaacatttttgaggggcacatgtggggtcaaaaagatagccaatttccattacatgggtttacaatttccattcttttgtgccacgagtgttagaatttaaatgaatacttttacaaagtctactttttgttcaaggatatgctgacccatatagtttactcttaaaattgtgtcaaggtatttctcactatactctaaaacaactagacttgaaaagaaaccatttgagatttgaatctaatggttaacgctattcagattttcccaaagatcttacctcatgaaagtagttctgggtcagaatgatctactcagttaaaaaacaacaacaacaaaaaactaagcgattgggaaaaaacaggaattttatctggttattgcatctggtgatagaggccttcaaagcctattatttctaacctaagtaaaggccccagtgaaaaacatactggggaaataaaacctctgagaaaaggttcaagcaccttttccaaatttaaatcttgccttaaattctctctaccacactgcctttgacactcttggaagtccatgtagttctctacagacagacttcaaagaaacgttaccttatcaaagactaatctgtgccacctctgattcagtgttttatgtctttcactttccctgggaaggagtaaagttcttttctacagctctgggactattacatttaattctgctcttgatagtcaaagaccatggacaacaactgtcatctgaaggactcttctagaagccagagactggtgtttgatggatgttttatactaaataaaacccatcagcatggggttatgtagaaaagcaatttattccattttaagcacttacacagttagtcatggagagtaacaggcctgctggtgaaacaggtcacccaaaatggagatggcatcaaactagtggtcaaggactaactcctaaaaaaaaaaagcaactcttatcaaggattaatttaatttttaaaacaaatacaagttattgattcactcttcccaacttgacagtctacctgtggtataactgtcaggtaaaaacatacatctttacaacttggtggtcccaagtt

SEQ ID NO: 287898 - DNA, 1894 bp, Homo sapiens
gaggattttcttatactgtgtttgaatccacatgactgataatatgcttaatgtttgagaaattataaccttgcaattgaggttaatgatctactaactacctttgtgttgatcagattgtgtacaatctggaaaagacaacgactaatccaaagaaatgaaactacagaatttcaggcattgtaattatacctgtaagaagttaacctagcagagaaaacgtttaactatccctcccatcaccatcaccattcattctatttgacaaacaggaggcatccaaatatttgctaggggaaagtcatccctgatcatccataaatcacactgtaacaatctcttctcaacaaagcctgcagtaactaaacctcagaagttcactgttataaactttttctttcaactttacagggctgtttagaaatatatggccaaatctgtaacccggaaacagcaaaaaacttcttagcaaaggatcactaagtaccctttggatgtactcttccaaccagacaagagtgccagaaacttggcaagcaattcatcctgtggaagttgcaaatactggctgacctgcttaaaaagattctagagttggccggaggcagaacatgtcaactctttgctggattctatttcatctgctgttgatactgatctcaatgcaccaaggaaaggaaagatgagcctcctgtcttccagcaacaaccctcacatatgcactgagtaaaggatgaatgtatggacacatctgggagtattttaaagaatgtatcttgccttgtgttgacccaaaccaaaaacatttttgaggggcacatgtggggtcaaaaagatagccaatttccattacatgggtttacaatttccattcttttgtgccacgagtgttagaatttaaatgaatacttttacaaagtctactttttgttcaaggatatgctgacccatatagtttactcttaaaattgtgtcaaggtatttctcactatactctaaaacaactagacttgaaaagaaaccatttgagatttgaatctaatggttaacgctattcagattttcccaaagatcttacctcatgaaagtagttctgggtcagaatgatctactcagttaaaaaacaacaacaacaaaaaactaagcgattgggaaaaaacaggaattttatctggttattgcatctggtgatagaggccttcaaagcctattatttctaacctaagtaaaggccccagtgaaaaacatactggggaaataaaacctctgagaaaaggttcaagcaccttttccaaatttaaatcttgccttaaattctctctaccacactgcctttgacactcttggaagtccatgtagttctctacagacagacttcaaagaaacgttaccttatcaaagactaatctgtgccacctctgattcagtgttttatgtctttcactttccctgggaaggagtaaagttcttttctacagctctgggactattacatttaattctgctcttgatagtcaaagaccatggacaacaactgtcatctgaaggactcttctagaagccagagactggtgtttgatggatgttttatactaaataaaacccatcagcatggggttatgtagaaaagcaatttattccattttaagcacttacacagttagtcatggagagtaacaggcctgctggtgaaacaggtcacccaaaatggagatggcatcaaactagtggtcaaggactaactcctaaaaaaaaaaagcaactcttatcaaggattaatttaatttttaaaacaaatacaagttattgattcactcttcccaacttgacagtctacctgtggtataactgtcaggtaaaaacatacatctttacaacttggtggtcccaagtt

SEQ ID NO: 287899 - DNA, 2055 bp, Homo sapiens
gccagcaggacgtggctcagtttgccgatttccgggaagtgctgactacaagggcaacccagctctcagaggaactggcccagctccgggatgcctatcagaagcagaaggagcagctgcggcaacaactagaagcccctccaagccagagggatgggcactttctccaggaaagccggcgactctctgcccagtttgaaaatctcatggcagagagccgccaggacctggaggaggagtatgagcctcagttcctgcggctcctagagaggaaagaagctgggaccaaagctctgcagagaacccaggctgagatccaggaaatgaaggaggctctgagacccctgcaagcagaggcccggcagctccgcctgcaaaacaggaacctggaggaccagatcgcacttgtgaggcaaaaacgagatgaagaggtgcagcagtacagggaacagctggaggaaatggaagaacgccagaggcagttaagaaatggggtgcaactccagcaacagaagaacaaagagatggaacagctaaggctcagtcttgctgaagagctctctacttataagggctgtttagaaatatatggccaaatctgtaacccggaaacagcaaaaaacttcttagcaaaggatcactaagtaccctttggatgtactcttccaaccagacaagagtgccagaaacttggcaagcaattcatcctgtggaagttgcaaatactggctgacctgcttaaaaagattctagagttggccggaggcagaacatgtcaactctttgctggattctatttcatctgctgttgatactgatctcaatgcaccaaggaaaggaaagatgagcctcctgtcttccagcaacaaccctcacatatgcactgagtaaaggatgaatgtatggacacatctgggagtattttaaagaatgtatcttgccttgtgttgacccaaaccaaaaacatttttgaggggcacatgtggggtcaaaaagatagccaatttccattacatgggtttacaatttccattcttttgtgccacgagtgttagaatttaaatgaatacttttacaaagtctactttttgttcaaggatatgctgacccatatagtttactcttaaaattgtgtcaaggtatttctcactatactctaaaacaactagacttgaaaagaaaccatttgagatttgaatctaatggttaacgctattcagattttcccaaagatcttacctcatgaaagtagttctgggtcagaatgatctactcagttaaaaaacaacaacaacaaaaaactaagcgattgggaaaaaacaggaattttatctggttattgcatctggtgatagaggccttcaaagcctattatttctaacctaagtaaaggccccagtgaaaaacatactggggaaataaaacctctgagaaaaggttcaagcaccttttccaaatttaaatcttgccttaaattctctctaccacactgcctttgacactcttggaagtccatgtagttctctacagacagacttcaaagaaacgttaccttatcaaagactaatctgtgccacctctgattcagtgttttatgtctttcactttccctgggaaggagtaaagttcttttctacagctctgggactattacatttaattctgctcttgatagtcaaagaccatggacaacaactgtcatctgaaggactcttctagaagccagagactggtgtttgatggatgttttatactaaataaaacccatcagcatggggttatgtagaaaagcaatttattccattttaagcacttacacagttagtcatggagagtaacaggcctgctggtgaaacaggtcacccaaaatggagatggcatcaaactagtggtcaaggactaactcctaaaaaaaaaaagcaactcttatcaaggattaatttaatttttaaaacaaatacaagttattgattcactcttcccaacttgacagtctacctgtggtataactgtcaggtaaaaacatacatctttacaacttggtggtcccaagtt

SEQ ID NO: 287900 - DNA, 1154 bp, Homo sapiens
atgttaagtaccaggtagaaatctctctgactttaaggagctttggacacaaaaacttttccttaaacaagccatttattttctaaacatggacttccactagttgtgtaactctcctagaattctagccaatatttaataattgttgccacacttttgtatttcaacttaagtattttatattattaaaaactaccaattatcttaacaaacctgcacatggagggagaggtatatgaaactcagcccactaactagaccaaaatcctcctcaatgacactaaggttgtaatactaaaaagtcccaatcaccctcccaggattctattaaagcaagctgtggttaacagacaagatgcctttttcgtcatcattttcaaaagcattgtcactttttttccaagacacaacttctttgaacctgtttcataacctatcatataaataccagcctcaatactgctatcaagattaaacaatgaacaaaaaagtgttttataagtaagagtggacaatgtgagtttttattgtttggctcattagaaatgttcttggccatctcatgcaggaacagctggaggaaatggaagaacgccagaggcagttaagaaatggggtgcaactccagcaacagaagaacaaagagatggaacagctaaggctcagtcttgctgaagagctctctacttataagtcagtttctgctgctatacaaatctcatctaatactggctgaggggatggtgggagggcttagggaaaattttaccttagaatcaaaaacaaaaagaggatttgggaaatgattttcaaattgtgcttatccaaaaacacatggaaaatggctctctctttttaaagggctatgctactacccaagagcctggaacaggctgatgctcccacttctcaggcaggtggaatggagacacagtctcaaggtgatctttgtgaagagaagagtggtgtttgcattgttactgctttcctaacaatactaattaatgccttaaaaacaggccggacggggtggctcacgcctgtaatcccagcactttgggaggctgaggagggtggatcacctggagtcaggagttcaagaccagcctggccaacatggcaaaactccatctccactaaaaatacaaaaatta

SEQ ID NO: 287901 - DNA, 2425 bp, Homo sapiens
atgttaagtaccaggtagaaatctctctgactttaaggagctttggacacaaaaacttttccttaaacaagccatttattttctaaacatggacttccactagttgtgtaactctcctagaattctagccaatatttaataattgttgccacacttttgtatttcaacttaagtattttatattattaaaaactaccaattatcttaacaaacctgcacatggagggagaggtatatgaaactcagcccactaactagaccaaaatcctcctcaatgacactaaggttgtaatactaaaaagtcccaatcaccctcccaggattctattaaagcaagctgtggttaacagacaagatgcctttttcgtcatcattttcaaaagcattgtcactttttttccaagacacaacttctttgaacctgtttcataacctatcatataaataccagcctcaatactgctatcaagattaaacaatgaacaaaaaagtgttttataagtaagagtggacaatgtgagtttttattgtttggctcattagaaatgttcttggccatctcatgcaggaacagctggaggaaatggaagaacgccagaggcagttaagaaatggggtgcaactccagcaacagaagaacaaagagatggaacagctaaggctcagtcttgctgaagagctctctacttataagtcagtttctgctgctatacaaatctcatctaatactggctgaggggatggtgggagggcttagggaaaattttaccttagaatcaaaaacaaaaagaggatttgggaaatgattttcaaattgtgcttatccaaaaacacatggaaaatggctctctctttttaaagggctatgctactacccaagagcctggaacaggctgatgctcccacttctcaggcaggtggaatggagacacagtctcaaggggctgtttagaaatatatggccaaatctgtaacccggaaacagcaaaaaacttcttagcaaaggatcactaagtaccctttggatgtactcttccaaccagacaagagtgccagaaacttggcaagcaattcatcctgtggaagttgcaaatactggctgacctgcttaaaaagattctagagttggccggaggcagaacatgtcaactctttgctggattctatttcatctgctgttgatactgatctcaatgcaccaaggaaaggaaagatgagcctcctgtcttccagcaacaaccctcacatatgcactgagtaaaggatgaatgtatggacacatctgggagtattttaaagaatgtatcttgccttgtgttgacccaaaccaaaaacatttttgaggggcacatgtggggtcaaaaagatagccaatttccattacatgggtttacaatttccattcttttgtgccacgagtgttagaatttaaatgaatacttttacaaagtctactttttgttcaaggatatgctgacccatatagtttactcttaaaattgtgtcaaggtatttctcactatactctaaaacaactagacttgaaaagaaaccatttgagatttgaatctaatggttaacgctattcagattttcccaaagatcttacctcatgaaagtagttctgggtcagaatgatctactcagttaaaaaacaacaacaacaaaaaactaagcgattgggaaaaaacaggaattttatctggttattgcatctggtgatagaggccttcaaagcctattatttctaacctaagtaaaggccccagtgaaaaacatactggggaaataaaacctctgagaaaaggttcaagcaccttttccaaatttaaatcttgccttaaattctctctaccacactgcctttgacactcttggaagtccatgtagttctctacagacagacttcaaagaaacgttaccttatcaaagactaatctgtgccacctctgattcagtgttttatgtctttcactttccctgggaaggagtaaagttcttttctacagctctgggactattacatttaattctgctcttgatagtcaaagaccatggacaacaactgtcatctgaaggactcttctagaagccagagactggtgtttgatggatgttttatactaaataaaacccatcagcatggggttatgtagaaaagcaatttattccattttaagcacttacacagttagtcatggagagtaacaggcctgctggtgaaacaggtcacccaaaatggagatggcatcaaactagtggtcaaggactaactcctaaaaaaaaaaagcaactcttatcaaggattaatttaatttttaaaacaaatacaagttattgattcactcttcccaacttgacagtctacctgtggtataactgtcaggtaaaaacatacatctttacaacttggtggtcccaagtt

SEQ ID NO: 287902 - DNA, 840 bp, Homo sapiens
  misc_feature (41)..(41): n is a, c, g, or t
  misc_feature (45)..(45): n is a, c, g, or t
cagtgtacgctcgatacggatcgaggcgtctgtcgggctgnagcnggggaggagcccagtggaggcgccctcccgaagcgccactgcccatgctgaccacccagccctccggctgctgatgtcatgagtaacaccactgtgcccaatgccccccaggccaacagcgactccatggtgggctatgtgttggggcccttcttcctcatcaccctggtcggggtggtggtggctgtggtaatgtatgtacagaagaaaaagcgggtggaccggctgcgccatcacctgctccccatgtacagctatgacccagctgaggaactgcatgaggctgagcaggagctgctctctgacatgggagaccccaaggtggtacatggctggcagagtggctaccagcacaagcggatgccactgctggatgtcaagacgtgacctgacccccttgccccacccttcagagcctggggtcctggactgcctggggccctgccatctgcttcccctgctgtcacctggctccccctgctgggtgctgggtctccatttctccctccacccaccctcagcagcatctgcttcccatgccctcaccatcacctcactgcccccaggccttctgccctttgtgggtgttgagctcaccgcccacccacaggcactcatgggaagaggctttccttctgggatggcggcggctggtagacacctttgctttctctagccctcctgggctgggcttgggcacaaatccccaggcaggctttggagttgtttccatggtgatggggccagatgtatagtattcagtatatattttgtaaataaaatgttttgtggcta

SEQ ID NO: 287903 - DNA, 870 bp, Homo sapiens
ctttgatcacgcgcctgacggcttttccggggcccgggagccaaccgagggcgttcctgtcggggctgcagcggcgggagggagcccagtggaggcgccctcccgaagcgccactgcccatgctgaccacccagccctccggctgctgatgtcatgagtaacaccactgtgcccaatgccccccaggccaacagcgactccatggtgggctatgtgttggggcccttcttcctcatcaccctggtcggggtggtggtggctgtggtaatgtatgtacagaagaaaaagcgggtggaccggctgcgccatcacctgctccccatgtacagctatgacccagctgaggaactgcatgaggctgagcaggagctgctctctgacatgggagaccccaaggtggtacatggctggcagagtggctaccagcacaagcggatgccactgctggatgtcaagacgtgacctgacccccttgccccacccttcagagcctggggtcctggactgcctggggccctgccatctgcttcccctgctgtcacctggctccccctgctgggtgctgggtctccatttctccctccacccaccctcagcagcatctgcttcccatgccctcaccatcacctcactgcccccaggccttctgccctttgtgggtgttgagctcaccgcccacccacaggcactcatgggaagaggctttccttctgggatggcggcggctggtagacacctttgctttctctagccctcctgggctgggcttgggcacaaatccccaggcaggctttggagttgtttccatggtgatggggccagatgtatagtattcagtatatattttgtaaataaaatgttttgtggcta

SEQ ID NO: 287904 - DNA, 1122 bp, Homo sapiens
ctttgatcacgcgcctgacggcttttccggggcccgggagccaaccgagggcgttcctgtcggggctgcagcggcgggaggtaaggcatggccaggccggctgggctgcagagcgccggcacgggtccacgcctcgggtgacgggcttccaggatgttcgggcgcggggcggcccatccgcatcccccaacacccccacctccggcctgagcctcccagcgccgtgggaaccacctcctgtccgctgttgctggcccgcatcctagcagcggcctgacgccctccccaccctggcatgcccccttgacctgggacgatgagcatacgactggggagcccagtggaggcgccctcccgaagcgccactgcccatgctgaccacccagccctccggctgctgatgtcatgagtaacaccactgtgcccaatgccccccaggccaacagcgactccatggtgggctatgtgttggggcccttcttcctcatcaccctggtcggggtggtggtggctgtggtaatgtatgtacagaagaaaaagcgggtggaccggctgcgccatcacctgctccccatgtacagctatgacccagctgaggaactgcatgaggctgagcaggagctgctctctgacatgggagaccccaaggtggtacatggctggcagagtggctaccagcacaagcggatgccactgctggatgtcaagacgtgacctgacccccttgccccacccttcagagcctggggtcctggactgcctggggccctgccatctgcttcccctgctgtcacctggctccccctgctgggtgctgggtctccatttctccctccacccaccctcagcagcatctgcttcccatgccctcaccatcacctcactgcccccaggccttctgccctttgtgggtgttgagctcaccgcccacccacaggcactcatgggaagaggctttccttctgggatggcggcggctggtagacacctttgctttctctagccctcctgggctgggcttgggcacaaatccccaggcaggctttggagttgtttccatggtgatggggccagatgtatagtattcagtatatattttgtaaataaaatgttttgtggcta

SEQ ID NO: 287905 - DNA, 1215 bp, Homo sapiens
ctttgatcacgcgcctgacggcttttccggggcccgggagccaaccgagggcgttcctgtcggggctgcagcggcgggagggagcccagtggaggcgccctcccgaagcgccactgcccatgctgaccacccagccctccggctgctgatgtcatgagtaacaccactgtgcccaatgccccccaggccaacagcgactccatggtgggctatgtgttggggcccttcttcctcatcaccctggtcggggtggtggtggctgtggtaatgtatgtacagaagaaaaagcgggtggaccggctgcgccatcacctgctccccatgtacagctatgacccagctgaggaactgcatgaggctgagcaggagctgctctctgacatgggagaccccaaggtggtacatggctggcagagtggctaccagcacaagcggatgccactgctggatgtcaagacgtgacctgacccccttgccccacccttcagagcctggggtcctggactgcctggggccctgccatctgcttcccctgctgtcacctggctccccctgctgggtgctgggtctccatttctccctccacccaccctcagcagcatctgcttcccatgccctcaccatcacctcactgcccccaggccttctgccctttgtgggtgttgagctcaccgcccacccacaggcactcatgggaagaggctttccttctgggatggcggcggctggtagacacctttgctttctctagccctcctgggctgggcttgggcacaaatccccaggcaggctttggagttgtttccatggtgatggggccagatgtatagtattcagtatatattttgtaaataaaatgttttgtggctaaaaaaaaaaaaaaactcaaaaaaaaacactaaatataaacgcacgaaccacacttcactccagagcgacgccgatcccaattccaccgctcttggcggtacaacaacaaaaactctggggggggggcccttccccatattcccctttatgaaggccgttccacaacaatcggccggtgtcaacacaccccggaccggagaaacaccgggtgtcccacaagttaactgccctgaacgaataacgcctttcgccaagggggataatccaaaaaggcccccccatatccttttcaaaaaattgcctcgcttgataacaggctctttttaccacaggcgccatttgaat

SEQ ID NO: 287906 - DNA, 810 bp, Homo sapiens
ctttgatcacgcgcctgacggcttttccggggcccgggagccaaccgagggcgttcctgtcggggctgcagcggcgggagggagcccagtggaggcgccctcccgaagcgccactgcccatgctgaccacccagccctccggctgctgatgtcatgagtaacaccactgtgcccaatgccccccaggccaacagcgactccatggtaatgtatgtacagaagaaaaagcgggtggaccggctgcgccatcacctgctccccatgtacagctatgacccagctgaggaactgcatgaggctgagcaggagctgctctctgacatgggagaccccaaggtggtacatggctggcagagtggctaccagcacaagcggatgccactgctggatgtcaagacgtgacctgacccccttgccccacccttcagagcctggggtcctggactgcctggggccctgccatctgcttcccctgctgtcacctggctccccctgctgggtgctgggtctccatttctccctccacccaccctcagcagcatctgcttcccatgccctcaccatcacctcactgcccccaggccttctgccctttgtgggtgttgagctcaccgcccacccacaggcactcatgggaagaggctttccttctgggatggcggcggctggtagacacctttgctttctctagccctcctgggctgggcttgggcacaaatccccaggcaggctttggagttgtttccatggtgatggggccagatgtatagtattcagtatatattttgtaaataaaatgttttgtggcta

SEQ ID NO: 287907 - DNA, 1348 bp, Homo sapiens
  misc_feature (41)..(41): n is a, c, g, or t
  misc_feature (45)..(45): n is a, c, g, or t
cagtgtacgctcgatacggatcgaggcgtctgtcgggctgnagcnggggaggagcccagtggaggcgccctcccgaagcgccactgcccatgctgaccacccagccctccggctgctgatgtcatgagtaacaccactgtgcccaatgccccccaggccaacagcgactccatggtgggctatgtgttggggcccttcttcctcatcaccctggtcggggtggtggtggctgtggtaaggagccctcatatacacacagacacccacagctttgctaaggcaggggctgggtgggcctggtccagtctgcacagagtccccactgtcctgttaagggagtgaagggtgtggaggtgggcctctctctgcctgtgggccttcctgggctcagcagcccccacagtgctgtgtctctgttgcaggtaatgtatgtacagaagaaaaagcggtgagtgtccctgtcccccacccgccctaaccccatcacccgttctgaaattcctgctcataggctctgacttttctgtaagatgtccctcagccatcctgatacaagcctgaaatttgttttccctgccccagcctcaggttactcactggggaaagcccctttgtagaatcagggttgtattcttggaggtatagtgtgtcccaaaaggcacccactggaattgcccctgcctgggaaagggaggagagacgaggcagccaggtgtttgatgagggttggggggacctcctagctgagtcccctcccctgctccccagggtggaccggctgcgccatcacctgctccccatgtacagctatgacccagctgaggaactgcatgaggctgagcaggagctgctctctgacatgggagaccccaaggtggtacatggctggcagagtggctaccagcacaagcggatgccactgctggatgtcaagacgtgacctgacccccttgccccacccttcagagcctggggtcctggactgcctggggccctgccatctgcttcccctgctgtcacctggctccccctgctgggtgctgggtctccatttctccctccacccaccctcagcagcatctgcttcccatgccctcaccatcacctcactgcccccaggccttctgccctttgtgggtgttgagctcaccgcccacccacaggcactcatgggaagaggctttccttctgggatggcggcggctggtagacacctttgctttctctagccctcctgggctgggcttgggcacaaatccccaggcaggctttggagttgtttccatggtgatggggccagatgtatagtattcagtatatattttgtaaataaaatgttttgtggcta

SEQ ID NO: 287908 - DNA, 844 bp, Homo sapiens
ctttgatcacgcgcctgacggcttttccggggcccgggagccaaccgagggcgttcctgtcggggctgcagcggcgggagggagcccagtggaggcgccctcccgaagcgccactgcccatgctgaccacccagccctccggctgctgatgtcatgagtaacaccactgtgcccaatgccccccaggccaacagcgactccatggtgggctatgtgttggggcccttcttcctcatcaccctggtcggggtggtggtggctgtgggtggaccggctgcgccatcacctgctccccatgtacagctatgacccagctgaggaactgcatgaggctgagcaggagctgctctctgacatgggagaccccaaggtggtacatggctggcagagtggctaccagcacaagcggatgccactgctggatgtcaagacgtgacctgacccccttgccccacccttcagagcctggggtcctggactgcctggggccctgccatctgcttcccctgctgtcacctggctccccctgctgggtgctgggtctccatttctccctccacccaccctcagcagcatctgcttcccatgccctcaccatcacctcactgcccccaggccttctgccctttgtgggtgttgagctcaccgcccacccacaggcactcatgggaagaggctttccttctgggatggcggcggctggtagacacctttgctttctctagccctcctgggctgggcttgggcacaaatccccaggcaggctttggagttgtttccatggtgatggggccagatgtatagtattcagtatatattttgtaaataaaatgttttgtggcta

SEQ ID NO: 287909 - DNA, 1072 bp, Homo sapiens
ctttgatcacgcgcctgacggcttttccggggcccgggagccaaccgagggcgttcctgtcggggctgcagcggcgggagggagcccagtggaggcgccctcccgaagcgccactgcccatgctgaccacccagccctccggctgctgatgtcatgagtaacaccactgtgcccaatgccccccaggccaacagcgactccatggtgggctatgtgttggggcccttcttcctcatcaccctggtcggggtggtggtggctgtggtaatgtatgtacagaagaaaaagcgggtggaccggctgcgccatcacctgctccccatgtacagctatgacccagctgaggaactgcatgaggctgagcaggagctgctctctgacatgggagaccccaaggtggtacatggctggcagagtggctaccagcacaagcggatgccactgctggatgtcaagacgtgacctgacccccttgccccacccttcagagcctggggtcctggactgcctggggccctgccatctgcttcccctgctgtcacctggctccccctgctgggtgctgggtctccatttctccctccacccaccctcagcagcatctgcttcccatgccctcaccatcacctcactgcccccaggccttctgccctttgtgggtgttgagctcaccgcccacccacaggcactcatgggaagaggctttccttctgggatggcggcggctggtagacacctttgctttctctagccctcctgggctgggcttgggcacaaatccccaggcaggctttggagttgtttccatggtgatggggccagatgtatagtattcagtatatattttgtaaataaaatgttttgtggctagcctacacacaacagaccgacagaaaacacagagacaacacgacacagaaacacgagcccccgcccgccacgagcgagagcggaagaaccgaccacacacacacccacgccacggccccggccgacgcaacgagccgaacgaccaccgcaaggcagacccacacgaacaacgagccgacgagcgcccggcccgccacacaca

SEQ ID NO: 287910 - DNA, 1523 bp, Homo sapiens
  misc_feature (41)..(41): n is a, c, g, or t
  misc_feature (45)..(45): n is a, c, g, or t
cagtgtacgctcgatacggatcgaggcgtctgtcgggctgnagcnggggaggagcccagtggaggcgccctcccgaagcgccactgcccatgctgaccacccagccctccggctgctgatgtcatgagtaacaccactgtgcccaatgccccccaggccaacagcgactccatggtgggctatgtgttggggcccttcttcctcatcaccctggtcggggtggtggtggctgtggtaaggagccctcatatacacacagacacccacagctttgctaaggcaggggctgggtgggcctggtccagtctgcacagagtccccactgtcctgttaagggagtgaagggtgtggaggtgggcctctctctgcctgtgggccttcctgggctcagcagcccccacagtgctgtgtctctgttgcaggtaatgtatgtacagaagaaaaagcggtgagtgtccctgtcccccacccgccctaaccccatcacccgttctgaaattcctgctcataggctctgacttttctgtaagatgtccctcagccatcctgatacaagcctgaaatttgttttccctgccccagcctcaggttactcactggggaaagcccctttgtagaatcagggttgtattcttggaggtatagtgtgtcccaaaaggcacccactggaattgcccctgcctgggaaagggaggagagacgaggcagccaggtgtttgatgagggttggggggacctcctagctgagtcccctcccctgctccccagggtggaccggctgcgccatcacctgctccccatgtacagctatgacccagctgaggaactgcatgaggctgagcaggagctgctctctgacatgggagaccccaaggtgagcacttgggggccagggggagaatgaggcaaggtgggagtcagccctgttcccagccatactcgtccacactgaaaccagagcctggttctgcttacttgggctgtaactgggtgctgcagactcccagggaacacagcccagccttgtggtgtggtctcctccccgacaggtggtacatggctggcagagtggctaccagcacaagcggatgccactgctggatgtcaagacgtgacctgacccccttgccccacccttcagagcctggggtcctggactgcctggggccctgccatctgcttcccctgctgtcacctggctccccctgctgggtgctgggtctccatttctccctccacccaccctcagcagcatctgcttcccatgccctcaccatcacctcactgcccccaggccttctgccctttgtgggtgttgagctcaccgcccacccacaggcactcatgggaagaggctttccttctgggatggcggcggctggtagacacctttgctttctctagccctcctgggctgggcttgggcacaaatccccaggcaggctttggagttgtttccatggtgatggggccagatgtatagtattcagtatatattttgtaaataaaatgttttgtggcta

SEQ ID NO: 287911 - DNA, 1617 bp, Homo sapiens
ctttgatcacgcgcctgacggcttttccggggcccgggagccaaccgagggcgttcctgtcggggctgcagcggcgggaggtaaggcatggccaggccggctgggctgcagagcgccggcacgggtccacgcctcgggtgacgggcttccaggatgttcgggcgcggggcggcccatccgcatcccccaacacccccacctccggcctgagcctcccagcgccgtgggaaccacctcctgtccgctgttgctggcccgcatcctagcagcggcctgacgccctccccaccctggcatgcccccttgacctgggacgatgagcatacgactggggagcccagtggaggcgccctcccgaagcgccactgcccatgctgaccacccagccctccggctgctgatgtcatgagtaacaccactgtgcccaatgccccccaggccaacagcgactccatggtgggctatgtgttggggcccttcttcctcatcaccctggtcggggtggtggtggctgtggtaatgtatgtacagaagaaaaagcggtgagtgtccctgtcccccacccgccctaaccccatcacccgttctgaaattcctgctcataggctctgacttttctgtaagatgtccctcagccatcctgatacaagcctgaaatttgttttccctgccccagcctcaggttactcactggggaaagcccctttgtagaatcagggttgtattcttggaggtatagtgtgtcccaaaaggcacccactggaattgcccctgcctgggaaagggaggagagacgaggcagccaggtgtttgatgagggttggggggacctcctagctgagtcccctcccctgctccccagggtggaccggctgcgccatcacctgctccccatgtacagctatgacccagctgaggaactgcatgaggctgagcaggagctgctctctgacatgggagaccccaaggtgagcacttgggggccagggggagaatgaggcaaggtgggagtcagccctgttcccagccatactcgtccacactgaaaccagagcctggttctgcttacttgggctgtaactgggtgctgcagactcccagggaacacagcccagccttgtggtgtggtctcctccccgacaggtggtacatggctggcagagtggctaccagcacaagcggatgccactgctggatgtcaagacgtgacctgacccccttgccccacccttcagagcctggggtcctggactgcctggggccctgccatctgcttcccctgctgtcacctggctccccctgctgggtgctgggtctccatttctccctccacccaccctcagcagcatctgcttcccatgccctcaccatcacctcactgcccccaggccttctgccctttgtgggtgttgagctcaccgcccacccacaggcactcatgggaagaggctttccttctgggatggcggcggctggtagacacctttgctttctctagccctcctgggctgggcttgggcacaaatccccaggcaggctttggagttgtttccatggtgatggggccagatgtatagtattcagtatatattttgtaaataaaatgttttgtggcta

SEQ ID NO: 287912 - DNA, 1021 bp, Homo sapiens
ctttgatcacgcgcctgacggcttttccggggcccgggagccaaccgagggcgttcctgtcggggctgcagcggcgggaggtaaggcatggccaggccggctgggctgcagagcgccggcacgggtccacgcctcgggtgacgggcttccaggatgttcgggcgcggggcggcccatccgcatcccccaacacccccacctccggcctgagcctcccagcgccgtgggaaccacctcctgtccgctgttgctggcccgcatcctagcagcggcctgacgccctccccaccctggcatgcccccttgacctgggacgatgagcatacgactggggagcccagtggaggcgccctcccgaagcgccactgcccatgctgaccacccagccctccggctgctgatgtcatgagtaacaccactgtgcccaatgccccccaggccaacagcgactccatggtgggctatgtgttggggcccttcttcctcatcaccctggtcggggtggtggtggctgtggtaatgtatgtacagaagaaaaagcgggtggaccggctgcgccatcacctgctccccatgtacagctatgacccagctgaggaactgcatgaggctgagcaggagctgctctctgacatgggagaccccaaggtggtacatggctggcagagtggctaccagcacaagcggatgccactgctggatgtcaagacgtgacctgacccccttgccccacccttcagagcctggggtcctggactgcctggggccctgccatctgcttcccctgctgtcacctggctccccctgctgggtgctgggtctccatttctccacaggcactcatgggaagaggctttccttctgggatggcggcggctggtagacacctttgctttctctagccctcctgggctgggcttgggcacaaatccccaggcaggctttggagttgtttccatggtgatggggccagatgtatagtattcagtatatattttgtaaataaaatgttttgtggcta

SEQ ID NO: 287913 - DNA, 680 bp, Homo sapiens
cgggagccaaccgagggcgttcctgtcggggctgcagcggcgggaggtaaggcatggccaggccggctgggctgcagagcgccggcacgggtccacgcctcgggtgacgggcttccaggatgttcgggcgcggggcggcccatccgcatcccccaacacccccacctccggcctgagcctcccagcgccgtgggaaccacctcctgtccgctgttgctggcccgcatcctagcagcggcctgacgccctccccaccctggcatgcccccttgacctgggacgatgagcatacgactgggtaagggcaagctcgatgccccgtgccctacggacacgggggtaggtcgctcataccttgccctctgatagagactcaagcgaacctgggtcgcggaccttgggccatcagcgtgcaaactgccccaggacgatctctttgcttctgtcgatggggactgaccctctccacctctgcctgtcagctcaggccaggaggggagggacctgggcggagccccgggtggagacaagaggaaggtgacatcatcttgaagatacaatccagctttacccactcgtgtccaccctggcacacgagacagatgggggagagggtgtttgggctgtatgtctgaggtgacaccagggacaagggcatagaactcaggcatggagcccat

SEQ ID NO: 287914 - DNA, 486 bp, Homo sapiens
cggccgccctggggtcggggcaattgccgcgttgccctgccctccgggatccctgggggcctctgctcctctctttgtggagacgtcgtttcaccggcggcgcgtgaccccggcagctgtccagagacccagagatgtccaatcacaggcgcacggtgcacaggcgcgcagggctgcctggaacgggcccaggcaggcagtgaccgggacctctccggaggggagaggacggtgccctcccgggcaggagctggccaggcaggcgctgcccagggcggcctccctgctggactacggcattgccactgagttatataaagacactatttggggaaggacagcgggtgaggactggcgcggcggcacacgccttgcctgttgtctcagctcttctgggggccaaggccaggagtccagggttacagtgagccgtgatggccagtgcgttccaaaagagagaaacagagagaaagggaatcaggctta

SEQ ID NO: 287915 - DNA, 1614 bp, Homo sapiens
acgtcgagtccggggcggcgcctggaggcggagccgcccgctgcggtaaatggggcagaggccgggaggggtgggggttccccgcgccgcagccatggagcagcttcgcgccgccgcccgtctgcagattgttctgggccacctcggccgcccctcggccggggctgtcgtagctcatcccacttcagggactatttcctctgccagtttccatcctcaacaattccagtatactctggataataatgttctaaccctggaacagagaaaattttatgaagaaaatgggtttctagtaatcaaaaatcttgtacctgatgccgatattcaacgctttcggaatgagtttgaaaaaatctgcagaaaggaggtgaaaccattaggattaacagtaatgagagatgtgaccatttcgaaatccgaatatgctccaagtgagaagatgatcacgaaggtccaggatttccaggaagataaggagctcttcagatactgcactctccccgagattctgaaatatgtggagtgcttcactggacctaatattatggccatgcacacaatgttgataaacaaacctccagattctggcaagaagacgtcccgtcaccccctgcaccaggacctgcactatttccccttcaggcccagcgatctcatcgtttgcgcctggacggcgatggagcacatcagccggaacaacggctgtctggttgtgctcccaggcacacacaagggctccctgaagccccacgattaccccaagtgggaggggggagttaacaaaatgttccacgggatccaggactacgaggaaaacaaggcccgggtgcacctggtgatggagaagggcgacactgttttcttccatcctttgctcatccacggatctggtcagaataaaacccagggattccggaaggcaatttcctgccatttcgccagtgccgattgccactacattgacgtgaagggcaccagtcaagaaaacatcgagaaggaagttgtaggaatagcacataaattctttggagctgaaaatagcgtgaacttgaaggatatttggatgtttcgagctcgacttgtgaaaggagaaagaaccaatctttgaaatagccatctgctataactctttcaacagaaaaccaaaaccaaacgaaatgtctaaggaaaatgttttcttaatgagatgatgtaaccttttctatcacttgttaaaagcagaaaacatgtatcaggtacttaattgcatagagttagttttgcagcacaatggtgttgctttaatggaaaaaaaaacagtaaaagtgaaatattactgttttaaggaaaactaatttagggtggcagccaataaaggtggttggtgtctaatttaagtgttaaatcaatttctttcattcagttagctctttacccaagaagaagtgaatgatttggagcttagggtatgttttgtatcccctttctgataaacccattccctaccaattttatgtcataagagatttttttcccccaaatctagaacaatgtataatacattcacatctagtcaagggcataggaacggtgtcatggagtccaaataaagtggatattcctgctcggaca

SEQ ID NO: 287916 - DNA, 1108 bp, Homo sapiens
gtccggagctgctgagggatcccgggtccttctgttggtctgagaccctggggcgggcggaatcccggagaaagccggagggactccccagtggaagcctgggagctgccgttctcctccctgcctgtgcaaacaggaaggggctggtgatgctggctgcgggcctccctcctggactgcgacattgtcaccaaattctataaagacgtcatgcaggaagtgataacgtgtgctgcgacgttctggaagtaactcgaagctaaaaaagaacaaaaaatcaatgaaaaaatgaaactaaagaaacaatgagatgctatgtcaatatccgtagttatggaatggaaaataaatcttacaaagagatgctggagttatctaagaaatttacaccatactggcctgtgtgcatcagacttttctggaggtcatttattttattcactttttttttttttatgaccaaccgaactttctaatattttgggctggagtcccactaaatgaaataccccttttgaatggcacatatgacttttagggatgcatcttagcatttttatttttttatttttattttcaaaacttcattgatgttttggagttttgtttgttttttgtttttgtgttttttggacatggcctcactctgtcgcccaggctggagtgcagaggcacgatctgggctcactgcaacttcaaactcccgggctcaggtgatcctcctgcagcaggacgagccgcagacaaaactcagacaccggattaaagaagggctgtattaggccgggaacttcggcagacttgcaaccgaggtccctgaaaaagaaattcttggcccttttaagggcttgtaactctaagggtctacgtgaaagtagctcatcccacttcagggactatttcctctgccagtttccatcctcaacaattccagtatactctggataataatgttctaaccctggaacagagaaaattttatgaagaaaatgggtttctagtaatcaaaaatcttgtacctgatgccgatattcaacgctttcggtacagtaacactatttgttattttacaatagtatgtattgtgtgcatgtaatgagaatacaag

SEQ ID NO: 287917 - DNA, 1709 bp, Homo sapiens
attaggaggggggttgttaggggttcggaggaaaagttcggggaacagctaaataggttgttgttgatttggttaaaaaatagtagagggatgatgctaataattaggctgtgggtggttgtgttgattccgcaatgagtacagattataatctgtactcattgggtgggggttccccgcgccgcagccatggagcagcttcgcgccgccgcccgtctgcagattgttctgggccacctcggccgcccctcggccggggctgtcgtagctcatcccacttcagggactatttcctctgccagtttccatcctcaacaattccagtatactctggataataatgttctaaccctggaacagagaaaattttatgaagaaaatgggtttctagtaatcaaaaatcttgtacctgatgccgatattcaacgctttcggaatgagtttgaaaaaatctgcagaaaggaggtgaaaccattaggattaacagtaatgagagatgtgaccatttcgaaatccgaatatgctccaagtgagaagatgatcacgaaggtccaggatttccaggaagataaggagctcttcagatactgcactctccccgagattctgaaatatgtggagtgcttcactggacctaatattatggccatgcacacaatgttgataaacaaacctccagattctggcaagaagacgtcccgtcaccccctgcaccaggacctgcactatttccccttcaggcccagcgatctcatcgtttgcgcctggacggcgatggagcacatcagccggaacaacggctgtctggttgtgctcccaggcacacacaagggctccctgaagccccacgattaccccaagtgggaggggggagttaacaaaatgttccacgggatccaggactacgaggaaaacaaggcccgggtgcacctggtgatggagaagggcgacactgttttcttccatcctttgctcatccacggatctggtcagaataaaacccagggattccggaaggcaatttcctgccatttcgccagtgccgattgccactacattgacgtgaagggcaccagtcaagaaaacatcgagaaggaagttgtaggaatagcacataaattctttggagctgaaaatagcgtgaacttgaaggatatttggatgtttcgagctcgacttgtgaaaggagaaagaaccaatctttgaaatagccatctgctataactctttcaacagaaaaccaaaaccaaacgaaatgtctaaggaaaatgttttcttaatgagatgatgtaaccttttctatcacttgttaaaagcagaaaacatgtatcaggtacttaattgcatagagttagttttgcagcacaatggtgttgctttaatggaaaaaaaaacagtaaaagtgaaatattactgttttaaggaaaactaatttagggtggcagccaataaaggtggttggtgtctaatttaagtgttaaatcaatttctttcattcagttagctctttacccaagaagaagtgaatgatttggagcttagggtatgttttgtatcccctttctgataaacccattccctaccaattttatgtcataagagatttttttcccccaaatctagaacaatgtataatacattcacatctagtcaagggcataggaacggtgtcatggagtccaaataaagtggatattcctgctcggaca

SEQ ID NO: 287918 - DNA, 1730 bp, Homo sapiens
cggccgccctggggtcggggcaattgccgcgttgccctgccctccgggatccctgggggcctctgctcctctctttgtggagacgtcgtttcaccggcggcgcgtgaccccggcagctgtccagagacccagagatgtccaatcacaggcgcacggtgcacaggcgcgcagggctgcctggaacgggcccaggcaggcagtgaccgggacctctccggaggggagaggacggtgccctcccgggcaggagctggccaggcaggcgctgcccagggcggcctccctgctggactacggcattgccactgagttatataaagacactatttggggaaggacagcgggtatactctggataataatgttctaaccctggaacagagaaaattttatgaagaaaatgggtttctagtaatcaaaaatcttgtacctgatgccgatattcaacgctttcggaatgagtttgaaaaaatctgcagaaaggaggtgaaaccattaggattaacagtaatgagagatgtgaccatttcgaaatccgaatatgctccaagtgagaagatgatcacgaaggtccaggatttccaggaagataaggagctcttcagatactgcactctccccgagattctgaaatatgtggagtgcttcactggacctaatattatggccatgcacacaatgttgataaacaaacctccagattctggcaagaagacgtcccgtcaccccctgcaccaggacctgcactatttccccttcaggcccagcgatctcatcgtttgcgcctggacggcgatggagcacatcagccggaacaacggctgtctggttgtgctcccaggcacacacaagggctccctgaagccccacgattaccccaagtgggaggggggagttaacaaaatgttccacgggatccaggactacgaggaaaacaaggcccgggtgcacctggtgatggagaagggcgacactgttttcttccatcctttgctcatccacggatctggtcagaataaaacccagggattccggaaggcaatttcctgccatttcgccagtgccgattgccactacattgacgtgaagggcaccagtcaagaaaacatcgagaaggaagttgtaggaatagcacataaattctttggagctgaaaatagcgtgaacttgaaggatatttggatgtttcgagctcgacttgtgaaaggagaaagaaccaatctttgaaatagccatctgctataactctttcaacagaaaaccaaaaccaaacgaaatgtctaaggaaaatgttttcttaatgagatgatgtaaccttttctatcacttgttaaaagcagaaaacatgtatcaggtacttaattgcatagagttagttttgcagcacaatggtgttgctttaatggaaaaaaaaacagtaaaagtgaaatattactgttttaaggaaaactaatttagggtggcagccaataaaggtggttggtgtctaatttaagtgttaaatcaatttctttcattcagttagctctttacccaagaagaagtgaatgatttggagcttagggtatgttttgtatcccctttctgataaacccattccctaccaattttatgtcataagagatttttttcccccaaatctagaacaatgtataatacattcacatctagtcaagggcataggaacggtgtcatggagtccaaataaagtggatattcctgctcggaca

SEQ ID NO: 287919 - DNA, 1789 bp, Homo sapiens
cggccgccctggggtcggggcaattgccgcgttgccctgccctccgggatccctgggggcctctgctcctctctttgtggagacgtcgtttcaccggcggcgcgtgaccccggcagctgtccagagacccagagatgtccaatcacaggcgcacggtgcacaggcgcgcagggctgcctggaacgggcccaggcaggcagtgaccgggacctctccggaggggagaggacggtgccctcccgggcaggagctggccaggcaggcgctgcccagggcggcctccctgctggactacggcattgccactgagttatataaagacactatttggggaaggacagcgggtagctcatcccacttcagggactatttcctctgccagtttccatcctcaacaattccagtatactctggataataatgttctaaccctggaacagagaaaattttatgaagaaaatgggtttctagtaatcaaaaatcttgtacctgatgccgatattcaacgctttcggaatgagtttgaaaaaatctgcagaaaggaggtgaaaccattaggattaacagtaatgagagatgtgaccatttcgaaatccgaatatgctccaagtgagaagatgatcacgaaggtccaggatttccaggaagataaggagctcttcagatactgcactctccccgagattctgaaatatgtggagtgcttcactggacctaatattatggccatgcacacaatgttgataaacaaacctccagattctggcaagaagacgtcccgtcaccccctgcaccaggacctgcactatttccccttcaggcccagcgatctcatcgtttgcgcctggacggcgatggagcacatcagccggaacaacggctgtctggttgtgctcccaggcacacacaagggctccctgaagccccacgattaccccaagtgggaggggggagttaacaaaatgttccacgggatccaggactacgaggaaaacaaggcccgggtgcacctggtgatggagaagggcgacactgttttcttccatcctttgctcatccacggatctggtcagaataaaacccagggattccggaaggcaatttcctgccatttcgccagtgccgattgccactacattgacgtgaagggcaccagtcaagaaaacatcgagaaggaagttgtaggaatagcacataaattctttggagctgaaaatagcgtgaacttgaaggatatttggatgtttcgagctcgacttgtgaaaggagaaagaaccaatctttgaaatagccatctgctataactctttcaacagaaaaccaaaaccaaacgaaatgtctaaggaaaatgttttcttaatgagatgatgtaaccttttctatcacttgttaaaagcagaaaacatgtatcaggtacttaattgcatagagttagttttgcagcacaatggtgttgctttaatggaaaaaaaaacagtaaaagtgaaatattactgttttaaggaaaactaatttagggtggcagccaataaaggtggttggtgtctaatttaagtgttaaatcaatttctttcattcagttagctctttacccaagaagaagtgaatgatttggagcttagggtatgttttgtatcccctttctgataaacccattccctaccaattttatgtcataagagatttttttcccccaaatctagaacaatgtataatacattcacatctagtcaagggcataggaacggtgtcatggagtccaaataaagtggatattcctgctcggaca

SEQ ID NO: 287920 - DNA, 2319 bp, Homo sapiens
gtccggagctgctgagggatcccgggtccttctgttggtctgagaccctggggcgggcggaatcccggagaaagccggagggactccccagtggaagcctgggagctgccgttctcctccctgcctgtgcaaacaggaaggggctggtgatgctggctgcgggcctccctcctggactgcgacattgtcaccaaattctataaagacgtcatgcaggaagtgataacgtgtgctgcgacgttctggaagtaactcgaagctaaaaaagaacaaaaaatcaatgaaaaaatgaaactaaagaaacaatgagatgctatgtcaatatccgtagttatggaatggaaaataaatcttacaaagagatgctggagttatctaagaaatttacaccatactggcctgtgtgcatcagacttttctggaggtcatttattttattcactttttttttttttatgaccaaccgaactttctaatattttgggctggagtcccactaaatgaaataccccttttgaatggcacatatgacttttagggatgcatcttagcatttttatttttttatttttattttcaaaacttcattgatgttttggagttttgtttgttttttgtttttgtgttttttggacatggcctcactctgtcgcccaggctggagtgcagaggcacgatctgggctcactgcaacttcaaactcccgggctcaggtgatcctcctgcagcaggacgagccgcagacaaaactcagacaccggattaaagaagggctgtattaggccgggaacttcggcagacttgcaaccgaggtccctgaaaaagaaattcttggcccttttaagggcttgtaactctaagggtctacgtgaaagtagctcatcccacttcagggactatttcctctgccagtttccatcctcaacaattccagtatactctggataataatgttctaaccctggaacagagaaaattttatgaagaaaatgggtttctagtaatcaaaaatcttgtacctgatgccgatattcaacgctttcggaatgagtttgaaaaaatctgcagaaaggaggtgaaaccattaggattaacagtaatgagagatgtgaccatttcgaaatccgaatatgctccaagtgagaagatgatcacgaaggtccaggatttccaggaagataaggagctcttcagatactgcactctccccgagattctgaaatatgtggagtgcttcactggacctaatattatggccatgcacacaatgttgataaacaaacctccagattctggcaagaagacgtcccgtcaccccctgcaccaggacctgcactatttccccttcaggcccagcgatctcatcgtttgcgcctggacggcgatggagcacatcagccggaacaacggctgtctggttgtgctcccaggcacacacaagggctccctgaagccccacgattaccccaagtgggaggggggagttaacaaaatgttccacgggatccaggactacgaggaaaacaaggcccgggtgcacctggtgatggagaagggcgacactgttttcttccatcctttgctcatccacggatctggtcagaataaaacccagggattccggaaggcaatttcctgccatttcgccagtgccgattgccactacattgacgtgaagggcaccagtcaagaaaacatcgagaaggaagttgtaggaatagcacataaattctttggagctgaaaatagcgtgaacttgaaggatatttggatgtttcgagctcgacttgtgaaaggagaaagaaccaatctttgaaatagccatctgctataactctttcaacagaaaaccaaaaccaaacgaaatgtctaaggaaaatgttttcttaatgagatgatgtaaccttttctatcacttgttaaaagcagaaaacatgtatcaggtacttaattgcatagagttagttttgcagcacaatggtgttgctttaatggaaaaaaaaacagtaaaagtgaaatattactgttttaaggaaaactaatttagggtggcagccaataaaggtggttggtgtctaatttaagtgttaaatcaatttctttcattcagttagctctttacccaagaagaagtgaatgatttggagcttagggtatgttttgtatcccctttctgataaacccattccctaccaattttatgtcataagagatttttttcccccaaatctagaacaatgtataatacattcacatctagtcaagggcataggaacggtgtcatggagtccaaataaagtggatattcctgctcggaca

SEQ ID NO: 287921 - DNA, 1656 bp, Homo sapiens
attaggaggggggttgttaggggttcggaggaaaagttcggggaacagctaaataggttgttgttgatttggttaaaaaatagtagagggatgatgctaataattaggctgtgggtggttgtgttgattccgcaatgagtacagattataatctgtactcattgggtgggggttccccgcgccgcagccatggagcagcttcgcgccgccgcccgtctgcagattgttctgggccacctcggccgcccctcggccggggctgtcgtagctcatcccacttcagggactatttcctctgccagtttccatcctcaacaattccagtatactctggataataatgttctaaccctggaacagagaaaattttatgaagaaaatgggtttctagtaatcaaaaatcttgtacctgatgccgatattcaacgctttcgtaatgagagatgtgaccatttcgaaatccgaatatgctccaagtgagaagatgatcacgaaggtccaggatttccaggaagataaggagctcttcagatactgcactctccccgagattctgaaatatgtggagtgcttcactggacctaatattatggccatgcacacaatgttgataaacaaacctccagattctggcaagaagacgtcccgtcaccccctgcaccaggacctgcactatttccccttcaggcccagcgatctcatcgtttgcgcctggacggcgatggagcacatcagccggaacaacggctgtctggttgtgctcccaggcacacacaagggctccctgaagccccacgattaccccaagtgggaggggggagttaacaaaatgttccacgggatccaggactacgaggaaaacaaggcccgggtgcacctggtgatggagaagggcgacactgttttcttccatcctttgctcatccacggatctggtcagaataaaacccagggattccggaaggcaatttcctgccatttcgccagtgccgattgccactacattgacgtgaagggcaccagtcaagaaaacatcgagaaggaagttgtaggaatagcacataaattctttggagctgaaaatagcgtgaacttgaaggatatttggatgtttcgagctcgacttgtgaaaggagaaagaaccaatctttgaaatagccatctgctataactctttcaacagaaaaccaaaaccaaacgaaatgtctaaggaaaatgttttcttaatgagatgatgtaaccttttctatcacttgttaaaagcagaaaacatgtatcaggtacttaattgcatagagttagttttgcagcacaatggtgttgctttaatggaaaaaaaaacagtaaaagtgaaatattactgttttaaggaaaactaatttagggtggcagccaataaaggtggttggtgtctaatttaagtgttaaatcaatttctttcattcagttagctctttacccaagaagaagtgaatgatttggagcttagggtatgttttgtatcccctttctgataaacccattccctaccaattttatgtcataagagatttttttcccccaaatctagaacaatgtataatacattcacatctagtcaagggcataggaacggtgtcatggagtccaaataaagtggatattcctgctcggaca

SEQ ID NO: 287922 - DNA, 2032 bp, Homo sapiens
gccagactggctttttattttttatagagaaaggttctcactctgttgtgtaggctgagtgcagtggtgcgatcatagcttactgcggcctcaagttcctgggctcaagcaatcctcttgcctcagcctcctgagtagctgggaccacagttgtgcaccaccatacccagctaattttttatttctttgtttttagagacagggagtctcactatgttgcccaggctggtcttgaactcctggcctcaccctcctgagttgctgggattacagtcgggagccaccatgcctgggcttcagtctcagctccaccacttaatatcatgtgtcctggggcaatttacttcacatcccatgcctctgtttcctcatctgtaaaatggggataataatagcacttatgtcctagtgttgttattaggactaaatacggtgaaatatatggaaaccactttgaagagagctgggcacatggtaagtgttacagaaatgtttgctgttattattattacaatgtaaccaaattataaaaagacttccctactggtatgctaaactagggaataatttaattctgggaatggattctagccagacagtttctcctccctttcattggaattattctacctcaagctggaggccaacttagtgcagagaaaccacccctcaagtctgcaaccctttccacagaggagggcagggcaggtgcttggagccagcggtaacgacatcatttgcaaattaaattttctaggaatgagtttgaaaaaatctgcagaaaggaggtgaaaccattaggattaacagtaatgagagatgtgaccatttcgaaatccgaatatgctccaagtgagaagatgatcacgaaggtccaggatttccaggaagataaggagctcttcagatactgcactctccccgagattctgaaatatgtggagtgcttcactggacctaatattatggccatgcacacaatgttgataaacaaacctccagattctggcaagaagacgtcccgtcaccccctgcaccaggacctgcactatttccccttcaggcccagcgatctcatcgtttgcgcctggacggcgatggagcacatcagccggaacaacggctgtctggttgtgctcccaggcacacacaagggctccctgaagccccacgattaccccaagtgggaggggggagttaacaaaatgttccacgggatccaggactacgaggaaaacaaggcccgggtgcacctggtgatggagaagggcgacactgttttcttccatcctttgctcatccacggatctggtcagaataaaacccagggattccggaaggcaatttcctgccatttcgccagtgccgattgccactacattgacgtgaagggcaccagtcaagaaaacatcgagaaggaagttgtaggaatagcacataaattctttggagctgaaaatagcgtgaacttgaaggatatttggatgtttcgagctcgacttgtgaaaggagaaagaaccaatctttgaaatagccatctgctataactctttcaacagaaaaccaaaaccaaacgaaatgtctaaggaaaatgttttcttaatgagatgatgtaaccttttctatcacttgttaaaagcagaaaacatgtatcaggtacttaattgcatagagttagttttgcagcacaatggtgttgctttaatggaaaaaaaaacagtaaaagtgaaatattactgttttaaggaaaactaatttagggtggcagccaataaaggtggttggtgtctaatttaagtgttaaatcaatttctttcattcagttagctctttacccaagaagaagtgaatgatttggagcttagggtatgttttgtatcccctttctgataaacccattccctaccaattttatgtcataagagatttttttcccccaaatctagaacaatgtataatacattcacatctagtcaagggcataggaacggtgtcatggagtccaaataaagtggatattcctgctcggaca

SEQ ID NO: 287923 - DNA, 1558 bp, Homo sapiens
acgtcgagtccggggcggcgcctggaggcggagccgcccgctgcggtaaatggggcagaggccgggaggggtgggggttccccgcgccgcagccatggagcagcttcgcgccgccgcccgtctgcagattgttctgggccacctcggccgcccctcggccggggctgtcgtagctcatcccacttcagggactatttcctctgccagtttccatcctcaacaattccagtatactctggataataatgttctaaccctggaacagagaaaattttatgaagaaaatgggtttctagtaatcaaaaatcttgtacctgatgccgatattcaacgctttcggaatgagtttgaaaaaatctgcagaaaggaggtgaaaccattaggattaacagtaatgagagatgtgaccatttcgaaatccgaatatgctccaagtgagaagatgatcacgaaggtccaggatttccaggaagataaggagctcttcagatactgcactctccccgagattctgaaatatgtggagtgcttcactggacctaatattatggccatgcacacaatgttgataaacaaacctccagattctggcaagaagacgtcccgtcaccccctgcaccaggacctgcactatttccccttcaggcccagcgatctcatcgtttgcgcctggacggcgatggagcacatcagccggaacaacggctgtctggttgtgctcccaggcacacacaagggctccctgaagccccacgattaccccaagtgggaggggggagttaacaaaatgttccacgggatccaggactacgaggaaaacaaggcccgggtgcacctggtgatggagaagggcgacactgttttcttccatcctttgctcatccacggatctggtcagaataaaacccagggattccggaaggcaatttcctgccatttcgccagtgccgattgccactacattgacgtgaagggcaccagtcaagaaaacatcgagaaggaagttgtaggaatagcacataaattctttggagctgaaaatagcgtgaacttgaaggatatttggatgtttcgagctcgacttgtgaaaggagaaagaaccaatctttgaaatagccatctgctataactctttcaacagaaaaccaaaaccaaacgaaatgtctaaggaaaatgttttcttaatgagatgatgtaaccttttctatcacttgttaaaagcagaaaacatgtatcaggtacttaattgcatagagttagttttgcagcacaatggtgttgctttaatggaaaaaaaaacagtaaaagtgaaatattactgttttaaggaatcaatttctttcattcagttagctctttacccaagaagaagtgaatgatttggagcttagggtatgttttgtatcccctttctgataaacccattccctaccaattttatgtcataagagatttttttcccccaaatctagaacaatgtataatacattcacatctagtcaagggcataggaacggtgtcatggagtccaaataaagtggatattcctgctcggaca

SEQ ID NO: 287924 - DNA, 1070 bp, Homo sapiens
cggccgccctggggtcggggcaattgccgcgttgccctgccctccgggatccctgggggcctctgctcctctctttgtggagacgtcgtttcaccggcggcgcgtgaccccggcagctgtccagagacccagagatgtccaatcacaggcgcacggtgcacaggcgcgcagggctgcctggaacgggcccaggcaggcagtgaccgggacctctccggaggggagaggacggtgccctcccgggcaggagctggccaggcaggcgctgcccagggcggcctccctgctggactacggcattgccactgagttatataaagacactatttggggaaggacagcgggtatactctggataataatgttctaaccctggaacagagaaaattttatgaagaaaatgggtttctagtaatcaaaaatcttgtacctgatgccgatattcaacgctttcggaatgagtttgaaaaaatctgcagaaaggaggtgaaaccattaggattaacagtaatgagagatgtgaccatttcgaaatccgaatatgctccaagtgagaagatgatcacgaaggtccaggatttccaggaagataaggagctcttcagatactgcactctccccgagattctgaaatatgtggagtgcttcactggacctaatattatggccatgcacacaatgttgataaacaaacctccagattctggtaattgtaagggagaagaaaaaaaaatggtttcattaaaatgtgtaaggttggctgggtgcagtaactcatgcctgtaatcccagcattttaggagaccaagggaggaagatctctgaggccaggagtttgagagtggcctgggcaacatagtgaggctctgtctctaaaaataaaatttaaaaatatccaggcatggtggtatgcacctgtagtccctgctattggaaggctgaggtgggaggatcacttgagcccaggagttgaaggctgcagtgaacctataatggcatgctctccagcctgcgtgacacagtgagaccctatctctacataataaataaaacaaaacaaaacaaaataa

SEQ ID NO: 287925 - DNA, 494 bp, Homo sapiens
acgtcgagtccggggcggcgcctggaggcggagccgcccgctgcggtaaatggggcagaggccgggaggggtgggggttccccgcgccgcagccatggagcagcttcgcgccgccgcccgtctgcagattgttctgggccacctcggccgcccctcggccggggctgtcgtagctcatcccacttcagggactatttcctctgccagtttccatcctcaacaattccatactctggctaataaagctctacccttggaacagacaacattctatcccgactctgctccccctagacctcactcctctctcacccctctccctctctttcacctgctctcctaactcctcccactattctctgtctctcccccttcctcccccctccctcttacctgctccctgttccctcccttcctcccccccactacgccccttacccctcccttcttccgctctaccacccccctctccttccctccctctctctctctct

SEQ ID NO: 287926 - DNA, 1459 bp, Homo sapiens
  misc_feature (1075)..(1075): n is a, c, g, or t
  misc_feature (1135)..(1135): n is a, c, g, or t
  misc_feature (1449)..(1449): n is a, c, g, or t
ctgatggcttcgctgtcttctgtaaaaattgctatgagagaacttttcactcactgttttgcagtttctccctcagtccctggttctttcttctcacataatcccaatttcaatttatagttcatggcccaggcagagtcattcatcacggcatctcctgagctaaaccagcacctgctctgctcacttcttgactggctgctcatcatcagccctctgcagagatttcatttcctccgtgccagtagccatcgaccctctgatgaggatgccccctccaacaggcaccgccaggcagccctgcctggagacccagaggcaccgagtcacatttgctctgcacacctggctctcgcttgatgtgggcctgtgtgctacagcccggaacacaaaagaagacacccatgcaaataccattaaaagtttattgttttatttcaatattcaggaacagtgtacactttccgttcagccatcgtcacagcacgtgctgtgtgggtgcggccacgtatggatcgcagagccgacctcagctcagcgacgcagagtgcttctgctgaaaaatttggaggtttgtgtctggagttttgttctttgtaactctctcatcatcgaggctatatattaatagacatggtattaagcccacacgaaacattcagaattagaattggattaagaagacgcgttttggcatcacgctgactactcctcatctccgtcctcggggagggtgatgccagcgtgggactctttggaaggcctatcaatcacaggtgcgctaaaatcaaaaggtgggtcagtaggttagggagggaggcgcgaaaggagatgccagcgggtgttaagaaggatatggtcagaagagctctttgtctccatccacggggccgtctgctcagcccgtgtgtctcggtgagtaattcgggagcaggtgcacgcctgtgcctactcgctaccacgcgtcttctgggaggaagtgaatgagccggttatcttctcagggagggttagtgctggccactgtgcactgccgctgccagcacgcccggtcacagccagtgtctatgggcgnctggcgcggctgcgaggctgtctagaggactcctacccttctgctctgagtgcgcaagtnttcctggactctccggctgtgggctgtggtttggaaacgaggttgttcatagaggctgctctggggccaccatgcagggcaacggtgacgtccagaggccacctgcttgacatctccatcaccaaatctccaggaagaccctgtttcctatgtgaggccattgcccagcccacgtttgcctccttttcctccctctgccacacgcgaattcagctaattggggtgtgtgggcagccacggcctggggaggtggcccctctctgtgctgcccacgttggactctacagctgcccagccgcatgtacataccaaanctccacatgt

SEQ ID NO: 287927 - DNA, 1293 bp, Homo sapiens
tttttgtacataatatacattatttctgttgatgtacctcttaatgacatctcggtcaatgatggactgtatatatgatggtggtcccataggattataatggagctgaaaaattcctgttacctagcgacattgtaatgtggcacaatacattagtcatgagtttgtggtgatggctggtgtaaacaaacctgcattgccagtcatataaaagtctagcacatacaattatgtacagtgcataatacttgatagtgataataaaagatattactgatttatgtatttactatacaatatacttttattattttacagtgtactcctatttatttaaaaagttaactataaaacagcctcaggcaggtccttcaggagatattccagaagagggcattgttatcatagatgacagctccattcatgttactgaccctgaagaccttcaagtgggacaagatatggaggtggaagacagtggtattgatgatcctgaccacgggtaggcttaggtttatgtgtgtgtatgtgtcttagtttttaacaaaaaaattaaaaagtaaaaaaactaaaaatagaaaaatgcttagagaataaggatataaagaatatttttgtgcagttgaacaatgagtgcttaagctaaatgtcatcacaaaagagtaaaaaaattttacaaaattaaaaatgtttaaagttaaaaagctctaggaagctaaggtcaatttattattggagaaataaaattatttttatgaatttactgtagcctaggtgtacattatttatcatgtctacagtagtgttcagcaattaggccttcacattctctcaccactcactcactcagtcactcacccagagcagcttccagtcccgcaagctccatttatggtaagtgccctgtacaggtgtaccatttttttaatccattataccatatttttattgtaccttttctatgtttagatttgtttagatacacaagtaccactgtgttacagttgcctatagtactcagtacagtaacacactttacaagcttatagcctaggaacaataggctataccatctaggtttgtgtaagtacactcttatgatgttcacacagtgacaaaatcgcccaaggatgcattcatcagaacacattcccattgttatccaatgcatgactgtataatggttttatggattaaattttttatgtaattcaactggaaagtatttttatgttattttggaaaaaataaaacaatgacaattgaaatcatggaatctgcaaagattcacag

SEQ ID NO: 287928 - DNA, 779 bp, Homo sapiens
agacagtttcttccgcttcctgtaccacccggctcaagtagcggacacggaacagggaactatcagcccgtcggcctccgggccctgcattctctagccatggaccgggaccttttgcggcagtcgctaaattgccacgggtcgtctttgctctctctacttcggagcgaacagcaggacaatccacacttccgtagcctcctggggtcggccgccgagccagcccggggcccgccgccccagcacccgttgcagggcagaaaagagaagagagttgacaacatcgagatacagaaattcatctccaaaaaagcggatctgctttttgcactttcctggaaatcagatgcacctgcaacttctgaaattaatgaagacagtgaagatcattatgcaatcatgccacctttagagcaattcatggagatacctagtatggatcggagagagctgtttttccgagatattgagcgtggtgatatagtgattggaagaattagttctattcgggaattcggttttttcatggtgttgatctgtttaggaagtggtatcatgagagatatagcccacttagaaatcacagctctttgtcccttaagagatgtgccttctcacagtaaccatggggatcctttatcatattaccaaactggtgacatcattcgagctggatcaaggtattgcagatccaggggaataagtctgagagcttcctatcttccggagagtgtgactaattcaatcctgaggccattaaaggaatcaagtccttggat

SEQ ID NO: 287929 - DNA, 635 bp, Homo sapiens
agacagtttcttccgcttcctgtaccacccggctcaagtagcggacacggaacagggaactatcagcccgtcggcctccgggccctgcattctctagccatggaccgggaccttttgcggcagtcgctaaattgccacgggtcgtctttgctctctctacttcggagcgaacagcaggacaatccacacttccgtagcctcctggggtcggccgccgagccagcccggggcccgccgccccagcacccgttgcagggcagaaaagagaagagagttgacaacatcgagatacagaaattcatctccaatgaaattaatgaagacagtgaagatcattatgcaatcatgccacctttagagcaattcatggagatacctagtatggatcggagagagctgtttttccgagatattgagcgtggtgatatagtgattggaagaattagttctattcgggaattcggttttttcatggtgttgatctgtttaggaagtggtatcatgagagatatagcccacttagaaatcacagctctttgtcccttaagagatgtgccttctcacagtaaccatggggatcctttatcatattaccaaactggtgacatcattcgaggtgattagtttcatcatac

SEQ ID NO: 287930 - DNA, 4603 bp, Homo sapiens
agacagtttcttccgcttcctgtaccacccggctcaagtagcggacacggaacagggaactatcagcccgtcggcctccgggccctgcattctctagccatggaccgggaccttttgcggcagtcgctaaattgccacgggtcgtctttgctctctctacttcggagcgaacagcaggacaatccacacttccgtagcctcctggggtcggccgccgagccagcccggggcccgccgccccagcacccgttgcagggcagaaaagagaagagagttgacaacatcgagatacagaaattcatctccaaaaaagcggatctgctttttgcactttcctggaaatcagatgcacctgcaacttctgaaattaatgaagacagtgaagatcattatgcaatcatgccacctttagagcaattcatggagatacctagtatggatcggagagagctgtttttccgagatattgagcgtggtgatatagtgattggaagaattagttctattcgggaattcggttttttcatggtgttgatctgtttaggaagtggtatcatgagagatatagcccacttagaaatcacagctctttgtcccttaagagatgtgccttctcacagtaaccatggggatcctttatcatattaccaaactggtgacatcattcgagctggaatcaaggatattgacagataccatgaaaagctagcagtatctctgtatagctcttctcttccaccacacctatctggtattaaattaggtgtaattagctctgaagagcttcctttatactacaggagaagtgttgagctaaatagcaattctttggagtcctatgaaaatgtcatgcagagttccttgggatttgttaatccaggagtagttgaattccttctagaaaaactaggaatagatgaatctaatccaccatctttaatgagaggcctacaaagcaaaaatttctctgaagatgattttgcttctgcattgagaaaaaaacaatccgcatcttgggctttaaaatgtgtgaagatcggagttgactattttaaagttggacgccatgtggatgctatgaatgaatacaataaagctttggaaatagacaaacaaaacgtggaagctttggtagctcgtggagcattatatgcgacaaaaggaagtttgaacaaagcaatagaagattttgagcttgcattagaaaactgtccaactcacagaaatgcaagaaaatacctctgccagacacttgtagagagaggaggacagttagaagaagaagaaaagtttttaaatgctgaaagttactataagaaagctttggctttggatgagacttttaaagatgcagaggatgctttgcagaaacttcataaatatatgcaggtgattccttatttcctcttagaaatttagtgatatttgaaataatgcccaaacttaattttctcctgaggaaaactattctacattacttaagtaaggcattatgaaaagtttctttttaggtatagtttttcctaattgggtttgacattgcttcatagtgcctctgtttttgtccataatcgaaagtaaagatagctgtgagaaaactattacctaaatttggtatgttgttttgagaaatgtccttatagggagctcacctggtggtttttaaattattgttgctactataattgagctaattataaaaacctttttgagacatattttaaattgtcttttcctgtaatactgatgatgatgttttctcatgcattttcttctgaattggaccattgctgctgtgtctgtgacatctggtgctgctcatccccatccacaaactggaaaatgatttcctatgtaatcatgcatccaactgggctgtgctatttttttaaatggtttgtatttgaacatggtgattcctccttcacttcaccttaacggaatgtctttatttgaattttatttgtaaaatgtgtcctgtttaaatttttcaatctttaaaaataatttttatgtactttttttttttttttaacctttcttgcactctgggtcatgggtaccactgcaatggcttcccctttttttatgggataccaactgcaatatggtcctcaatgctgttctggccatttcaatgactaatgccaaacatctgtatgactaatttttttatgttaaaaaaatactgtttaatgctggctctatggtgatttggttttactaaattgggtttctcgttgggggtggtcttttgaatactgggttttatatattctgctatttttaacgtgtggtttttttcgatatctgggttctaaaagaaatctttggaattaagagaaaaacaagctgaaaaggaagaaaagcagaaaacaaagaaaatagaaacaagtgcagaaaagttgcgtaagctcttaaaagaagagaagaggtaaactataatattcagtatttttaaacttaaggcaactactgaattgaacccaaagtgccatactggaggtaaagtaaataaaaatatgaaagtatttcaagtgccaatcagtgactgttaagaatctttagcaaatatgtgttccatgtattttcttattaaagagatgaagtggaatttaaggctagaattctacaaaaaaagagtatcttagaattaaaatatagaataagttactttaattatgttttaggaagaaatattttagaactagagcagtggttctcaactaggggtggatttattcacccggggacatttgacaagatgtggagacatttttgattgccataactgatagggtgctactgcatctagtgtataatggtcagggatgctcttaaacattctgtaatgcacaggtcagctcccacccgcacccccaccccctaccaagaattatttggctgaaaataccaataatcaggtgaagaaaccatgaactagaggtagccaaataaaaaagttgagttctcctttatgtgttcagtagtcttaagtttttaaggtagtgttgaaaaaagtctgtctttcagagatgatggatttgcttacaatgatacctgtctgcaagcattttttcccccaaaagtgcttaatagtaaaattagatcttgtagtagccgagattattgtatcatttatctgaaccacagcttttataaaatctttaaaggaaacaaatagggcccacatctttatgaataatttagaaacatttttgtatatatatgacaaatgaactgttttttttaggctaaagaagaaaagaagaaaatcaacttcttcttcaagtgtttcttctgctgatgaatcagtgtcttcatcatcatcctcttcctcttctggtcacaaaaggcataagaaacataagaggaaccgttcagagtcttctcgcagttccagaaggcattcatctagggcatcctcaaatcagatagatcagaataggaaagatgagtgctacccagttccagctaatacttcagcatcttttcttaaccataaacaagaagtggagaaactactggggaagcaggataggttacagtatgaaaagacacagataaaagagaaagatagatgccctctctcttcatcttcacttgaaataccggatgattttggaggtaggtctgaagatccaagagatttttataacagctataaaacccaagcaggtagtagcaaaacagaaaagccatataaatcagaaagacatttttccagtagaagaaattcctcagattccttctgtaggaattcagaggacaagatttatggttataggagatttgaaaaggatatagagggaagaaaagagcactatagaaggtgggaaccaggttctgtgaggcattctacctcaccagcaagctcagaatactcttggaagtcagttgagaaatacaaaaaatacgctcactctggatcacgtgatttcagtagacatgagcaaagataccgtttaaatacaaatcaaggagaatatgaaagagaggacaattatggggaggatatcaaaacagaggttccagaagaagatgcactaagtagcaaagaacactcagaaagcagtgttaagaaaaatttacctcagaatttactgaatatatttaatcagatagctgaatttgaaaaagaaaaaggaaataagtcaaaaaattaatacaccaaggatatcggcaccattacacaaaatgccattaagtgaagtttttggttgtattagtcataacagttgagtgcagaaatctctgcttctaaaattatttgtagagattacaggaaacaaatgcttttaagtaagtttttctcaaattttgtttcagttctaggtcccttgtcacagcttggtttttagactttttatgtatatgtttatgtacagtatattactcttgacagtttgaatttcttcacctaaagataattctctgaaagtactgtttcttcattctattgcggtatatgagaattcctgggtgcatcttattctgctgtttgagagaaaaatttgtgcattgaacacttggatcatttttataaaaattaatttcattttcttttctgttaaattaaaaatcgtcagcttttgaaagatta

SEQ ID NO: 287931 - DNA, 4760 bp, Homo sapiens
agacagtttcttccgcttcctgtaccacccggctcaagtagcggacacggaacagggaactatcagcccgtcggcctccgggccctgcattctctagccatggaccgggaccttttgcggcagtcgctaaattgccacgggtcgtctttgctctctctacttcggagcgaacagcaggacaatccacacttccgtagcctcctggggtcggccgccgagccagcccggggcccgccgccccagcacccgttgcagggcagaaaagagaagagagttgacaacatcgagatacagaaattcatctccaaaaaagcggatctgctttttgcactttcctggaaatcagatgcacctgcaacttctgaaattaatgaagacagtgaagatcattatgcaatcatgccacctttagagcaattcatggagatacctagtatggatcggagagagctgtttttccgagatattgagcgtggtgatatagtgattggaagaattagttctattcgggaattcggttttttcatggtgttgatctgtttaggaagtggtatcatgagagatatagcccacttagaaatcacagctctttgtcccttaagagatgtgccttctcacagtaaccatggggatcctttatcatattaccaaactggtgacatcattcgagctggaatcaaggatattgacagataccatgaaaagctagcagtatctctgtatagctcttctcttccaccacacctatctggtattaaattaggtgtaattagctctgaagagcttcctttatactacaggagaagtgttgagctaaatagcaattctttggagtcctatgaaaatgtcatgcagagttccttgggatttgttaatccaggagtagttgaattccttctagaaaaactaggaatagatgaatctaatccaccatctttaatgagaggcctacaaagcaaaaatttctctgaagatgattttgcttctgcattgagaaaaaaacaatccgcatcttgggctttaaaatgtgtgaagatcggagttgactattttaaagttggacgccatgtggatgctatgaatgaatacaataaagctttggaaatagacaaacaaaacgtggaagctttggtagctcgtggagcattatatgcgacaaaaggaagtttgaacaaagcaatagaagattttgagcttgcattagaaaactgtccaactcacagaaatgcaagaaaatacctctgccagacacttgtagagagaggaggacagttagaagaagaagaaaagtttttaaatgctgaaagttactataagaaagctttggctttggatgagacttttaaagatgcagaggatgctttgcagaaacttcataaatatatgcaggtgattccttatttcctcttagaaatttagtgatatttgaaataatgcccaaacttaattttctcctgaggaaaactattctacattacttaagtaaggcattatgaaaagtttctttttaggtatagtttttcctaattgggtttgacattgcttcatagtgcctctgtttttgtccataatcgaaagtaaagatagctgtgagaaaactattacctaaatttggtatgttgttttgagaaatgtccttatagggagctcacctggtggtttttaaattattgttgctactataattgagctaattataaaaacctttttgagacatattttaaattgtcttttcctgtaatactgatgatgatgttttctcatgcattttcttctgaattggaccattgctgctgtgtctgtgacatctggtgctgctcatccccatccacaaactggaaaatgatttcctatgtaatcatgcatccaactgggctgtgctatttttttaaatggtttgtatttgaacatggtgattcctccttcacttcaccttaacggaatgtctttatttgaattttatttgtaaaatgtgtcctgtttaaatttttcaatctttaaaaataatttttatgtactttttttttttttttaacctttcttgcactctgggtcatgggtaccactgcaatggcttcccctttttttatgggataccaactgcaatatggtcctcaatgctgttctggccatttcaatgactaatgccaaacatctgtatgactaatttttttatgttaaaaaaatactgtttaatgctggctctatggtgatttggttttactaaattgggtttctcgttgggggtggtcttttgaatactgggttttatatattctgctatttttaacgtgtggtttttttcgatatctgggttctaaaagaaatctttggaattaagagaaaaacaagctgaaaaggaagaaaagcagaaaacaaagaaaatagaaacaagtgcagaaaagttgcgtaagctcttaaaagaagagaagaggtaaactataatattcagtatttttaaacttaaggcaactactgaattgaacccaaagtgccatactggaggtaaagtaaataaaaatatgaaagtatttcaagtgccaatcagtgactgttaagaatctttagcaaatatgtgttccatgtattttcttattaaagagatgaagtggaatttaaggctagaattctacaaaaaaagagtatcttagaattaaaatatagaataagttactttaattatgttttaggaagaaatattttagaactagagcagtggttctcaactaggggtggatttattcacccggggacatttgacaagatgtggagacatttttgattgccataactgatagggtgctactgcatctagtgtataatggtcagggatgctcttaaacattctgtaatgcacaggtcagctcccacccgcacccccaccccctaccaagaattatttggctgaaaataccaataatcaggtgaagaaaccatgaactagaggtagccaaataaaaaagttgagttctcctttatgtgttcagtagtcttaagtttttaaggtagtgttgaaaaaagtctgtctttcagagatgatggatttgcttacaatgatacctgtctgcaagcattttttcccccaaaagtgcttaatagtaaaattagatcttgtagtagccgagattattgtatcatttatctgaaccacagcttttataaaatctttaaaggaaacaaatagggcccacatctttatgaataatttagaaacatttttgtatatatatgacaaatgaactgttttttttaggctaaagaagaaaagaagaaaatcaacttcttcttcaagtgtttcttctgctgatgaatcagtgtcttcatcatcatcctcttcctcttctggtcacaaaaggcataagaaacataagaggaaccgttcagagtcttctcgcagttccagaaggcattcatctagggcatcctcaaatcagatagatcagaataggaaagatgagtgctacccagttccagctaatacttcagcatcttttcttaaccataaacaagaagtggagaaactactggggaagcaggataggttacagtatgaaaagacacagataaaagagaaagatagatgccctctctcttcatcttcacttgaaataccggatgattttggaggtaggtctgaagatccaagagatttttataacagctataaaacccaagcaggtagtagcaaaacagaaaagccatataaatcagaaagacatttttccagtagaagaaattcctcagattccttctgtaggaattcagaggacaagatttatggttataggagatttgaaaaggatatagagggaagaaaagagcactatagaaggtgggaaccaggttctgtgaggcattctacctcaccagcaagctcagaatactcttggaagtcagttgagaaatacaaaaaatacgctcactctggatcacgtgatttcagtagacatgagcaaagataccgtttaaatacaaatcaaggagaatatgaaagagaggacaattatggggaggatatcaaaacagaggttccagaagaagatgcactaagtagcaaagaacactcagaaagcagtgttaagaaaaatttacctcagaatttactgaatatatttaatcagatagctgaatttgaaaaagaaaaaggaaataagtcaaaaaattaatacaccaaggatatcggcaccattacacaaaatgccattaagtgaagtttttggttgtattagtcataacagttgagtgcagaaatctctgcttctaaaattatttgtagagattacaggaaacaaatgcttttaagtaagtttttctcaaattttgtttcagttctaggtcccttgtcacagcttggtttttagactttttatgtatatgtttatgtacagtatattactcttgacagtttgaatttcttcacctaaagataattctctgaaagtactgtttcttcattctattgcggtatatgagaattcctgggtgcatcttattctgctgtttgagagaaaaatttgtgcattgaacacttggatcatttttataaaaattaatttcattttcttttctgttaaattaaaaatcgtcagcttttgaaagattaaaaaaaaaaatgtttcttgaacacttttatatttatcagtttaaatattacattttttgcccaattttttttaaaatttttaaatggtagattatatgtcttaattttcctctaaagcccaatttgattaaaagtggtttgtgaacagtcattggct

SEQ ID NO: 287932 - DNA, 4511 bp, Homo sapiens
gctgggtggacggggggcgctcctgggttgtgcaatgcgggatgcgggctgaactttttctctggcactgcttggtagaggcgcagattccttagctaaaaatcccttgagctttcctatctgagttggaggcgtcactttttaagtttccccgctctccacctccagaaaagagaagagagttgacaacatcgagatacagaaattcatctccaaaaaagcggatctgctttttgcactttcctggaaatcagatgcacctgcaacttctgaaattaatgaagacagtgaagatcattatgcaatcatgccacctttagagcaattcatggagatacctagtatggatcggagagagctgtttttccgagatattgagcgtggtgatatagtgattggaagaattagttctattcgggaattcggttttttcatggtgttgatctgtttaggaagtggtatcatgagagatatagcccacttagaaatcacagctctttgtcccttaagagatgtgccttctcacagtaaccatggggatcctttatcatattaccaaactggtgacatcattcgagctggaatcaaggatattgacagataccatgaaaagctagcagtatctctgtatagctcttctcttccaccacacctatctggtattaaattaggtgtaattagctctgaagagcttcctttatactacaggagaagtgttgagctaaatagcaattctttggagtcctatgaaaatgtcatgcagagttccttgggatttgttaatccaggagtagttgaattccttctagaaaaactaggaatagatgaatctaatccaccatctttaatgagaggcctacaaagcaaaaatttctctgaagatgattttgcttctgcattgagaaaaaaacaatccgcatcttgggctttaaaatgtgtgaagatcggagttgactattttaaagttggacgccatgtggatgctatgaatgaatacaataaagctttggaaatagacaaacaaaacgtggaagctttggtagctcgtggagcattatatgcgacaaaaggaagtttgaacaaagcaatagaagattttgagcttgcattagaaaactgtccaactcacagaaatgcaagaaaatacctctgccagacacttgtagagagaggaggacagttagaagaagaagaaaagtttttaaatgctgaaagttactataagaaagctttggctttggatgagacttttaaagatgcagaggatgctttgcagaaacttcataaatatatgcaggtgattccttatttcctcttagaaatttagtgatatttgaaataatgcccaaacttaattttctcctgaggaaaactattctacattacttaagtaaggcattatgaaaagtttctttttaggtatagtttttcctaattgggtttgacattgcttcatagtgcctctgtttttgtccataatcgaaagtaaagatagctgtgagaaaactattacctaaatttggtatgttgttttgagaaatgtccttatagggagctcacctggtggtttttaaattattgttgctactataattgagctaattataaaaacctttttgagacatattttaaattgtcttttcctgtaatactgatgatgatgttttctcatgcattttcttctgaattggaccattgctgctgtgtctgtgacatctggtgctgctcatccccatccacaaactggaaaatgatttcctatgtaatcatgcatccaactgggctgtgctatttttttaaatggtttgtatttgaacatggtgattcctccttcacttcaccttaacggaatgtctttatttgaattttatttgtaaaatgtgtcctgtttaaatttttcaatctttaaaaataatttttatgtactttttttttttttttaacctttcttgcactctgggtcatgggtaccactgcaatggcttcccctttttttatgggataccaactgcaatatggtcctcaatgctgttctggccatttcaatgactaatgccaaacatctgtatgactaatttttttatgttaaaaaaatactgtttaatgctggctctatggtgatttggttttactaaattgggtttctcgttgggggtggtcttttgaatactgggttttatatattctgctatttttaacgtgtggtttttttcgatatctgggttctaaaagaaatctttggaattaagagaaaaacaagctgaaaaggaagaaaagcagaaaacaaagaaaatagaaacaagtgcagaaaagttgcgtaagctcttaaaagaagagaagaggtaaactataatattcagtatttttaaacttaaggcaactactgaattgaacccaaagtgccatactggaggtaaagtaaataaaaatatgaaagtatttcaagtgccaatcagtgactgttaagaatctttagcaaatatgtgttccatgtattttcttattaaagagatgaagtggaatttaaggctagaattctacaaaaaaagagtatcttagaattaaaatatagaataagttactttaattatgttttaggaagaaatattttagaactagagcagtggttctcaactaggggtggatttattcacccggggacatttgacaagatgtggagacatttttgattgccataactgatagggtgctactgcatctagtgtataatggtcagggatgctcttaaacattctgtaatgcacaggtcagctcccacccgcacccccaccccctaccaagaattatttggctgaaaataccaataatcaggtgaagaaaccatgaactagaggtagccaaataaaaaagttgagttctcctttatgtgttcagtagtcttaagtttttaaggtagtgttgaaaaaagtctgtctttcagagatgatggatttgcttacaatgatacctgtctgcaagcattttttcccccaaaagtgcttaatagtaaaattagatcttgtagtagccgagattattgtatcatttatctgaaccacagcttttataaaatctttaaaggaaacaaatagggcccacatctttatgaataatttagaaacatttttgtatatatatgacaaatgaactgttttttttaggctaaagaagaaaagaagaaaatcaacttcttcttcaagtgtttcttctgctgatgaatcagtgtcttcatcatcatcctcttcctcttctggtcacaaaaggcataagaaacataagaggaaccgttcagagtcttctcgcagttccagaaggcattcatctagggcatcctcaaatcagatagatcagaataggaaagatgagtgctacccagttccagctaatacttcagcatcttttcttaaccataaacaagaagtggagaaactactggggaagcaggataggttacagtatgaaaagacacagataaaagagaaagatagatgccctctctcttcatcttcacttgaaataccggatgattttggaggtaggtctgaagatccaagagatttttataacagctataaaacccaagcaggtagtagcaaaacagaaaagccatataaatcagaaagacatttttccagtagaagaaattcctcagattccttctgtaggaattcagaggacaagatttatggttataggagatttgaaaaggatatagagggaagaaaagagcactatagaaggtgggaaccaggttctgtgaggcattctacctcaccagcaagctcagaatactcttggaagtcagttgagaaatacaaaaaatacgctcactctggatcacgtgatttcagtagacatgagcaaagataccgtttaaatacaaatcaaggagaatatgaaagagaggacaattatggggaggatatcaaaacagaggttccagaagaagatgcactaagtagcaaagaacactcagaaagcagtgttaagaaaaatttacctcagaatttactgaatatatttaatcagatagctgaatttgaaaaagaaaaaggaaataagtcaaaaaattaatacaccaaggatatcggcaccattacacaaaatgccattaagtgaagtttttggttgtattagtcataacagttgagtgcagaaatctctgcttctaaaattatttgtagagattacaggaaacaaatgcttttaagtaagtttttctcaaattttgtttcagttctaggtcccttgtcacagcttggtttttagactttttatgtatatgtttatgtacagtatattactcttgacagtttgaatttcttcacctaaagataattctctgaaagtactgtttcttcattctattgcggtatatgagaattcctgggtgcatcttattctgctgtttgagagaaaaatttgtgcattgaacacttggatcatttttataaaaattaatttcattttcttttctgttaaattaaaaatcgtcagcttttgaaagatta

SEQ ID NO: 287933 - DNA, 4549 bp, Homo sapiens
agacagtttcttccgcttcctgtaccacccggctcaagtagcggacacggaacagggaactatcagcccgtcggcctccgggccctgcattctctagccatggaccgggaccttttgcggcagtcgctaaattgccacgggtcgtctttgctctctctacttcggagcgaacagcaggacaatccacacttccgtagcctcctggggtcggccgccgagccagcccggggcccgccgccccagcacccgttgcagggcagaaaagagaagagagttgacaacatcgagatacagaaattcatctccaatgaaattaatgaagacagtgaagatcattatgcaatcatgccacctttagagcaattcatggagatacctagtatggatcggagagagctgtttttccgagatattgagcgtggtgatatagtgattggaagaattagttctattcgggaattcggttttttcatggtgttgatctgtttaggaagtggtatcatgagagatatagcccacttagaaatcacagctctttgtcccttaagagatgtgccttctcacagtaaccatggggatcctttatcatattaccaaactggtgacatcattcgagctggaatcaaggatattgacagataccatgaaaagctagcagtatctctgtatagctcttctcttccaccacacctatctggtattaaattaggtgtaattagctctgaagagcttcctttatactacaggagaagtgttgagctaaatagcaattctttggagtcctatgaaaatgtcatgcagagttccttgggatttgttaatccaggagtagttgaattccttctagaaaaactaggaatagatgaatctaatccaccatctttaatgagaggcctacaaagcaaaaatttctctgaagatgattttgcttctgcattgagaaaaaaacaatccgcatcttgggctttaaaatgtgtgaagatcggagttgactattttaaagttggacgccatgtggatgctatgaatgaatacaataaagctttggaaatagacaaacaaaacgtggaagctttggtagctcgtggagcattatatgcgacaaaaggaagtttgaacaaagcaatagaagattttgagcttgcattagaaaactgtccaactcacagaaatgcaagaaaatacctctgccagacacttgtagagagaggaggacagttagaagaagaagaaaagtttttaaatgctgaaagttactataagaaagctttggctttggatgagacttttaaagatgcagaggatgctttgcagaaacttcataaatatatgcaggtgattccttatttcctcttagaaatttagtgatatttgaaataatgcccaaacttaattttctcctgaggaaaactattctacattacttaagtaaggcattatgaaaagtttctttttaggtatagtttttcctaattgggtttgacattgcttcatagtgcctctgtttttgtccataatcgaaagtaaagatagctgtgagaaaactattacctaaatttggtatgttgttttgagaaatgtccttatagggagctcacctggtggtttttaaattattgttgctactataattgagctaattataaaaacctttttgagacatattttaaattgtcttttcctgtaatactgatgatgatgttttctcatgcattttcttctgaattggaccattgctgctgtgtctgtgacatctggtgctgctcatccccatccacaaactggaaaatgatttcctatgtaatcatgcatccaactgggctgtgctatttttttaaatggtttgtatttgaacatggtgattcctccttcacttcaccttaacggaatgtctttatttgaattttatttgtaaaatgtgtcctgtttaaatttttcaatctttaaaaataatttttatgtactttttttttttttttaacctttcttgcactctgggtcatgggtaccactgcaatggcttcccctttttttatgggataccaactgcaatatggtcctcaatgctgttctggccatttcaatgactaatgccaaacatctgtatgactaatttttttatgttaaaaaaatactgtttaatgctggctctatggtgatttggttttactaaattgggtttctcgttgggggtggtcttttgaatactgggttttatatattctgctatttttaacgtgtggtttttttcgatatctgggttctaaaagaaatctttggaattaagagaaaaacaagctgaaaaggaagaaaagcagaaaacaaagaaaatagaaacaagtgcagaaaagttgcgtaagctcttaaaagaagagaagaggtaaactataatattcagtatttttaaacttaaggcaactactgaattgaacccaaagtgccatactggaggtaaagtaaataaaaatatgaaagtatttcaagtgccaatcagtgactgttaagaatctttagcaaatatgtgttccatgtattttcttattaaagagatgaagtggaatttaaggctagaattctacaaaaaaagagtatcttagaattaaaatatagaataagttactttaattatgttttaggaagaaatattttagaactagagcagtggttctcaactaggggtggatttattcacccggggacatttgacaagatgtggagacatttttgattgccataactgatagggtgctactgcatctagtgtataatggtcagggatgctcttaaacattctgtaatgcacaggtcagctcccacccgcacccccaccccctaccaagaattatttggctgaaaataccaataatcaggtgaagaaaccatgaactagaggtagccaaataaaaaagttgagttctcctttatgtgttcagtagtcttaagtttttaaggtagtgttgaaaaaagtctgtctttcagagatgatggatttgcttacaatgatacctgtctgcaagcattttttcccccaaaagtgcttaatagtaaaattagatcttgtagtagccgagattattgtatcatttatctgaaccacagcttttataaaatctttaaaggaaacaaatagggcccacatctttatgaataatttagaaacatttttgtatatatatgacaaatgaactgttttttttaggctaaagaagaaaagaagaaaatcaacttcttcttcaagtgtttcttctgctgatgaatcagtgtcttcatcatcatcctcttcctcttctggtcacaaaaggcataagaaacataagaggaaccgttcagagtcttctcgcagttccagaaggcattcatctagggcatcctcaaatcagatagatcagaataggaaagatgagtgctacccagttccagctaatacttcagcatcttttcttaaccataaacaagaagtggagaaactactggggaagcaggataggttacagtatgaaaagacacagataaaagagaaagatagatgccctctctcttcatcttcacttgaaataccggatgattttggaggtaggtctgaagatccaagagatttttataacagctataaaacccaagcaggtagtagcaaaacagaaaagccatataaatcagaaagacatttttccagtagaagaaattcctcagattccttctgtaggaattcagaggacaagatttatggttataggagatttgaaaaggatatagagggaagaaaagagcactatagaaggtgggaaccaggttctgtgaggcattctacctcaccagcaagctcagaatactcttggaagtcagttgagaaatacaaaaaatacgctcactctggatcacgtgatttcagtagacatgagcaaagataccgtttaaatacaaatcaaggagaatatgaaagagaggacaattatggggaggatatcaaaacagaggttccagaagaagatgcactaagtagcaaagaacactcagaaagcagtgttaagaaaaatttacctcagaatttactgaatatatttaatcagatagctgaatttgaaaaagaaaaaggaaataagtcaaaaaattaatacaccaaggatatcggcaccattacacaaaatgccattaagtgaagtttttggttgtattagtcataacagttgagtgcagaaatctctgcttctaaaattatttgtagagattacaggaaacaaatgcttttaagtaagtttttctcaaattttgtttcagttctaggtcccttgtcacagcttggtttttagactttttatgtatatgtttatgtacagtatattactcttgacagtttgaatttcttcacctaaagataattctctgaaagtactgtttcttcattctattgcggtatatgagaattcctgggtgcatcttattctgctgtttgagagaaaaatttgtgcattgaacacttggatcatttttataaaaattaatttcattttcttttctgttaaattaaaaatcgtcagcttttgaaagatta

SEQ ID NO: 287934 - DNA, 3860 bp, Homo sapiens
tagagtttcatagaaatgcgaacgggtatgctgtcgaattcataagaacagggaggtgagaagtgttgagctaaatagcaattctttggagtcctatgaaaatgtcatgcagagttccttgggatttgttaatccaggagtagttgaattccttctagaaaaactaggaatagatgaatctaatccaccatctttaatgagaggcctacaaagcaaaaatttctctgaagatgattttgcttctgcattgagaaaaaaacaatccgcatcttgggctttaaaatgtgtgaagatcggagttgactattttaaagttggacgccatgtggatgctatgaatgaatacaataaagctttggaaatagacaaacaaaacgtggaagctttggtagctcgtggagcattatatgcgacaaaaggaagtttgaacaaagcaatagaagattttgagcttgcattagaaaactgtccaactcacagaaatgcaagaaaatacctctgccagacacttgtagagagaggaggacagttagaagaagaagaaaagtttttaaatgctgaaagttactataagaaagctttggctttggatgagacttttaaagatgcagaggatgctttgcagaaacttcataaatatatgcaggtgattccttatttcctcttagaaatttagtgatatttgaaataatgcccaaacttaattttctcctgaggaaaactattctacattacttaagtaaggcattatgaaaagtttctttttaggtatagtttttcctaattgggtttgacattgcttcatagtgcctctgtttttgtccataatcgaaagtaaagatagctgtgagaaaactattacctaaatttggtatgttgttttgagaaatgtccttatagggagctcacctggtggtttttaaattattgttgctactataattgagctaattataaaaacctttttgagacatattttaaattgtcttttcctgtaatactgatgatgatgttttctcatgcattttcttctgaattggaccattgctgctgtgtctgtgacatctggtgctgctcatccccatccacaaactggaaaatgatttcctatgtaatcatgcatccaactgggctgtgctatttttttaaatggtttgtatttgaacatggtgattcctccttcacttcaccttaacggaatgtctttatttgaattttatttgtaaaatgtgtcctgtttaaatttttcaatctttaaaaataatttttatgtactttttttttttttttaacctttcttgcactctgggtcatgggtaccactgcaatggcttcccctttttttatgggataccaactgcaatatggtcctcaatgctgttctggccatttcaatgactaatgccaaacatctgtatgactaatttttttatgttaaaaaaatactgtttaatgctggctctatggtgatttggttttactaaattgggtttctcgttgggggtggtcttttgaatactgggttttatatattctgctatttttaacgtgtggtttttttcgatatctgggttctaaaagaaatctttggaattaagagaaaaacaagctgaaaaggaagaaaagcagaaaacaaagaaaatagaaacaagtgcagaaaagttgcgtaagctcttaaaagaagagaagaggtaaactataatattcagtatttttaaacttaaggcaactactgaattgaacccaaagtgccatactggaggtaaagtaaataaaaatatgaaagtatttcaagtgccaatcagtgactgttaagaatctttagcaaatatgtgttccatgtattttcttattaaagagatgaagtggaatttaaggctagaattctacaaaaaaagagtatcttagaattaaaatatagaataagttactttaattatgttttaggaagaaatattttagaactagagcagtggttctcaactaggggtggatttattcacccggggacatttgacaagatgtggagacatttttgattgccataactgatagggtgctactgcatctagtgtataatggtcagggatgctcttaaacattctgtaatgcacaggtcagctcccacccgcacccccaccccctaccaagaattatttggctgaaaataccaataatcaggtgaagaaaccatgaactagaggtagccaaataaaaaagttgagttctcctttatgtgttcagtagtcttaagtttttaaggtagtgttgaaaaaagtctgtctttcagagatgatggatttgcttacaatgatacctgtctgcaagcattttttcccccaaaagtgcttaatagtaaaattagatcttgtagtagccgagattattgtatcatttatctgaaccacagcttttataaaatctttaaaggaaacaaatagggcccacatctttatgaataatttagaaacatttttgtatatatatgacaaatgaactgttttttttaggctaaagaagaaaagaagaaaatcaacttcttcttcaagtgtttcttctgctgatgaatcagtgtcttcatcatcatcctcttcctcttctggtcacaaaaggcataagaaacataagaggaaccgttcagagtcttctcgcagttccagaaggcattcatctagggcatcctcaaatcagatagatcagaataggaaagatgagtgctacccagttccagctaatacttcagcatcttttcttaaccataaacaagaagtggagaaactactggggaagcaggataggttacagtatgaaaagacacagataaaagagaaagatagatgccctctctcttcatcttcacttgaaataccggatgattttggaggtaggtctgaagatccaagagatttttataacagctataaaacccaagcaggtagtagcaaaacagaaaagccatataaatcagaaagacatttttccagtagaagaaattcctcagattccttctgtaggaattcagaggacaagatttatggttataggagatttgaaaaggatatagagggaagaaaagagcactatagaaggtgggaaccaggttctgtgaggcattctacctcaccagcaagctcagaatactcttggaagtcagttgagaaatacaaaaaatacgctcactctggatcacgtgatttcagtagacatgagcaaagataccgtttaaatacaaatcaaggagaatatgaaagagaggacaattatggggaggatatcaaaacagaggttccagaagaagatgcactaagtagcaaagaacactcagaaagcagtgttaagaaaaatttacctcagaatttactgaatatatttaatcagatagctgaatttgaaaaagaaaaaggaaataagtcaaaaaattaatacaccaaggatatcggcaccattacacaaaatgccattaagtgaagtttttggttgtattagtcataacagttgagtgcagaaatctctgcttctaaaattatttgtagagattacaggaaacaaatgcttttaagtaagtttttctcaaattttgtttcagttctaggtcccttgtcacagcttggtttttagactttttatgtatatgtttatgtacagtatattactcttgacagtttgaatttcttcacctaaagataattctctgaaagtactgtttcttcattctattgcggtatatgagaattcctgggtgcatcttattctgctgtttgagagaaaaatttgtgcattgaacacttggatcatttttataaaaattaatttcattttcttttctgttaaattaaaaatcgtcagcttttgaaagatta

SEQ ID NO: 287935 - DNA, 3931 bp, Homo sapiens
atgggtatggagacatatcatataagtaatgctagggtgagtggtaggaagttttttcataggaggtgtatgagttggtcgtagcggaatcgggggtatgctgttcgaattcagaagtacagggaggtgagaagtgttgagctaaatagcaattctttggagtcctatgaaaatgtcatgcagagttccttgggatttgttaatccaggagtagttgaattccttctagaaaaactaggaatagatgaatctaatccaccatctttaatgagaggcctacaaagcaaaaatttctctgaagatgattttgcttctgcattgagaaaaaaacaatccgcatcttgggctttaaaatgtgtgaagatcggagttgactattttaaagttggacgccatgtggatgctatgaatgaatacaataaagctttggaaatagacaaacaaaacgtggaagctttggtagctcgtggagcattatatgcgacaaaaggaagtttgaacaaagcaatagaagattttgagcttgcattagaaaactgtccaactcacagaaatgcaagaaaatacctctgccagacacttgtagagagaggaggacagttagaagaagaagaaaagtttttaaatgctgaaagttactataagaaagctttggctttggatgagacttttaaagatgcagaggatgctttgcagaaacttcataaatatatgcaggtgattccttatttcctcttagaaatttagtgatatttgaaataatgcccaaacttaattttctcctgaggaaaactattctacattacttaagtaaggcattatgaaaagtttctttttaggtatagtttttcctaattgggtttgacattgcttcatagtgcctctgtttttgtccataatcgaaagtaaagatagctgtgagaaaactattacctaaatttggtatgttgttttgagaaatgtccttatagggagctcacctggtggtttttaaattattgttgctactataattgagctaattataaaaacctttttgagacatattttaaattgtcttttcctgtaatactgatgatgatgttttctcatgcattttcttctgaattggaccattgctgctgtgtctgtgacatctggtgctgctcatccccatccacaaactggaaaatgatttcctatgtaatcatgcatccaactgggctgtgctatttttttaaatggtttgtatttgaacatggtgattcctccttcacttcaccttaacggaatgtctttatttgaattttatttgtaaaatgtgtcctgtttaaatttttcaatctttaaaaataatttttatgtactttttttttttttttaacctttcttgcactctgggtcatgggtaccactgcaatggcttcccctttttttatgggataccaactgcaatatggtcctcaatgctgttctggccatttcaatgactaatgccaaacatctgtatgactaatttttttatgttaaaaaaatactgtttaatgctggctctatggtgatttggttttactaaattgggtttctcgttgggggtggtcttttgaatactgggttttatatattctgctatttttaacgtgtggtttttttcgatatctgggttctaaaagaaatctttggaattaagagaaaaacaagctgaaaaggaagaaaagcagaaaacaaagaaaatagaaacaagtgcagaaaagttgcgtaagctcttaaaagaagagaagaggtaaactataatattcagtatttttaaacttaaggcaactactgaattgaacccaaagtgccatactggaggtaaagtaaataaaaatatgaaagtatttcaagtgccaatcagtgactgttaagaatctttagcaaatatgtgttccatgtattttcttattaaagagatgaagtggaatttaaggctagaattctacaaaaaaagagtatcttagaattaaaatatagaataagttactttaattatgttttaggaagaaatattttagaactagagcagtggttctcaactaggggtggatttattcacccggggacatttgacaagatgtggagacatttttgattgccataactgatagggtgctactgcatctagtgtataatggtcagggatgctcttaaacattctgtaatgcacaggtcagctcccacccgcacccccaccccctaccaagaattatttggctgaaaataccaataatcaggtgaagaaaccatgaactagaggtagccaaataaaaaagttgagttctcctttatgtgttcagtagtcttaagtttttaaggtagtgttgaaaaaagtctgtctttcagagatgatggatttgcttacaatgatacctgtctgcaagcattttttcccccaaaagtgcttaatagtaaaattagatcttgtagtagccgagattattgtatcatttatctgaaccacagcttttataaaatctttaaaggaaacaaatagggcccacatctttatgaataatttagaaacatttttgtatatatatgacaaatgaactgttttttttaggctaaagaagaaaagaagaaaatcaacttcttcttcaagtgtttcttctgctgatgaatcagtgtcttcatcatcatcctcttcctcttctggtcacaaaaggcataagaaacataagaggaaccgttcagagtcttctcgcagttccagaaggcattcatctagggcatcctcaaatcagatagatcagaataggaaagatgagtgctacccagttccagctaatacttcagcatcttttcttaaccataaacaagaagtggagaaactactggggaagcaggataggttacagtatgaaaagacacagataaaagagaaagatagatgccctctctcttcatcttcacttgaaataccggatgattttggaggtaggtctgaagatccaagagatttttataacagctataaaacccaagcaggtagtagcaaaacagaaaagccatataaatcagaaagacatttttccagtagaagaaattcctcagattccttctgtaggaattcagaggacaagatttatggttataggagatttgaaaaggatatagagggaagaaaagagcactatagaaggtgggaaccaggttctgtgaggcattctacctcaccagcaagctcagaatactcttggaagtcagttgagaaatacaaaaaatacgctcactctggatcacgtgatttcagtagacatgagcaaagataccgtttaaatacaaatcaaggagaatatgaaagagaggacaattatggggaggatatcaaaacagaggttccagaagaagatgcactaagtagcaaagaacactcagaaagcagtgttaagaaaaatttacctcagaatttactgaatatatttaatcagatagctgaatttgaaaaagaaaaaggaaataagtcaaaaaattaatacaccaaggatatcggcaccattacacaaaatgccattaagtgaagtttttggttgtattagtcataacagttgagtgcagaaatctctgcttctaaaattatttgtagagattacaggaaacaaatgcttttaagtaagtttttctcaaattttgtttcagttctaggtcccttgtcacagcttggtttttagactttttatgtatatgtttatgtacagtatattactcttgacagtttgaatttcttcacctaaagataattctctgaaagtactgtttcttcattctattgcggtatatgagaattcctgggtgcatcttattctgctgtttgagagaaaaatttgtgcattgaacacttggatcatttttataaaaattaatttcattttcttttctgttaaattaaaaatcgtcagcttttgaaagatta

SEQ ID NO: 287936 - DNA, 3784 bp, Homo sapiens
agacagtttcttccgcttcctgtaccacccggctcaagtagcggacacggaacagggaactatcagcccgtcggcctccgggccctgcattctctagccatggaccgggaccttttgcggcagtcgctaaattgccacgggtcgtctttgctctctctacttcggagcgaacagcaggacaatccacacttccgtagcctcctggggtcggccgccgagccagcccggggcccgccgccccagcacccgttgcagggcagaaaagagaagagagttgacaacatcgagatacagaaattcatctccaaaaaagcggatctgctttttgcactttcctggaaatcagatgcacctgcaacttctgaaattaatgaagacagtgaagatcattatgcaatcatgccacctttagagcaattcatggagatacctagtatggatcggagagagctgtttttccgagatattgagcgtggtgatatagtgattggaagaattagttctattcgggaattcggttttttcatggtgttgatctgtttaggaagtggtatcatgagagatatagcccacttagaaatcacagctctttgtcccttaagagatgtgccttctcacagtaaccatggggatcctttatcatattaccaaactggtgacatcattcgagctggaatcaaggatattgacagataccatgaaaagctagcagtatctctgtatagctcttctcttccaccacacctatctggtattaaattaggtgtaattagctctgaagagcttcctttatactacaggagaagtgttgagctaaatagcaattctttggagtcctatgaaaatgtcatgcagagttccttgggatttgttaatccaggagtagttgaattccttctagaaaaactaggaatagatgaatctaatccaccatctttaatgagaggcctacaaagcaaaaatttctctgaagatgattttgcttctgcattgagaaaaaaacaatccgcatcttgggctttaaaatgtgtgaagatcggagttgactattttaaagttggacgccatgtggatgctatgaatgaatacaataaagctttggaaatagacaaacaaaacgtggaagctttggtagctcgtggagcattatatgcgacaaaaggaagtttgaacaaagcaatagaagattttgagcttgcattagaaaactgtccaactcacagaaatgcaagaaaatacctctgccagacacttgtagagagaggaggacagttagaagaagaagaaaagtttttaaatgctgaaagttactataagaaagctttggctttggatgagacttttaaagatgcagaggatgctttgcagaaacttcataaatatatgcaggtgattccttatttcctcttagaaatttagtgatatttgaaataatgcccaaacttaattttctcctgaggaaaactattctacattacttaagtaaggcattatgaaaagtttctttttaggtatagtttttcctaattgggtttgacattgcttcatagtgcctctgtttttgtccataatcgaaagtaaagatagctgtgagaaaactattacctaaatttggtatgttgttttgagaaatgtccttatagggagctcacctggtggtttttaaattattgttgctactataattgagctaattataaaaacctttttgagacatattttaaattgtcttttcctgtaatactgatgatgatgttttctcatgcattttcttctgaattggaccattgctgctgtgtctgtgacatctggtgctgctcatccccatccacaaactggaaaatgatttcctatgtaatcatgcatccaactgggctgtgctatttttttaaatggtttgtatttgaacatggtgattcctccttcacttcaccttaacggaatgtctttatttgaattttatttgtaaaatgtgtcctgtttaaatttttcaatctttaaaaataatttttatgtactttttttttttttttaacctttcttgcactctgggtcatgggtaccactgcaatggcttcccctttttttatgggataccaactgcaatatggtcctcaatgctgttctggccatttcaatgactaatgccaaacatctgtatgactaatttttttatgttaaaaaaatactgtttaatgctggctctatggtgatttggttttactaaattgggtttctcgttgggggtggtcttttgaatactgggttttatatattctgctatttttaacgtgtggtttttttcgatatctgggttctaaaagaaatctttggaattaagagaaaaacaagctgaaaaggaagaaaagcagaaaacaaagaaaatagaaacaagtgcagaaaagttgcgtaagctcttaaaagaagagaagaggctaaagaagaaaagaagaaaatcaacttcttcttcaagtgtttcttctgctgatgaatcagtgtcttcatcatcatcctcttcctcttctggtcacaaaaggcataagaaacataagaggaaccgttcagagtcttctcgcagttccagaaggcattcatctagggcatcctcaaatcagatagatcagaataggaaagatgagtgctacccagttccagctaatacttcagcatcttttcttaaccataaacaagaagtggagaaactactggggaagcaggataggttacagtatgaaaagacacagataaaagagaaagatagatgccctctctcttcatcttcacttgaaataccggatgattttggaggtaggtctgaagatccaagagatttttataacagctataaaacccaagcaggtagtagcaaaacagaaaagccatataaatcagaaagacatttttccagtagaagaaattcctcagattccttctgtaggaattcagaggacaagatttatggttataggagatttgaaaaggatatagagggaagaaaagagcactatagaaggtgggaaccaggttctgtgaggcattctacctcaccagcaagctcagaatactcttggaagtcagttgagaaatacaaaaaatacgctcactctggatcacgtgatttcagtagacatgagcaaagataccgtttaaatacaaatcaaggagaatatgaaagagaggacaattatggggaggatatcaaaacagaggttccagaagaagatgcactaagtagcaaagaacactcagaaagcagtgttaagaaaaatttacctcagaatttactgaatatatttaatcagatagctgaatttgaaaaagaaaaaggaaataagtcaaaaaattaatacaccaaggatatcggcaccattacacaaaatgccattaagtgaagtttttggttgtattagtcataacagttgagtgcagaaatctctgcttctaaaattatttgtagagattacaggaaacaaatgcttttaagtaagtttttctcaaattttgtttcagttctaggtcccttgtcacagcttggtttttagactttttatgtatatgtttatgtacagtatattactcttgacagtttgaatttcttcacctaaagataattctctgaaagtactgtttcttcattctattgcggtatatgagaattcctgggtgcatcttattctgctgtttgagagaaaaatttgtgcattgaacacttggatcatttttataaaaattaatttcattttcttttctgttaaattaaaaatcgtcagcttttgaaagatta

SEQ ID NO: 287937 - DNA, 4174 bp, Homo sapiens
agacagtttcttccgcttcctgtaccacccggctcaagtagcggacacggaacagggaactatcagcccgtcggcctccgggccctgcattctctagccatggaccgggaccttttgcggcagtcgctaaattgccacgggtcgtctttgctctctctacttcggagcgaacagcaggacaatccacacttccgtagcctcctggggtcggccgccgagccagcccggggcccgccgccccagcacccgttgcagggcagaaaagagaagagagttgacaacatcgagatacagaaattcatctccaaaaaagcggatctgctttttgcactttcctggaaatcagatgcacctgcaacttctgaaattaatgaagacagtgaagatcattatgcaatcatgccacctttagagcaattcatggagatacctagtatggatcggagagagctgtttttccgagatattgagcgtggtgatatagtgattggaagaattagttctattcgggaattcggttttttcatggtgttgatctgtttaggaagtggtatcatgagagatatagcccacttagaaatcacagctctttgtcccttaagagatgtgccttctcacagtaaccatggggatcctttatcatattaccaaactggtgacatcattcgagctggaatcaaggatattgacagataccatgaaaagctagcagtatctctgtatagctcttctcttccaccacacctatctggtattaaattaggtgtaattagctctgaagagcttcctttatactacaggagaagtgttgagctaaatagcaattctttggagtcctatgaaaatgtcatgcagagttccttgggatttgttaatccaggagtagttgaattccttctagaaaaactaggaatagatgaatctaatccaccatctttaatgagaggcctacaaagcaaaaatttctctgaagatgattttgcttctgcattgagaaaaaaacaatccgcatcttgggctttaaaatgtgtgaagatcggagttgactattttaaagttggacgccatgtggatgctatgaatgaatacaataaagctttggaaatagacaaacaaaacgtggaagctttggtagctcgtggagcattatatgcgacaaaaggaagtttgaacaaagcaatagaagattttgagcttgcattagaaaactgtccaactcacagaaatgcaagaaaatacctctgccagacacttgtagagagaggaggacagttagaagaagaagaaaagtttttaaatgctgaaagttactataagaaagctttggctttggatgagacttttaaagatgcagaggatgctttgcagaaacttcataaatatatgcaggtgattccttatttcctcttagaaatttagtgatatttgaaataatgcccaaacttaattttctcctgaggaaaactattctacattacttaagtaaggcattatgaaaagtttctttttaggtatagtttttcctaattgggtttgacattgcttcatagtgcctctgtttttgtccataatcgaaagtaaagatagctgtgagaaaactattacctaaatttggtatgttgttttgagaaatgtccttatagggagctcacctggtggtttttaaattattgttgctactataattgagctaattataaaaacctttttgagacatattttaaattgtcttttcctgtaatactgatgatgatgttttctcatgcattttcttctgaattggaccattgctgctgtgtctgtgacatctggtgctgctcatccccatccacaaactggaaaatgatttcctatgtaatcatgcatccaactgggctgtgctatttttttaaatgaaatctttggaattaagagaaaaacaagctgaaaaggaagaaaagcagaaaacaaagaaaatagaaacaagtgcagaaaagttgcgtaagctcttaaaagaagagaagaggtaaactataatattcagtatttttaaacttaaggcaactactgaattgaacccaaagtgccatactggaggtaaagtaaataaaaatatgaaagtatttcaagtgccaatcagtgactgttaagaatctttagcaaatatgtgttccatgtattttcttattaaagagatgaagtggaatttaaggctagaattctacaaaaaaagagtatcttagaattaaaatatagaataagttactttaattatgttttaggaagaaatattttagaactagagcagtggttctcaactaggggtggatttattcacccggggacatttgacaagatgtggagacatttttgattgccataactgatagggtgctactgcatctagtgtataatggtcagggatgctcttaaacattctgtaatgcacaggtcagctcccacccgcacccccaccccctaccaagaattatttggctgaaaataccaataatcaggtgaagaaaccatgaactagaggtagccaaataaaaaagttgagttctcctttatgtgttcagtagtcttaagtttttaaggtagtgttgaaaaaagtctgtctttcagagatgatggatttgcttacaatgatacctgtctgcaagcattttttcccccaaaagtgcttaatagtaaaattagatcttgtagtagccgagattattgtatcatttatctgaaccacagcttttataaaatctttaaaggaaacaaatagggcccacatctttatgaataatttagaaacatttttgtatatatatgacaaatgaactgttttttttaggctaaagaagaaaagaagaaaatcaacttcttcttcaagtgtttcttctgctgatgaatcagtgtcttcatcatcatcctcttcctcttctggtcacaaaaggcataagaaacataagaggaaccgttcagagtcttctcgcagttccagaaggcattcatctagggcatcctcaaatcagatagatcagaataggaaagatgagtgctacccagttccagctaatacttcagcatcttttcttaaccataaacaagaagtggagaaactactggggaagcaggataggttacagtatgaaaagacacagataaaagagaaagatagatgccctctctcttcatcttcacttgaaataccggatgattttggaggtaggtctgaagatccaagagatttttataacagctataaaacccaagcaggtagtagcaaaacagaaaagccatataaatcagaaagacatttttccagtagaagaaattcctcagattccttctgtaggaattcagaggacaagatttatggttataggagatttgaaaaggatatagagggaagaaaagagcactatagaaggtgggaaccaggttctgtgaggcattctacctcaccagcaagctcagaatactcttggaagtcagttgagaaatacaaaaaatacgctcactctggatcacgtgatttcagtagacatgagcaaagataccgtttaaatacaaatcaaggagaatatgaaagagaggacaattatggggaggatatcaaaacagaggttccagaagaagatgcactaagtagcaaagaacactcagaaagcagtgttaagaaaaatttacctcagaatttactgaatatatttaatcagatagctgaatttgaaaaagaaaaaggaaataagtcaaaaaattaatacaccaaggatatcggcaccattacacaaaatgccattaagtgaagtttttggttgtattagtcataacagttgagtgcagaaatctctgcttctaaaattatttgtagagattacaggaaacaaatgcttttaagtaagtttttctcaaattttgtttcagttctaggtcccttgtcacagcttggtttttagactttttatgtatatgtttatgtacagtatattactcttgacagtttgaatttcttcacctaaagataattctctgaaagtactgtttcttcattctattgcggtatatgagaattcctgggtgcatcttattctgctgtttgagagaaaaatttgtgcattgaacacttggatcatttttataaaaattaatttcattttcttttctgttaaattaaaaatcgtcagcttttgaaagatta

SEQ ID NO: 287938 - DNA, 3668 bp, Homo sapiens
agacagtttcttccgcttcctgtaccacccggctcaagtagcggacacggaacagggaactatcagcccgtcggcctccgggccctgcattctctagccatggaccgggaccttttgcggcagtcgctaaattgccacgggtcgtctttgctctctctacttcggagcgaacagcaggacaatccacacttccgtagcctcctggggtcggccgccgagccagcccggggcccgccgccccagcacccgttgcagggcagaaaagagaagagagttgacaacatcgagatacagaaattcatctccaaaaaagcggatctgctttttgcactttcctggaaatcagatgcacctgcaacttctgaaattaatgaagacagtgaagatcattatgcaatcatgccacctttagagcaattcatggagatacctagtatggatcggagagagctgtttttccgagatattgagcgtggtgatatagtgattggaagaattagttctattcgggaattcggttttttcatggtgttgatctgtttaggaagtggtatcatgagagatatagcccacttagaaatcacagctctttgtcccttaagagatgtgccttctcacagtaaccatggggatcctttatcatattaccaaactggtgacatcattcgagctggaatcaaggatattgacagataccatgaaaagctagcagtatctctgtatagctcttctcttccaccacacctatctggtattaaattaggtgtaattagctctgaagagcttcctttatactacaggagaagtgttgagctaaatagcaattctttggagtcctatgaaaatgtcatgcagagttccttgggatttgttaatccaggagtagttgaattccttctagaaaaactaggaatagatgaatctaatccaccatctttaatgagaggcctacaaagcaaaaatttctctgaagatgattttgcttctgcattgagaaaaaaacaatccgcatcttgggctttaaaatgtgtgaagatcggagttgactattttaaagttggacgccatgtggatgctatgaatgaatacaataaagctttggaaatagacaaacaaaacgtggaagctttggtagctcgtggagcattatatgcgacaaaaggaagtttgaacaaagcaatagaagattttgagcttgcattagaaaactgtccaactcacagaaatgcaagaaaatacctctgccagacacttgtagagagaggaggacagttagaagaagaagaaaagtttttaaatgctgaaagttactataagaaagctttggctttggatgagacttttaaagatgcagaggatgctttgcagaaacttcataaatatatgcagaaatctttggaattaagagaaaaacaagctgaaaaggaagaaaagcagaaaacaaagaaaatagaaacaagtgcagaaaagttgcgtaagctcttaaaagaagagaagaggtaaactataatattcagtatttttaaacttaaggcaactactgaattgaacccaaagtgccatactggaggtaaagtaaataaaaatatgaaagtatttcaagtgccaatcagtgactgttaagaatctttagcaaatatgtgttccatgtattttcttattaaagagatgaagtggaatttaaggctagaattctacaaaaaaagagtatcttagaattaaaatatagaataagttactttaattatgttttaggaagaaatattttagaactagagcagtggttctcaactaggggtggatttattcacccggggacatttgacaagatgtggagacatttttgattgccataactgatagggtgctactgcatctagtgtataatggtcagggatgctcttaaacattctgtaatgcacaggtcagctcccacccgcacccccaccccctaccaagaattatttggctgaaaataccaataatcaggtgaagaaaccatgaactagaggtagccaaataaaaaagttgagttctcctttatgtgttcagtagtcttaagtttttaaggtagtgttgaaaaaagtctgtctttcagagatgatggatttgcttacaatgatacctgtctgcaagcattttttcccccaaaagtgcttaatagtaaaattagatcttgtagtagccgagattattgtatcatttatctgaaccacagcttttataaaatctttaaaggaaacaaatagggcccacatctttatgaataatttagaaacatttttgtatatatatgacaaatgaactgttttttttaggctaaagaagaaaagaagaaaatcaacttcttcttcaagtgtttcttctgctgatgaatcagtgtcttcatcatcatcctcttcctcttctggtcacaaaaggcataagaaacataagaggaaccgttcagagtcttctcgcagttccagaaggcattcatctagggcatcctcaaatcagatagatcagaataggaaagatgagtgctacccagttccagctaatacttcagcatcttttcttaaccataaacaagaagtggagaaactactggggaagcaggataggttacagtatgaaaagacacagataaaagagaaagatagatgccctctctcttcatcttcacttgaaataccggatgattttggaggtaggtctgaagatccaagagatttttataacagctataaaacccaagcaggtagtagcaaaacagaaaagccatataaatcagaaagacatttttccagtagaagaaattcctcagattccttctgtaggaattcagaggacaagatttatggttataggagatttgaaaaggatatagagggaagaaaagagcactatagaaggtgggaaccaggttctgtgaggcattctacctcaccagcaagctcagaatactcttggaagtcagttgagaaatacaaaaaatacgctcactctggatcacgtgatttcagtagacatgagcaaagataccgtttaaatacaaatcaaggagaatatgaaagagaggacaattatggggaggatatcaaaacagaggttccagaagaagatgcactaagtagcaaagaacactcagaaagcagtgttaagaaaaatttacctcagaatttactgaatatatttaatcagatagctgaatttgaaaaagaaaaaggaaataagtcaaaaaattaatacaccaaggatatcggcaccattacacaaaatgccattaagtgaagtttttggttgtattagtcataacagttgagtgcagaaatctctgcttctaaaattatttgtagagattacaggaaacaaatgcttttaagtaagtttttctcaaattttgtttcagttctaggtcccttgtcacagcttggtttttagactttttatgtatatgtttatgtacagtatattactcttgacagtttgaatttcttcacctaaagataattctctgaaagtactgtttcttcattctattgcggtatatgagaattcctgggtgcatcttattctgctgtttgagagaaaaatttgtgcattgaacacttggatcatttttataaaaattaatttcattttcttttctgttaaattaaaaatcgtcagcttttgaaagatta

SEQ ID NO: 287939 - DNA, 3355 bp, Homo sapiens
agacagtttcttccgcttcctgtaccacccggctcaagtagcggacacggaacagggaactatcagcccgtcggcctccgggccctgcattctctagccatggaccgggaccttttgcggcagtcgctaaattgccacgggtcgtctttgctctctctacttcggagcgaacagcaggacaatccacacttccgtagcctcctggggtcggccgccgagccagcccggggcccgccgccccagcacccgttgcagggcagaaaagagaagagagttgacaacatcgagatacagaaattcatctccaaaaaagcggatctgctttttgcactttcctggaaatcagatgcacctgcaacttctgaaattaatgaagacagtgaagatcattatgcaatcatgccacctttagagcaattcatggagatacctagtatggatcggagagagctgtttttccgagatattgagcgtggtgatatagtgattggaagaattagttctattcgggaattcggttttttcatggtgttgatctgtttaggaagtggtatcatgagagatatagcccacttagaaatcacagctctttgtcccttaagagatgtgccttctcacagtaaccatggggatcctttatcatattaccaaactggtgacatcattcgagctggaatcaaggatattgacagataccatgaaaagctagcagtatctctgtatagctcttctcttccaccacacctatctggtattaaattaggtgtaattagctctgaagagcttcctttatactacaggagaagtgttgagctaaatagcaattctttggagtcctatgaaaatgtcatgcagagttccttgggatttgttaatccaggagtagttgaattccttctagaaaaactaggaatagatgaatctaatccaccatctttaatgagaggcctacaaagcaaaaatttctctgaagatgattttgcttctgcattgagaaaaaaacaatccgcatcttgggctttaaaatgtgtgaagatcggagttgactattttaaagttggacgccatgtggatgctatgaatgaatacaataaagctttggaaatagacaaacaaaacgtggaagctttggtagctcgtggagcattatatgcgacaaaaggaagtttgaacaaagcaatagaagattttgagcttgcattagaaaactgtccaactcacagaaatgcaagaaaatacctctgccagacacttgtagagagaggaggacagttagaagaagaagaaaagtttttaaatgctgaaagttactataagaaagctttggctttggatgagacttttaaagatgcagaggatgctttgcagaaacttcataaatatatgcaggtgattccttatttcctcttagaaatttagtgatatttgaaataatgcccaaacttaattttctcctgaggaaaactattctacattacttaagtaaggcattatgaaaagtttctttttaggtatagtttttcctaattgggtttgacattgcttcatagtgcctctgtttttgtccataatcgaaagtaaagatagctgtgagaaaactattacctaaatttggtatgttgttttgagaaatgtccttatagggagctcacctggtggtttttaaattattgttgctactataattgagctaattataaaaacctttttgagacatattttaaattgtcttttcctgtaatactgatgatgatgttttctcatgcattttcttctgaattggaccattgctgctgtgtctgtgacatctggtgctgctcatccccatccacaaactggaaaatgatttcctatgtaatcatgcatccaactgggctgtgctatttttttaaatgaaatctttggaattaagagaaaaacaagctgaaaaggaagaaaagcagaaaacaaagaaaatagaaacaagtgcagaaaagttgcgtaagctcttaaaagaagagaagaggctaaagaagaaaagaagaaaatcaacttcttcttcaagtgtttcttctgctgatgaatcagtgtcttcatcatcatcctcttcctcttctggtcacaaaaggcataagaaacataagaggaaccgttcagagtcttctcgcagttccagaaggcattcatctagggcatcctcaaatcagatagatcagaataggaaagatgagtgctacccagttccagctaatacttcagcatcttttcttaaccataaacaagaagtggagaaactactggggaagcaggataggttacagtatgaaaagacacagataaaagagaaagatagatgccctctctcttcatcttcacttgaaataccggatgattttggaggtaggtctgaagatccaagagatttttataacagctataaaacccaagcaggtagtagcaaaacagaaaagccatataaatcagaaagacatttttccagtagaagaaattcctcagattccttctgtaggaattcagaggacaagatttatggttataggagatttgaaaaggatatagagggaagaaaagagcactatagaaggtgggaaccaggttctgtgaggcattctacctcaccagcaagctcagaatactcttggaagtcagttgagaaatacaaaaaatacgctcactctggatcacgtgatttcagtagacatgagcaaagataccgtttaaatacaaatcaaggagaatatgaaagagaggacaattatggggaggatatcaaaacagaggttccagaagaagatgcactaagtagcaaagaacactcagaaagcagtgttaagaaaaatttacctcagaatttactgaatatatttaatcagatagctgaatttgaaaaagaaaaaggaaataagtcaaaaaattaatacaccaaggatatcggcaccattacacaaaatgccattaagtgaagtttttggttgtattagtcataacagttgagtgcagaaatctctgcttctaaaattatttgtagagattacaggaaacaaatgcttttaagtaagtttttctcaaattttgtttcagttctaggtcccttgtcacagcttggtttttagactttttatgtatatgtttatgtacagtatattactcttgacagtttgaatttcttcacctaaagataattctctgaaagtactgtttcttcattctattgcggtatatgagaattcctgggtgcatcttattctgctgtttgagagaaaaatttgtgcattgaacacttggatcatttttataaaaattaatttcattttcttttctgttaaattaaaaatcgtcagcttttgaaagatta

SEQ ID NO: 287940 - DNA, 4135 bp, Homo sapiens
agacagtttcttccgcttcctgtaccacccggctcaagtagcggacacggaacagggaactatcagcccgtcggcctccgggccctgcattctctagccatggaccgggaccttttgcggcagtcgctaaattgccacgggtcgtctttgctctctctacttcggagcgaacagcaggacaatccacacttccgtagcctcctggggtcggccgccgagccagcccggggcccgccgccccagcacccgttgcagggcagaaaagagaagagagttgacaacatcgagatacagaaattcatctccaaaaaagcggatctgctttttgcactttcctggaaatcagatgcacctgcaacttctgaaattaatgaagacagtgaagatcattatgcaatcatgccacctttagagcaattcatggagatacctagtatggatcggagagagctgtttttccgagatattgagcgtggtgatatagtgattggaagaattagttctattcgggaattcggttttttcatggtgttgatctgtttaggaagtggtatcatgagagatatagcccacttagaaatcacagctctttgtcccttaagagatgtgccttctcacagtaaccatggggatcctttatcatattaccaaactggtgacatcattcgagctggaatcaaggatattgacagataccatgaaaagctagcagtatctctgtatagctcttctcttccaccacacctatctggtattaaattaggtgtaattagctctgaagagcttcctttatactacaggagaagtgttgagctaaatagcaattctttggagtcctatgaaaatgtcatgcagagttccttgggatttgttaatccaggagtagttgaattccttctagaaaaactaggaatagatgaatctaatccaccatctttaatgagaggcctacaaagcaaaaatttctctgaagatgattttgcttctgcattgagaaaaaaacaatccgcatcttgggctttaaaatgtgtgaagatcggagttgactattttaaagttggacgccatgtggatgctatgaatgaatacaataaagctttggaaatagacaaacaaaacgtggaagctttggtagctcgtggagcattatatgcgacaaaaggaagtttgaacaaagcaatagaagattttgagcttgcattagaaaactgtccaactcacagaaatgcaagaaaatacctctgccagacacttgtagagagaggaggacagttagaagaagaagaaaagtttttaaatgctgaaagttactataagaaagctttggctttggatgagacttttaaagatgcagaggatgctttgcagaaacttcataaatatatgcaggtgattccttatttcctcttagaaatttagtgatatttgaaataatgcccaaacttaattttctcctgaggaaaactattctacattacttaagtaaggcattatgaaaagtttctttttaggtatagtttttcctaattgggtttgacattgcttcatagtgcctctgtttttgtccataatcgaaagtaaagatagctgtgagaaaactattacctaaatttggtatgttgttttgagaaatgtccttatagggagctcacctggtggtttttaaattattgttgctactataattgagctaattataaaaacctttttgagacatattttaaattgtcttttcctgtaatactgatgatgatgttttctcatgcattttcttctgaattggaccattgctgctgtgtctgtgacatctggtgctgctcatccccatccacaaactggaaaatgatttcctatgtaatcatgcatccaactgggctgtgctatttttttaaatggtttgtatttgaacatggtgattcctccttcacttcaccttaacggaatgtctttatttgaattttatttgtaaaatgtgtcctgtttaaatttttcaatctttaaaaataatttttatgtactttttttttttttttaacctttcttgcactctgggtcatgggtaccactgcaatggcttcccctttttttatgggataccaactgcaatatggtcctcaatgctgttctggccatttcaatgactaatgccaaacatctgtatgactaatttttttatgttaaaaaaatactgtttaatgctggctctatggtgatttggttttactaaattgggtttctcgttgggggtggtcttttgaatactgggttttatatattctgctatttttaacgtgtggtttttttcgatatctgggttctaaaagaaatctttggaattaagagaaaaacaagctgaaaaggaagaaaagcagaaaacaaagaaaatagaaacaagtgcagaaaagttgcgtaagctcttaaaagaagagaagaggtaaactataatattcagtatttttaaacttaaggcaactactgaattgaacccaaagtgccatactggaggtaaagtaaataaaaatatgaaagtatttcaagtgccaatcagtgactgttaagaatctttagcaaatatgtgttccatgtattttcttattaaagagatgaagtggaatttaaggctagaattctacaaaaaaagagtatcttagaattaaaatatagaataagttactttaattatgttttaggaagaaatattttagaactagagcagtggttctcaactaggggtggatttattcacccggggacatttgacaagatgtggagacatttttgattgccataactgatagggtgctactgcatctagtgtataatggtcagggatgctcttaaacattctgtaatgcacaggtcagctcccacccgcacccccaccccctaccaagaattatttggctgaaaataccaataatcaggtgaagaaaccatgaactagaggtagccaaataaaaaagttgagttctcctttatgtgttcagtagtcttaagtttttaaggtagtgttgaaaaaagtctgtctttcagagatgatggatttgcttacaatgatacctgtctgcaagcattttttcccccaaaagtgcttaatagtaaaattagatcttgtagtagccgagattattgtatcatttatctgaaccacagcttttataaaatctttaaaggaaacaaatagggcccacatctttatgaataatttagaaacatttttgtatatatatgacaaatgaactgttttttttaggctaaagaagaaaagaagaaaatcaacttcttcttcaagtgtttcttctgctgatgaatcagtgtcttcatcatcatcctcttcctcttctggtcacaaaaggcataagaaacataagaggaaccgttcagagtcttctcgcagttccagaaggcattcatctagggcatcctcaaatcagatagatcagaataggaaagatgagtgctacccagttccagctaatacttcagcatcttttcttaaccataaacaagaagtggagaaactactggggaagcaggataggttacagtatgaaaagacacagataaaagagaaagatagatgccctctctcttcatcttcacttgaaataccggatgattttggaggtaggtctgaagatccaagagatttttataacagctataaaacccaagcaggtagtagcaaaacagaaaagccatataaatcagaaagacatttttccagtagaagaaattcctcagattccttctgtaggaattcagaggacaagatttatggttataggagatttgaaaaggatatagagggaagaaaagagcactatagaaggtgggaaccaggttctgtgaggcattctacctcaccagcaagctcagaatactcttggaagtcagttgagaaatacaaaaaatacgctcactctggatcacgtgatttcagtagacatgagcaaagataccgtttaaatacaaatcaaggagaatatgaaagagaggacaattatggggaggatatcaaaacagaggttccagaagaagatgcactaagtagcaaagaacactcagaaagcagtgttaagaaaaatttacctcagaatttactgaatatatttaatcagatagctgaatttga

SEQ ID NO: 287941 - DNA, 4602 bp, Homo sapiens
agacagtttcttccgcttcctgtaccacccggctcaagtagcggacacggaacagggaactatcagcccgtcggcctccgggccctgcattctctagccatggaccgggaccttttgcggcagtcgctaaattgccacgggtcgtctttgctctctctacttcggagcgaacagcaggacaatccacacttccgtagcctcctggggtcggccgccgagccagcccggggcccgccgccccagcacccgttgcagggcagaaaagagaagagagttgacaacatcgagatacagaaattcatctccaaaaaagcggatctgctttttgcactttcctggaaatcagatgcacctgcaacttctgaaattaatgaagacagtgaagatcattatgcaatcatgccacctttagagcaattcatggagatacctagtatggatcggagagagctgtttttccgagatattgagcgtggtgatatagtgattggaagaattagttctattcgggaattcggttttttcatggtgttgatctgtttaggaagtggtatcatgagagatatagcccacttagaaatcacagctctttgtcccttaagagatgtgccttctcacagtaaccatggggatcctttatcatattaccaaactggtgacatcattcgagctggaatcaaggatattgacagataccatgaaaagctagcagtatctctgtatagctcttctcttccaccacacctatctggtattaaattaggtgtaattagctctgaagagcttcctttatactacaggagaagtgttgagctaaatagcaattctttggagtcctatgaaaatgtcatgcagagttccttgggatttgttaatccaggagtagttgaattccttctagaaaaactaggaatagatgaatctaatccaccatctttaatgagaggcctacaaagcaaaaatttctctgaagatgattttgcttctgcattgagaaaaaaacaatccgcatcttgggctttaaaatgtgtgaagatcggagttgactattttaaagttggacgccatgtggatgctatgaatgaatacaataaagctttggaaatagacaaacaaaacgtggaagctttggtagctcgtggagcattatatgcgacaaaaggaagtttgaacaaagcaatagaagattttgagcttgcattagaaaactgtccaactcacagaaatgcaagaaaatacctctgccagacacttgtagagagaggaggacagttagaagaagaagaaaagtttttaaatgctgaaagttactataagaaagctttggctttggatgagacttttaaagatgcagaggatgctttgcagaaacttcataaatatatgcaggtgattccttatttcctcttagaaatttagtgatatttgaaataatgcccaaacttaattttctcctgaggaaaactattctacattacttaagtaaggcattatgaaaagtttctttttaggtatagtttttcctaattgggtttgacattgcttcatagtgcctctgtttttgtccataatcgaaagtaaagatagctgtgagaaaactattacctaaatttggtatgttgttttgagaaatgtccttatagggagctcacctggtggtttttaaattattgttgctactataattgagctaattataaaaacctttttgagacatattttaaattgtcttttcctgtaatactgatgatgatgttttctcatgcattttcttctgaattggaccattgctgctgtgtctgtgacatctggtgctgctcatccccatccacaaactggaaaatgatttcctatgtaatcatgcatccaactgggctgtgctatttttttaaatggtttgtatttgaacatggtgattcctccttcacttcaccttaacggaatgtctttatttgaattttatttgtaaaatgtgtcctgtttaaatttttcaatctttaaaaataatttttatgtactttttttttttttttaacctttcttgcactctgggtcatgggtaccactgcaatggcttcccctttttttatgggataccaactgcaatatggtcctcaatgctgttctggccatttcaatgactaatgccaaacatctgtatgactaatttttttatgttaaaaaaatactgtttaatgctggctctatggtgatttggttttactaaattgggtttctcgttgggggtggtcttttgaatactgggttttatatattctgctatttttaacgtgtggtttttttcgatatctgggttctaaaagaaatctttggaattaagagaaaaacaagctgaaaaggaagaaaagcagaaaacaaagaaaatagaaacaagtgcagaaaagttgcgtaagctcttaaaagaagagaagaggtaaactataatattcagtatttttaaacttaaggcaactactgaattgaacccaaagtgccatactggaggtaaagtaaataaaaatatgaaagtatttcaagtgccaatcagtgactgttaagaatctttagcaaatatgtgttccatgtattttcttattaaagagatgaagtggaatttaaggctagaattctacaaaaaaagagtatcttagaattaaaatatagaataagttactttaattatgttttaggaagaaatattttagaactagagcagtggttctcaactaggggtggatttattcacccggggacatttgacaagatgtggagacatttttgattgccataactgatagggtgctactgcatctagtgtataatggtcagggatgctcttaaacattctgtaatgcacaggtcagctcccacccgcacccccaccccctaccaagaattatttggctgaaaataccaataatcaggtgaagaaaccatgaactagaggtagccaaataaaaaagttgagttctcctttatgtgttcagtagtcttaagtttttaaggtagtgttgaaaaaagtctgtctttcagagatgatggatttgcttacaatgatacctgtctgcaagcattttttcccccaaaagtgcttaatagtaaaattagatcttgtagtagccgagattattgtatcatttatctgaaccacagcttttataaaatctttaaaggaaacaaatagggcccacatctttatgaataatttagaaacatttttgtatatatatgacaaatgaactgttttttttaggctaaagaagaaaagaagaaaatcaacttcttcttcaagtgtttcttctgctgatgaatcagtgtcttcatcatcatcctcttcctcttctggtcacaaaaggcataagaaacataagaggaaccgttcagagtcttctcgcagttccagaaggcattcatctagggcatcctcaaatcagatagatcagaataggaaagatgagtgctacccagttccagctaatacttcagcatcttttcttaaccataaacaagaagtggagaaactactggggaagcaggataggttacagtatgaaaagacacagataaaagagaaagatagatgccctctctcttcatcttcacttgaaataccggatgattttggagtgtactcctatttatttaaaaagttaactataaaacagcctcaggcaggtccttcaggagatattccagaagagggcattgttatcatagatgacagctccattcatgttactgaccctgaagaccttcaagtgggacaagatatggaggtggaagacagtggtattgatgatcctgaccacgggtaggcttaggtttatgtgtgtgtatgtgtcttagtttttaacaaaaaaattaaaaagtaaaaaaactaaaaatagaaaaatgcttagagaataaggatataaagaatatttttgtgcagttgaacaatgagtgcttaagctaaatgtcatcacaaaagagtaaaaaaattttacaaaattaaaaatgtttaaagttaaaaagctctaggaagctaaggtcaatttattattggagaaataaaattatttttatgaatttactgtagcctaggtgtacattatttatcatgtctacagtagtgttcagcaattaggccttcacattctctcaccactcactcactcagtcactcacccagagcagcttccagtcccgcaagctccatttatggtaagtgccctgtacaggtgtaccatttttttaatccattataccatatttttattgtaccttttctatgtttagatttgtttagatacacaagtaccactgtgttacagttgcctatagtactcagtacagtaacacactttacaagcttatagcctaggaacaataggctataccatctaggtttgtgtaagtacactcttatgatgttcacacagtgacaaaatcgcccaaggatgcattcatcagaacacattcccattgttatccaatgcatgactgtataatggttttatggattaaattttttatgtaattcaactggaaagtatttttatgttattttggaaaaaataaaacaatgacaattgaaatcatggaatctgcaaagattcacag

SEQ ID NO: 287942 - DNA, 2849 bp, Homo sapiens
agacagtttcttccgcttcctgtaccacccggctcaagtagcggacacggaacagggaactatcagcccgtcggcctccgggccctgcattctctagccatggaccgggaccttttgcggcagtcgctaaattgccacgggtcgtctttgctctctctacttcggagcgaacagcaggacaatccacacttccgtagcctcctggggtcggccgccgagccagcccggggcccgccgccccagcacccgttgcagggcagaaaagagaagagagttgacaacatcgagatacagaaattcatctccaaaaaagcggatctgctttttgcactttcctggaaatcagatgcacctgcaacttctgaaattaatgaagacagtgaagatcattatgcaatcatgccacctttagagcaattcatggagatacctagtatggatcggagagagctgtttttccgagatattgagcgtggtgatatagtgattggaagaattagttctattcgggaattcggttttttcatggtgttgatctgtttaggaagtggtatcatgagagatatagcccacttagaaatcacagctctttgtcccttaagagatgtgccttctcacagtaaccatggggatcctttatcatattaccaaactggtgacatcattcgagctggaatcaaggatattgacagataccatgaaaagctagcagtatctctgtatagctcttctcttccaccacacctatctggtattaaattaggtgtaattagctctgaagagcttcctttatactacaggagaagtgttgagctaaatagcaattctttggagtcctatgaaaatgtcatgcagagttccttgggatttgttaatccaggagtagttgaattccttctagaaaaactaggaatagatgaatctaatccaccatctttaatgagaggcctacaaagcaaaaatttctctgaagatgattttgcttctgcattgagaaaaaaacaatccgcatcttgggctttaaaatgtgtgaagatcggagttgactattttaaagttggacgccatgtggatgctatgaatgaatacaataaagctttggaaatagacaaacaaaacgtggaagctttggtagctcgtggagcattatatgcgacaaaaggaagtttgaacaaagcaatagaagattttgagcttgcattagaaaactgtccaactcacagaaatgcaagaaaatacctctgccagacacttgtagagagaggaggacagttagaagaagaagaaaagtttttaaatgctgaaagttactataagaaagctttggctttggatgagacttttaaagatgcagaggatgctttgcagaaacttcataaatatatgcagaaatctttggaattaagagaaaaacaagctgaaaaggaagaaaagcagaaaacaaagaaaatagaaacaagtgcagaaaagttgcgtaagctcttaaaagaagagaagaggctaaagaagaaaagaagaaaatcaacttcttcttcaagtgtttcttctgctgatgaatcagtgtcttcatcatcatcctcttcctcttctggtcacaaaaggcataagaaacataagaggaaccgttcagagtcttctcgcagttccagaaggcattcatctagggcatcctcaaatcagatagatcagaataggaaagatgagtgctacccagttccagctaatacttcagcatcttttcttaaccataaacaagaagtggagaaactactggggaagcaggataggttacagtatgaaaagacacagataaaagagaaagatagatgccctctctcttcatcttcacttgaaataccggatgattttggaggtaggtctgaagatccaagagatttttataacagctataaaacccaagcaggtagtagcaaaacagaaaagccatataaatcagaaagacatttttccagtagaagaaattcctcagattccttctgtaggaattcagaggacaagatttatggttataggagatttgaaaaggatatagagggaagaaaagagcactatagaaggtgggaaccaggttctgtgaggcattctacctcaccagcaagctcagaatactcttggaagtcagttgagaaatacaaaaaatacgctcactctggatcacgtgatttcagtagacatgagcaaagataccgtttaaatacaaatcaaggagaatatgaaagagaggacaattatggggaggatatcaaaacagaggttccagaagaagatgcactaagtagcaaagaacactcagaaagcagtgttaagaaaaatttacctcagaatttactgaatatatttaatcagatagctgaatttgaaaaagaaaaaggaaataagtcaaaaaattaatacaccaaggatatcggcaccattacacaaaatgccattaagtgaagtttttggttgtattagtcataacagttgagtgcagaaatctctgcttctaaaattatttgtagagattacaggaaacaaatgcttttaagtaagtttttctcaaattttgtttcagttctaggtcccttgtcacagcttggtttttagactttttatgtatatgtttatgtacagtatattactcttgacagtttgaatttcttcacctaaagataattctctgaaagtactgtttcttcattctattgcggtatatgagaattcctgggtgcatcttattctgctgtttgagagaaaaatttgtgcattgaacacttggatcatttttataaaaattaatttcattttcttttctgttaaattaaaaatcgtcagcttttgaaagatta

SEQ ID NO: 287943 - DNA, 4058 bp, Homo sapiens
agacagtttcttccgcttcctgtaccacccggctcaagtagcggacacggaacagggaactatcagcccgtcggcctccgggccctgcattctctagccatggaccgggaccttttgcggcagtcgctaaattgccacgggtcgtctttgctctctctacttcggagcgaacagcaggacaatccacacttccgtagcctcctggggtcggccgccgagccagcccggggcccgccgccccagcacccgttgcagggcagaaaagagaagagagttgacaacatcgagatacagaaattcatctccaaaaaagcggatctgctttttgcactttcctggaaatcagatgcacctgcaacttctgaaattaatgaagacagtgaagatcattatgcaatcatgccacctttagagcaattcatggagatacctagtatggatcggagagagctgtttttccgagatattgagcgtggtgatatagtgattggaagaattagttctattcgggaattcggttttttcatggtgttgatctgtttaggaagtggtatcatgagagatatagcccacttagaaatcacagctctttgtcccttaagagatgtgccttctcacagtaaccatggggatcctttatcatattaccaaactggtgacatcattcgagctggaatcaaggatattgacagataccatgaaaagctagcagtatctctgtatagctcttctcttccaccacacctatctggtattaaattaggtgtaattagctctgaagagcttcctttatactacaggagaagtgttgagctaaatagcaattctttggagtcctatgaaaatgtcatgcagagttccttgggatttgttaatccaggagtagttgaattccttctagaaaaactaggaatagatgaatctaatccaccatctttaatgagaggcctacaaagcaaaaatttctctgaagatgattttgcttctgcattgagaaaaaaacaatccgcatcttgggctttaaaatgtgtgaagatcggagttgactattttaaagttggacgccatgtggatgctatgaatgaatacaataaagctttggaaatagacaaacaaaacgtggaagctttggtagctcgtggagcattatatgcgacaaaaggaagtttgaacaaagcaatagaagattttgagcttgcattagaaaactgtccaactcacagaaatgcaagaaaatacctctgccagacacttgtagagagaggaggacagttagaagaagaagaaaagtttttaaatgctgaaagttactataagaaagctttggctttggatgagacttttaaagatgcagaggatgctttgcagaaacttcataaatatatgcaggtgattccttatttcctcttagaaatttagtgatatttgaaataatgcccaaacttaattttctcctgaggaaaactattctacattacttaagtaaggcattatgaaaagtttctttttaggtatagtttttcctaattgggtttgacattgcttcatagtgcctctgtttttgtccataatcgaaagtaaagatagctgtgagaaaactattacctaaatttggtatgttgttttgagaaatgtccttatagggagctcacctggtggtttttaaattattgttgctactataattgagctaattataaaaacctttttgagacatattttaaattgtcttttcctgtaatactgatgatgatgttttctcatgcattttcttctgaattggaccattgctgctgtgtctgtgacatctggtgctgctcatccccatccacaaactggaaaatgatttcctatgtaatcatgcatccaactgggctgtgctatttttttaaatggtttgtatttgaacatggtgattcctccttcacttcaccttaacggaatgtctttatttgaattttatttgtaaaatgtgtcctgtttaaatttttcaatctttaaaaataatttttatgtactttttttttttttttaacctttcttgcactctgggtcatgggtaccactgcaatggcttcccctttttttatgggataccaactgcaatatggtcctcaatgctgttctggccatttcaatgactaatgccaaacatctgtatgactaatttttttatgttaaaaaaatactgtttaatgctggctctatggtgatttggttttactaaattgggtttctcgttgggggtggtcttttgaatactgggttttatatattctgctatttttaacgtgtggtttttttcgatatctgggttctaaaagaaatctttggaattaagagaaaaacaagctgaaaaggaagaaaagcagaaaacaaagaaaatagaaacaagtgcagaaaagttgcgtaagctcttaaaagaagagaagaggtaaactataatattcagtatttttaaacttaaggcaactactgaattgaacccaaagtgccatactggaggtaaagtaaataaaaatatgaaagtatttcaagtgccaatcagtgactgttaagaatctttagcaaatatgtgttccatgtattttcttattaaagagatgaagtggaatttaaggctagaattctacaaaaaaagagtatcttagaattaaaatatagaataagttactttaattatgttttaggaagaaatattttagaactagagcagtggttctcaactaggggtggatttattcacccggggacatttgacaagatgtggagacatttttgattgccataactgatagggtgctactgcatctagtgtataatggtcagggatgctcttaaacattctgtaatgcacaggtcagctcccacccgcacccccaccccctaccaagaattatttggctgaaaataccaataatcaggtgaagaaaccatgaactagaggtagccaaataaaaaagttgagttctcctttatgtgttcagtagtcttaagtttttaaggtagtgttgaaaaaagtctgtctttcagagatgatggatttgcttacaatgatacctgtctgcaagcattttttcccccaaaagtgcttaatagtaaaattagatcttgtagtagccgagattattgtatcatttatctgaaccacagcttttataaaatctttaaaggaaacaaatagggcccacatctttatgaataatttagaaacatttttgtatatatatgacaaatgaactgttttttttaggctaaagaagaaaagaagaaaatcaacttcttcttcaagtgtttcttctgctgatgaatcagtgtcttcatcatcatcctcttcctcttctggtcacaaaaggcataagaaacataagaggaaccgttcagagtcttctcgcagttccagaaggcattcatctagggcatcctcaaatcagatagatcagaataggaaagatgagtgctacccagttccagctaatacttcagcatcttttcttaaccataaacaagaagtggagaaactactggggaagcaggataggttacagtatgaaaagacacagataaaagagaaagatagatgccctctctcttcatcttcacttgaaataccggatgattttggagttctaggtcccttgtcacagcttggtttttagactttttatgtatatgtttatgtacagtatattactcttgacagtttgaatttcttcacctaaagataattctctgaaagtactgtttcttcattctattgcggtatatgagaattcctgggtgcatcttattctgctgtttgagagaaaaatttgtgcattgaacacttggatcatttttataaaaattaatttcattttcttttctgttaaattaaaaatcgtcagcttttgaaagattaaaaaaaaaaatgtttcttgaacacttttatatttatcagtttaaatattacattttttgcccaattttttttaaaatttttaaatggtagattatatgtcttaattttcctctaaagcccaatttgattaaaagtggtttgtgaacagtcattggct

SEQ ID NO: 287944 - DNA, 3354 bp, Homo sapiens
agacagtttcttccgcttcctgtaccacccggctcaagtagcggacacggaacagggaactatcagcccgtcggcctccgggccctgcattctctagccatggaccgggaccttttgcggcagtcgctaaattgccacgggtcgtctttgctctctctacttcggagcgaacagcaggacaatccacacttccgtagcctcctggggtcggccgccgagccagcccggggcccgccgccccagcacccgttgcagggcagaaaagagaagagagttgacaacatcgagatacagaaattcatctccaaaaaagcggatctgctttttgcactttcctggaaatcagatgcacctgcaacttctgaaattaatgaagacagtgaagatcattatgcaatcatgccacctttagagcaattcatggagatacctagtatggatcggagagagctgtttttccgagatattgagcgtggtgatatagtgattggaagaattagttctattcgggaattcggttttttcatggtgttgatctgtttaggaagtggtatcatgagagatatagcccacttagaaatcacagctctttgtcccttaagagatgtgccttctcacagtaaccatggggatcctttatcatattaccaaactggtgacatcattcgagctggaatcaaggatattgacagataccatgaaaagctagcagtatctctgtatagctcttctcttccaccacacctatctggtattaaattaggtgtaattagctctgaagagcttcctttatactacaggagaagtgttgagctaaatagcaattctttggagtcctatgaaaatgtcatgcagagttccttgggatttgttaatccaggagtagttgaattccttctagaaaaactaggaatagatgaatctaatccaccatctttaatgagaggcctacaaagcaaaaatttctctgaagatgattttgcttctgcattgagaaaaaaacaatccgcatcttgggctttaaaatgtgtgaagatcggagttgactattttaaagttggacgccatgtggatgctatgaatgaatacaataaagctttggaaatagacaaacaaaacgtggaagctttggtagctcgtggagcattatatgcgacaaaaggaagtttgaacaaagcaatagaagattttgagcttgcattagaaaactgtccaactcacagaaatgcaagaaaatacctctgccagacacttgtagagagaggaggacagttagaagaagaagaaaagtttttaaatgctgaaagttactataagaaagctttggctttggatgagacttttaaagatgcagaggatgctttgcagaaacttcataaatatatgcaggtgattccttatttcctcttagaaatttagtgatatttgaaataatgcccaaacttaattttctcctgaggaaaactattctacattacttaagtaaggcattatgaaaagtttctttttaggtatagtttttcctaattgggtttgacattgcttcatagtgcctctgtttttgtccataatcgaaagtaaagatagctgtgagaaaactattacctaaatttggtatgttgttttgagaaatgtccttatagggagctcacctggtggtttttaaattattgttgctactataattgagctaattataaaaacctttttgagacatattttaaattgtcttttcctgtaatactgatgatgatgttttctcatgcattttcttctgaattggaccattgctgctgtgtctgtgacatctggtgctgctcatccccatccacaaactggaaaatgatttcctatgtaatcatgcatccaactgggctgtgctatttttttaaatgaaatctttggaattaagagaaaaacaagctgaaaaggaagaaaagcagaaaacaaagaaaatagaaacaagtgcagaaaagttgcgtaagctcttaaaagaagagaagaggctaaagaagaaaagaagaaaatcaacttcttcttcaagtgtttcttctgctgatgaatcagtgtcttcatcatcatcctcttcctcttctggtcacaaaaggcataagaaacataagaggaaccgttcagagtcttctcgcagttccagaaggcattcatctagggcatcctcaaatcagatagatcagaataggaaagatgagtgctacccagttccagctaatacttcagcatcttttcttaaccataaacaagaagtggagaaactactggggaagcaggataggttacagtatgaaaagacacagataaaagagaaagatagatgccctctctcttcatcttcacttgaaataccggatgattttggagtgtactcctatttatttaaaaagttaactataaaacagcctcaggcaggtccttcaggagatattccagaagagggcattgttatcatagatgacagctccattcatgttactgaccctgaagaccttcaagtgggacaagatatggaggtggaagacagtggtattgatgatcctgaccacgggtaggcttaggtttatgtgtgtgtatgtgtcttagtttttaacaaaaaaattaaaaagtaaaaaaactaaaaatagaaaaatgcttagagaataaggatataaagaatatttttgtgcagttgaacaatgagtgcttaagctaaatgtcatcacaaaagagtaaaaaaattttacaaaattaaaaatgtttaaagttaaaaagctctaggaagctaaggtcaatttattattggagaaataaaattatttttatgaatttactgtagcctaggtgtacattatttatcatgtctacagtagtgttcagcaattaggccttcacattctctcaccactcactcactcagtcactcacccagagcagcttccagtcccgcaagctccatttatggtaagtgccctgtacaggtgtaccatttttttaatccattataccatatttttattgtaccttttctatgtttagatttgtttagatacacaagtaccactgtgttacagttgcctatagtactcagtacagtaacacactttacaagcttatagcctaggaacaataggctataccatctaggtttgtgtaagtacactcttatgatgttcacacagtgacaaaatcgcccaaggatgcattcatcagaacacattcccattgttatccaatgcatgactgtataatggttttatggattaaattttttatgtaattcaactggaaagtatttttatgttattttggaaaaaataaaacaatgacaattgaaatcatggaatctgcaaagattcacag

SEQ ID NO: 287945 - DNA, 2902 bp, Homo sapiens
agacagtttcttccgcttcctgtaccacccggctcaagtagcggacacggaacagggaactatcagcccgtcggcctccgggccctgcattctctagccatggaccgggaccttttgcggcagtcgctaaattgccacgggtcgtctttgctctctctacttcggagcgaacagcaggacaatccacacttccgtagcctcctggggtcggccgccgagccagcccggggcccgccgccccagcacccgttgcagggcagaaaagagaagagagttgacaacatcgagatacagaaattcatctccaaaaaagcggatctgctttttgcactttcctggaaatcagatgcacctgcaacttctgaaattaatgaagacagtgaagatcattatgcaatcatgccacctttagagcaattcatggagatacctagtatggatcggagagagctgtttttccgagatattgagcgtggtgatatagtgattggaagaattagttctattcgggaattcggttttttcatggtgttgatctgtttaggaagtggtatcatgagagatatagcccacttagaaatcacagctctttgtcccttaagagatgtgccttctcacagtaaccatggggatcctttatcatattaccaaactggtgacatcattcgagctggaatcaaggatattgacagataccatgaaaagctagcagtatctctgtatagctcttctcttccaccacacctatctggtattaaattaggtgtaattagctctgaagagcttcctttatactacaggagaagtgttgagctaaatagcaattctttggagtcctatgaaaatgtcatgcagagttccttgggatttgttaatccaggagtagttgaattccttctagaaaaactaggaatagatgaatctaatccaccatctttaatgagaggcctacaaagcaaaaatttctctgaagatgattttgcttctgcattgagaaaaaaacaatccgcatcttgggctttaaaatgtgtgaagatcggagttgactattttaaagttggacgccatgtggatgctatgaatgaatacaataaagctttggaaatagacaaacaaaacgtggaagctttggtagctcgtggagcattatatgcgacaaaaggaagtttgaacaaagcaatagaagattttgagcttgcattagaaaactgtccaactcacagaaatgcaagaaaatacctctgccagacacttgtagagagaggaggacagttagaagaagaagaaaagtttttaaatgctgaaagttactataagaaagctttggctttggatgagacttttaaagatgcagaggatgctttgcagaaacttcataaatatatgcaggtgattccttatttcctcttagaaatttagtgatatttgaaataatgcccaaacttaattttctcctgaggaaaactattctacattacttaagtaaggcattatgaaaagtttctttttaggtatagtttttcctaattgggtttgacattgcttcatagtgcctctgtttttgtccataatcgaaagtaaagatagctgtgagaaaactattacctaaatttggtatgttgttttgagaaatgtccttatagggagctcacctggtggtttttaaattattgttgctactataattgagctaattataaaaacctttttgagacatattttaaattgtcttttcctgtaatactgatgatgatgttttctcatgcattttcttctgaattggaccattgctgctgtgtctgtgacatctggtgctgctcatccccatccacaaactggaaaatgatttcctatgtaatcatgcatccaactgggctgtgctatttttttaaatggtttgtatttgaacatggtgattcctccttcacttcaccttaacggaatgtctttatttgaattttatttgtaaaatgtgtcctgtttaaatttttcaatctttaaaaataatttttatgtactttttttttttttttaacctttcttgcactctgggtcatgggtaccactgcaatggcttcccctttttttatgggataccaactgcaatatggtcctcaatgctgttctggccatttcaatgactaatgccaaacatctgtatgactaatttttttatgttaaaaaaatactgtttaatgctggctctatggtgatttggttttactaaattgggtttctcgttgggggtggtcttttgaatactgggttttatatattctgctatttttaacgtgtggtttttttcgatatctgggttctaaaagaaatctttggaattaagagaaaaacaagctgaaaaggaagaaaagcagaaaacaaagaaaaatttacctcagaatttactgaatatatttaatcagatagctgaatttgaaaaagaaaaaggaaataagtcaaaaaattaatacaccaaggatatcggcaccattacacaaaatgccattaagtgaagtttttggttgtattagtcataacagttgagtgcagaaatctctgcttctaaaattatttgtagagattacaggaaacaaatgcttttaagtaagtttttctcaaattttgtttcagttctaggtcccttgtcacagcttggtttttagactttttatgtatatgtttatgtacagtatattactcttgacagtttgaatttcttcacctaaagataattctctgaaagtactgtttcttcattctattgcggtatatgagaattcctgggtgcatcttattctgctgtttgagagaaaaatttgtgcattgaacacttggatcatttttataaaaattaatttcattttcttttctgttaaattaaaaatcgtcagcttttgaaagatta

SEQ ID NO: 287946 - DNA, 1751 bp, Homo sapiens
agacagtttcttccgcttcctgtaccacccggctcaagtagcggacacggaacagggaactatcagcccgtcggcctccgggccctgcattctctagccatggaccgggaccttttgcggcagtcgctaaattgccacgggtcgtctttgctctctctacttcggagcgaacagcaggacaatccacacttccgtagcctcctggggtcggccgccgagccagcccggggcccgccgccccagcacccgttgcagggcagaaaagagaagagagttgacaacatcgagatacagaaattcatctccaaaaaagcggatctgctttttgcactttcctggaaatcagatgcacctgcaacttctgaaattaatgaagacagtgaagatcattatgcaatcatgccacctttagagcaattcatggagatacctagtatggatcggagagagctgtttttccgagatattgagcgtggtgatatagtgattggaagaattagttctattcgggaattcggttttttcatggtgttgatctgtttaggaagtggtatcatgagagatatagcccacttagaaatcacagctctttgtcccttaagagatgtgccttctcacagtaaccatggggatcctttatcatattaccaaactggtgacatcattcgagctggaatcaaggatattgacagataccatgaaaagctagcagtatctctgtatagctcttctcttccaccacacctatctggtattaaattaggtgtaattagctctgaagagcttcctttatactacaggagaagtgttgagctaaatagcaattctttggagtcctatgaaaatgtcatgcagagttccttgggatttgttaatccaggagtagttgaattccttctagaaaaactaggaatagatgaatctaatccaccatctttaatgagaggcctacaaagcaaaaatttctctgaagatgattttgcttctgcattgagaaaaaaacaatccgcatcttgggctttaaaatgtgtgaagatcggagttgactattttaaagttggacgccatgtggatgctatgaatgaatacaataaagctttggaaatagacaaacaaaacgtggaagctttggtagctcgtggagcattatatgcgacaaaaggaagtttgaacaaagcaatagaagattttgagcttgcattagaaaactgtccaactcacagaaatgcaagaaaatacctctgccagacacttgtagagagaggaggacagttagaagaagaagaaaagtttttaaatgctgaaagttactataagaaagctttggctttggatgagacttttaaagatgcagaggatgctttgcagaaacttcataaatatatgcaggtgattccttatttcctcttagaaatttagtgatatttgaaataatgcccaaacttaattttctcctgaggaaaactattctacattacttaagtaaggcattatgaaaagtttctttttaggtatagtttttcctaattgggtttgacattgcttcatagtgcctctgtttttgtccataatcgaaagtaaagatagctgtgagaaaactattacctaaatttggtatgttgttttgagaaatgtccttatagggagctcacctggtggtttttaaattattgttgctactataattgagctaattataaaaaccttctgggaacatttaaaatggttttcagatacacttatttttctat

SEQ ID NO: 287947 - DNA, 1083 bp, Homo sapiens
gataggatcaccacggtggtaacctctcacattgtcttctccacaggaggcgtctgacacagtatgatgatgaagatcccatggggcagcatcccagtactgatgttgctcctgctcctgggcctaatcgatatctcccaggcccagctcagctgcaccgggcccccagccatccctggcatcccgggtatccctgggacacctggccccgatggccaacctgggaccccagggataaaaggagagaaagggcttccagggctggctggagaccatggtgagttcggagagaagggagacccagggattcctgggaatccaggaaaagtcggccccaagggccccatgggccctaaaggtggcccaggggcccctggagccccaggccccaaaggtgaatcgggagactacaaggccacccagaaaatcgccttctctgccacaagaaccatcaacgtccccctgcgccgggaccagaccatccgcttcgaccacgtgatcaccaacatgaacaacaattatgagccccgcagtggcaagttcacctgcaaggtgcccggtctctactacttcacctaccacgccagctctcgagggaacctgtgcgtgaacctcatgcgtggccgggagcgtgcacagaaggtggtcaccttctgtgactatgcctacaacaccttccaggtcaccaccggtggcatggtcctcaagctggagcagggggagaacgtcttcctgcaggccaccgacaagaactcactactgggcatggagggtgccaacagcatcttttccgggttcctgctctttccagatatggaggcctgacctgtgggctgcttcacatccaccccggctccccctgccagcaacgctcactctacccccaacaccaccccttgcccagccaatgcacacagtagggcttggtgaatgctgctgagtgaatgagtaaataaactcttcaaggccaagggacagtggtctaattcaactctgtgtcccagcacctggcacaccagaagtgccatgctcagaaatgttggttacatgaatgaatgaaccatgaatgaatgaaaaatctgt

SEQ ID NO: 287948 - DNA, 1246 bp, Homo sapiens
gtggatgttcccccaggacagcgtgttctccccacagctgctgagttggcagaaccaaacttgccacccacccgtctcatttacagtaaatccagtgggttgcagaaataggacctgaaactgcctgagggcagcagggtggggggacagtgaggggacgggaaaggggccagcctgctggtccatgggaggggaccgtcaggggaaagcccttcccgcctctggggaagggaacttccgcttcggaccgagggcagtaggctctcggctcctggtcccactgctgctcagcccagtggcctcacaggacaccagcttcccaggaggcgtctgacacagtatgatgatgaagatcccatggggcagcatcccagtactgatgttgctcctgctcctgggcctaatcgatatctcccaggcccagctcagctgcaccgggcccccagccatccctggcatcccgggtatccctgggacacctggccccgatggccaacctgggaccccagggataaaaggagagaaagggcttccagggctggctggagaccatggtgagttcggagagaagggagacccagggattcctgggaatccaggaaaagtcggccccaagggccccatgggccctaaaggtggcccaggggcccctggagccccaggccccaaaggtgaatcgggagactacaaggccacccagaaaatcgccttctctgccacaagaaccatcaacgtccccctgcgccgggaccagaccatccgcttcgaccacgtgatcaccaacatgaacaacaattatgagccccgcagtggcaagttcacctgcaaggtgcccggtctctactacttcacctaccacgccagctctcgagggaacctgtgcgtgaacctcatgcgtggccgggagcgtgcacagaaggtggtcaccttctgtgactatgcctacaacaccttccaggtcaccaccggtggcatggtcctcaagctggagcagggggagaacgtcttcctgcaggccaccgacaagaactcactactgggcatggagggtgccaacagcatcttttccgggttcctgctctttccagatatggaggcctgacctgtgggctgcttcacatccaccccggctccccctgccagcaacgctcactctacccccaacaccaccccttgcccagccaatgcacacagtagggcttggtgaatgctgctgagtgaatgagtaaataaactcttcaaggcc

SEQ ID NO: 287949 - DNA, 1360 bp, Homo sapiens
gtggatgttcccccaggacagcgtgttctccccacagctgctgagttggcagaaccaaacttgccacccacccgtctcatttacagtaaatccagtgggttgcagaaataggacctgaaactgcctgagggcagcagggtggggggacagtgaggggacgggaaaggggccagcctgctggtccatgggaggggaccgtcaggggaaagcccttcccgcctctggggaagggaacttccgcttcggaccgagggcagtaggctctcggctcctggtcccactgctgctcagcccagtggcctcacaggacaccagcttcccaggaggcgtctgacacagtatgatgatgaagatcccatggggcagcatcccagtactgatgttgctcctgctcctgggcctaatcgatatctcccaggcccagctcagctgcaccgggcccccagccatccctggcatcccgggtatccctgggacacctggccccgatggccaacctgggaccccagggataaaaggagagaaagggcttccagggctggctggagaccatggtgagttcggagagaagggagacccagggattcctgggaatccaggaaaagtcggccccaagggccccatgggccctaaaggtggcccaggggcccctggagccccaggccccaaaggtgaatcgggagactacaaggccacccagaaaatcgccttctctgccacaagaaccatcaacgtccccctgcgccgggaccagaccatccgcttcgaccacgtgatcaccaacatgaacaacaattatgagccccgcagtggcaagttcacctgcaaggtgcccggtctctactacttcacctaccacgccagctctcgagggaacctgtgcgtgaacctcatgcgtggccgggagcgtgcacagaaggtggtcaccttctgtgactatgcctacaacaccttccaggtcaccaccggtggcatggtcctcaagctggagcagggggagaacgtcttcctgcaggccaccgacaagaactcactactgggcatggagggtgccaacagcatcttttccgggttcctgctctttccagatatggaggcctgacctgtgggctgcttcacatccaccccggctccccctgccagcaacgctcactctacccccaacaccaccccttgcccagccaatgcacacagtagggcttggtgaatgctgctgagtgaatgagtaaataaactcttcaaggccaagggacagtggtctaattcaactctgtgtcccagcacctggcacaccagaagtgccatgctcagaaatgttggttacatgaatgaatgaaccatgaatgaatgaaaaatctgt

SEQ ID NO: 287950 - DNA, 1513 bp, Homo sapiens
gtggatgttcccccaggacagcgtgttctccccacagctgctgagttggcagaaccaaacttgccacccacccgtctcatttacagtaaatccagtgggttgcagaaataggacctgaaactgcctgagggcagcagggtggggggacagtgaggggacgggaaaggggccagcctgctggtccatgggaggggaccgtcaggggaaagcccttcccgcctctggggaagggaacttccgcttcggaccgagggcagtaggctctcggctcctggtcccactgctgctcagcccagtggcctcacaggacaccagcttcccagccctgtcaggttgaaatcagcattgccaagaggctcagagaggttaaggcacttgcctgaggttatgcagccggtagcagatggggctttaaagtcaagtgggcctgactccatgttgcggaaagggactgctggaccgaaggagatggaaaggaggcgtctgacacagtatgatgatgaagatcccatggggcagcatcccagtactgatgttgctcctgctcctgggcctaatcgatatctcccaggcccagctcagctgcaccgggcccccagccatccctggcatcccgggtatccctgggacacctggccccgatggccaacctgggaccccagggataaaaggagagaaagggcttccagggctggctggagaccatggtgagttcggagagaagggagacccagggattcctgggaatccaggaaaagtcggccccaagggccccatgggccctaaaggtggcccaggggcccctggagccccaggccccaaaggtgaatcgggagactacaaggccacccagaaaatcgccttctctgccacaagaaccatcaacgtccccctgcgccgggaccagaccatccgcttcgaccacgtgatcaccaacatgaacaacaattatgagccccgcagtggcaagttcacctgcaaggtgcccggtctctactacttcacctaccacgccagctctcgagggaacctgtgcgtgaacctcatgcgtggccgggagcgtgcacagaaggtggtcaccttctgtgactatgcctacaacaccttccaggtcaccaccggtggcatggtcctcaagctggagcagggggagaacgtcttcctgcaggccaccgacaagaactcactactgggcatggagggtgccaacagcatcttttccgggttcctgctctttccagatatggaggcctgacctgtgggctgcttcacatccaccccggctccccctgccagcaacgctcactctacccccaacaccaccccttgcccagccaatgcacacagtagggcttggtgaatgctgctgagtgaatgagtaaataaactcttcaaggccaagggacagtggtctaattcaactctgtgtcccagcacctggcacaccagaagtgccatgctcagaaatgttggttacatgaatgaatgaaccatgaatgaatgaaaaatctgt

SEQ ID NO: 287951 - DNA, 1349 bp, Homo sapiens
gtggatgttcccccaggacagcgtgttctccccacagctgctgagttggcagaaccaaacttgccacccacccgtctcatttacagtaaatccagtgggttgcagaaataggacctgaaactgcctgagggcagcagggtggggggacagtgaggggacgggaaaggggccagcctgctggtccatgggaggggaccgtcaggggaaagcccttcccgcctctggggaagggaacttccgcttcggaccgagggcagtaggctctcggctcctggtcccactgctgctcagcccagtggcctcacaggacaccagcttcccaggaggcgtctgacacagtatgatgatgaagatcccatggggcagcatcccagtactgatgttgctcctgctcctgggcctaatcgatatctcccaggcccagctcagctgcaccgggcccccagccatccctggcatcccgggtatccctgggacacctggccccgatggccaacctgggaccccagggataaaaggagagaaagggcttccagggctggctggagaccatggtgagttcggagagaagggagacccagggattcctgggaatccaggaaaagtcggccccaagggccccatgggccctaaaggtggcccaggggcccctggagccccaggccccaaaggtgaatcgggagactacaaggccacccagaaaatcgccttctctgccacaagaaccatcaacgtccccctgcgccgggaccagaccatccgcttcgaccacgtgatcaccaacatgaacaacaattatgagccccgcagtggcaagttcacctgcaaggtgcccggtctctactacttcacctaccacgccagctctcgagggaacctgtgcgtgaacctcatgcgtggccgggagcgtgcacagaaggtggtcaccttctgtgactatgcctacaacaccttccaggtcaccaccggtggcatggtcctcaagctggagcagggggagaacgtcttcctgcaggccaccgacaagaactcactactgggcatggagggtgccaacagcatcttttccgggttcctgctctttccagatatggaggcctgacctgtgggctgcttcacatccaccccggctccccctgccagcaacgctcactctacccccaacaccaccccttgcccagccaatgcacacagtagggcttggtgaatgctgctgagtgaatgagtaaataaactcttcaaggcccaagcccccccccccccaccccccacccccctccttcctctcccatcccccctccttcctcctacatctccccccatatccccttccctcctttcatcacccc

SEQ ID NO: 287952 - DNA, 888 bp, Homo sapiens
tacgcattatgggagtgtggcaagaaataaaatacctgagcaaccttatcccagtatgcatttcataccaggatcaagtcactaatgacagccaagttccaggcttatctatggctgcctaatgagactggccccactaggatggggactggggaggggacacacatgagtgcccaagcttcagtctacacctccccccttcagccagaagtgcgcctgggtgcgcacccaggcgccttctctgccacaagaaccatcaacgtccccctgcgccgggaccagaccatccgcttcgaccacgtgatcaccaacatgaacaacaattatgagccccgcagtggcaagttcacctgcaaggtgcccggtctctactacttcacctaccacgccagctctcgagggaacctgtgcgtgaacctcatgcgtggccgggagcgtgcacagaaggtggtcaccttctgtgactatgcctacaacaccttccaggtcaccaccggtggcatggtcctcaagctggagcagggggagaacgtcttcctgcaggccaccgacaagaactcactactgggcatggagggtgccaacagcatcttttccgggttcctgctctttccagatatggaggcctgacctgtgggctgcttcacatccaccccggctccccctgccagcaacgctcactctacccccaacaccaccccttgcccagccaatgcacacagtagggcttggtgaatgctgctgagtgaatgagtaaataaactcttcaaggccaagggacagtggtctaattcaactctgtgtcccagcacctggcacaccagaagtgccatgctcagaaatgttggttacatgaatgaatgaaccatgaatgaatgaaaaatctgt

SEQ ID NO: 287953 - DNA, 1313 bp, Homo sapiens
gtggatgttcccccaggacagcgtgttctccccacagctgctgagttggcagaaccaaacttgccacccacccgtctcatttacagtaaatccagtgggttgcagaaataggacctgaaactgcctgagggcagcagggtggggggacagtgaggggacgggaaaggggccagcctgctggtccatgggaggggaccgtcaggggaaagcccttcccgcctctggggaagggaacttccgcttcggaccgagggcagtaggctctcggctcctggtcccactgctgctcagcccagtggcctcacaggacaccagcttcccaggaggcgtctgacacagtatgatgatgaagatcccatggggcagcatcccagtactgatgttgctcctgctcctgggcctaatcgatatctcccaggcccagctcagctgcaccgggcccccagccatccctggcatcccgggtatccctgggacacctggccccgatggccaacctgggaccccagggataaaaggagagaaagggcttccagggctggctggagaccatggtgagttcggagagaagggagacccagggattcctgggaatccaggaaaagtcggccccaagggccccatgggccctaaaggtggcccaggggcccctggagccccaggccccaaaggtgaatcgggagactacaaggccacccagaaaatagaccatccgcttcgaccacgtgatcaccaacatgaacaacaattatgagccccgcagtggcaagttcacctgcaaggtgcccggtctctactacttcacctaccacgccagctctcgagggaacctgtgcgtgaacctcatgcgtggccgggagcgtgcacagaaggtggtcaccttctgtgactatgcctacaacaccttccaggtcaccaccggtggcatggtcctcaagctggagcagggggagaacgtcttcctgcaggccaccgacaagaactcactactgggcatggagggtgccaacagcatcttttccgggttcctgctctttccagatatggaggcctgacctgtgggctgcttcacatccaccccggctccccctgccagcaacgctcactctacccccaacaccaccccttgcccagccaatgcacacagtagggcttggtgaatgctgctgagtgaatgagtaaataaactcttcaaggccaagggacagtggtctaattcaactctgtgtcccagcacctggcacaccagaagtgccatgctcagaaatgttggttacatgaatgaatgaaccatgaatgaatgaaaaatctgt

SEQ ID NO: 287954 - DNA, 1169 bp, Homo sapiens
gtggatgttcccccaggacagcgtgttctccccacagctgctgagttggcagaaccaaacttgccacccacccgtctcatttacagtaaatccagtgggttgcagaaataggacctgaaactgcctgagggcagcagggtggggggacagtgaggggacgggaaaggggccagcctgctggtccatgggaggggaccgtcaggggaaagcccttcccgcctctggggaagggaacttccgcttcggaccgagggcagtaggctctcggctcctggtcccactgctgctcagcccagtggcctcacaggacaccagcttcccaggaggcgtctgacacagtatgatgatgaagatcccatggggcagcatcccagtactgatgttgctcctgctcctgggcctaatcgatatctcccaggcccagctcagctgcaccgggcccccagccatccctggcatcccgggtatccctgggacacctggccccgatggccaacctgggaccccagggataaaaggagagaaagggcttccagggctggctggagaccatggtgagttcggagagaagggagacccagggattcctgggaatccaggaaaagtcggccccaagggccccatgggccctaaaggtggcccaggggcccctggagccccaggccccaaaggtgaatcgggagactacaaggccacccagaaaatcgccttctctgccacaagaaccatcaacgtccccctgcgccgggaccagaccatccgcttcgaccacgtgatcaccaacatgaacaacaattatgagccccgcagtggcaagttcacctgcaaggtgcccggtctctactacttcacctaccacgccagctctcgagggaacctgtgcgtgaacctcatgcgtggccgggagcgtgcacagaaggtggtcaccttctgtgactatgcctacaacaccttccaggtcaccaccggtggcatggtcctcaagctggagcagggggagaacgtcttcctgcaggccaccctgacctgtgggctgcttcacatccaccccggctccccctgccagcaacgctcactctacccccaacaccaccccttgcccagccaatgcacacagtagggcttggtgaatgctgctgagtgaatgagtaaataaactcttcaaggcc

SEQ ID NO: 287955 - DNA, 1231 bp, Homo sapiens
gtggatgttcccccaggacagcgtgttctccccacagctgctgagttggcagaaccaaacttgccacccacccgtctcatttacagtaaatccagtgggttgcagaaataggacctgaaactgcctgagggcagcagggtggggggacagtgaggggacgggaaaggggccagcctgctggtccatgggaggggaccgtcaggggaaagcccttcccgcctctggggaagggaacttccgcttcggaccgagggcagtaggctctcggctcctggtcccactgctgctcagcccagtggcctcacaggacaccagcttcccaggaggcgtctgacacagtatgatgatgaagatcccatggggcagcatcccagtactgatgttgctcctgctcctgggcctaatcgatatctcccaggcccagctcagctgcaccgggcccccagccatccctggcatcccgggtatccctgggacacctggccccgatggccaacctgggaccccagggataaaaggagagaaagggcttccagggctggctggagaccatggtgagttcggagagaagggagacccagggattcctgggaatccaggaaaagtcggccccaagggccccatgggccctaaaggtggcccaggggcccctggagccccaggccccaaaggtgaatcgggagactacaaggccacccagaaaatcgccttctctgccacaagaaccatcaacgtccccctgcgccgggaccagaccatccgcttcgaccacgtgatcaccaacatgaacaacaattatgagccccgcagtggcaagttcacctgcaaggtcaccaccggtggcatggtcctcaagctggagcagggggagaacgtcttcctgcaggccaccgacaagaactcactactgggcatggagggtgccaacagcatcttttccgggttcctgctctttccagatatggaggcctgacctgtgggctgcttcacatccaccccggctccccctgccagcaacgctcactctacccccaacaccaccccttgcccagccaatgcacacagtagggcttggtgaatgctgctgagtgaatgagtaaataaactcttcaaggccaagggacagtggtctaattcaactctgtgtcccagcacctggcacaccagaagtgccatgctcagaaatgttggttacatgaatgaatgaaccatgaatgaatgaaaaatctgt

SEQ ID NO: 287956 - DNA, 1039 bp, Homo sapiens
caggggacaaatggggaaaaaagttctcaaaataaaaaagagaaatatggtagttttaagatgaggataagctaggcagcattttcaggggcacctgtagccatcgtggttgaaggatttgaattgggaaagttcctttgggtttttccaaaaggtgctgttaccttgtatagatatccacctatctattcacatggaccagcaaacgggacttctctctctatcgatataaatgtctagaatgaacactggatgcataaaataaactgatctgttcagacaactattttcaaatagtttttttttgcatctttcttagaagaactgttttgttaatgctaagaggtaaatgctgcttattataacctataatcacagctctgctttgtagaaaaatcaactttctgcaactcatagatcttgctgaaacactgttcttgtgattttagtacaacttttactttcttttataaagtataaaatctcacactgaagacaacagtagcccttgtgtttgctagtatggggattgtccactaagggacagctaaaagaactgaaatagttaatgcttgggagatctgagagtgggcaactgtgggatgtgattccttttaaggtaaaatcaacaggccacttactttatgtccaaaagaaaaattaggcatatccagttcattcttctctcagtgcctaggatttaatagattggaatacatttcaaaaataaagaattgccttgaactgggtaactgatttgatgtaaatgcccaaaggagaaggagtaaaaggaaaatgacatagagtctgagctagagtaacagggacagtattaattaatattaaccaaatatcaaataagaacatttaagagacgagccaccatgcccggcccaaatattttttattcaggatggtataacctaactgataataggtaataaggttaaatttttttatgacgtattttatttacaaatatcatacactgctggtgttaccatatgaaaggaaataaagtcaattgataattgcctca

SEQ ID NO: 287957 - DNA, 765 bp, Homo sapiens
ctggaactgggagtgatgtcagctcccagctcggtgcctgcccggattcctgacatggtgtagtgcaggcagggtggggaaaggacggggaaggactcgtgtgctgcgagctggcggccgggccggagtgctggggctttgaactccgagaggaggtggaccagaacttttggaactagtgccggcggctctccaccccccagtataaaagaacgtgtggatcactttgctgagtacatccaagatttgaagaactgaaataaatcagctttaaacctgctttttaaaaatatctgggttggaatttgcccctgacaaataataaaatgatgagtgatgcaagtgacatgttggctgcagcgttggagcagatggatggtatcatagcaggttctaaggctctggaatattccaatgggatttttgattgccaatctcccacctctccattcatgggaagtttgcgagctctgcaccttgtggaagacctgcgtggattgttagagatgatggaaacagatgagaaagaaggcttgagatgccagatcccagattcaacagcagaaacgcttgttgaatggcttcagagtcaaatggtagggtctgcctgttccaaattctgttataaatcctttgttgcttattccaaaatttagaacatagaatagctgattagaacaagaaaagtttagggcaacacatgtgctccgattttattacttaagatatcttaattttcttttgactctaaggataactttttaa

SEQ ID NO: 287958 - DNA, 6026 bp, Homo sapiens
  misc_feature (1966)..(1966): n is a, c, g, or t
ctggaactgggagtgatgtcagctcccagctcggtgcctgcccggattcctgacatggtgtagtgcaggcagggtggggaaaggacggggaaggactcgtgtgctgcgagctggcggccgggccggagtgctggggctttgaactccgagaggaggtggaccagaacttttggaactagtgccggcggctctccaccccccagtataaaagaacgtgtggatcactttgctgagtacatccaagatttgaagaactgaaataaatcagctttaaacctgctttttaaaaatatctgggttggaatttgcccctgacaaataataaaatgatgagtgatgcaagtgacatgttggctgcagcgttggagcagatggatggtatcatagcaggttctaaggctctggaatattccaatgggatttttgattgccaatctcccacctctccattcatgggaagtttgcgagctctgcaccttgtggaagacctgcgtggattgttagagatgatggaaacagatgagaaagaaggcttgagatgccagatcccagattcaacagcagaaacgcttgttgaatggcttcagagtcaaatgacaaatggacacctaccagggaacggagatgtgtatcaagaaaggctggcacgtttagaaaatgataaagaatccctcgttcttcaggtaagtgtgttaacagaccaggtggaggctcagggagagaagattcgagatttggagttttgtcttgaagagcacagagagaagttgaatgccacagaagaaatgctgcagcaggagcttctaagtaggacatccttagaaactcagaagttggatctgatggctgaaatatctaacttgaagttgaaactgacagctgtagagaaggacagattggattatgaagataagttcagagacacagaggggctgattcaggagatcaatgatttgaggttaaaagttagtgaaatggacagtgagagacttcagtatgaaaaaaagcttaaatcaaccaaagatgaactggcatctttaaaagaacaactagaagaaaaggaatctgaagtaaaaaggctacaagaaaaattggtttgcaagatgaaaggagaaggggttgaaattgttgatagagatgaaaattttaaaaagaagctcaaagaaaaaaacatcgaagtacaaaaaatgaaaaaagctgtggagtccttgatggcagcaaatgaagaaaaggatcggaaaatagaagatcttcgacagtgcctgaacaggtacaagaaaatgcaagacacggtggtactggcccaaggtaaaaaaggcaaagatggagaatatgaagagctgctcaattccagttccatctcctctttgctggatgcacagggtttcagtgatctggagaaaagtccatcacccactccagtaatgggatctcccagttgtgacccatttaacacaagtgttcccgaagagttccatactaccatcttgcaagtttccatcccttcattattgccagcaactgtaagcatggaaacttctgaaaaatcaaagttgactcctaagccagagacttcatttgaagaaaatgatggaaacataatccttggtgccactgttgatacccaactgtgtgataaacttttaacttcaagtctgcagaagtccagcagcctgggcaatctgaagaaagagacatctgatggggaaaaggaaactattcagaagacttcagaggacagagctccggcagaaagcaggccatttgggacccttcctcccaggcccccagggcaggacacctccatggatgacaaccccttcggcactcgaaaagtcagatcttcctttggccggggcttttttaaaatcaaaagtaacaagagaacagcaagtgcaccaaacttagatcgtaaacgaagtgccagtgcacccaccctagctgaaacagaaaaagagacagcagngcacctagatctggctggtgcttcttctcggccaaaagattcacagaggaacagtcccttccagataccgcctccatctccagattccaaaaagaaatccagaggtatcatgaaactctttggaaaacttaggagaagtcaatcaactacattcaacccagatgacatgtctgagcctgaattcaaaagaggagggacaagggcaaccgcggggccccgattaggttggtctcgagacttgggacagtctaacagtgacttggatatgccatttgccaagtggaccaaggagcaggtttgcaattggctgatggaacagggcttgggctcgtacctgaattctggcaagcactggattgcatctggccaaacgcttttgcaggcttctcaacaagatctagagaaggaacttggaatcaagcattcacttcatcgaaagaaactccagctagcactccaagccctgggatctgaagaagaaaccaatcatgggaagctggatttcaactgggtcactagatggttggatgacattggcctccctcaatataagacccagtttgatgaaggacgggttgatggtcgaatgctacattacatgactgttgatgacttactgtctctgaaggttgtaagtgtgctacaccatctcagtatcaaaagggccatccaggtcctgaggatcaataactttgaaccaaactgtctacggaggcggccatctgatgagaataccatcgccccatcagaagttcagaagtggactaaccatcgagtgatggagtggctgcgctccgtggacttggcagaatatgcgcccaatctcagaggcagtggtgtccatggtgggctcatggttctagagcctcgttttaacgtagaaacaatggctcagttattgaacatcccacccaataagactttgctgcgaagacatttggccactcatttcaaccttctgattggggctgaggcacagcaccagaagcgagatgccatggagctgccggattatgtacttctaacagctactgccaaagtgaagccaaagaaacttgcctttagcaattttgggaatttgagaaagaagaaacaggaagatggtgaagaatatgtttgtccaatggaattgggacaggcatcaggaagtgcatctaagaaaggatttaaacctggtttggatatgcgcctgtatgaggaagatgatttggaccggttagagcagatggaagattcagaagggacagtgagacagataggtgcattctctgaaggcatcaacaatctgacgcacatgttaaaagaagatgacatgtttaaagattttgctgcccgttcccccagtgccagcattacagatgaagactcaaacgtttgaccgtagcacctggatgaacattaggagtgcttagtcttttttctacttgcttttccaaacactcacagtatatacaacaggcagcggattgtctattgtttgttgttccaacttctgctgtcgagaagtttaaacagaaagcaggagtaatgtgccgattctgaagttgccacaaaaaataagacactggtgaatgagagtataattgtttttcttctatttaatgtaaaaatctgtgatatattatatttaaagtgttgcatttaagatgagtattttaccagagtgtttccattcatatccgcggtatggaggatttgaggaacagtaaccaggatgtgaatgattttgttacatcagtgttcactgtagccacctaagtaggacattatatgatttcagaatcaatatgtggaacttctttaagcattcagtgtgcccactaaatgccagccacacctccacttgcctcttattgtcttatttttatatatttttctaaatatatgtatatatacagtacatagaaaatagaacttttattttgtgacctaaggacgatggtgaaaagatcacgttttcaaaacaatctggtgatcagaatgttcatataccagctggtttctgaagaggtcagaatgatctttctccatactgacttttaacaatgttgatcattgaggctaaattaatatatatgaaatattcctttttgatgacaccacaaaattgttgaacagtttaagaatttcaaccttaatcttggatccctttacctcatatggaagaacttgagggacattagtatacttttttttaagatggagtcttgctctgtcacccaggttggagtgccatggcatgatcttggctcactgcaacctccacctcctgggtcaagccattctgcttcagccccaagtaggtgggactccaggcatgcaccaccatgcctggctaatttttgcatttttagtagagacagggtttcaccatattggccaggctgggactcgaactcctgaccttgtgatctgcccgcctcagcctcccaaagtactgggattataggcatgagccaccacgcccagcctgttatttttttattattattgtttttttttagtgacagagtctcattctgttgcccatgctggagtgcagtggcgtgatcatagctcactgcagccttgaattcctaggctccagtgatcctctcacctcagcttccctaatagctaggattacaggtgtgtggcctcccaccccaccccacccttcacacctggctgatttttcaaaaagtttttttgtagaaacagggtctcaccatgttgtccagcctggtctcaaactcctgtcctcaagtgatcctcccacctcagcctttcaaagtgctggaattacaggtgtgagccactctgcctggcctaccactaacttgaatacattcagaatcacctcctctccccaaaatttgtagaaatagtttttgaggaagccaaaagcaaagcagaaacctttacagtattgtttcttttctctttgttaactgtgtcattacagcaaaatactagcagtctgcctaaacatgttcattgtacatttctcaggctatcaatgaatggaggtttttaaaaagttgaatatttgtctgaacattttatttcaaagttcaaaaaaacagaggctgcaaaattcattttataatggctattttgtgacgataagatgtagttcatgtttttctgtagcactgggcccaaatattctttgtaaagaaaatcgctgcagcaaaaactgttactgtgtttattatatttgtagaagtattagaaaaatattctattttttattcagtgctgcgtaattacccatggtagccaaccctacaaaagacaggttttcacaaattgaggtggaggtgggcggttcagtatctgccactggacttgattataaactgtatttgaatatcagtggtattatcttttaagttgtcagcaagttaccaaggtattcattaaagaacttgtaatatcaaattactatttattcataacaattgatttgatgctaataataattttctttaaactctaccattcattatgtggtaactgtattgaacttactttatttggattttattttaatgtgactagatgtcaccacttcaaaaaatcaatttgttcttagaacctggttgaaaataccaggaaactgttacagacgccattttttttttttttgagacggagtcttgctctgttgcccaggctggagtgcagtggcacaatctcagctcactgcaagctccgcctcctgggttcacgccattctcccacctcagcttcccaagcagctgggactacaggtacctgccaccacgcctggctaattttgtttttgtatttttagtagagacggggtttcaccgtgttagccaggaaggtctcaatctcctgacctcgtgaatcgcccccctcggtctcccaaagtgctgggattacaggcgtgagccaccatgcccggcccaaatattttttattcaggatggtataacctaactgataataggtaataaggttaaatttttttatgacgtattttatttacaaatatcatacactgctggtgttaccatatgaaaggaaataaagtcaattgataattgcctca

SEQ ID NO: 287959 - DNA, 6264 bp, Homo sapiens
  misc_feature (1966)..(1966): n is a, c, g, or t
ctggaactgggagtgatgtcagctcccagctcggtgcctgcccggattcctgacatggtgtagtgcaggcagggtggggaaaggacggggaaggactcgtgtgctgcgagctggcggccgggccggagtgctggggctttgaactccgagaggaggtggaccagaacttttggaactagtgccggcggctctccaccccccagtataaaagaacgtgtggatcactttgctgagtacatccaagatttgaagaactgaaataaatcagctttaaacctgctttttaaaaatatctgggttggaatttgcccctgacaaataataaaatgatgagtgatgcaagtgacatgttggctgcagcgttggagcagatggatggtatcatagcaggttctaaggctctggaatattccaatgggatttttgattgccaatctcccacctctccattcatgggaagtttgcgagctctgcaccttgtggaagacctgcgtggattgttagagatgatggaaacagatgagaaagaaggcttgagatgccagatcccagattcaacagcagaaacgcttgttgaatggcttcagagtcaaatgacaaatggacacctaccagggaacggagatgtgtatcaagaaaggctggcacgtttagaaaatgataaagaatccctcgttcttcaggtaagtgtgttaacagaccaggtggaggctcagggagagaagattcgagatttggagttttgtcttgaagagcacagagagaagttgaatgccacagaagaaatgctgcagcaggagcttctaagtaggacatccttagaaactcagaagttggatctgatggctgaaatatctaacttgaagttgaaactgacagctgtagagaaggacagattggattatgaagataagttcagagacacagaggggctgattcaggagatcaatgatttgaggttaaaagttagtgaaatggacagtgagagacttcagtatgaaaaaaagcttaaatcaaccaaagatgaactggcatctttaaaagaacaactagaagaaaaggaatctgaagtaaaaaggctacaagaaaaattggtttgcaagatgaaaggagaaggggttgaaattgttgatagagatgaaaattttaaaaagaagctcaaagaaaaaaacatcgaagtacaaaaaatgaaaaaagctgtggagtccttgatggcagcaaatgaagaaaaggatcggaaaatagaagatcttcgacagtgcctgaacaggtacaagaaaatgcaagacacggtggtactggcccaaggtaaaaaaggcaaagatggagaatatgaagagctgctcaattccagttccatctcctctttgctggatgcacagggtttcagtgatctggagaaaagtccatcacccactccagtaatgggatctcccagttgtgacccatttaacacaagtgttcccgaagagttccatactaccatcttgcaagtttccatcccttcattattgccagcaactgtaagcatggaaacttctgaaaaatcaaagttgactcctaagccagagacttcatttgaagaaaatgatggaaacataatccttggtgccactgttgatacccaactgtgtgataaacttttaacttcaagtctgcagaagtccagcagcctgggcaatctgaagaaagagacatctgatggggaaaaggaaactattcagaagacttcagaggacagagctccggcagaaagcaggccatttgggacccttcctcccaggcccccagggcaggacacctccatggatgacaaccccttcggcactcgaaaagtcagatcttcctttggccggggcttttttaaaatcaaaagtaacaagagaacagcaagtgcaccaaacttagatcgtaaacgaagtgccagtgcacccaccctagctgaaacagaaaaagagacagcagngcacctagatctggctggtgcttcttctcggccaaaagattcacagaggaacagtcccttccagataccgcctccatctccagattccaaaaagaaatccagaggtatcatgaaactctttggaaaacttaggagaagtcaatcaactacattcaacccagatgacatgtctgagcctgaattcaaaagaggagggacaagggcaaccgcggggccccgattaggttggtctcgagacttgggacagtctaacagtgacttggatatgccatttgccaagtggaccaaggagcaggtttgcaattggctgatggaacagggcttgggctcgtacctgaattctggcaagcactggattgcatctggccaaacgcttttgcaggcttctcaacaagatctagagaaggaacttggaatcaagcattcacttcatcgaaagaaactccagctagcactccaagccctgggatctgaagaagaaaccaatcatgggaagctggatttcaactgggtcactagatggttggatgacattggcctccctcaatataagacccagtttgatgaaggacgggttgatggtcgaatgctacattacatgactgttgatgacttactgtctctgaaggttgtaagtgtgctacaccatctcagtatcaaaagggccatccaggtcctgaggatcaataactttgaaccaaactgtctacggaggcggccatctgatgagaataccatcgccccatcagaagttcagaagtggactaaccatcgagtgatggagtggctgcgctccgtggacttggcagaatatgcgcccaatctcagaggcagtggtgtccatggtgggctcatggttctagagcctcgttttaacgtagaaacaatggctcagttattgaacatcccacccaataagactttgctgcgaagacatttggccactcatttcaaccttctgattggggctgaggcacagcaccagaagcgagatgccatggagctgccggattatgtacttctaacagctactgccaaagtgaagccaaagaaacttgcctttagcaattttgggaatttgagaaagaagaaacaggaagatggtgaagaatatgtttgtccaatggaattgggacaggcatcaggaagtgcatctaagaaaggatttaaacctggtttggatatgcgcctgtatgaggaagatgatttggaccggttagagcagatggaagattcagaagggacagtgagacagataggtgcattctctgaaggcatcaacaatctgacgcacatgttaaaagaagatgacatgtttaaagattttgctgcccgttcccccagtgccagcattacagatgaagactcaaacgtttgaccgtagcacctggatgaacattaggagtgcttagtcttttttctacttgcttttccaaacactcacagtatatacaacaggcagcggattgtctattgtttgttgttccaacttctgctgtcgagaagtttaaacagaaagcaggagtaatgtgccgattctgaagttgccacaaaaaataagacactggtgaatgagagtataattgtttttcttctatttaatgtaaaaatctgtgatatattatatttaaagtgttgcatttaagatgagtattttaccagagtgtttccattcatatccgcggtatggaggatttgaggaacagtaaccaggatgtgaatgattttgttacatcagtgttcactgtagccacctaagtaggacattatatgatttcagaatcaatatgtggaacttctttaagcattcagtgtgcccactaaatgccagccacacctccacttgcctcttattgtcttatttttatatatttttctaaatatatgtatatatacagtacatagaaaatagaacttttattttgtgacctaaggacgatggtgaaaagatcacgttttcaaaacaatctggtgatcagaatgttcatataccagctggtttctgaagaggtcagaatgatctttctccatactgacttttaacaatgttgatcattgaggctaaattaatatatatgaaatattcctttttgatgacaccacaaaattgttgaacagtttaagaatttcaaccttaatcttggatccctttacctcatatggaagaacttgagggacattagtatacttttttttaagatggagtcttgctctgtcacccaggttggagtgccatggcatgatcttggctcactgcaacctccacctcctgggtcaagccattctgcttcagccccaagtaggtgggactccaggcatgcaccaccatgcctggctaatttttgcatttttagtagagacagggtttcaccatattggccaggctgggactcgaactcctgaccttgtgatctgcccgcctcagcctcccaaagtactgggattataggcatgagccaccacgcccagcctgttatttttttattattattgtttttttttagtgacagagtctcattctgttgcccatgctggagtgcagtggcgtgatcatagctcactgcagccttgaattcctaggctccagtgatcctctcacctcagcttccctaatagctaggattacaggtgtgtggcctcccaccccaccccacccttcacacctggctgatttttcaaaaagtttttttgtagaaacagggtctcaccatgttgtccagcctggtctcaaactcctgtcctcaagtgatcctcccacctcagcctttcaaagtgctggaattacaggtgtgagccactctgcctggcctaccactaacttgaatacattcagaatcacctcctctccccaaaatttgtagaaatagtttttgaggaagccaaaagcaaagcagaaacctttacagtattgtttcttttctctttgttaactgtgtcattacagcaaaatactagcagtctgcctaaacatgttcattgtacatttctcaggctatcaatgaatggaggtttttaaaaagttgaatatttgtctgaacattttatttcaaagttcaaaaaaacagaggctgcaaaattcattttataatggctattttgtgacgataagatgtagttcatgtttttctgtagcactgggcccaaatattctttgtaaagaaaatcgctgcagcaaaaactgttactgtgtttattatatttgtagaagtattagaaaaatattctattttttattcagtgctgcgtaattacccatggtagccaaccctacaaaagacaggttttcacaaattgaggtggaggtgggcggttcagtatctgccactggacttgattataaactgtatttgaatatcagtggtattatcttttaagttgtcagcaagttaccaaggtattcattaaagaacttgtaatatcaaattactatttattcataacaattgatttgatgctaataataattttctttaaactctaccattcattatgtggtaactgtattgaacttactttatttggattttattttaatgtgactagatgtcaccacttcaaaaaatcaatttgttcttagaacctggttgaaaataccaggaaactgttacagacgccattttttttttttttgagacggagtcttgctctgttgcccaggctggagtgcagtggcacaatctcagctcactgcaagctccgcctcctgggttcacgccattctcccacctcagcttcccaagcagctgggactacaggtacctgccaccacgcctggctaattttgtttttgtatttttagtagagacggggtttcaccgtgttagccaggaaggtctcaatctcctgacctcgtgaatcgcccccctcggtctcccaaagtgctgggattacaggcgtgagccaccatgcccggcccaaatattttttattcaggatggtataacctaactgataataggtaataaggttaaatttttttatgacgtattttatttacaaatatcatacactgctggtgttaccatatgaaaggaaataaagtcaattgataattgcctcatttttattgcccttatttcattttccgttgttcatagtaacaggctttgtttctgacatagaaaataacacaatctctttataaactgccataaatttgttcgaatggagtttataatgtgtatcaacagataggaatttgaggcctttgtttgagaagcttttgtaggaaaagaagcaactgagctggggaatgaagaatcatggcagaaggtaaaagaaacaaaaacaaacaaaaa

SEQ ID NO: 287960 - DNA, 5940 bp, Homo sapiens
  misc_feature (1966)..(1966): n is a, c, g, or t
ctggaactgggagtgatgtcagctcccagctcggtgcctgcccggattcctgacatggtgtagtgcaggcagggtggggaaaggacggggaaggactcgtgtgctgcgagctggcggccgggccggagtgctggggctttgaactccgagaggaggtggaccagaacttttggaactagtgccggcggctctccaccccccagtataaaagaacgtgtggatcactttgctgagtacatccaagatttgaagaactgaaataaatcagctttaaacctgctttttaaaaatatctgggttggaatttgcccctgacaaataataaaatgatgagtgatgcaagtgacatgttggctgcagcgttggagcagatggatggtatcatagcaggttctaaggctctggaatattccaatgggatttttgattgccaatctcccacctctccattcatgggaagtttgcgagctctgcaccttgtggaagacctgcgtggattgttagagatgatggaaacagatgagaaagaaggcttgagatgccagatcccagattcaacagcagaaacgcttgttgaatggcttcagagtcaaatgacaaatggacacctaccagggaacggagatgtgtatcaagaaaggctggcacgtttagaaaatgataaagaatccctcgttcttcaggtaagtgtgttaacagaccaggtggaggctcagggagagaagattcgagatttggagttttgtcttgaagagcacagagagaagttgaatgccacagaagaaatgctgcagcaggagcttctaagtaggacatccttagaaactcagaagttggatctgatggctgaaatatctaacttgaagttgaaactgacagctgtagagaaggacagattggattatgaagataagttcagagacacagaggggctgattcaggagatcaatgatttgaggttaaaagttagtgaaatggacagtgagagacttcagtatgaaaaaaagcttaaatcaaccaaagatgaactggcatctttaaaagaacaactagaagaaaaggaatctgaagtaaaaaggctacaagaaaaattggtttgcaagatgaaaggagaaggggttgaaattgttgatagagatgaaaattttaaaaagaagctcaaagaaaaaaacatcgaagtacaaaaaatgaaaaaagctgtggagtccttgatggcagcaaatgaagaaaaggatcggaaaatagaagatcttcgacagtgcctgaacaggtacaagaaaatgcaagacacggtggtactggcccaaggtaaaaaaggcaaagatggagaatatgaagagctgctcaattccagttccatctcctctttgctggatgcacagggtttcagtgatctggagaaaagtccatcacccactccagtaatgggatctcccagttgtgacccatttaacacaagtgttcccgaagagttccatactaccatcttgcaagtttccatcccttcattattgccagcaactgtaagcatggaaacttctgaaaaatcaaagttgactcctaagccagagacttcatttgaagaaaatgatggaaacataatccttggtgccactgttgatacccaactgtgtgataaacttttaacttcaagtctgcagaagtccagcagcctgggcaatctgaagaaagagacatctgatggggaaaaggaaactattcagaagacttcagaggacagagctccggcagaaagcaggccatttgggacccttcctcccaggcccccagggcaggacacctccatggatgacaaccccttcggcactcgaaaagtcagatcttcctttggccggggcttttttaaaatcaaaagtaacaagagaacagcaagtgcaccaaacttagatcgtaaacgaagtgccagtgcacccaccctagctgaaacagaaaaagagacagcagngcacctagatctggctggtgcttcttctcggccaaaagattcacagaggaacagtcccttccagataccgcctccatctccagattccaaaaagaaatccagaggtatcatgaaactctttggaaaacttaggagaagtcaatcaactacattcaacccagatgacatgtctgagcctgaattcaaaagaggagggacaagggcaaccgcggggccccgattaggttggtctcgagacttgggacagtctaacagtgacttggatatgccatttgccaagtggaccaaggagcaggtttgcaattggctgatggaacagggcttgggctcgtacctgaattctggcaagcactggattgcatctggccaaacgcttttgcaggcttctcaacaagatctagagaaggaacttggaatcaagcattcacttcatcgaaagaaactccagctagcactccaagccctgggatctgaagaagaaaccaatcatgggaagctggatttcaactgggtcactagatggttggatgacattggcctccctcaatataagacccagtttgatgaaggacgggttgatggtcgaatgctacattacatgactgttgatgacttactgtctctgaaggttgtaagtgtgctacaccatctcagtatcaaaagggccatccaggtcctgaggatcaataactttgaaccaaactgtctacggaggcggccatctgatgagaataccatcgccccatcagaagttcagaagtggactaaccatcgagtgatggagtggctgcgctccgtggacttggcagaatatgcgcccaatctcagaggcagtggtgtccatggtgggctcatggttctagagcctcgttttaacgtagaaacaatggctcagttattgaacatcccacccaataagactttgctgcgaagacatttggccactcatttcaaccttctgattggggctgaggcacagcaccagaagcgagatgccatggagctgccggattatgtacttctaacagctactgccaaagtgaagccaaagaaacttgcctttagcaattttgggaatttgagaaagaagaaacaggaagatggtgaagaatatgtttgtccaatggaattgggacaggcatcaggaagtgcatctaagaaaggatttaaacctggtttggatatgcgcctgtatgaggaagatgatttggaccggttagagcagatggaagattcagaagggacagtgagacagataggtgcattctctgaaggcatcaacaatctgacgcacatgttaaaagaagatgacatgtttaaagattttgctgcccgttcccccagtgccagcattacagatgaagactcaaacgtttgaccgtagcacctggatgaacattaggagtgcttagtcttttttctacttgcttttccaaacactcacagtatatacaacaggcagcggattgtctattgtttgttgttccaacttctgctgtcgagaagtttaaacagaaagcaggagtaatgtgccgattctgaagttgccacaaaaaataagacactggtgaatgagagtataattgtttttcttctatttaatgtaaaaatctgtgatatattatatttaaagtgttgcatttaagatgagtattttaccagagtgtttccattcatatccgcggtatggaggatttgaggaacagtaaccaggatgtgaatgattttgttacatcagtgttcactgtagccacctaagtaggacattatatgatttcagaatcaatatgtggaacttctttaagcattcagtgtgcccactaaatgccagccacacctccacttgcctcttattgtcttatttttatatatttttctaaatatatgtatatatacagtacatagaaaatagaacttttattttgtgacctaaggacgatggtgaaaagatcacgttttcaaaacaatctggtgatcagaatgttcatataccagctggtttctgaagaggtcagaatgatctttctccatactgacttttaacaatgttgatcattgaggctaaattaatatatatgaaatattcctttttgatgacaccacaaaattgttgaacagtttaagaatttcaaccttaatcttggatccctttacctcatatggaagaacttgagggacattagtatacttttttttaagatggagtcttgctctgtcacccaggttggagtgccatggcatgatcttggctcactgcaacctccacctcctgggtcaagccattctgcttcagccccaagtaggtgggactccaggcatgcaccaccatgcctggctaatttttgcatttttagtagagacagggtttcaccatattggccaggctgggactcgaactcctgaccttgtgatctgcccgcctcagcctcccaaagtactgggattataggcatgagccaccacgcccagcctgttatttttttattattattgtttttttttagtgacagagtctcattctgttgcccatgctggagtgcagtggcgtgatcatagctcactgcagccttgaattcctaggctccagtgatcctctcacctcagcttccctaatagctaggattacaggtgtgtggcctcccaccccaccccacccttcacacctggctgatttttcaaaaagtttttttgtagaaacagggtctcaccatgttgtccagcctggtctcaaactcctgtcctcaagtgatcctcccacctcagcctttcaaagtgctggaattacaggtgtgagccactctgcctggcctaccactaacttgaatacattcagaatcacctcctctccccaaaatttgtagaaatagtttttgaggaagccaaaagcaaagcagaaacctttacagtattgtttcttttctctttgttaactgtgtcattacagcaaaatactagcagtctgcctaaacatgttcattgtacatttctcaggctatcaatgaatggaggtttttaaaaagttgaatatttgtctgaacattttatttcaaagttcaaaaaaacagaggctgcaaaattcattttataatggctattttgtgacgataagatgtagttcatgtttttctgtagcactgggcccaaatattctttgtaaagaaaatcgctgcagcaaaaactgttactgtgtttattatatttgtagaagtattagaaaaatattctattttttattcagtgctgcgtaattacccatggtagccaaccctacaaaagacaggttttcacaaattgaggtggaggtgggcggttcagtatctgccactggacttgattataaactgtatttgaatatcagtggtattatcttttaagttgtcagcaagttaccaaggtattcattaaagaacttgtaatatcaaattactatttattcataacaattgatttgatgctaataataattttctttaaactctaccattcattatgtggtaactgtattgaacttactttatttggattttattttaatgtgactagatgtcaccacttcaaaaaatcaatttgttcttagaacctggttgaaaataccaggaaactgttacagacgcctcctgggttcacgccattctcccacctcagcttcccaagcagctgggactacaggtacctgccaccacgcctggctaattttgtttttgtatttttagtagagacggggtttcaccgtgttagccaggaaggtctcaatctcctgacctcgtgaatcgcccccctcggtctcccaaagtgctgggattacaggcgtgagccaccatgcccggcccaaatattttttattcaggatggtataacctaactgataataggtaataaggttaaatttttttatgacgtattttatttacaaatatcatacactgctggtgttaccatatgaaaggaaataaagtcaattgataattgcctca

SEQ ID NO: 287961 - DNA, 5252 bp, Homo sapiens
  misc_feature (1966)..(1966): n is a, c, g, or t
ctggaactgggagtgatgtcagctcccagctcggtgcctgcccggattcctgacatggtgtagtgcaggcagggtggggaaaggacggggaaggactcgtgtgctgcgagctggcggccgggccggagtgctggggctttgaactccgagaggaggtggaccagaacttttggaactagtgccggcggctctccaccccccagtataaaagaacgtgtggatcactttgctgagtacatccaagatttgaagaactgaaataaatcagctttaaacctgctttttaaaaatatctgggttggaatttgcccctgacaaataataaaatgatgagtgatgcaagtgacatgttggctgcagcgttggagcagatggatggtatcatagcaggttctaaggctctggaatattccaatgggatttttgattgccaatctcccacctctccattcatgggaagtttgcgagctctgcaccttgtggaagacctgcgtggattgttagagatgatggaaacagatgagaaagaaggcttgagatgccagatcccagattcaacagcagaaacgcttgttgaatggcttcagagtcaaatgacaaatggacacctaccagggaacggagatgtgtatcaagaaaggctggcacgtttagaaaatgataaagaatccctcgttcttcaggtaagtgtgttaacagaccaggtggaggctcagggagagaagattcgagatttggagttttgtcttgaagagcacagagagaagttgaatgccacagaagaaatgctgcagcaggagcttctaagtaggacatccttagaaactcagaagttggatctgatggctgaaatatctaacttgaagttgaaactgacagctgtagagaaggacagattggattatgaagataagttcagagacacagaggggctgattcaggagatcaatgatttgaggttaaaagttagtgaaatggacagtgagagacttcagtatgaaaaaaagcttaaatcaaccaaagatgaactggcatctttaaaagaacaactagaagaaaaggaatctgaagtaaaaaggctacaagaaaaattggtttgcaagatgaaaggagaaggggttgaaattgttgatagagatgaaaattttaaaaagaagctcaaagaaaaaaacatcgaagtacaaaaaatgaaaaaagctgtggagtccttgatggcagcaaatgaagaaaaggatcggaaaatagaagatcttcgacagtgcctgaacaggtacaagaaaatgcaagacacggtggtactggcccaaggtaaaaaaggcaaagatggagaatatgaagagctgctcaattccagttccatctcctctttgctggatgcacagggtttcagtgatctggagaaaagtccatcacccactccagtaatgggatctcccagttgtgacccatttaacacaagtgttcccgaagagttccatactaccatcttgcaagtttccatcccttcattattgccagcaactgtaagcatggaaacttctgaaaaatcaaagttgactcctaagccagagacttcatttgaagaaaatgatggaaacataatccttggtgccactgttgatacccaactgtgtgataaacttttaacttcaagtctgcagaagtccagcagcctgggcaatctgaagaaagagacatctgatggggaaaaggaaactattcagaagacttcagaggacagagctccggcagaaagcaggccatttgggacccttcctcccaggcccccagggcaggacacctccatggatgacaaccccttcggcactcgaaaagtcagatcttcctttggccggggcttttttaaaatcaaaagtaacaagagaacagcaagtgcaccaaacttagatcgtaaacgaagtgccagtgcacccaccctagctgaaacagaaaaagagacagcagngcacctagatctggctggtgcttcttctcggccaaaagattcacagaggaacagtcccttccagataccgcctccatctccagattccaaaaagaaatccagaggtatcatgaaactctttggaaaacttaggagaagtcaatcaactacattcaacccagatgacatgtctgagcctgaattcaaaagaggagggacaagggcaaccgcggggccccgattaggttggtctcgagacttgggacagtctaacagtgacttggatatgccatttgccaagtggaccaaggagcaggtttgcaattggctgatggaacagggcttgggctcgtacctgaattctggcaagcactggattgcatctggccaaacgcttttgcaggcttctcaacaagatctagagaaggaacttggaatcaagcattcacttcatcgaaagaaactccagctagcactccaagccctgggatctgaagaagaaaccaatcatgggaagctggatttcaactgggtcactagatggttggatgacattggcctccctcaatataagacccagtttgatgaaggacgggttgatggtcgaatgctacattacatgactgttgatgacttactgtctctgaaggttgtaagtgtgctacaccatctcagtatcaaaagggccatccaggtcctgaggatcaataactttgaaccaaactgtctacggaggcggccatctgatgagaataccatcgccccatcagaagttcagaagtggactaaccatcgagtgatggagtggctgcgctccgtggacttggcagaatatgcgcccaatctcagaggcagtggtgtccatggtgggctcatggttctagagcctcgttttaacgtagaaacaatggctcagttattgaacatcccacccaataagactttgctgcgaagacatttggccactcatttcaaccttctgattggggctgaggcacagcaccagaagcgagatgccatggagctgccggattatgtacttctaacagctactgccaaagtgaagccaaagaaacttgcctttagcaattttgggaatttgagaaagaagaaacaggaagatggtgaagaatatgtttgtccaatggaattgggacaggcatcaggaagtgcatctaagaaaggatttaaacctggtttggatatgcgcctgtatgaggaagatgatttggaccggttagagcagatggaagattcagaagggacagtgagacagataggtgcattctctgaaggcatcaacaatctgacgcacatgttaaaagaagatgacatgtttaaagattttgctgcccgttcccccagtgccagcattacagatgaagactcaaacgtttgaccgtagcacctggatgaacattaggagtgcttagtcttttttctacttgcttttccaaacactcacagtatatacaacaggcagcggattgtctattgtttgttgttccaacttctgctgtcgagaagtttaaacagaaagcaggagtaatgtgccgattctgaagttgccacaaaaaataagacactggtgaatgagagtataattgtttttcttctatttaatgtaaaaatctgtgatatattatatttaaagtgttgcatttaagatgagtattttaccagagtgtttccattcatatccgcggtatggaggatttgaggaacagtaaccaggatgtgaatgattttgttacatcagtgttcactgtagccacctaagtaggacattatatgatttcagaatcaatatgtggaacttctttaagcattcagtgtgcccactaaatgccagccacacctccacttgcctcttattgtcttatttttatatatttttctaaatatatgtatatatacagtacatagaaaatagaacttttattttgtgacctaaggacgatggtgaaaagatcacgttttcaaaacaatctggtgatcagaatgttcatataccagctggtttctgaagaggtcagaatgatctttctccatactgacttttaacaatgttgatcattgaggctaaattaatatatatgaaatattcctttttgatgacaccacaaaattgttgaacagtttaagaatttcaaccttaatcttggatccctttacctcatatggaagaacttgagggacattagtatacttttttttaagatggagtcttgctctgtcacccaggttggagtgccatggcatgatcttggctcactgcaacctccacctcctgggtcaagccattctgcttcagccccaagtaggtgggactccaggcatgcaccaccatgcctggctaatttttgcatttttagtagagacagggtttcaccatattggccaggctgggactcgaactcctgaccttgtgatctgcccgcctcagcctcccaaagtactgggattataggcatgagccaccacgcccagcctgttatttttttattattattgtttttttttagtgacagagtctcattctgttgcccatgctggagtgcagtggcgtgatcatagctcactgcagccttgaattcctaggctccagtgatcctctcacctcagcttccctaatagctaggattacaggtgtgtggcctcccaccccaccccacccttcacacctggctgatttttcaaaaagtttttttgtagaaacagggtctcaccatgttgtccagcctggtctcaaactcctgtcctcaagtgatcctcccacctcagcctttcaaagtgctggaattacaggtgtgagccactctgcctggcctaccactaacttgaatacattcagaatcacctcctctccccaaaatttgtagaaatagtttttgaggaagccaaaagcaaagcagaaacctttacagtattgtttcttttctctttgttaactgtgtcattacagcaaaatactagcagtctgcctaaacatgttcattgtacatttctcaggctatcaatgaatggaggtttttaaaaagttgaatatttgtctgaacattttatttcaaagttcaaaaaaacagaggctgcaaaattcattttataatggctattttgtgacgataagatgtagttcatgtttttctgtagcactgggcccaaatattttttattcaggatggtataacctaactgataataggtaataaggttaaatttttttatgacgtattttatttacaaatatcatacactgctggtgttaccatatgaaaggaaataaagtcaattgataattgcctca

SEQ ID NO: 287962 - DNA, 6053 bp, Homo sapiens
  misc_feature (1993)..(1993): n is a, c, g, or t
ctggaactgggagtgatgtcagctcccagctcggtgcctgcccggattcctgacatggtgtagtgcaggcagggtggggaaaggacggggaaggactcgtgtgctgcgagctggcggccgggccggagtgctggggctttgaactccgagaggaggtggaccagaacttttggaactagtgccggcggctctccaccccccagtataaaagaacgtgtggatcactttgctgagtacatccaagatttgaagaactgaaataaatcagctttaaacctgctttttaaaaatatctgggttggaatttgcccctgacaaataataaaatgatgagtgatgcaagtgacatgttggctgcagcgttggagcagatggatggtatcatagcaggttctaaggctctggaatattccaatgggatttttgattgccaatctcccacctctccattcatgggaagtttgcgagctctgcaccttgtggaagacctgcgtggattgttagagatgatggaaacagatgagaaagaaggcttgagatgccagatcccagattcaacagcagaaacgcttgttgaatggcttcagagtcaaatgacaaatggacacctaccagggaacggagatgtgtatcaagaaaggctggcacgtttagaaaatgataaagaatccctcgttcttcaggtaagtgtgttaacagaccaggtggaggctcagggagagaagattcgagatttggagttttgtcttgaagagcacagagagaagttgaatgccacagaagaaatgctgcagcaggagcttctaagtaggacatccttagaaactcagaagttggatctgatggctgaaatatctaacttgaagttgaaactgacagctgtagagaaggacagattggattatgaagataagttcagagacacagaggggctgattcaggagatcaatgatttgaggttaaaagttagtgaaatggacagtgagagacttcagtatgaaaaaaagcttaaatcaaccaaatctttaatggccaaactttctagcatgaaaatcaaggtgggtcagatgcagtatgaaaagcagcggatggaacaaaaatgggagtcactgaaggatgaactggcatctttaaaagaacaactagaagaaaaggaatctgaagtaaaaaggctacaagaaaaattggtttgcaagatgaaaggagaaggggttgaaattgttgatagagacatcgaagtacaaaaaatgaaaaaagctgtggagtccttgatggcagcaaatgaagaaaaggatcggaaaatagaagatcttcgacagtgcctgaacaggtacaagaaaatgcaagacacggtggtactggcccaaggtaaaaaaggcaaagatggagaatatgaagagctgctcaattccagttccatctcctctttgctggatgcacagggtttcagtgatctggagaaaagtccatcacccactccagtaatgggatctcccagttgtgacccatttaacacaagtgttcccgaagagttccatactaccatcttgcaagtttccatcccttcattattgccagcaactgtaagcatggaaacttctgaaaaatcaaagttgactcctaagccagagacttcatttgaagaaaatgatggaaacataatccttggtgccactgttgatacccaactgtgtgataaacttttaacttcaagtctgcagaagtccagcagcctgggcaatctgaagaaagagacatctgatggggaaaaggaaactattcagaagacttcagaggacagagctccggcagaaagcaggccatttgggacccttcctcccaggcccccagggcaggacacctccatggatgacaaccccttcggcactcgaaaagtcagatcttcctttggccggggcttttttaaaatcaaaagtaacaagagaacagcaagtgcaccaaacttagctgaaacagaaaaagagacagcagngcacctagatctggctggtgcttcttctcggccaaaagattcacagaggaacagtcccttccagataccgcctccatctccagattccaaaaagaaatccagaggtatcatgaaactctttggaaaacttaggagaagtcaatcaactacattcaacccagatgacatgtctgagcctgaattcaaaagaggagggacaagggcaaccgcggggccccgattaggttggtctcgagacttgggacagtctaacagtgacttggatatgccatttgccaagtggaccaaggagcaggtttgcaattggctgatggaacagggcttgggctcgtacctgaattctggcaagcactggattgcatctggccaaacgcttttgcaggcttctcaacaagatctagagaaggaacttggaatcaagcattcacttcatcgaaagaaactccagctagcactccaagccctgggatctgaagaagaaaccaatcatgggaagctggatttcaactgggtcactagatggttggatgacattggcctccctcaatataagacccagtttgatgaaggacgggttgatggtcgaatgctacattacatgactgttgatgacttactgtctctgaaggttgtaagtgtgctacaccatctcagtatcaaaagggccatccaggtcctgaggatcaataactttgaaccaaactgtctacggaggcggccatctgatgagaataccatcgccccatcagaagttcagaagtggactaaccatcgagtgatggagtggctgcgctccgtggacttggcagaatatgcgcccaatctcagaggcagtggtgtccatggtgggctcatggttctagagcctcgttttaacgtagaaacaatggctcagttattgaacatcccacccaataagactttgctgcgaagacatttggccactcatttcaaccttctgattggggctgaggcacagcaccagaagcgagatgccatggagctgccggattatgtacttctaacagctactgccaaagtgaagccaaagaaacttgcctttagcaattttgggaatttgagaaagaagaaacaggaagatggtgaagaatatgtttgtccaatggaattgggacaggcatcaggaagtgcatctaagaaaggatttaaacctggtttggatatgcgcctgtatgaggaagatgatttggaccggttagagcagatggaagattcagaagggacagtgagacagataggtgcattctctgaaggcatcaacaatctgacgcacatgttaaaagaagatgacatgtttaaagattttgctgcccgttcccccagtgccagcattacagatgaagactcaaacgtttgaccgtagcacctggatgaacattaggagtgcttagtcttttttctacttgcttttccaaacactcacagtatatacaacaggcagcggattgtctattgtttgttgttccaacttctgctgtcgagaagtttaaacagaaagcaggagtaatgtgccgattctgaagttgccacaaaaaataagacactggtgaatgagagtataattgtttttcttctatttaatgtaaaaatctgtgatatattatatttaaagtgttgcatttaagatgagtattttaccagagtgtttccattcatatccgcggtatggaggatttgaggaacagtaaccaggatgtgaatgattttgttacatcagtgttcactgtagccacctaagtaggacattatatgatttcagaatcaatatgtggaacttctttaagcattcagtgtgcccactaaatgccagccacacctccacttgcctcttattgtcttatttttatatatttttctaaatatatgtatatatacagtacatagaaaatagaacttttattttgtgacctaaggacgatggtgaaaagatcacgttttcaaaacaatctggtgatcagaatgttcatataccagctggtttctgaagaggtcagaatgatctttctccatactgacttttaacaatgttgatcattgaggctaaattaatatatatgaaatattcctttttgatgacaccacaaaattgttgaacagtttaagaatttcaaccttaatcttggatccctttacctcatatggaagaacttgagggacattagtatacttttttttaagatggagtcttgctctgtcacccaggttggagtgccatggcatgatcttggctcactgcaacctccacctcctgggtcaagccattctgcttcagccccaagtaggtgggactccaggcatgcaccaccatgcctggctaatttttgcatttttagtagagacagggtttcaccatattggccaggctgggactcgaactcctgaccttgtgatctgcccgcctcagcctcccaaagtactgggattataggcatgagccaccacgcccagcctgttatttttttattattattgtttttttttagtgacagagtctcattctgttgcccatgctggagtgcagtggcgtgatcatagctcactgcagccttgaattcctaggctccagtgatcctctcacctcagcttccctaatagctaggattacaggtgtgtggcctcccaccccaccccacccttcacacctggctgatttttcaaaaagtttttttgtagaaacagggtctcaccatgttgtccagcctggtctcaaactcctgtcctcaagtgatcctcccacctcagcctttcaaagtgctggaattacaggtgtgagccactctgcctggcctaccactaacttgaatacattcagaatcacctcctctccccaaaatttgtagaaatagtttttgaggaagccaaaagcaaagcagaaacctttacagtattgtttcttttctctttgttaactgtgtcattacagcaaaatactagcagtctgcctaaacatgttcattgtacatttctcaggctatcaatgaatggaggtttttaaaaagttgaatatttgtctgaacattttatttcaaagttcaaaaaaacagaggctgcaaaattcattttataatggctattttgtgacgataagatgtagttcatgtttttctgtagcactgggcccaaatattctttgtaaagaaaatcgctgcagcaaaaactgttactgtgtttattatatttgtagaagtattagaaaaatattctattttttattcagtgctgcgtaattacccatggtagccaaccctacaaaagacaggttttcacaaattgaggtggaggtgggcggttcagtatctgccactggacttgattataaactgtatttgaatatcagtggtattatcttttaagttgtcagcaagttaccaaggtattcattaaagaacttgtaatatcaaattactatttattcataacaattgatttgatgctaataataattttctttaaactctaccattcattatgtggtaactgtattgaacttactttatttggattttattttaatgtgactagatgtcaccacttcaaaaaatcaatttgttcttagaacctggttgaaaataccaggaaactgttacagacgccattttttttttttttgagacggagtcttgctctgttgcccaggctggagtgcagtggcacaatctcagctcactgcaagctccgcctcctgggttcacgccattctcccacctcagcttcccaagcagctgggactacaggtacctgccaccacgcctggctaattttgtttttgtatttttagtagagacggggtttcaccgtgttagccaggaaggtctcaatctcctgacctcgtgaatcgcccccctcggtctcccaaagtgctgggattacaggcgtgagccaccatgcccggcccaaatattttttattcaggatggtataacctaactgataataggtaataaggttaaatttttttatgacgtattttatttacaaatatcatacactgctggtgttaccatatgaaaggaaataaagtcaattgataattgcctca

SEQ ID NO: 287963 - DNA, 5722 bp, Homo sapiens
  misc_feature (1662)..(1662): n is a, c, g, or t
gacaggcatcccctccgtcgtgctacagcgttagagcagatagatggtatcatcgacaggttctaaggctctggaatattccaatgggatttttgattgccaatctcccacctctccattcatgggaagtttgcgagctctgcaccttgtggaagacctgcgtggattgttagagatgatggaaacagatgagaaagaaggcttgagatgccagatcccagattcaacagcagaaacgcttgttgaatggcttcagagtcaaatgacaaatggacacctaccagggaacggagatgtgtatcaagaaaggctggcacgtttagaaaatgataaagaatccctcgttcttcaggtaagtgtgttaacagaccaggtggaggctcagggagagaagattcgagatttggagttttgtcttgaagagcacagagagaagttgaatgccacagaagaaatgctgcagcaggagcttctaagtaggacatccttagaaactcagaagttggatctgatggctgaaatatctaacttgaagttgaaactgacagctgtagagaaggacagattggattatgaagataagttcagagacacagaggggctgattcaggagatcaatgatttgaggttaaaagttagtgaaatggacagtgagagacttcagtatgaaaaaaagcttaaatcaaccaaatctttaatggccaaactttctagcatgaaaatcaaggtgggtcagatgcagtatgaaaagcagcggatggaacaaaaatgggagtcactgaaggatgaactggcatctttaaaagaacaactagaagaaaaggaatctgaagtaaaaaggctacaagaaaaattggtttgcaagatgaaaggagaaggggttgaaattgttgatagagacatcgaagtacaaaaaatgaaaaaagctgtggagtccttgatggcagcaaatgaagaaaaggatcggaaaatagaagatcttcgacagtgcctgaacaggtacaagaaaatgcaagacacggtggtactggcccaaggtaaaaaaggcaaagatggagaatatgaagagctgctcaattccagttccatctcctctttgctggatgcacagggtttcagtgatctggagaaaagtccatcacccactccagtaatgggatctcccagttgtgacccatttaacacaagtgttcccgaagagttccatactaccatcttgcaagtttccatcccttcattattgccagcaactgtaagcatggaaacttctgaaaaatcaaagttgactcctaagccagagacttcatttgaagaaaatgatggaaacataatccttggtgccactgttgatacccaactgtgtgataaacttttaacttcaagtctgcagaagtccagcagcctgggcaatctgaagaaagagacatctgatggggaaaaggaaactattcagaagacttcagaggacagagctccggcagaaagcaggccatttgggacccttcctcccaggcccccagggcaggacacctccatggatgacaaccccttcggcactcgaaaagtcagatcttcctttggccggggcttttttaaaatcaaaagtaacaagagaacagcaagtgcaccaaacttagctgaaacagaaaaagagacagcagngcacctagatctggctggtgcttcttctcggccaaaagattcacagaggaacagtcccttccagataccgcctccatctccagattccaaaaagaaatccagaggtatcatgaaactctttggaaaacttaggagaagtcaatcaactacattcaacccagatgacatgtctgagcctgaattcaaaagaggagggacaagggcaaccgcggggccccgattaggttggtctcgagacttgggacagtctaacagtgacttggatatgccatttgccaagtggaccaaggagcaggtttgcaattggctgatggaacagggcttgggctcgtacctgaattctggcaagcactggattgcatctggccaaacgcttttgcaggcttctcaacaagatctagagaaggaacttggaatcaagcattcacttcatcgaaagaaactccagctagcactccaagccctgggatctgaagaagaaaccaatcatgggaagctggatttcaactgggtcactagatggttggatgacattggcctccctcaatataagacccagtttgatgaaggacgggttgatggtcgaatgctacattacatgactgttgatgacttactgtctctgaaggttgtaagtgtgctacaccatctcagtatcaaaagggccatccaggtcctgaggatcaataactttgaaccaaactgtctacggaggcggccatctgatgagaataccatcgccccatcagaagttcagaagtggactaaccatcgagtgatggagtggctgcgctccgtggacttggcagaatatgcgcccaatctcagaggcagtggtgtccatggtgggctcatggttctagagcctcgttttaacgtagaaacaatggctcagttattgaacatcccacccaataagactttgctgcgaagacatttggccactcatttcaaccttctgattggggctgaggcacagcaccagaagcgagatgccatggagctgccggattatgtacttctaacagctactgccaaagtgaagccaaagaaacttgcctttagcaattttgggaatttgagaaagaagaaacaggaagatggtgaagaatatgtttgtccaatggaattgggacaggcatcaggaagtgcatctaagaaaggatttaaacctggtttggatatgcgcctgtatgaggaagatgatttggaccggttagagcagatggaagattcagaagggacagtgagacagataggtgcattctctgaaggcatcaacaatctgacgcacatgttaaaagaagatgacatgtttaaagattttgctgcccgttcccccagtgccagcattacagatgaagactcaaacgtttgaccgtagcacctggatgaacattaggagtgcttagtcttttttctacttgcttttccaaacactcacagtatatacaacaggcagcggattgtctattgtttgttgttccaacttctgctgtcgagaagtttaaacagaaagcaggagtaatgtgccgattctgaagttgccacaaaaaataagacactggtgaatgagagtataattgtttttcttctatttaatgtaaaaatctgtgatatattatatttaaagtgttgcatttaagatgagtattttaccagagtgtttccattcatatccgcggtatggaggatttgaggaacagtaaccaggatgtgaatgattttgttacatcagtgttcactgtagccacctaagtaggacattatatgatttcagaatcaatatgtggaacttctttaagcattcagtgtgcccactaaatgccagccacacctccacttgcctcttattgtcttatttttatatatttttctaaatatatgtatatatacagtacatagaaaatagaacttttattttgtgacctaaggacgatggtgaaaagatcacgttttcaaaacaatctggtgatcagaatgttcatataccagctggtttctgaagaggtcagaatgatctttctccatactgacttttaacaatgttgatcattgaggctaaattaatatatatgaaatattcctttttgatgacaccacaaaattgttgaacagtttaagaatttcaaccttaatcttggatccctttacctcatatggaagaacttgagggacattagtatacttttttttaagatggagtcttgctctgtcacccaggttggagtgccatggcatgatcttggctcactgcaacctccacctcctgggtcaagccattctgcttcagccccaagtaggtgggactccaggcatgcaccaccatgcctggctaatttttgcatttttagtagagacagggtttcaccatattggccaggctgggactcgaactcctgaccttgtgatctgcccgcctcagcctcccaaagtactgggattataggcatgagccaccacgcccagcctgttatttttttattattattgtttttttttagtgacagagtctcattctgttgcccatgctggagtgcagtggcgtgatcatagctcactgcagccttgaattcctaggctccagtgatcctctcacctcagcttccctaatagctaggattacaggtgtgtggcctcccaccccaccccacccttcacacctggctgatttttcaaaaagtttttttgtagaaacagggtctcaccatgttgtccagcctggtctcaaactcctgtcctcaagtgatcctcccacctcagcctttcaaagtgctggaattacaggtgtgagccactctgcctggcctaccactaacttgaatacattcagaatcacctcctctccccaaaatttgtagaaatagtttttgaggaagccaaaagcaaagcagaaacctttacagtattgtttcttttctctttgttaactgtgtcattacagcaaaatactagcagtctgcctaaacatgttcattgtacatttctcaggctatcaatgaatggaggtttttaaaaagttgaatatttgtctgaacattttatttcaaagttcaaaaaaacagaggctgcaaaattcattttataatggctattttgtgacgataagatgtagttcatgtttttctgtagcactgggcccaaatattctttgtaaagaaaatcgctgcagcaaaaactgttactgtgtttattatatttgtagaagtattagaaaaatattctattttttattcagtgctgcgtaattacccatggtagccaaccctacaaaagacaggttttcacaaattgaggtggaggtgggcggttcagtatctgccactggacttgattataaactgtatttgaatatcagtggtattatcttttaagttgtcagcaagttaccaaggtattcattaaagaacttgtaatatcaaattactatttattcataacaattgatttgatgctaataataattttctttaaactctaccattcattatgtggtaactgtattgaacttactttatttggattttattttaatgtgactagatgtcaccacttcaaaaaatcaatttgttcttagaacctggttgaaaataccaggaaactgttacagacgccattttttttttttttgagacggagtcttgctctgttgcccaggctggagtgcagtggcacaatctcagctcactgcaagctccgcctcctgggttcacgccattctcccacctcagcttcccaagcagctgggactacaggtacctgccaccacgcctggctaattttgtttttgtatttttagtagagacggggtttcaccgtgttagccaggaaggtctcaatctcctgacctcgtgaatcgcccccctcggtctcccaaagtgctgggattacaggcgtgagccaccatgcccggcccaaatattttttattcaggatggtataacctaactgataataggtaataaggttaaatttttttatgacgtattttatttacaaatatcatacactgctggtgttaccatatgaaaggaaataaagtcaattgataattgcctca

SEQ ID NO: 287964 - DNA, 5960 bp, Homo sapiens
  misc_feature (1900)..(1900): n is a, c, g, or t
ctggaactgggagtgatgtcagctcccagctcggtgcctgcccggattcctgacatggtgtagtgcaggcagggtggggaaaggacggggaaggactcgtgtgctgcgagctggcggccgggccggagtgctggggctttgaactccgagaggaggtggaccagaacttttggaactagtgccggcggctctccaccccccagtataaaagaacgtgtggatcactttgctgagtacatccaagatttgaagaactgaaataaatcagctttaaacctgctttttaaaaatatctgggttggaatttgcccctgacaaataataaaatgatgagtgatgcaagtgacatgttggctgcagcgttggagcagatggatggtatcatagcaggttctaaggctctggaatattccaatgggatttttgattgccaatctcccacctctccattcatgggaagtttgcgagctctgcaccttgtggaagacctgcgtggattgttagagatgatggaaacagatgagaaagaaggcttgagatgccagatcccagattcaacagcagaaacgcttgttgaatggcttcagagtcaaatgacaaatggacacctaccagggaacggagatgtgtatcaagaaaggctggcacgtttagaaaatgataaagaatccctcgttcttcaggtaagtgtgttaacagaccaggtggaggctcagggagagaagattcgagatttggagttttgtcttgaagagcacagagagaagttgaatgccacagaagaaatgctgcagcaggagcttctaagtaggacatccttagaaactcagaagttggatctgatggctgaaatatctaacttgaagttgaaactgacagctgtagagaaggacagattggattatgaagataagttcagagacacagaggggctgattcaggagatcaatgatttgaggttaaaagttagtgaaatggacagtgagagacttcagtatgaaaaaaagcttaaatcaaccaaagatgaactggcatctttaaaagaacaactagaagaaaaggaatctgaagtaaaaaggctacaagaaaaattggtttgcaagatgaaaggagaaggggttgaaattgttgatagagacatcgaagtacaaaaaatgaaaaaagctgtggagtccttgatggcagcaaatgaagaaaaggatcggaaaatagaagatcttcgacagtgcctgaacaggtacaagaaaatgcaagacacggtggtactggcccaaggtaaaaaaggcaaagatggagaatatgaagagctgctcaattccagttccatctcctctttgctggatgcacagggtttcagtgatctggagaaaagtccatcacccactccagtaatgggatctcccagttgtgacccatttaacacaagtgttcccgaagagttccatactaccatcttgcaagtttccatcccttcattattgccagcaactgtaagcatggaaacttctgaaaaatcaaagttgactcctaagccagagacttcatttgaagaaaatgatggaaacataatccttggtgccactgttgatacccaactgtgtgataaacttttaacttcaagtctgcagaagtccagcagcctgggcaatctgaagaaagagacatctgatggggaaaaggaaactattcagaagacttcagaggacagagctccggcagaaagcaggccatttgggacccttcctcccaggcccccagggcaggacacctccatggatgacaaccccttcggcactcgaaaagtcagatcttcctttggccggggcttttttaaaatcaaaagtaacaagagaacagcaagtgcaccaaacttagctgaaacagaaaaagagacagcagngcacctagatctggctggtgcttcttctcggccaaaagattcacagaggaacagtcccttccagataccgcctccatctccagattccaaaaagaaatccagaggtatcatgaaactctttggaaaacttaggagaagtcaatcaactacattcaacccagatgacatgtctgagcctgaattcaaaagaggagggacaagggcaaccgcggggccccgattaggttggtctcgagacttgggacagtctaacagtgacttggatatgccatttgccaagtggaccaaggagcaggtttgcaattggctgatggaacagggcttgggctcgtacctgaattctggcaagcactggattgcatctggccaaacgcttttgcaggcttctcaacaagatctagagaaggaacttggaatcaagcattcacttcatcgaaagaaactccagctagcactccaagccctgggatctgaagaagaaaccaatcatgggaagctggatttcaactgggtcactagatggttggatgacattggcctccctcaatataagacccagtttgatgaaggacgggttgatggtcgaatgctacattacatgactgttgatgacttactgtctctgaaggttgtaagtgtgctacaccatctcagtatcaaaagggccatccaggtcctgaggatcaataactttgaaccaaactgtctacggaggcggccatctgatgagaataccatcgccccatcagaagttcagaagtggactaaccatcgagtgatggagtggctgcgctccgtggacttggcagaatatgcgcccaatctcagaggcagtggtgtccatggtgggctcatggttctagagcctcgttttaacgtagaaacaatggctcagttattgaacatcccacccaataagactttgctgcgaagacatttggccactcatttcaaccttctgattggggctgaggcacagcaccagaagcgagatgccatggagctgccggattatgtacttctaacagctactgccaaagtgaagccaaagaaacttgcctttagcaattttgggaatttgagaaagaagaaacaggaagatggtgaagaatatgtttgtccaatggaattgggacaggcatcaggaagtgcatctaagaaaggatttaaacctggtttggatatgcgcctgtatgaggaagatgatttggaccggttagagcagatggaagattcagaagggacagtgagacagataggtgcattctctgaaggcatcaacaatctgacgcacatgttaaaagaagatgacatgtttaaagattttgctgcccgttcccccagtgccagcattacagatgaagactcaaacgtttgaccgtagcacctggatgaacattaggagtgcttagtcttttttctacttgcttttccaaacactcacagtatatacaacaggcagcggattgtctattgtttgttgttccaacttctgctgtcgagaagtttaaacagaaagcaggagtaatgtgccgattctgaagttgccacaaaaaataagacactggtgaatgagagtataattgtttttcttctatttaatgtaaaaatctgtgatatattatatttaaagtgttgcatttaagatgagtattttaccagagtgtttccattcatatccgcggtatggaggatttgaggaacagtaaccaggatgtgaatgattttgttacatcagtgttcactgtagccacctaagtaggacattatatgatttcagaatcaatatgtggaacttctttaagcattcagtgtgcccactaaatgccagccacacctccacttgcctcttattgtcttatttttatatatttttctaaatatatgtatatatacagtacatagaaaatagaacttttattttgtgacctaaggacgatggtgaaaagatcacgttttcaaaacaatctggtgatcagaatgttcatataccagctggtttctgaagaggtcagaatgatctttctccatactgacttttaacaatgttgatcattgaggctaaattaatatatatgaaatattcctttttgatgacaccacaaaattgttgaacagtttaagaatttcaaccttaatcttggatccctttacctcatatggaagaacttgagggacattagtatacttttttttaagatggagtcttgctctgtcacccaggttggagtgccatggcatgatcttggctcactgcaacctccacctcctgggtcaagccattctgcttcagccccaagtaggtgggactccaggcatgcaccaccatgcctggctaatttttgcatttttagtagagacagggtttcaccatattggccaggctgggactcgaactcctgaccttgtgatctgcccgcctcagcctcccaaagtactgggattataggcatgagccaccacgcccagcctgttatttttttattattattgtttttttttagtgacagagtctcattctgttgcccatgctggagtgcagtggcgtgatcatagctcactgcagccttgaattcctaggctccagtgatcctctcacctcagcttccctaatagctaggattacaggtgtgtggcctcccaccccaccccacccttcacacctggctgatttttcaaaaagtttttttgtagaaacagggtctcaccatgttgtccagcctggtctcaaactcctgtcctcaagtgatcctcccacctcagcctttcaaagtgctggaattacaggtgtgagccactctgcctggcctaccactaacttgaatacattcagaatcacctcctctccccaaaatttgtagaaatagtttttgaggaagccaaaagcaaagcagaaacctttacagtattgtttcttttctctttgttaactgtgtcattacagcaaaatactagcagtctgcctaaacatgttcattgtacatttctcaggctatcaatgaatggaggtttttaaaaagttgaatatttgtctgaacattttatttcaaagttcaaaaaaacagaggctgcaaaattcattttataatggctattttgtgacgataagatgtagttcatgtttttctgtagcactgggcccaaatattctttgtaaagaaaatcgctgcagcaaaaactgttactgtgtttattatatttgtagaagtattagaaaaatattctattttttattcagtgctgcgtaattacccatggtagccaaccctacaaaagacaggttttcacaaattgaggtggaggtgggcggttcagtatctgccactggacttgattataaactgtatttgaatatcagtggtattatcttttaagttgtcagcaagttaccaaggtattcattaaagaacttgtaatatcaaattactatttattcataacaattgatttgatgctaataataattttctttaaactctaccattcattatgtggtaactgtattgaacttactttatttggattttattttaatgtgactagatgtcaccacttcaaaaaatcaatttgttcttagaacctggttgaaaataccaggaaactgttacagacgccattttttttttttttgagacggagtcttgctctgttgcccaggctggagtgcagtggcacaatctcagctcactgcaagctccgcctcctgggttcacgccattctcccacctcagcttcccaagcagctgggactacaggtacctgccaccacgcctggctaattttgtttttgtatttttagtagagacggggtttcaccgtgttagccaggaaggtctcaatctcctgacctcgtgaatcgcccccctcggtctcccaaagtgctgggattacaggcgtgagccaccatgcccggcccaaatattttttattcaggatggtataacctaactgataataggtaataaggttaaatttttttatgacgtattttatttacaaatatcatacactgctggtgttaccatatgaaaggaaataaagtcaattgataattgcctca

SEQ ID NO: 287965 - DNA, 6381 bp, Homo sapiens
  misc_feature (2321)..(2321): n is a, c, g, or t
ctggaactgggagtgatgtcagctcccagctcggtgcctgcccggattcctgacatggtgtagtgcaggcagggtggggaaaggacggggaaggactcgtgtgctgcgagctggcggccgggccggagtgctggggctttgaactccgagaggaggtggaccagaacttttggaactagtgccggcggctctccaccccccagtataaaagaacgtgtggatcactttgctgagtacatccaagatttgaagaactgaaataaatcagctttaaacctgctttttaaaaatatctgggttggaatttgcccctgacaaataataaaatgatgagtgatgcaagtgacatgttggctgcagcgttggagcagatggatggtatcatagcaggttctaaggctctggaatattccaatgggatttttgattgccaatctcccacctctccattcatgggaagtttgcgagctctgcaccttgtggaagacctgcgtggattgttagagatgatggaaacagatgagaaagaaggcttgagatgccagatcccagattcaacagcagaaacgcttgttgaatggcttcagagtcaaatgacaaatggacacctaccagggaacggagatgtgtatcaagaaaggctggcacgtttagaaaatgataaagaatccctcgttcttcaggtaagtgtgttaacagaccaggtggaggctcagggagagaagattcgagatttggagttttgtcttgaagagcacagagagaagttgaatgccacagaagaaatgctgcagcaggagcttctaagtaggacatccttagaaactcagaagttggatctgatggctgaaatatctaacttgaagttgaaactgacagctgtagagaaggacagattggattatgaagataagttcagagacacagaggggctgattcaggagatcaatgatttgaggttaaaagttagtgaaatggacagtgagagacttcagtatgaaaaaaagcttaaatcaaccaaagtaagtttttctcacaggttaacattttcaaacaaatggcatcactattcatctatgcccaataatataaataagatgttttctacttaatgtatgataaagaaggtattttaaaagtaaatgaagatttccccccaagctggaaaccttgaatttaaacaccactgatctgaatttaaaaacaaggcttaactcatccgacagaacataacctgccctttctctgagttgtatctaacctcctttataaactgatactgttttctcggttatttagcttgtctttttctatctgtagttttctttcactcctctgtctctctaccagtctttaatggccaaactttctagcatgaaaatcaaggtgggtcagatgcagtatgaaaagcagcggatggaacaaaaatgggagtcactgaaggatgaactggcatctttaaaagaacaactagaagaaaaggaatctgaagtaaaaaggctacaagaaaaattggtttgcaagatgaaaggagaaggggttgaaattgttgatagagacatcgaagtacaaaaaatgaaaaaagctgtggagtccttgatggcagcaaatgaagaaaaggatcggaaaatagaagatcttcgacagtgcctgaacaggtacaagaaaatgcaagacacggtggtactggcccaaggtaaaaaaggcaaagatggagaatatgaagagctgctcaattccagttccatctcctctttgctggatgcacagggtttcagtgatctggagaaaagtccatcacccactccagtaatgggatctcccagttgtgacccatttaacacaagtgttcccgaagagttccatactaccatcttgcaagtttccatcccttcattattgccagcaactgtaagcatggaaacttctgaaaaatcaaagttgactcctaagccagagacttcatttgaagaaaatgatggaaacataatccttggtgccactgttgatacccaactgtgtgataaacttttaacttcaagtctgcagaagtccagcagcctgggcaatctgaagaaagagacatctgatggggaaaaggaaactattcagaagacttcagaggacagagctccggcagaaagcaggccatttgggacccttcctcccaggcccccagggcaggacacctccatggatgacaaccccttcggcactcgaaaagtcagatcttcctttggccggggcttttttaaaatcaaaagtaacaagagaacagcaagtgcaccaaacttagctgaaacagaaaaagagacagcagngcacctagatctggctggtgcttcttctcggccaaaagattcacagaggaacagtcccttccagataccgcctccatctccagattccaaaaagaaatccagaggtatcatgaaactctttggaaaacttaggagaagtcaatcaactacattcaacccagatgacatgtctgagcctgaattcaaaagaggagggacaagggcaaccgcggggccccgattaggttggtctcgagacttgggacagtctaacagtgacttggatatgccatttgccaagtggaccaaggagcaggtttgcaattggctgatggaacagggcttgggctcgtacctgaattctggcaagcactggattgcatctggccaaacgcttttgcaggcttctcaacaagatctagagaaggaacttggaatcaagcattcacttcatcgaaagaaactccagctagcactccaagccctgggatctgaagaagaaaccaatcatgggaagctggatttcaactgggtcactagatggttggatgacattggcctccctcaatataagacccagtttgatgaaggacgggttgatggtcgaatgctacattacatgactgttgatgacttactgtctctgaaggttgtaagtgtgctacaccatctcagtatcaaaagggccatccaggtcctgaggatcaataactttgaaccaaactgtctacggaggcggccatctgatgagaataccatcgccccatcagaagttcagaagtggactaaccatcgagtgatggagtggctgcgctccgtggacttggcagaatatgcgcccaatctcagaggcagtggtgtccatggtgggctcatggttctagagcctcgttttaacgtagaaacaatggctcagttattgaacatcccacccaataagactttgctgcgaagacatttggccactcatttcaaccttctgattggggctgaggcacagcaccagaagcgagatgccatggagctgccggattatgtacttctaacagctactgccaaagtgaagccaaagaaacttgcctttagcaattttgggaatttgagaaagaagaaacaggaagatggtgaagaatatgtttgtccaatggaattgggacaggcatcaggaagtgcatctaagaaaggatttaaacctggtttggatatgcgcctgtatgaggaagatgatttggaccggttagagcagatggaagattcagaagggacagtgagacagataggtgcattctctgaaggcatcaacaatctgacgcacatgttaaaagaagatgacatgtttaaagattttgctgcccgttcccccagtgccagcattacagatgaagactcaaacgtttgaccgtagcacctggatgaacattaggagtgcttagtcttttttctacttgcttttccaaacactcacagtatatacaacaggcagcggattgtctattgtttgttgttccaacttctgctgtcgagaagtttaaacagaaagcaggagtaatgtgccgattctgaagttgccacaaaaaataagacactggtgaatgagagtataattgtttttcttctatttaatgtaaaaatctgtgatatattatatttaaagtgttgcatttaagatgagtattttaccagagtgtttccattcatatccgcggtatggaggatttgaggaacagtaaccaggatgtgaatgattttgttacatcagtgttcactgtagccacctaagtaggacattatatgatttcagaatcaatatgtggaacttctttaagcattcagtgtgcccactaaatgccagccacacctccacttgcctcttattgtcttatttttatatatttttctaaatatatgtatatatacagtacatagaaaatagaacttttattttgtgacctaaggacgatggtgaaaagatcacgttttcaaaacaatctggtgatcagaatgttcatataccagctggtttctgaagaggtcagaatgatctttctccatactgacttttaacaatgttgatcattgaggctaaattaatatatatgaaatattcctttttgatgacaccacaaaattgttgaacagtttaagaatttcaaccttaatcttggatccctttacctcatatggaagaacttgagggacattagtatacttttttttaagatggagtcttgctctgtcacccaggttggagtgccatggcatgatcttggctcactgcaacctccacctcctgggtcaagccattctgcttcagccccaagtaggtgggactccaggcatgcaccaccatgcctggctaatttttgcatttttagtagagacagggtttcaccatattggccaggctgggactcgaactcctgaccttgtgatctgcccgcctcagcctcccaaagtactgggattataggcatgagccaccacgcccagcctgttatttttttattattattgtttttttttagtgacagagtctcattctgttgcccatgctggagtgcagtggcgtgatcatagctcactgcagccttgaattcctaggctccagtgatcctctcacctcagcttccctaatagctaggattacaggtgtgtggcctcccaccccaccccacccttcacacctggctgatttttcaaaaagtttttttgtagaaacagggtctcaccatgttgtccagcctggtctcaaactcctgtcctcaagtgatcctcccacctcagcctttcaaagtgctggaattacaggtgtgagccactctgcctggcctaccactaacttgaatacattcagaatcacctcctctccccaaaatttgtagaaatagtttttgaggaagccaaaagcaaagcagaaacctttacagtattgtttcttttctctttgttaactgtgtcattacagcaaaatactagcagtctgcctaaacatgttcattgtacatttctcaggctatcaatgaatggaggtttttaaaaagttgaatatttgtctgaacattttatttcaaagttcaaaaaaacagaggctgcaaaattcattttataatggctattttgtgacgataagatgtagttcatgtttttctgtagcactgggcccaaatattctttgtaaagaaaatcgctgcagcaaaaactgttactgtgtttattatatttgtagaagtattagaaaaatattctattttttattcagtgctgcgtaattacccatggtagccaaccctacaaaagacaggttttcacaaattgaggtggaggtgggcggttcagtatctgccactggacttgattataaactgtatttgaatatcagtggtattatcttttaagttgtcagcaagttaccaaggtattcattaaagaacttgtaatatcaaattactatttattcataacaattgatttgatgctaataataattttctttaaactctaccattcattatgtggtaactgtattgaacttactttatttggattttattttaatgtgactagatgtcaccacttcaaaaaatcaatttgttcttagaacctggttgaaaataccaggaaactgttacagacgccattttttttttttttgagacggagtcttgctctgttgcccaggctggagtgcagtggcacaatctcagctcactgcaagctccgcctcctgggttcacgccattctcccacctcagcttcccaagcagctgggactacaggtacctgccaccacgcctggctaattttgtttttgtatttttagtagagacggggtttcaccgtgttagccaggaaggtctcaatctcctgacctcgtgaatcgcccccctcggtctcccaaagtgctgggattacaggcgtgagccaccatgcccggcccaaatattttttattcaggatggtataacctaactgataataggtaataaggttaaatttttttatgacgtattttatttacaaatatcatacactgctggtgttaccatatgaaaggaaataaagtcaattgataattgcctca

SEQ ID NO: 287966 - DNA, 5963 bp, Homo sapiens
  misc_feature (1903)..(1903): n is a, c, g, or t
ctggaactgggagtgatgtcagctcccagctcggtgcctgcccggattcctgacatggtgtagtgcaggcagggtggggaaaggacggggaaggactcgtgtgctgcgagctggcggccgggccggagtgctggggctttgaactccgagaggaggtggaccagaacttttggaactagtgccggcggctctccaccccccagtataaaagaacgtgtggatcactttgctgagtacatccaagatttgaagaactgaaataaatcagctttaaacctgctttttaaaaatatctgggttggaatttgcccctgacaaataataaaatgatgagtgatgcaagtgacatgttggctgcagcgttggagcagatggatggtatcatagcaggttctaaggctctggaatattccaatgggatttttgattgccaatctcccacctctccattcatgggaagtttgcgagctctgcaccttgtggaagacctgcgtggattgttagagatgatggaaacagatgagaaagaaggcttgagatgccagatcccagattcaacagcagaaacgcttgttgaatggcttcagagtcaaatgacaaatggacacctaccagggaacggagatgtgtatcaagaaaggctggcacgtttagaaaatgataaagaatccctcgttcttcaggtaagtgtgttaacagaccaggtggaggctcagggagagaagattcgagatttggagttttgtcttgaagagcacagagagaagttgaatgccacagaagaaatgctgcagcaggagcttctaagtaggacatccttagaaactcagaagttggatctgatggctgaaatatctaacttgaagttgaaactgacagctgtagagaaggacagattggattatgaagataagttcagagacacagaggggctgattcaggagatcaatgatttgaggttaaaagttagtgaaatggacagtgagagacttcagtatgaaaaaaagcttaaatcaaccaaagatgaactggcatctttaaaagaacaactagaagaaaaggaatctgaagtaaaaaggctacaagaaaaattggtttgcaagatgaaaggagaaggggttgaaattgttgatagagacatcgaagtacaaaaaatgaaaaaagctgtggagtccttgatggcagcaaatgaagaaaaggatcggaaaatagaagatcttcgacagtgcctgaacaggtacaagaaaatgcaagacacggtggtactggcccaaggtaaaaaaggcaaagatggagaatatgaagagctgctcaattccagttccatctcctctttgctggatgcacagggtttcagtgatctggagaaaagtccatcacccactccagtaatgggatctcccagttgtgacccatttaacacaagtgttcccgaagagttccatactaccatcttgcaagtttccatcccttcattattgccagcaactgtaagcatggaaacttctgaaaaatcaaagttgactcctaagccagagacttcatttgaagaaaatgatggaaacataatccttggtgccactgttgatacccaactgtgtgataaacttttaacttcaagtctgcagaagtccagcagcctgggcaatctgaagaaagagacatctgatggggacagagctccggcagaaagcaggccatttgggacccttcctcccaggcccccagggcaggacacctccatggatgacaaccccttcggcactcgaaaagtcagatcttcctttggccggggcttttttaaaatcaaaagtaacaagagaacagcaagtgcaccaaacttagatcgtaaacgaagtgccagtgcacccaccctagctgaaacagaaaaagagacagcagngcacctagatctggctggtgcttcttctcggccaaaagattcacagaggaacagtcccttccagataccgcctccatctccagattccaaaaagaaatccagaggtatcatgaaactctttggaaaacttaggagaagtcaatcaactacattcaacccagatgacatgtctgagcctgaattcaaaagaggagggacaagggcaaccgcggggccccgattaggttggtctcgagacttgggacagtctaacagtgacttggatatgccatttgccaagtggaccaaggagcaggtttgcaattggctgatggaacagggcttgggctcgtacctgaattctggcaagcactggattgcatctggccaaacgcttttgcaggcttctcaacaagatctagagaaggaacttggaatcaagcattcacttcatcgaaagaaactccagctagcactccaagccctgggatctgaagaagaaaccaatcatgggaagctggatttcaactgggtcactagatggttggatgacattggcctccctcaatataagacccagtttgatgaaggacgggttgatggtcgaatgctacattacatgactgttgatgacttactgtctctgaaggttgtaagtgtgctacaccatctcagtatcaaaagggccatccaggtcctgaggatcaataactttgaaccaaactgtctacggaggcggccatctgatgagaataccatcgccccatcagaagttcagaagtggactaaccatcgagtgatggagtggctgcgctccgtggacttggcagaatatgcgcccaatctcagaggcagtggtgtccatggtgggctcatggttctagagcctcgttttaacgtagaaacaatggctcagttattgaacatcccacccaataagactttgctgcgaagacatttggccactcatttcaaccttctgattggggctgaggcacagcaccagaagcgagatgccatggagctgccggattatgtacttctaacagctactgccaaagtgaagccaaagaaacttgcctttagcaattttgggaatttgagaaagaagaaacaggaagatggtgaagaatatgtttgtccaatggaattgggacaggcatcaggaagtgcatctaagaaaggatttaaacctggtttggatatgcgcctgtatgaggaagatgatttggaccggttagagcagatggaagattcagaagggacagtgagacagataggtgcattctctgaaggcatcaacaatctgacgcacatgttaaaagaagatgacatgtttaaagattttgctgcccgttcccccagtgccagcattacagatgaagactcaaacgtttgaccgtagcacctggatgaacattaggagtgcttagtcttttttctacttgcttttccaaacactcacagtatatacaacaggcagcggattgtctattgtttgttgttccaacttctgctgtcgagaagtttaaacagaaagcaggagtaatgtgccgattctgaagttgccacaaaaaataagacactggtgaatgagagtataattgtttttcttctatttaatgtaaaaatctgtgatatattatatttaaagtgttgcatttaagatgagtattttaccagagtgtttccattcatatccgcggtatggaggatttgaggaacagtaaccaggatgtgaatgattttgttacatcagtgttcactgtagccacctaagtaggacattatatgatttcagaatcaatatgtggaacttctttaagcattcagtgtgcccactaaatgccagccacacctccacttgcctcttattgtcttatttttatatatttttctaaatatatgtatatatacagtacatagaaaatagaacttttattttgtgacctaaggacgatggtgaaaagatcacgttttcaaaacaatctggtgatcagaatgttcatataccagctggtttctgaagaggtcagaatgatctttctccatactgacttttaacaatgttgatcattgaggctaaattaatatatatgaaatattcctttttgatgacaccacaaaattgttgaacagtttaagaatttcaaccttaatcttggatccctttacctcatatggaagaacttgagggacattagtatacttttttttaagatggagtcttgctctgtcacccaggttggagtgccatggcatgatcttggctcactgcaacctccacctcctgggtcaagccattctgcttcagccccaagtaggtgggactccaggcatgcaccaccatgcctggctaatttttgcatttttagtagagacagggtttcaccatattggccaggctgggactcgaactcctgaccttgtgatctgcccgcctcagcctcccaaagtactgggattataggcatgagccaccacgcccagcctgttatttttttattattattgtttttttttagtgacagagtctcattctgttgcccatgctggagtgcagtggcgtgatcatagctcactgcagccttgaattcctaggctccagtgatcctctcacctcagcttccctaatagctaggattacaggtgtgtggcctcccaccccaccccacccttcacacctggctgatttttcaaaaagtttttttgtagaaacagggtctcaccatgttgtccagcctggtctcaaactcctgtcctcaagtgatcctcccacctcagcctttcaaagtgctggaattacaggtgtgagccactctgcctggcctaccactaacttgaatacattcagaatcacctcctctccccaaaatttgtagaaatagtttttgaggaagccaaaagcaaagcagaaacctttacagtattgtttcttttctctttgttaactgtgtcattacagcaaaatactagcagtctgcctaaacatgttcattgtacatttctcaggctatcaatgaatggaggtttttaaaaagttgaatatttgtctgaacattttatttcaaagttcaaaaaaacagaggctgcaaaattcattttataatggctattttgtgacgataagatgtagttcatgtttttctgtagcactgggcccaaatattctttgtaaagaaaatcgctgcagcaaaaactgttactgtgtttattatatttgtagaagtattagaaaaatattctattttttattcagtgctgcgtaattacccatggtagccaaccctacaaaagacaggttttcacaaattgaggtggaggtgggcggttcagtatctgccactggacttgattataaactgtatttgaatatcagtggtattatcttttaagttgtcagcaagttaccaaggtattcattaaagaacttgtaatatcaaattactatttattcataacaattgatttgatgctaataataattttctttaaactctaccattcattatgtggtaactgtattgaacttactttatttggattttattttaatgtgactagatgtcaccacttcaaaaaatcaatttgttcttagaacctggttgaaaataccaggaaactgttacagacgccattttttttttttttgagacggagtcttgctctgttgcccaggctggagtgcagtggcacaatctcagctcactgcaagctccgcctcctgggttcacgccattctcccacctcagcttcccaagcagctgggactacaggtacctgccaccacgcctggctaattttgtttttgtatttttagtagagacggggtttcaccgtgttagccaggaaggtctcaatctcctgacctcgtgaatcgcccccctcggtctcccaaagtgctgggattacaggcgtgagccaccatgcccggcccaaatattttttattcaggatggtataacctaactgataataggtaataaggttaaatttttttatgacgtattttatttacaaatatcatacactgctggtgttaccatatgaaaggaaataaagtcaattgataattgcctca

SEQ ID NO: 287967 - DNA, 1091 bp, Homo sapiens
ctggaactgggagtgatgtcagctcccagctcggtgcctgcccggattcctgacatggtgtagtgcaggcagggtggggaaaggacggggaaggactcgtgtgctgcgagctggcggccgggccggagtgctggggctttgaactccgagaggaggtggaccagaacttttggaactagtgccggcggctctccaccccccagtataaaagaacgtgtggatcactttgctgagtacatccaagatttgaagaactgaaataaatcagctttaaacctgctttttaaaaatatctgggttggaatttgcccctgacaaataataaaatgatgagtgatgcaagtgacatgttggctgcagcgttggagcagatggatggtatcatagcaggttctaaggctctggaatattccaatgggatttttgattgccaatctcccacctctccattcatgggaagtttgcgagctctgcaccttgtggaagacctgcgtggattgttagagatgatggaaacagatgagaaagaaggcttgagatgccagatcccagattcaacagcagaaacgcttgttgaatggcttcagagtcaaatgacaaatggacacctaccagggaacggagatgtgtatcaagaaaggctggcacgtttagaaaatgataaagaatccctcgttcttcaggtaagtgtgttaacagaccaggtggaggctcagggagagaagattcgagatttggagttttgtcttgaagagcacagagagaagttgaatgccacagaagaaatgctgcagcaggtatgtgcagaggccagaaccaagatgggatttccctgctgaactatgtgagatgctgcatttctatgttgtgtttgctctgatgcagcagtaagtttcttgattcacttagaccagcacattaaaaaaaaaaaattgagagtagtagagtctcaaaacacatgcacacaatataaagtgtttatgtaattagaatctggaacaaaatgtcaataggattgtggcttattttaattttctttttttgcattcagatggtttcctctcacccatagcatgtgttttataattaag

SEQ ID NO: 287968 - DNA, 3010 bp, Homo sapiens
  misc_feature (1900)..(1900): n is a, c, g, or t
ctggaactgggagtgatgtcagctcccagctcggtgcctgcccggattcctgacatggtgtagtgcaggcagggtggggaaaggacggggaaggactcgtgtgctgcgagctggcggccgggccggagtgctggggctttgaactccgagaggaggtggaccagaacttttggaactagtgccggcggctctccaccccccagtataaaagaacgtgtggatcactttgctgagtacatccaagatttgaagaactgaaataaatcagctttaaacctgctttttaaaaatatctgggttggaatttgcccctgacaaataataaaatgatgagtgatgcaagtgacatgttggctgcagcgttggagcagatggatggtatcatagcaggttctaaggctctggaatattccaatgggatttttgattgccaatctcccacctctccattcatgggaagtttgcgagctctgcaccttgtggaagacctgcgtggattgttagagatgatggaaacagatgagaaagaaggcttgagatgccagatcccagattcaacagcagaaacgcttgttgaatggcttcagagtcaaatgacaaatggacacctaccagggaacggagatgtgtatcaagaaaggctggcacgtttagaaaatgataaagaatccctcgttcttcaggtaagtgtgttaacagaccaggtggaggctcagggagagaagattcgagatttggagttttgtcttgaagagcacagagagaagttgaatgccacagaagaaatgctgcagcaggagcttctaagtaggacatccttagaaactcagaagttggatctgatggctgaaatatctaacttgaagttgaaactgacagctgtagagaaggacagattggattatgaagataagttcagagacacagaggggctgattcaggagatcaatgatttgaggttaaaagttagtgaaatggacagtgagagacttcagtatgaaaaaaagcttaaatcaaccaaagatgaactggcatctttaaaagaacaactagaagaaaaggaatctgaagtaaaaaggctacaagaaaaattggtttgcaagatgaaaggagaaggggttgaaattgttgatagagacatcgaagtacaaaaaatgaaaaaagctgtggagtccttgatggcagcaaatgaagaaaaggatcggaaaatagaagatcttcgacagtgcctgaacaggtacaagaaaatgcaagacacggtggtactggcccaaggtaaaaaaggcaaagatggagaatatgaagagctgctcaattccagttccatctcctctttgctggatgcacagggtttcagtgatctggagaaaagtccatcacccactccagtaatgggatctcccagttgtgacccatttaacacaagtgttcccgaagagttccatactaccatcttgcaagtttccatcccttcattattgccagcaactgtaagcatggaaacttctgaaaaatcaaagttgactcctaagccagagacttcatttgaagaaaatgatggaaacataatccttggtgccactgttgatacccaactgtgtgataaacttttaacttcaagtctgcagaagtccagcagcctgggcaatctgaagaaagagacatctgatggggaaaaggaaactattcagaagacttcagaggacagagctccggcagaaagcaggccatttgggacccttcctcccaggcccccagggcaggacacctccatggatgacaaccccttcggcactcgaaaagtcagatcttcctttggccggggcttttttaaaatcaaaagtaacaagagaacagcaagtgcaccaaacttagctgaaacagaaaaagagacagcagngcacctagatctggctggtgcttcttctcggccaaaagattcacagaggaacagtcccttccagataccgcctccatctccagattccaaaaagaaatccagaggtatcatgaaactctttggaaaacttaggagaagtcaatcaactacattcaacccagatgacatgtctgagcctgaattcaaaagaggagggacaagggcaaccgcggggccccgattaggttggtctcgagacttgggacagtctaacagtgacttggatatgccatttgccaagtggaccaaggagcaggtttgcaattggctgatggaacagggcttgggctcgtacctgaattctggcaagcactggattgcatctggccaaacgcttttgcaggcttctcaacaagatctagagaaggaacttggaatcaagcattcacttcatcgaaagaaactccagctagcactccaagccctgggatctgaagaagaaaccaatcatgggaagctggatttcaactgggtcactagatggttggatgacattggcctccctcaatataagacccagtttgatgaaggacgggttgatggtcgaatgctacattacatgactgttgatgacttactgtctctgaaggttgtaagtgtgctacaccatctcagtatcaaaagggccatccaggtcctgaggatcaataactttgaaccaaactgtctacggaggcggccatctgatgagaataccatcgccccatcagaagttcagaagtggactaaccatcgagtgatggagtggctgcgctccgtggacttggcagaatatgcgcccaatctcagaggcagtggtgtccatggtgggctcatggttctagagcctcgttttaacgtagaaacaatggctcagttattgaacatcccacccaataagactttgctgcgaagacatttggccactcatttcaaccttctgattggggctgaggcacagcaccagaagcgagatgccatggagctgccggattatgtacttctaacagctactgccaaagtgaagccaaagaaacttgcctttagcaacccagtcaatttgtggtaaacgtaatgagtagctggtggcgc

SEQ ID NO: 287969 - DNA, 2887 bp, Homo sapiens
  misc_feature (1900)..(1900): n is a, c, g, or t
ctggaactgggagtgatgtcagctcccagctcggtgcctgcccggattcctgacatggtgtagtgcaggcagggtggggaaaggacggggaaggactcgtgtgctgcgagctggcggccgggccggagtgctggggctttgaactccgagaggaggtggaccagaacttttggaactagtgccggcggctctccaccccccagtataaaagaacgtgtggatcactttgctgagtacatccaagatttgaagaactgaaataaatcagctttaaacctgctttttaaaaatatctgggttggaatttgcccctgacaaataataaaatgatgagtgatgcaagtgacatgttggctgcagcgttggagcagatggatggtatcatagcaggttctaaggctctggaatattccaatgggatttttgattgccaatctcccacctctccattcatgggaagtttgcgagctctgcaccttgtggaagacctgcgtggattgttagagatgatggaaacagatgagaaagaaggcttgagatgccagatcccagattcaacagcagaaacgcttgttgaatggcttcagagtcaaatgacaaatggacacctaccagggaacggagatgtgtatcaagaaaggctggcacgtttagaaaatgataaagaatccctcgttcttcaggtaagtgtgttaacagaccaggtggaggctcagggagagaagattcgagatttggagttttgtcttgaagagcacagagagaagttgaatgccacagaagaaatgctgcagcaggagcttctaagtaggacatccttagaaactcagaagttggatctgatggctgaaatatctaacttgaagttgaaactgacagctgtagagaaggacagattggattatgaagataagttcagagacacagaggggctgattcaggagatcaatgatttgaggttaaaagttagtgaaatggacagtgagagacttcagtatgaaaaaaagcttaaatcaaccaaagatgaactggcatctttaaaagaacaactagaagaaaaggaatctgaagtaaaaaggctacaagaaaaattggtttgcaagatgaaaggagaaggggttgaaattgttgatagagacatcgaagtacaaaaaatgaaaaaagctgtggagtccttgatggcagcaaatgaagaaaaggatcggaaaatagaagatcttcgacagtgcctgaacaggtacaagaaaatgcaagacacggtggtactggcccaaggtaaaaaaggcaaagatggagaatatgaagagctgctcaattccagttccatctcctctttgctggatgcacagggtttcagtgatctggagaaaagtccatcacccactccagtaatgggatctcccagttgtgacccatttaacacaagtgttcccgaagagttccatactaccatcttgcaagtttccatcccttcattattgccagcaactgtaagcatggaaacttctgaaaaatcaaagttgactcctaagccagagacttcatttgaagaaaatgatggaaacataatccttggtgccactgttgatacccaactgtgtgataaacttttaacttcaagtctgcagaagtccagcagcctgggcaatctgaagaaagagacatctgatggggaaaaggaaactattcagaagacttcagaggacagagctccggcagaaagcaggccatttgggacccttcctcccaggcccccagggcaggacacctccatggatgacaaccccttcggcactcgaaaagtcagatcttcctttggccggggcttttttaaaatcaaaagtaacaagagaacagcaagtgcaccaaacttagctgaaacagaaaaagagacagcagngcacctagatctggctggtgcttcttctcggccaaaagattcacagaggaacagtcccttccagataccgcctccatctccagattccaaaaagaaatccagaggtatcatgaaactctttggaaaacttaggagaagtcaatcaactacattcaacccagatgacatgtctgagcctgaattcaaaagaggagggacaagggcaaccgcggggccccgattaggttggtctcgagacttgggacagtctaacagtgacttggatatgccatttgccaagtggaccaaggagcaggtttgcaattggctgatggaacagggcttgggctcgtacctgaattctggcaagcactggattgcatctggccaaacgcttttgcaggcttctcaacaagatctagagaaggaacttggaatcaagcattcacttcatcgaaagaaactccagctagcactccaagccctgggatctgaagaagaaaccaatcatgggaagctggatttcaactgggtcactagatggttggatgacattggcctccctcaatataagacccagtttgatgaaggacgggttgatggtcgaatgctacattacatgactgttaataccatcgccccatcagaagttcagaagtggactaaccatcgagtgatggagtggctgcgctccgtggacttggcagaatatgcgcccaatctcagaggcagtggtgtccatggtgggctcatggttctagagcctcgttttaacgtagaaacaatggctcagttattgaacatcccacccaataagactttgctgcgaagacatttggccactcatttcaaccttctgattggggctgaggcacagcaccagaagcgagatgccatggagctgccggattatgtacttctaacagctactgccaaagtgaagccaaagaaacttgcctttagcaacccagtcaatttgtggtaaacgtaatgagtagctggtggcgc

SEQ ID NO: 287970 - DNA, 1050 bp, Homo sapiens
gagatcgagctcggtaccaaaacatgaactacatcttatcgtcacgaaagaacagaggctgcaaaattcattttataatggctattttgtgacgataagatgtagttcatgtttttctgtagcactgggcccaaatattctttgtaaagaaaatcgctgcagcaaaaactgttactgtgtttattatatttgtagaagtattagaaaaatattctattttttattcagtgctgcgtaattacccatggtagccaaccctacaaaagacaggttttcacaaattgaggtggaggtgggcggttcagtatctgccactggacttgattataaactgtatttgaatatcagtggtattatcttttaagttgtcagcaagttaccaaggtattcattaaagaacttgtaatatcaaattactatttattcataacaattgatttgatgctaataataattttctttaaactctaccattcattatgtggtaactgtattgaacttactttatttggattttattttaatgtgactagatgtcaccacttcaaaaaatcaatttgttcttagaacctggttgaaaataccaggaaactgttacagacgccattttttttttttttgagacggagtcttgctctgttgcccaggctggagtgcagtggcacaatctcagctcactgcaagctccgcctcctgggttcacgccattctcccacctcagcttcccaagcagctgggactacaggtacctgccaccacgcctggctaattttgtttttgtatttttagtagagacggggtttcaccgtgttagccaggaaggtctcaatctcctgacctcgtgaatcgcccccctcggtctcccaaagtgctgggattacaggcgtgagccaccatgcccggcccaaatattttttattcaggatggtataacctaactgataataggtaataaggttaaatttttttatgacgtattttatttacaaatatcatacactgctggtgttaccatatgaaaggaaataaagtcaattgataattgcctca

SEQ ID NO: 287971 - DNA, 925 bp, Homo sapiens
ctggaactgggagtgatgtcagctcccagctcggtgcctgcccggattcctgacatggtgtagtgcaggcagggtggggaaaggacggggaaggactcgtgtgctgcgagctggcggccgggccggagtgctggggctttgaactccgagaggaggtggaccagaacttttggaactagtgccggcggctctccaccccccagtataaaagaacgtgtggatcactttgctgagtacatccaagatttgaagaactgaaataaatcagctttaaacctgctttttaaaaatatctgggttggaatttgcccctgacaaataataaaatgatgagtgatgcaagtgacatgttggctgcagcgttggagcagatggatggtatcatagcaggttctaaggctctggaatattccaatgggatttttgattgccaatctcccacctctccattcatgggaagtttgcgagctctgcaccttgtggaagacctgcgtggattgttagagatgatggaaacagatgagaaagaaggcttgagatgccagatcccagattcaacagcagaaacgcttgttgaatggcttcagagtcaaatgacaaatggacacctaccagggaacggagatgtgtatcaagaaaggctggcacgtttagaaaatgataaagaatccctcgttcttcaggtaagtgtgttaacagaccaggtggaggctcagggagagaagattcgagatttggagttttgtcttgaagagcacagagagaagttgaatgccacagaagaaatgctgcagcaggtatgtgcagaggccagaaccaagatgggatttccctgctgaactatgtgagatgctgcatttctatgttgccgcttaataataatcaaccacgcgcgtttcttgattcagtaggttttacgctttca

SEQ ID NO: 287972 - DNA, 222 bp, Homo sapiens
tcaggtgaggtagaagatgtccatcttttcagatttttccaaaagagaatatgggtgttaaatgtgccctttttaaagaataaatgaaagaaatcattaacatctttaccttaaaatatttcagtctggagagtaaataacttcttatcactgtcacacatgtgaactgaactgacttctgatttgatgttattttcagacatcgaagtacaaaaaatgaaa

SEQ ID NO: 287973 - DNA, 212 bp, Homo sapiens
gccaaaggagttaaaaagaaccatccctgtgtcccgggatcgttgccctcagaactgaaattagataaagtaagggacttagaaactgttctgcccttttgagagaagagaaaaatggttctgtatctttggaaaaattagtaaaaaatttataccagggattgagccctccaccttttagaaaaataggctaattctgtttttggaaaaaa

SEQ ID NO: 287974 - DNA, 742 bp, Homo sapiens
tcatttctctttctcagaaacgaaggtgaatgacttaggggaatttagcaaaaaatgcctccgtggatttaatttagtgttgtgaagatatatagactctcaccctgctctctcctgtggtataaacttagcggaaagacctaaaatcatgattccctttgacttcatcatggagtttcccatctgttgtgatagtggataaattaacattgacgttgagcctgtgtgtaacatcagaagcactgtgtgccgcatgcctctcctccacggtgtgtatttggcgaggaggagtctgatctgcatttcattttgtcatctctgtgttctctccattgggctgcgtgtgattgtgtgcgttgttgggatatctgaagatcgtaaacgaagtgccagtgcacccaccctaggtattgtacccctgcatgccagccttcaccagcactgtgctccaaaccaatctaatccctgctcttggcatctgtgatctctagaaagcgatctgacagcaatcagaaaatgtagttctctattccggagtgttctttccaccttctgctaaaaaggactctgtagaggctttgcttccaagcctaaatgctgttttaaccaatactagtaacactcactgtgtgaatagctttgagaggacctagacgtgtgcagcatccctcagagtgcagggcaggaatgtcctggcattgtacattgcagctctttcagccttgaagtgcatattaccaca

SEQ ID NO: 287975 - DNA, 572 bp, Homo sapiens
catccctgttgccctttacagaggcctagagttctagagaacagcatggaaaccatgctagtggattttaaacacctcaagtgcaagaatggaatcttctttattaactgatacaggtatcgcatgtggtcttgtgctacagtaggtgattggccacagcttgctactccactactgaagttcttcttccatatttgactacacagcagagttatcatttgaaggtgaattagaaacccactagcaagcctatgtcatttaatggatgtaatgataaccttattttttttcagatctgggttggaatttgcccctgacaaataataaaatgatgagtgatgcaagtgacatgttggctgcagcgttggagcagatggatggtatcatagcaggtgatctgcatcctgtgaaagacagaatcacaacatttactctcctcacttggctttttcactacaactttcatattatcttttcactttattttcattttttagacctatgccttttgcttccctgtaatttcatctttgttcctcttctccattttctgccagcattattctcaaaca

SEQ ID NO: 287976 - DNA, 191 bp, Homo sapiens
tggggtaaataattaaattatacatataggagggagggggcaacgcaaaaaaaaatcacatgttatcaggccttgattatatgaattttatcaaatcctttggatgtttttgtttgcttttcttttaaagccaaagaaacttgcctttagcaattttgggaatttgagaaagaagaaacaggaagatggtg

SEQ ID NO: 287977 - DNA, 389 bp, Homo sapiens
aggagtaaaaggaaaatgacatagagtctgagctagagtaacagggacagtattaattaatattaaccaaatatcaaataagaacatttaagagacgaggccaggcgtggtggctcacgcctgtaatctcagcactttgggaggccgaggtgggtggatcacgaggtcaggagttcaagaccagcctggccaagatggtgaaaccctgtctctactaaaaatacaaaaattagccaggtgtggtggcgggtgcctgtaatcccagctacctgggacactgaggcagagaattgcttgaacccagtaggcggaggttgcagtaagccgagatcatgtcactgcactccagcctgggaaacagagtgagactctgtctcaaaaaaaaaaaa

SEQ ID NO: 287978 - DNA, 2518 bp, Homo sapiens
  misc_feature (2063)..(2063): n is a, c, g, or t
  misc_feature (2211)..(2211): n is a, c, g, or t
  misc_feature (2213)..(2213): n is a, c, g, or t
  misc_feature (2363)..(2363): n is a, c, g, or t
  misc_feature (2400)..(2400): n is a, c, g, or t
  misc_feature (2406)..(2406): n is a, c, g, or t
ctggaactgggagtgatgtcagctcccagctcggtgcctgcccggattcctgacatggtgtagtgcaggcagggtggggaaaggacggggaaggactcgtgtgctgcgagctggcggccgggccggagtgctggggctttgaactccgagaggaggtggaccagaacttttggaactagtgccggcggctctccaccccccagtataaaagaacgtgtggatcactttgctgagtacatccaagatttgaagaactgaaataaatcagctttaaacctgctttttaaaaatatctgggttggaatttgcccctgacaaataataaaatgatgagtgatgcaagtgacatgttggctgcagcgttggagcagatggatggtatcatagcaggttctaaggctctggaatattccaatgggatttttgattgccaatctcccacctctccattcatgggaagtttgcgagctctgcaccttgtggaagacctgcgtggattgttagagatgatggaaacagatgagaaagaaggcttgagatgccagatcccagattcaacagcagaaacgcttgttgaatggcttcagagtcaaatgacaaatggacacctaccagggaacggagatgtgtatcaagaaaggctggcacgtttagaaaatgataaagaatccctcgttcttcaggtaagtgtgttaacagaccaggtggaggctcagggagagaagattcgagatttggagttttgtcttgaagagcacagagagaagttgaatgccacagaagaaatgctgcagcaggagcttctaagtaggacatccttagaaactcagaagttggatctgatggctgaaatatctaacttgaagttgaaactgacagctgtagagaaggacagattggattatgaagataagttcagagacacagaggggctgattcaggagatcaatgatttgaggttaaaagttagtgaaatggacagtgagagacttcagtatgaaaaaaagcttaaatcaaccaaagatgaactggcatctttaaaagaacaactagaagaaaaggaatctgaagtaaaaaggctacaagaaaaattggtttgcaagatgaaaggagaaggggttgaaattgttgatagaggtaagaagatatatttcacatttatcatctcattttgttaaagtcctccaaaatctgtaaaggaaaccaatgaaaatcaatgtgtagttttagcatcaaagaaagagcagcagaatccagccaggaccagaaccacaggggattctccaagactctttactgtgactgggaatccattaatttcctcttcagcagctggaaaaggggaattctgtactttatttggtgtttaagattgctagactgtaaattctcatcacaaggatggacttgtctcaattgcgatgcaagggaatttgtgccaaaggagttaaaaagaaccatccctgtgtcccgggatcgttgccctcagaactgaaattagataaagtaagggacttagaaaaatggttctgtatctttggaaaaattagtaaaaaatttataccagggattgagccctccaccttttagaaaaataggctaattctgtttttggaaaaaatgcatgaatttgtccaaacttttttcataacagcagaggtttgttctgagtattatatggaccataatttctaacaaagcagattgtgcatgatagaaaatagcccgaatgaaatacatttttaaaattatatttggaaatataatgtgcataatatctgacaacactaggttaaatttaacctttctttgttattacgaatgatgactgtggccctatgagataccaaagcaatttctgagtcattcaaaacagtacaaattccagttagcgtagctttgttacatttttatccattttatgaacattagtaacattgtctgtccaatgagggacttgagttagattatctctaaagtccttcttggctctagaataccatggccttatacccctgcaggtatcacaattccctgtccgtcagaaaattcatcaagcctgnggaaaatggattctcaccaccaaccgcttcaccgccccaccccatcacctactgtttggcatatatataattgtgtattgataagggacattcagaaacaggtcatactgatcatgctttcagggttttaagaataaaatgggctggntncagtggctcacacctgtaattccagtactttggaaggctgaggaaggaggatcgcttgaggccaggagttcaagaccagcctgggcaacacaatgagaccctgtctctacaaaaaatttctttttaagatttgaaatttttaaatttcanatttcaccaggcatggtggctcactcctgtaatcccncctacntgggaggctgaggagggaggatcacttaaggcccaggagttcgaggctgtagtgagctatgactgtgtcactgcacttcagcctgggcaaggagcaagatcctgtctctgaa

SEQ ID NO: 287979 - DNA, 1516 bp, Homo sapiens
ctggaactgggagtgatgtcagctcccagctcggtgcctgcccggattcctgacatggtgtagtgcaggcagggtggggaaaggacggggaaggactcgtgtgctgcgagctggcggccgggccggagtgctggggctttgaactccgagaggaggtggaccagaacttttggaactagtgccggcggctctccaccccccagtataaaagaacgtgtggatcactttgctgagtacatccaagatttgaagaactgaaataaatcagctttaaacctgctttttaaaaatatctgggttggaatttgcccctgacaaataataaaatgatgagtgatgcaagtgacatgttggctgcagcgttggagcagatggatggtatcatagcaggttctaaggctctggaatattccaatgggatttttgattgccaatctcccacctctccattcatgggaagtttgcgagctctgcaccttgtggaagacctgcgtggattgttagagatgatggaaacagatgagaaagaaggcttgagatgccagatcccagattcaacagcagaaacgcttgttgaatggcttcagagtcaaatgacaaatggacacctaccagggaacggagatgtgtatcaagaaaggctggcacgtttagaaaatgataaagaatccctcgttcttcaggtaagtgtgttaacagaccaggtggaggctcagggagagaagattcgagatttggagttttgtcttgaagagcacagagagaagttgaatgccacagaagaaatgctgcagcaggagcttctaagtaggacatccttagaaactcagaagttggatctgatggctgaaatatctaacttgaagttgaaactgacagctgtagagaaggacagattggattatgaagataagttcagagacacagaggggctgattcaggagatcaatgatttgaggttaaaagttagtgaaatggacagtgagagacttcagtatgaaaaaaagcttaaatcaaccaaagtaagtttttctcacaggttaacattttcaaacaaatggcatcactattcatctatgcccaataatataaataagatgttttctacttaatgtatgataaagaaggtattttaaaagtaaatgaagatttccccccaagctggaaaccttgaatttaaacaccactgatctgaatttaaaaacaaggcttaactcatccgacagaacataacctgccctttctctgagttgtatctaacctcctttataaactgatactgttttctcggttatttagcttgtctttttctatctgtagttttctttcactcctctgtctctctaccagtctttaatggccaaactttctagcatgaaaatcaaggtgggtcagatgcagtatgaaaagcagcggatggaacaaaaatgggagtcactgaaggtgtagtagacgttgggtgatggggtccatggcctgttgctttctggcttgtgttgttttgctgtgatgatgt

SEQ ID NO: 287980 - DNA, 975 bp, Homo sapiens
acactcgcctgggtctccggttggcggctcggacggagttcatttgccgggctgaggtggcggcgttggcggagggacacacacacgcacacgcacagcgagcttcggggcaggagaaaggggtcccacaaactgcaaggaaaagaaaaaccctcaacaggaattacctttatacctgatgcccccaacataatctctctccaagggaaacgtgtttttattgccttgcggctgaaaatgtattctcgattctcccccttctctcttttgttgtgcattttttggatgtggtaaaactggcagtttatctgattatctggttttcagaactttgggcgatgtctctgagtgtcatcagttgctctctaggtttgacatagataattaagcaactacaaagcgtgataaagcttttgagagggaggaaaatgtattttggaaggagggagagacgcaaagaggcgagcctgtgtgttgagtcccagacttggtgtgtgactacaggcaaagtacttcacctttctagatgtcagccccgcccccctcacctcccaagtttaaataagaacttattttagactacatgatcctgttttcaatttttaagagttctgtgattttgagatgatctctctttagtccagaaaaatagagaaacgtaggtctatgtttgtttctcaaaaaaatatttgaggaggacagctgttacaaaacagctggagaactccaaatttttatggtggttagctaggtgcaaatgggtacaattttaggtttgttcaaataaacataggggaaaagtaaaagtacaggaaaattacgttatacatataagtgtgtccatcatttctgatttttctaaaaatttacttttttatttgacaagtactttttggctccttccgtgtatgcattaatatgtatataaggtgttatgggaaatactaataaaaggaaaatattgggcataaagag

SEQ ID NO: 287981 - DNA, 941 bp, Homo sapiens
ggcggcggcggcggcggctgaagagacagatcccggtcccgccgactcgcgagcggcgtctccggcagcggggggagtgggcgggcgggtcccacaaactgcaaggaaaagaaaaaccctcaacaggaattacctttatacctgatgcccccaacataatctctctccaagggaaacgtgtttttattgccttgcggctgaaaatgtattctcgattctcccccttctctcttttgttgtgcattttttggatgtggtaaaactggcagtttatctgattatctggttttcagaactttgggcgatgtctctgagtgtcatcagttgctctctaggtttgacatagataattaagcaactacaaagcgtgataaagcttttgagagggaggaaaatgtattttggaaggagggagagacgcaaagaggcgagcctgtgtgttgagtcccagacttggtgtgtgactacaggcaaagtacttcacctttctagatgtcagccccgcccccctcacctcccaagtttaaataagaacttattttagactacatgatcctgttttcaatttttaagagttctgtgattttgagatgatctctctttagtccagaaaaatagagaaacgtaggtctatgtttgtttctcaaaaaaatatttgaggaggacagctgttacaaaacagctggagaactccaaatttttatggtggttagctaggtgcaaatgggtacaattttaggtttgttcaaataaacataggggaaaagtaaaagtacaggaaaattacgttatacatataagtgtgtccatcatttctgatttttctaaaaatttacttttttatttgacaagtactttttggctccttccgtgtatgcattaatatgtatataaggtgttatgggaaatactaataaaaggaaaatattgggcataaagag

SEQ ID NO: 287982 - DNA, 625 bp, Homo sapiens
cttcggttcgccgtttcagcttcccccctaccccaaccttcacccgattttttttgagctgaaaaaaaagtggaacgagggagccaatctttggtaactcgggttttctgtggtaggtgggttcaaaatctgagctgtagggagcgctagagatttcgtgccctttagccaagctgagggtatttgcaaaccctgaagatttccgtctccgagctttgggcttggtaagcgaagtttggagtcggtgcctaatcgtatatcatctaaaccttgaaaaggctttgacctttggccaatttgatttgttctttgaagaagtgtatacaatgtgtgggaaaataatatgtgagaggagagaagtaaatgtgttgatgttgtgattgtttatgtgatttaatttttaattttttttttttaggtcccacaaactgcaaggaaaagaaaaaccctcaacaggaattacctttatacctgatgcccccaacataatctctctccaagggaaacgtgtttttattgccttgcggctgtctggcagttatctgaatatctgttttcagactttggcgatgttctgagtgtatcagtgctcttaggttgacatgataataagcactacgcgtgt

SEQ ID NO: 287983 - DNA, 708 bp, Homo sapiens
cttcggttcgccgtttcagcttcccccctaccccaaccttcacccgattttttttgagctgaaaaaaaagtggaacgagggagccaatctttggtaactcgggttttctgtggtaggtgggttcaaaatctgagctgtagggagcgctagagatttcgtgccctttagccaagctgagggtatttgcaaaccctgaagatttccgtctccgagctttgggcttggtaagcgaagtttggagtcggtgcctaatcgtatatcatctaaaccttgaaaaggctttgacctttggccaatttgatttgttctttgaagaagtgtatacaatgtgtgggtgatttaatttttaattttttttttttaggtcccacaaactgcaaggaaaagaaaaaccctcaacaggaattacctttatacctgatgcccccaacataatctctctccaagggaaacgtgtttttattgccttgcggctgaaaatgtattctcgattctcccccttctctcttttgttgtgcattttttggatgtggtaaaactggcagtttatctgattatctggttttcagaactttgggcgatgtctctgagtgtcatcagttgctctctaggtttgacatagataattaagcaactacaaagcgtgataaagctttagtagggttaattgggggggatcgtctagagtcgaaaggggcatccaaatgc

SEQ ID NO: 287984 - DNA, 762 bp, Homo sapiens
cttcggttcgccgtttcagcttcccccctaccccaaccttcacccgattttttttgagctgaaaaaaaagtggaacgagggagccaatctttggtaactcgggttttctgtggtaggtgggttcaaaatctgagctgtagggagcgctagagatttcgtgccctttagccaagctgagggtatttgcaaaccctgaagatttccgtctccgagctttgggcttggtaagcgaagtttggagtcggtgcctaatcgtatatcatctaaaccttgaaaaggctttgacctttggccaatttgatttgttctttgaagaagtgtatacaatgtgtgggaaaataatatgtgagaggagagaagtaaatgtgttgatgttgtgattgtttatgtgatttaatttttaattttttttttttaggtcccacaaactgcaaggaaaagaaaaaccctcaacaggaattacctttatacctgatgcccccaacataatctctctccaagggaaacgtgtttttattgccttgcggctgaaaatgtattctcgattctcccccttctctcttttgttgtgcattttttggatgtggtaaaactggcagtttatctgattatctggttttcagaactttgggcgatgtctctgagtgtcatcagttgctctctaggtttgacatagataattaagcaactacaaagcgtgataaagctttagtagggttaattgggggggatcgtctagagtcgaaaggggcatccaaatgc

SEQ ID NO: 287985 - DNA, 400 bp, Homo sapiens
tccggacgacgctgcacctttgtttggggggggttaaactattaaccaccgctcaggtcccacaaactgcaaggaaaagaaaaaccctcaacaggaattacctttatacctgatgcccccaacataatctctctccaagggaaacgtgtttttattgccttgcggctgaaaatgtattctcgattctcccccttctctcttttgttgtgcattttttggatgtggtaaaactggcagtttatctgattatctggttttcagaactttgggcgatgtctctgagtgtcatcagttgctctctaggtttgacatagataattaagcaactacaaagcgtgataaagctttagtagggttaattgggggggatcgtctagagtcgaaaggggcatccaaatgc

SEQ ID NO: 287986 - DNA, 437 bp, Homo sapiens
cttcggttcgccgtttcagcttcccccctaccccaaccttcacccgattttttttgagctgaaaaaaaagtggaacgagggagccaatctttggtcccacaaactgcaaggaaaagaaaaaccctcaacaggaattacctttatacctgatgcccccaacataatctctctccaagggaaacgtgtttttattgccttgcggctgaaaatgtattctcgattctcccccttctctcttttgttgtgcattttttggatgtggtaaaactggcagtttatctgattatctggttttcagaactttgggcgatgtctctgagtgtcatcagttgctctctaggtttgacatagataattaagcaactacaaagcgtgataaagctttagtagggttaattgggggggatcgtctagagtcgaaaggggcatccaaatgc

SEQ ID NO: 287987 - DNA, 704 bp, Homo sapiens
  misc_feature (668)..(668): n is a, c, g, or t
  misc_feature (688)..(688): n is a, c, g, or t
  misc_feature (700)..(700): n is a, c, g, or t
cttcggttcgccgtttcagcttcccccctaccccaaccttcacccgattttttttgagctgaaaaaaaagtggaacgagggagccaatctttggtaactcgggttttctgtggtaggtgggttcaaaatctgagctgtagggagcgctagagatttcgtgccctttagccaagctgagggtatttgcaaaccctgaagatttccgtctccgagctttgggcttggtaagcgaagtttggagtcggtgcctaatcgtatatcatctaaaccttgaaaaggctttgacctttggccaatttgatttgttctttgaagaagtgtatacaatgtgtgggtgatttaatttttaattttttttttttaggtcccacaaactgcaaggaaaagaaaaaccctcaacaggaattacctttatacctgatgcccccaacataatctctctccaagggaaacgtgtttttattgccttgcggctgaaaatgtattctcgattctcccccttctctcttttgttgtgcattttttggatgtggtaaaactggcagtttatctgattatctggttttcagaactttgggcgatgtctctgagtgtcatcagttgctctctaggtttgacatagataattaagcaactacaaagcgtgataaagctttagtagggtaatnggggggatctcagagcgacngcaggcagcaanatgc

SEQ ID NO: 287988 - DNA, 1217 bp, Homo sapiens
cttcggttcgccgtttcagcttcccccctaccccaaccttcacccgattttttttgagctgaaaaaaaagtggaacgagggagccaatctttggtaactcgggttttctgtggtaggtgggttcaaaatctgagctgtagggagcgctagagatttcgtgccctttagccaagctgagggtatttgcaaaccctgaagatttccgtctccgagctttgggcttggtaagcgaagtttggagtcggtgcctaatcgtatatcatctaaaccttgaaaaggctttgacctttggccaatttgatttgttctttgaagaagtgtatacaatgtgtgggaaaataatatgtgagaggagagaagtaaatgtgttgatgttgtgattgtttatgtgatttaatttttaattttttttttttaggtcccacaaactgcaaggaaaagaaaaaccctcaacaggaattacctttatacctgatgcccccaacataatctctctccaagggaaacgtgtttttattgccttgcggctgaaaatgtattctcgattctcccccttctctcttttgttgtgcattttttggatgtgctgagtgtcatcagttgctctctaggtttgacatagataattaagcaactacaaagcgtgataaagcttttgagagggaggaaaatgtattttggaaggagggagagacgcaaagaggcgagcctgtgtgttgagtcccagacttggtgtgtgactacaggcaaagtacttcacctttctagatgtcagccccgcccccctcacctcccaagtttaaataagaacttattttagactacatgatcctgttttcaatttttaagagttctgtgattttgagatgatctctctttagtccagaaaaatagagaaacgtaggtctatgtttgtttctcaaaaaaatatttgaggaggacagctgttacaaaacagctggagaactccaaatttttatggtggttagctaggtgcaaatgggtacaattttaggtttgttcaaataaacataggggaaaagtaaaagtacaggaaaattacgttatacatataagtgtgtccatcatttctgatttttctaaaaatttacttttttatttgacaagtactttttggctccttccgtgtatgcattaatatgtatataaggtgttatgggaaatactaataaaaggaaaatattgggcataaagag

SEQ ID NO: 287989 - DNA, 1868 bp, Homo sapiens
attataaagattctgaacaacccaagagcatatacgttgcccatatccaaggaagaatcaagattatcaagactagcaacaaagactccaagcaaaggctaccaagaaacctcatgaagtgaaacaggactttgagaagttcctacataaactgcgttccgaagctgaaattgagagagaatgtgtggcatcactatcgtcatcatcatcatcatcaccatcatcaacagacaactacaactttgaggaagaagaatactaagagaaaccagaaatgaactctattcaagaataatgcatacaattcagtggtatcagtttaattgtaacaatatatttaattcaagtccaatccatgtaatcagtattaagagtgtgttttaccattcatctttaaaatcttcaaatcaataaatctcagtaagttattcttaaaagatctgtccaagcatgatcttggctcttaatagtaaaaccatattttaagatggaaaaagaatcattatgaagcatagagagctttcaaccatttctttgaaaatatatcttgatataatagcaaccgttcatcataatacaaaacagaaggaagattaatttactgtggcacagaaagtcctgccaattcctaagtgccccaagtagtttctctcagactttttacattttttcaggcctcaagcaaaaccaaagccccacctccaggtttggtagcaaacaaactttgcttctccggtgctaagcttccatcactcctctggtaataagctttgtgcacatttgctagaaagctgggcagcttgtccgcaggtaccattgatactgtgcagcctccccatcctgctccagtaagtcgtgacccttgagccccaaacttcctaaaacagtgaggaaaaaaatattagaacctataaatgaaaatacaagggatttgcttggtgtttgtagaacacatagcctatctaagttctaagaagaaaatacatgcggggtttttaggtgtcatcaaacattttaggacattaagacatttatactgtttcagagagtgatttggaattttttcattgtatctaaatctagtccctggttttgactccaagtggtaagtcaacagtactcctcccatttcatgactggcaataacccactgtaatattgattccataaagtagccacttgaagagttgtatagcaagcttacacgtaaatcaggaaggaggcgttaagataaaacaggcaatggtaaaagaaatgtaggcaaccctgaatcagaaggtcactccaaatgaggacaaatcaaaatttaaaatgtacagtcttatacaagttttccccaatggctatttcagctgcattcttaaggccgggctgtttcaaagaagaatcagtcccctagaacagatagcctagttcactgaataaacttatcaacaaaaagcttgttattaaactccaggttgggtcggtggttggttgaatctctaatggaaaattaaccaagcctttccacaaagcagagggcagtccctagaggtccacaccaccttccctgtgccttctggagctagtctgattattggactcagaagttgacatcagatgagatatatctgattgggatgataacaactatataaaggaccacacagctagagttaattttagttactgtaaaccaggcacagtttcaaacctaagatttcaaccaaagtgaaaggccctatcacaatgtacacagatcacttagctttaaaagatgcaatttatcctgacacgaaagttaacatgtacttacaattaattcttcttaataaaattcactccaaattactagtggattaaaggctctatgattaatttagcac

SEQ ID NO: 287990 - DNA, 1113 bp, Homo sapiens
atccaggttgttaaaaccgggcgaggactgcagcctcgagtccacctcccgactgaacaggtggttaactcgcccggggagaggaactgccagctcccgctttctgtttcacccgagggaccacgaacgccgccgccgccatgcttactacggagccgggaggaggagcccgaagtcggcgcgccgagtgcggctgcgcgggccccgccgacggagcccgcggccgggaccccgaacccccgcctcgagcccgccgcgccggggctctctcaccggaacgcgagtccccgcggggccaccggcgcgtggcggctgagcggccgcgtttggctcccggagcgcccacaccctctcgggcttccggctttctcccgaggcccggctgcgcctggcttgtggtagcatccgctgtggccaggctcggagctacactcaggaaaagtggagttaatggaggttcctagagacactcacacaattctcaatccacatttcaaaaggctcccctgagacgcaccctgtcggcccctttccgaaagcacgcgaacttaaggctggcaggtgctttaaaagacactcctcccaaggactaggaagcctctgaaatgggcttggaagtttctaatcccaaagacttcgaacccaggatctggatagcaagcaaaaatatttagatatttactcagttgaaaacgtggggggtggcttcgtggtctcttcgccagccaaatcgcgtggaaaaccacgacctcaatttttacaacagcacgaagacttacaagtgagcgtagcagcgacttcctggaacctcaaacaatgtgggacgctgcaataatgcctgagggcttttgacttacagttgccgccggagacctggggagggggtagtacttgggccggtgagtccaacctcaggaactgtcctttcaaaaatggtgatggatgtaacaagttgcatgtctgggctttatttcagtgtattaattgtgcgatcttttaaaatagctgtatttttaaaactgttttacagaaatctctttaaaatgtgattattctctatattcttaaagaatacaatggctaattaaatcctttgttgataactgactctca

SEQ ID NO: 287991 - DNA, 1274 bp, Homo sapiens
tccggaccctttcttcccatcctttgctcctaggattttacatgttgcctgcaaagggagtcaaacttagggggcaggcaaacaaacgagttctttccagcctctgtaaccggatcgctagagcgaaataaactcgcacaagtgtccagagatcgtagccagacagccagcctgcgcttgaagcaacttttaagtgaggctgcaagagccgccgggatgtagattttagttcgtggccaagcacaactacgacaccctgtccctgcccccaccccatccccaagaatgcatggaggaaggagagaggacgaggtgagggccgcctgcatttctgcacgtcggcgccggttagaaaccctgcagttttgagagagaagaagaggagatggaggggccaggagccacgactcccgggagagcgcagggaggggcgtgggtgccccttcgcccacctccgcccccgtcacctcgacagctgtcccgctcttggaattcattggcttcctctacccggcctcccaaacaccaccccaatctagtttagccccccgccccaccctcgctgacctaataaggccatgcagtgtgcgggggagctacataaaagcgcgggctcgcggcgactctgcaccacgcaggggaagagaaagcaggagccgtccagcacggaggaaggcgaccatggccaaggagtggggctacgccagtcacaacggtcctgaccactggcatgaacttttcccaaatgccaagggggaaaaccagtcgcccgttgagctgcatactaaagacatcaggcatgacccttctctgcagccatggtctgtgtcttatgatggtggctctgccaagaccatcctgaataatgggaagacctgccgagttgtatttgatgatacttatgataggtcaatgctgagagggggtcctctccctggaccctaccgacttcgccagtttcatcttcactggggctcttcggatgatcatggctctgagcacaccgtggatggagtcaagtatgcagcggaggtaagaggaactgccataatccattctcggtctcatacagtgaaaactgcaaaattaaaaataagaaccacagcaacaaagcatcatccactgcttttgtttcaagtctatagttatgaaaagagctgtactagttttagctgaactgaagctgctgaacattctaggctagacaggtaaaagggtataggtgagttggcatcaaacatgaagatttccaaggttatgttaagaaactgggg

SEQ ID NO: 287992 - DNA, 2563 bp, Homo sapiens
tccggaccctttcttcccatcctttgctcctaggattttacatgttgcctgcaaagggagtcaaacttagggggcaggcaaacaaacgagttctttccagcctctgtaaccggatcgctagagcgaaataaactcgcacaagtgtccagagatcgtagccagacagccagcctgcgcttgaagcaacttttaagtgaggctgcaagagccgccgggatgtagattttagttcgtggccaagcacaactacgacaccctgtccctgcccccaccccatccccaagaatgcatggaggaaggagagaggacgaggtgagggccgcctgcatttctgcacgtcggcgccggttagaaaccctgcagttttgagagagaagaagaggagatggaggggccaggagccacgactcccgggagagcgcagggaggggcgtgggtgccccttcgcccacctccgcccccgtcacctcgacagctgtcccgctcttggaattcattggcttcctctacccggcctcccaaacaccaccccaatctagtttagccccccgccccaccctcgctgacctaataaggccatgcagtgtgcgggggagctacataaaagcgcgggctcgcggcgactctgcaccacgcaggggaagagaaagcaggagccgtccagcacggaggaaggcgaccatggccaaggagtggggctacgccagtcacaacggtcctgaccactggcatgaacttttcccaaatgccaagggggaaaaccagtcgcccgttgagctgcatactaaagacatcaggcatgacccttctctgcagccatggtctgtgtcttatgatggtggctctgccaagaccatcctgaataatgggaagacctgccgagttgtatttgatgatacttatgataggtcaatgctgagagggggtcctctccctggaccctaccgacttcgccagtttcatcttcactggggctcttcggatgatcatggctctgagcacaccgtggatggagtcaagtatgcagcggagcttcatttggttcactggaacccgaagtataacacttttaaagaagccctgaagcagcgcgatgggatcgctgtgattggcatttttctgaagataggacatgagaatggcgagttccagattttccttgatgcattggacaagattaagacaaagggcaaggaggcgcccttcacaaagtttgacccatcctgcctgttcccggcatgccgggactactggacctaccagggctcattcaccacgccgccctgcgaggaatgcattgtgtggctgctgctgaaggagcccatgaccgtgagctctgaccagatggccaagctgcggagcctcctctccagtgctgagaacgagcccccagtgcctcttgtgagcaactggcgacctccacagcctatcaataacagggtggtgagagcttccttcaaatgaggctgctggatcttgccctcttcaggaaaggaaacctaccattggagagcttggttccttgcctccttctggtgctcttactccaagtctatttcatttttccacactgagcaatgaatgtgagagatgtggtcaccaagatctaagttacttgttgaaagaaagttactttcgacaagatctaatatgaaagcatagatttcacatttgatctctgtaataatcatctttcctataaaagtagcatttttggtaaagtttcaaagaagaagaaacagagatggaagagtaaagatatttttaaaatggctagctattgggcaccagtttttctgttatctaaaatttcacacaacttcattgtttttatttttatattatgagttgtccatcttaaagaaatatgagtaattctacatgtagtagaggtgtatgaagatcatataacaattaaacataagccagaaattaaaatgactatagacagcaagaattgagctaataatatgttttaactcttaacaccagcaagaagtcagtcatttattgaagttttagctactaagattacttggttttgattaccagtgaaaagaaaacacaatacaatcaggagttttcaaatttttgattcagtatttgaatttcttcttcataaatgtagttgaatttatcctagtatttttctttacctgaagtagggccatttatttttaatttcactacatttttctttgcatgattattaaaataaaaactgcctctgttgtgtttctcactggaggctggaatgaatgatcactagaacacaaaagagtgaatgatgacacttgaagtcaaagcagttgtactgatcaccagaaccaataaagacataaatggaaaacacacaaatcaaaaaaacaccaaaacaacaaaaatttgtgtgtgggcgcgccgcttcggcgccctgaagaaaaaaggtctttctaaggaccccttctgcggttggggccgagcgggcgcccataggacggcatcagcgcgaaccctgcgccaaaacagccgggccccaaaggagaacatcccggggcaggagcaaagcggcggggagtcccac

SEQ ID NO: 287993 - DNA, 2355 bp, Homo sapiens
tccggaccctttcttcccatcctttgctcctaggattttacatgttgcctgcaaagggagtcaaacttagggggcaggcaaacaaacgagttctttccagcctctgtaaccggatcgctagagcgaaataaactcgcacaagtgtccagagatcgtagccagacagccagcctgcgcttgaagcaacttttaagtgaggctgcaagagccgccgggatgtagattttagttcgtggccaagcacaactacgacaccctgtccctgcccccaccccatccccaagaatgcatggaggaaggagagaggacgaggtgagggccgcctgcatttctgcacgtcggcgccggttagaaaccctgcagttttgagagagaagaagaggagatggaggggccaggagccacgactcccgggagagcgcagggaggggcgtgggtgccccttcgcccacctccgcccccgtcacctcgacagctgtcccgctcttggaattcattggcttcctctacccggcctcccaaacaccaccccaatctagtttagccccccgccccaccctcgctgacctaataaggccatgcagtgtgcgggggagctacataaaagcgcgggctcgcggcgactctgcaccacgcaggggaagagaaagcaggagccgtccagcacggaggaaggcgaccatggccaaggagtggggctacgccagtcacaacggtcctgaccactggcatgaacttttcccaaatgccaagggggaaaaccagtcgcccgttgagctgcatactaaagacatcaggcatgacccttctctgcagccatggtctgtgtcttatgatggtggctctgccaagaccatcctgaataatgggaagacctgccgagttgtatttgatgatacttatgataggtcaatgctgagagggggtcctctccctggaccctaccgacttcgccagtttcatcttcactggggctcttcggatgatcatggctctgagcacaccgtggatggagtcaagtatgcagcggagcttcatttggttcactggaacccgaagtataacacttttaaagaagccctgaagcagcgcgatgggatcgctgtgattggcatttttctgaagataggacatgagaatggcgagttccagattttccttgatgcattggacaagattaagacaaagggcaaggaggcgcccttcacaaagtttgacccatcctgcctgttcccggcatgccgggactactggacctaccagggctcattcaccacgccgccctgcgaggaatgcattgtgtggctgctgctgaaggagcccatgaccgtgagctctgaccagatggccaagctgcggagcctcctctccagtgctgagaacgagcccccagtgcctcttgtgagcaactggcgacctccacagcctatcaataacagggtggtgagagcttccttcaaatgaggctgctggatcttgccctcttcaggaaaggaaacctaccattggagagcttggttccttgcctccttctggtgctcttactccaagtctatttcatttttccacactgagcaatgaatgtgagagatgtggtcaccaagatctaagttacttgttgaaagaaagttactttcgacaagatctaatatgaaagcatagatttcacatttgatctctgtaataatcatctttcctataaaagtagcatttttggtaaagtttcaaagaagaagaaacagagatggaagagtaaagatatttttaaaatggctagctattgggcaccagtttttctgttatctaaaatttcacacaacttcattgtttttatttttatattatgagttgtccatcttaaagaaatatgagtaattctacatgtagtagaggtgtatgaagatcatataacaattaaacataagccagaaattaaaatgactatagacagcaagaattgagctaataatatgttttaactcttaacaccagcaagaagtcagtcatttattgaagttttagctactaagattacttggttttgattaccagtgaaaagaaaacacaatacaatcaggagttttcaaatttttgattcagtatttgaatttcttcttcataaatgtagttgaatttatcctagtatttttctttacctgaagtagggccatttatttttaatttcactacatttttctttgcatgattattaaaataaaaactgcctctgttgtgtttctcactggaggctggaatgaatgatcactagaacacaaaagagtgaatgatgacacttgaagtcaaagcagttgtactgatcaccagaaccagctaccctggtcccgagctcgatca

SEQ ID NO: 287994 - DNA, 1272 bp, Homo sapiens
gatgtctagtgcgtcagcagggtcatgactgcatgctgggtaacaccgaccagatggccaagctgcggagcctcctctccagtgctgagaacgagcccccagtgcctcttgtgagcaactggcgacctccacagcctatcaataacagggtggtgagagcttccttcaaatgaggctgctggatcttgccctcttcaggaaaggaaacctaccattggagagcttggttccttgcctccttctggtgctcttactccaagtctatttcatttttccacactgagcaatgaatgtgagagatgtggtcaccaagatctaagttacttgttgaaagaaagttactttcgacaagatctaatatgaaagcatagatttcacatttgatctctgtaataatcatctttcctataaaagtagcatttttggtaaagtttcaaagaagaagaaacagagatggaagagtaaagatatttttaaaatggctagctattgggcaccagtttttctgttatctaaaatttcacacaacttcattgtttttatttttatattatgagttgtccatcttaaagaaatatgagtaattctacatgtagtagaggtgtatgaagatcatataacaattaaacataagccagaaattaaaatgactatagacagcaagaattgagctaataatatgttttaactcttaacaccagcaagaagtcagtcatttattgaagttttagctactaagattacttggttttgattaccagtgaaaagaaaacacaatacaatcaggagttttcaaatttttgattcagtatttgaatttcttcttcataaatgtagttgaatttatcctagtatttttctttacctgaagtagggccatttatttttaatttcactacatttttctttgcatgattattaaaataaaaactgcctctgttgtgtttctcactggaggctggaatgaatgatcactagaacacaaaagagtgaatgatgacacttgaagtcaaagcagttgtactgatcaccagaaccaataaagacataaatggaaaacacacaaatcaaaaaaacaccaaaacaacaaaaatttgtgtgtgggcgcgccgcttcggcgccctgaagaaaaaaggtctttctaaggaccccttctgcggttggggccgagcgggcgcccataggacggcatcagcgcgaaccctgcgccaaaacagccgggccccaaaggagaacatcccggggcaggagcaaagcggcggggagtcccac

SEQ ID NO: 287995 - DNA, 1205 bp, Homo sapiens
gaccacgcaggggaagagaaagcaggagcccccagtgcctcttgtgagcaactggcgacctccacagcctatcaataacagggtggtgagagcttccttcaaatgaggctgctggatcttgccctcttcaggaaaggaaacctaccattggagagcttggttccttgcctccttctggtgctcttactccaagtctatttcatttttccacactgagcaatgaatgtgagagatgtggtcaccaagatctaagttacttgttgaaagaaagttactttcgacaagatctaatatgaaagcatagatttcacatttgatctctgtaataatcatctttcctataaaagtagcatttttggtaaagtttcaaagaagaagaaacagagatggaagagtaaagatatttttaaaatggctagctattgggcaccagtttttctgttatctaaaatttcacacaacttcattgtttttatttttatattatgagttgtccatcttaaagaaatatgagtaattctacatgtagtagaggtgtatgaagatcatataacaattaaacataagccagaaattaaaatgactatagacagcaagaattgagctaataatatgttttaactcttaacaccagcaagaagtcagtcatttattgaagttttagctactaagattacttggttttgattaccagtgaaaagaaaacacaatacaatcaggagttttcaaatttttgattcagtatttgaatttcttcttcataaatgtagttgaatttatcctagtatttttctttacctgaagtagggccatttatttttaatttcactacatttttctttgcatgattattaaaataaaaactgcctctgttgtgtttctcactggaggctggaatgaatgatcactagaacacaaaagagtgaatgatgacacttgaagtcaaagcagttgtactgatcaccagaaccaataaagacataaatggaaaacacacaaatcaaaaaaacaccaaaacaacaaaaatttgtgtgtgggcgcgccgcttcggcgccctgaagaaaaaaggtctttctaaggaccccttctgcggttggggccgagcgggcgcccataggacggcatcagcgcgaaccctgcgccaaaacagccgggccccaaaggagaacatcccggggcaggagcaaagcggcggggagtcccac

SEQ ID NO: 287996 - DNA, 2090 bp, Homo sapiens
tccggaccctttcttcccatcctttgctcctaggattttacatgttgcctgcaaagggagtcaaacttagggggcaggcaaacaaacgagttctttccagcctctgtaaccggatcgctagagcgaaataaactcgcacaagtgtccagagatcgtagccagacagccagcctgcgcttgaagcaacttttaagtgaggctgcaagagccgccgggatgtagattttagttcgtggccaagcacaactacgacaccctgtccctgcccccaccccatccccaagaatgcatggaggaaggagagaggacgaggtgagggccgcctgcatttctgcacgtcggcgccggttagaaaccctgcagttttgagagagaagaagaggagatggaggggccaggagccacgactcccgggagagcgcagggaggggcgtgggtgccccttcgcccacctccgcccccgtcacctcgacagctgtcccgctcttggaattcattggcttcctctacccggcctcccaaacaccaccccaatctagtttagccccccgccccaccctcgctgacctaataaggccatgcagtgtgcgggggagctacataaaagcgcgggctcgcggcgactctgcaccacgcaggggaagagaaagcaggagccgtccagcacggaggaaggcgaccatggccaaggagtggggctacgccagtcacaacggtcctgaccactggcatgaacttttcccaaatgccaagggggaaaaccagtcgcccgttgagctgcatactaaagacatcaggcatgacccttctctgcagccatggtctgtgtcttatgatggtggctctgccaagaccatcctgaataatgggaagacctgccgagttgtatttgatgatacttatgataggtcaatgctgagagggggtcctctccctggaccctaccgaacagcctatcaataacagggtggtgagagcttccttcaaatgaggctgctggatcttgccctcttcaggaaaggaaacctaccattggagagcttggttccttgcctccttctggtgctcttactccaagtctatttcatttttccacactgagcaatgaatgtgagagatgtggtcaccaagatctaagttacttgttgaaagaaagttactttcgacaagatctaatatgaaagcatagatttcacatttgatctctgtaataatcatctttcctataaaagtagcatttttggtaaagtttcaaagaagaagaaacagagatggaagagtaaagatatttttaaaatggctagctattgggcaccagtttttctgttatctaaaatttcacacaacttcattgtttttatttttatattatgagttgtccatcttaaagaaatatgagtaattctacatgtagtagaggtgtatgaagatcatataacaattaaacataagccagaaattaaaatgactatagacagcaagaattgagctaataatatgttttaactcttaacaccagcaagaagtcagtcatttattgaagttttagctactaagattacttggttttgattaccagtgaaaagaaaacacaatacaatcaggagttttcaaatttttgattcagtatttgaatttcttcttcataaatgtagttgaatttatcctagtatttttctttacctgaagtagggccatttatttttaatttcactacatttttctttgcatgattattaaaataaaaactgcctctgttgtgtttctcactggaggctggaatgaatgatcactagaacacaaaagagtgaatgatgacacttgaagtcaaagcagttgtactgatcaccagaaccaataaagacataaatggaaaacacacaaatcaaaaaaacaccaaaacaacaaaaatttgtgtgtgggcgcgccgcttcggcgccctgaagaaaaaaggtctttctaaggaccccttctgcggttggggccgagcgggcgcccataggacggcatcagcgcgaaccctgcgccaaaacagccgggccccaaaggagaacatcccggggcaggagcaaagcggcggggagtcccac

SEQ ID NO: 287997 - DNA, 1806 bp, Homo sapiens
tccggaccctttcttcccatcctttgctcctaggattttacatgttgcctgcaaagggagtcaaacttagggggcaggcaaacaaacgagttctttccagcctctgtaaccggatcgctagagcgaaataaactcgcacaagtgtccagagatcgtagccagacagccagcctgcgcttgaagcaacttttaagtgaggctgcaagagccgccgggatgtagattttagttcgtggccaagcacaactacgacaccctgtccctgcccccaccccatccccaagaatgcatggaggaaggagagaggacgaggtgagggccgcctgcatttctgcacgtcggcgccggttagaaaccctgcagttttgagagagaagaagaggagatggaggggccaggagccacgactcccgggagagcgcagggaggggcgtgggtgccccttcgcccacctccgcccccgtcacctcgacagctgtcccgctcttggaattcattggcttcctctacccggcctcccaaacaccaccccaatctagtttagccccccgccccaccctcgctgacctaataaggccatgcagtgtgcgggggagctacataaaagcgcgggctcgcggcgactctgcaccacgcaggggaagagaaagcaggagccgtccagacagcctatcaataacagggtggtgagagcttccttcaaatgaggctgctggatcttgccctcttcaggaaaggaaacctaccattggagagcttggttccttgcctccttctggtgctcttactccaagtctatttcatttttccacactgagcaatgaatgtgagagatgtggtcaccaagatctaagttacttgttgaaagaaagttactttcgacaagatctaatatgaaagcatagatttcacatttgatctctgtaataatcatctttcctataaaagtagcatttttggtaaagtttcaaagaagaagaaacagagatggaagagtaaagatatttttaaaatggctagctattgggcaccagtttttctgttatctaaaatttcacacaacttcattgtttttatttttatattatgagttgtccatcttaaagaaatatgagtaattctacatgtagtagaggtgtatgaagatcatataacaattaaacataagccagaaattaaaatgactatagacagcaagaattgagctaataatatgttttaactcttaacaccagcaagaagtcagtcatttattgaagttttagctactaagattacttggttttgattaccagtgaaaagaaaacacaatacaatcaggagttttcaaatttttgattcagtatttgaatttcttcttcataaatgtagttgaatttatcctagtatttttctttacctgaagtagggccatttatttttaatttcactacatttttctttgcatgattattaaaataaaaactgcctctgttgtgtttctcactggaggctggaatgaatgatcactagaacacaaaagagtgaatgatgacacttgaagtcaaagcagttgtactgatcaccagaaccaataaagacataaatggaaaacacacaaatcaaaaaaacaccaaaacaacaaaaatttgtgtgtgggcgcgccgcttcggcgccctgaagaaaaaaggtctttctaaggaccccttctgcggttggggccgagcgggcgcccataggacggcatcagcgcgaaccctgcgccaaaacagccgggccccaaaggagaacatcccggggcaggagcaaagcggcggggagtcccac

SEQ ID NO: 287998 - DNA, 1005 bp, Homo sapiens
aagcagtgtatcaacgcagactgcccattacggccggggcaccaagatctaagttacttgttgaaagaaagttactttcgacaagatctaatatgaaagcatagatttcacatttgatctctgtaataatcatctttcctataaaagtagcatttttggtaaagtttcaaagaagaagaaacagagatggaagagtaaagatatttttaaaatggctagctattgggcaccagtttttctgttatctaaaatttcacacaacttcattgtttttatttttatattatgagttgtccatcttaaagaaatatgagtaattctacatgtagtagaggtgtatgaagatcatataacaattaaacataagccagaaattaaaatgactatagacagcaagaattgagctaataatatgttttaactcttaacaccagcaagaagtcagtcatttattgaagttttagctactaagattacttggttttgattaccagtgaaaagaaaacacaatacaatcaggagttttcaaatttttgattcagtatttgaatttcttcttcataaatgtagttgaatttatcctagtatttttctttacctgaagtagggccatttatttttaatttcactacatttttctttgcatgattattaaaataaaaactgcctctgttgtgtttctcactggaggctggaatgaatgatcactagaacacaaaagagtgaatgatgacacttgaagtcaaagcagttgtactgatcaccagaaccaataaagacataaatggaaaacacacaaatcaaaaaaacaccaaaacaacaaaaatttgtgtgtgggcgcgccgcttcggcgccctgaagaaaaaaggtctttctaaggaccccttctgcggttggggccgagcgggcgcccataggacggcatcagcgcgaaccctgcgccaaaacagccgggccccaaaggagaacatcccggggcaggagcaaagcggcggggagtcccac

SEQ ID NO: 287999 - DNA, 733 bp, Homo sapiens
  misc_feature (41)..(41): n is a, c, g, or t
actttgggatcaagctagagaccaaacatgcttccaattcnagggactctctgtcctaagatttatctttgtttctcaaaaattaagatctccagaagggtgctgaacgaggatgggtactcctccaccatcaaggacaagatcctgaccattgatgtgaagcccggttggaggcagggcacacgcatcacctttgagaaggaaggggaccagggccccaacatcatcccagcagacatcattttcatcgtaaaggagaagctacaccctcgcttccgcagggagaatgacaacctctttttcgtgaaccccatccctcttggcaaggctctcacctgctgcactgtggaggtgaggaccctagatgaccgtctgctcaacatccccatcaatgacatcatccaccccaaatacttcaagaaggtgccaggggaggggatgccattgccggaggaccccactaagaaaggggatctcttcatcttcttcgacatccagttccccacccgcctcacaccccagaagaagcagatgctgcgccaggcattgctgacatgactgtggtgggctggagcaggggtgagaggaggctagccgggcctcaccccacccctacccgccacagcctcagggtgtgcaggggagcctgctgcacagatatgatacaagggtgggatggcgcagggcttaaactgacataataaagatctatttcctgtcctccagctacacc

SEQ ID NO: 288000 - DNA, 3764 bp, Homo sapiens
tggggggccggggtggggtggggcaggatgctggatggcccactgttctccgaggggcctgacagcccccgggagctccaggatgaggagtctggcagctgcctctgggtgcagaagtccaagctattggtgatagaagtgaagactatttcctgtcattatagtcgccgcgccccttctcgacagcccatggacttccaggccagccactgggctcgcgggttccagaaccgcacgtgtgggccgcgcccgggatccccacagccgccgccccgccggccctgggcctccagggtgctgcaggaggcgaccaactggcgggcggggcccctggccgaggtccgagctcgggagcaagagaaaaggaaagcggcgtcgcaggagcgggaggccaaggagaccgagcgaaaaaggcgcaaggctggtggggcccgacggagccccccgggtcgaccccgcccggagccccgcaacgcccctcgggtggcccagctggcagggctccctgctcccttgcggccggagcgcctggcgcctgtggggcgagcgccccgtccatccgcgcagccgcagagcgacccagggtcggcgtgggcggggccctggggaggtcggcggcccgggcccccaagctacgaggctcacctgctgctgagaggttctgccgggaccgccccacgacgccgctgggaccggccgccaccctacgtggctccaccttcttacgaaggcccccataggaccttggggactaagagaggccccgggaactctcaggtgcccacttcatcagccccagctgcgactccagccaggacagacggagggcgcacaaagaagaggctggatcctcggatctaccgggacgtcctcggggcttggggtctccgacaggggcaaggtctcttggggggatccccaggctgtggagcggccagagcaaggccagagcccggcaagggggtcgtggagaaaagcctggggctggctgctgctgacctgaacagtggtagcgacagccatccccaagccaaagctacagggagcgcaggcaccgagatagctcctgcggggtctgcaactgcggctccctgtgccccgcatcccgctcccagatccaggcaccacctcaagggctcgagggaagggaaagaaggagaacagatctggtttcccaaatgctggattccctcccctaaaaagcagccgccccgccatagccagacactccccagaccctgggctcccggaggcaccggatggagagaatctctgggtcttggagagggggcaggaccggagaccctggagggttggaaggcgacccgccgtgcccacaccttgccccgcagttcccagggcctgtcccgtggggaaggcgtctttgtcattgacgccacgtgcgtagtgatacgatcccaatatgttccaaccccccgaacccagcaggtgcagcttttgccctctggggtgacacgcgtggtgggggattcccccagccaatcgaagcccggcaaggaggagggtgaaggggccacggtctttccttccccttgtcaaaagcggctgtcgagcagtcgccttttacaccagcccggcgggggccgcgggggcgaagctgagggcgggaggccgggggactccacactggaggagcgcactttccgcatcttggggctcccggcccccgaagtaaacctgcgggacgcccccacgcagccaggtagcccagagcaccaagccttaggcccagcagcttcgggagcccagggcagagccgaggggtcggaagtggcggtggtccagcggcgcgccggccggggctgggcgcggaccccagggccctacgccggggccctgcgagaagccgtgtcccgtatccgccgccacacagcccctgactcggacacggacgaagctgaggagctcagcgtccatagcggctcctctgatggaagcgacacagaagccccgggcgcctcctggcggaatgagaggaccctgcccgaggttggaaacagttcgccagaggaagatgggaagacagcggaactgagcgacagtgtcggggagatcctagatgtcataagccaaaccgaggaggtcctcttcggggtgagggacatcagagggacccaacagggaaataggaagaggcagtgagaggccccttcttgtatttgtgtccccaacgcatccatccttgggtccactggtccccattcttccccacagacttcctttgcttctcttttccttgtatctttacccatacctgttctcatccttgaaatataaatgaaaggaagggaagcatatgcccattaatgattttgtttcaggagaggtgagaatgagcagatttaattaatgtctgttatgttcagggcacaagggtgagctcttcgcaggggctgatgcactgggtgtggagctgagcagagaggcctaaccaggatcaggcaggagggcagggatggtggcagccataggagggcagggtagggtagggcctctgaggaggagggaaaaagtgaaggagaggctttggacctggtgacagagtgatcagatgacagaggggttcttgggagaagaggcataggtccagcaacaaccaacaaagcagaaggagggctcaccttggtgtcacaagtcttggatttcaatcccaactctgccactgagttgctggttgactgaggccagtcactttccctctccaggcctccaggcctcctggtatataaaatgatggtattctaaggtccatccttccgtctctgacattttgagatctttggaaaggactctatctcatcctcccctcgacaagccaagaatgagaattgggaataagtgaacagagtttgagggtttctgggcggcctccgtgtcacccaaagtcatgatcaattcaggagactgcccaaggcttgcagaagaggtaagggagtgaggcactcctatcccagtctcccaggtttggttgagggctccccaaggcagggcaagatagcggccctgtcactgaccctggcctgtggtggtctgagctggggagggaaggacaccaatgaatcagcttgggacctctttaggccttccccttttcctccaccccgatgctccttagtgatgctctgaggcgtggccacgatctccctcccaggtggtatcgcccacctgaaaaaatcctgagaatttcttccatcttggcctcttccagaaaccggccaggcaaggaaagaggccggtcaccagaagccagcaggcgtggggtgtgatactctctatagccactacagggcgcgcgcaggtcgcggatctccccagttgctaatcccggctctgccactcaatccgatccctagttcccgagcgcgggtcccccgccttgcagtctccagccgtgcggggccgggagcaggcctccggcctcccagacttctagagcccgccgggcccatctttgtactcatccaccccagccggcttgggactcagacaccgaagtctttttttttttctctccgatccttggacacctcctctgtctgccatttattagccatgtgaacttggccacatcacttcacctccctgagcctcagtttcctcatctgtcaaatgggggtttataaacacctacctcgcagggttgttgtgaggatttaatgcgataatgtatgtaaagcgccttgcacactgcctggcacacagtaggcgctcaataaatctaagcttccctttatccagccttg

SEQ ID NO: 288001 - DNA, 2858 bp, Homo sapiens
tggggggccggggtggggtggggcaggatgctggatggcccactgttctccgaggggcctgacagcccccgggagctccaggatgaggagtctggcagctgcctctgggtgcagaagtccaagctattggtgatagaagtgaagactatttcctgtcattatagtcgccgcgccccttctcgacagcccatggacttccaggccagccactgggctcgcgggttccagaaccgcacgtgtgggccgcgcccgggatccccacagccgccgccccgccggccctgggcctccagggtgctgcaggaggcgaccaactggcgggcggggcccctggccgaggtccgagctcgggagcaagagaaaaggaaagcggcgtcgcaggagcgggaggccaaggagaccgagcgaaaaaggcgcaaggctggtggggcccgacggagccccccgggtcgaccccgcccggagccccgcaacgcccctcgggtggcccagctggcagggctccctgctcccttgcggccggagcgcctggcgcctgtggggcgagcgccccgtccatccgcgcagccgcagagcgacccagggtcggcgtgggcggggccctggggaggtcggcggcccgggcccccaagctacgaggctcacctgctgctgagaggttctgccgggaccgccccacgacgccgctgggaccggccgccaccctacgtggctccaccttcttacgaaggcccccataggaccttggggactaagagaggccccgggaactctcaggtgcccacttcatcagccccagctgcgactccagccaggacagacggagggcgcacaaagaagaggctggatcctcggatctaccgggacgtcctcggggcttggggtctccgacaggggcaaggtctcttggggggatccccaggctgtggagcggccagagcaaggccagagcccggcaagggggtcgtggagaaaagcctggggctggctgctgctgacctgaacagtggtagcgacagccatccccaagccaaagctacagggagcgcaggcaccgagatagctcctgcggggtctgcaactgcggctccctgtgccccgcatcccgctcccagatccaggcaccacctcaagggctcgagggaagggaaagaaggagaacagatctggtttcccaaatgctggattccctcccctaaaaagcagccgccccgccatagccagacactccccagaccctgggctcccggaggcaccggatggagagaatctctgggtcttggagagggggcaggaccggagaccctggagggttggaaggcgacccgccgtgcccacaccttgccccgcagttcccagggcctgtcccgtggggaaggcgtctttgtcattgacgccacgtgcgtagtgatacgatcccaatatgttccaaccccccgaacccagcaggtgcagcttttgccctctggggtgacacgcgtggtgggggattcccccagccaatcgaagcccggcaaggaggagggtgaaggggccacggtctttccttccccttgtcaaaagcggctgtcgagcagtcgccttttacaccagcccggcgggggccgcgggggcgaagctgagggcgggaggccgggggactccacactggaggagcgcactttccgcatcttggggctcccggcccccgaagtaaacctgcgggacgcccccacgcagccaggtagcccagagcaccaagccttaggcccagcagcttcgggagcccagggcagagccgaggggtcggaagtggcggtggtccagcggcgcgccggccggggctgggcgcggaccccagggccctacgccggggccctgcgagaagccgtgtcccgtatccgccgccacacagcccctgactcggacacggacgaagctgaggagctcagcgtccatagcggctcctctgatggaagcgacacagaagccccgggcgcctcctggcggaatgagaggaccctgcccgaggttggaaacagttcgccagaggaagatgggaagacagcggaactgagcgacagtgtcggggagatcctagatgtcataagccaaaccgaggaggtcctcttcggggtgagggacatcagagggacccaacagggaaataggaagaggcagtgagaggccccttcttgtatttgtgtccccaacgcatccatccttgggtccactggtccccattcttccccacagacttcctttgcttctcttttccttgtatctttacccatacctgttctcatccttgaaatataaatgaaaggaagggaagcatatgcccattaatgattttgtttcaggagaggtgagaatgagcagatttaattaatgtctgttatgttcagggcacaagggtgagctcttcgcaggggctgatgcactgggtgtggagctgagcagagaggcctaaccaggatcaggcaggagggcagggatggtggcagccataggagggcagggtagggtagggcctctgaggaggagggaaaaagtgaaggagaggctttggacctggtgacagagtgatcagatgacagaggggttcttgggagaagaggcataggtccagcaacaaccaacaaagcagaaggagggctcacctcctctgtctgccatttattagccatgtgaacttggccacatcacttcacctccctgagcctcagtttcctcatctgtcaaatgggggtttataaacacctacctcgcagggttgttgtgaggatttaatgcgataatgtatgtaaagcgccttgcacactgcctggcacacagtaggcgctcaataaatctaagcttccctttatccagccttg

SEQ ID NO: 288002 - DNA, 2230 bp, Homo sapiens
  misc_feature (2134)..(2134): n is a, c, g, or t
  misc_feature (2162)..(2162): n is a, c, g, or t
tggggggccggggtggggtggggcaggatgctggatggcccactgttctccgaggggcctgacagcccccgggagctccaggatgaggagtctggcagctgcctctgggtgcagaagtccaagctattggtgatagaagtgaagactatttcctgtcattatagtcgccgcgccccttctcgacagcccatggacttccaggccagccactgggctcgcgggttccagaaccgcacgtgtgggccgcgcccgggatccccacagccgccgccccgccggccctgggcctccagggtgctgcaggaggcgaccaactggcgggcggggcccctggccgaggtccgagctcgggagcaagagaaaaggaaagcggcgtcgcaggagcgggaggccaaggagaccgagcgaaaaaggcgcaaggctggtggggcccgacggagccccccgggtcgaccccgcccggagccccgcaacgcccctcgggtggcccagctggcagggctccctgctcccttgcggccggagcgcctggcgcctgtggggcgagcgccccgtccatccgcgcagccgcagagcgacccagggtcggcgtgggcggggccctggggaggtcggcggcccgggcccccaagctacgaggctcacctgctgctgagaggttctgccgggaccgccccacgacgccgctgggaccggccgccaccctacgtggctccaccttcttacgaaggcccccataggaccttggggactaagagaggccccgggaactctcaggtgcccacttcatcagccccagctgcgactccagccaggacagacggagggcgcacaaagaagaggctggatcctcggatctaccgggacgtcctcggggcttggggtctccgacaggggcaaggtctcttggggggatccccaggctgtggagcggccagagcaaggccagagcccggcaagggggtcgtggagaaaagcctggggctggctgctgctgacctgaacagtggtagcgacagccatccccaagccaaagctacagggagcgcaggcaccgagatagctcctgcggggtctgcaactgcggctccctgtgccccgcatcccgctcccagatccaggcaccacctcaagggctcgagggaagggaaagaaggagaacagatctggtttcccaaatgctggattccctcccctaaaaagcagccgccccgccatagccagacactccccagaccctgggctcccggaggcaccggatggagagaatctctgggtcttggagagggggcaggaccggagaccctggagggttggaaggcgacccgccgtgcccacaccttgccccgcagttcccagggcctgtcccgtggggaaggcgtctttgtcattgacgccacgtgcgtagtgatacgatcccaatatgttccaaccccccgaacccagcaggtgcagcttttgccctctggggtgacacgcgtggtgggggattcccccagccaatcgaagcccggcaaggaggagggtgaaggggccacggtctttccttccccttgtcaaaagcggctgtcgagcagtcgccttttacaccagcccggcgggggccgcgggggcgaagctgagggcgggaggccgggggactccacactggaggagcgcactttccgcatcttggggctcccggcccccgaagtaaacctgcgggacgcccccacgcagccaggtagcccagagcaccaagccttaggcccagcagcttcgggagcccagggcagagccgaggggtcggaagtggcggtggtccagcggcgcgccggccggggctgggcgcggaccccagggccctacgccggggccctgcgagaagccgtgtcccgtatccgccgccacacagcccctgactcggacacggacgaagctgaggagctcagcgtccatagcggctcctctgatggaagcgacacagaagccccgggcgcctcctggcggaatgagaggaccctgcccgaggttggaaacagttcgccagaggaagatgggaagacagcggaactgagcgacagtgtcggggagatcctagatgtcataagagacagcggaactgagcgacagtgtcggggagatcctagatgtnatagccacggtctttccttccccttgtnaaaagcttctgtcgagcagtcgccttttacaccagcccgtcgggggcctcggggcgaagctgagggcg

SEQ ID NO: 288003 - DNA, 877 bp, Homo sapiens
ctgtgtgaggcagactcagctcccaagcctgtctcaggcagcaggcagcccccgtgtgctggccatcccagctagcaggctggggtcctagagaatcgctaacctccaggaaaacagcctcctgtcgcctccacctggagacgctcatccagcagggtctgttctctctgctggagaaagccaccctggctgcaaggttcagcggcggccgccggggcagcacgcaccggattgcaacatgcgatgctttaaacctggtctgccgccagctcttcagatgcacagagggctacaaacaaccacaattagctttcagcacaacagccaccgtctgcgttaatgcgagatgaaccgcagtctttcacagagagagctgcgtgggaatgcgcttcagaaacgttgctggtaccagaagtcagcagtgttttcggtgatcagcagagcagaggtgtgagccgggcctaggcacgctcgctgaggacgcgctcatggcgcctgtgctgcctgcgggcagggccctcggctttggcaggagggaggacatctgtcctacgggtcatcaacctcaacttcagaaagtaacccataataatctccagaattttacaggacaaagatgcaaggtcaaaacaataaacctgcagactggggtcagagtccttgacttttgatggtgctgatttggttgggggcagcttgaggtcccccagccagagctggctcagtggtgggagcctgtggccgcgagggcagggggaggagtgcggagacaccactgctgctccgtgccctcagtggggctgtagggctgggcctgggcccctgtactctcctggatcctggggagaggccagggtccctgggatggggctgcctg

SEQ ID NO: 288004 - DNA, 745 bp, Homo sapiens
ctgtgtgaggcagactcagctcccaagcctgtctcaggcagcaggcagcccccgtgtgctggccatcccagctagcaggctggggtcctagagaatcgctaacctccaggaaaacagcctcctgtcgcctccacctggagacgctcatccagcagggtctgttctctctgctggagaaagccaccctggctgcaaggttcagcggcggccgccggggcagcacgcaccggattgcaacatgcgatgctttaaacctggtctgccgccagctcttcagatgcacagagggctacaaacaaccacaattagctttcagcacaacagccaccgtctgcgttaatgcgagatgaaccgcagtctttcacagagagagctgcgtgggaatgcgcttcagaaacgttgctggtaccagaagtcagcagtgttttcggtgatcagcagagcagagggcctccctgctccccacacagtctctgtgaccggggccgcctgcagcccggatcccttccgcaaggagctccctccgctgtctgcggcaacagacaccgccccctccagggctgctccctgcccctccaccccgggtgcagctgggagagcaaacaacaaggaaccgccactcccgctccttgcggatctgactctccaggtcgtgctcttctgggatcttcaacaacagaaaacacccagttaagcccagcgatgaaacagggttgtatcttggtatcaatggggtatgggttct

SEQ ID NO: 288005 - DNA, 992 bp, Homo sapiens
gtggggagattttgggtgacagccaatttataaatggatcgattcactcgggaatattttcatcatatggtgactgtgggatcttggagactgaatgcacatattacgagaatccccatgtgataacttgtgtttctcctctttgcagccttcagcaggaagacctcattgcaataagtgaaatgctgctctaggtagaagctctccctgctgtttttaagaagccacattcctcattggtcagtttcttgattgttcgtctgttggagaggtgctccctagaagaacctgccatacgtttcaaagcaataaaatcactgtatatctttctaaggaccttcaagtcatgactccagggaagcctattgggaagtctactaaaaactgcctgatttacaagaaagacctgaacttgtgggctcccatttgatttttttctcctcaggggactcagacattagaaagaaaaagcctcacagatttgaagaactggacccccaaatcaactcacctgcctggaagcaactgggaaacccttccaataagtcctgataataaagcacttcagggtcccatgtcttgatttttggcttgatagaaatactttgtcctttatttagtgtgatggggagggcttggactctgaaatcagttctgggttcaaattgtgaccagctgtgatttcaactgtctgaggctcggagattttaaacctggaaagtagatccccatctcggagggtggccatggaagttcatggagatgatgtacagggaatgcagtatctaactccagaaagtcctcggtttgagttaatggttatcatcaacacagtcactcttggttaactcaagagtcaaggtatgactcttgactaattccgtcattagggaggagttttctgttgtagtaagttaagtaaacttaaagaagatagtttattcctctcccatccaacagtcatattataagcagaccagagctgataaagc

SEQ ID NO: 288006 - DNA, 3177 bp, Homo sapiens
agcgggggacgttctggaaggtagcgtggggtagaaggcctgttgtggagggaaaccacccatcctcctgcctcccaccaccaccatcatcctggctggacggagagggtgacgggggctgggaaggggcagctcatgttcaggtttccaggaggggctacctgttgactgtctttgcaggaagaagaaaacacctgagtgaccagatgtcccagctccaggtgccttgccagatggccagaaccacacctcttgaagagtgacagtgctgtggagcatggtttctgcacacctggaatgactggaaccccaaagactcaagaaggagctaaagatcttgaagtagacatgaataaaacagaagttactcccaggctgtggaccacctgtcgagatggagaagtccttctgaggctatccaaacacggaccaggccatgagaccccgatgaccatccctgaattttttcgagagtcagtcaaccgatttggaacttatccagccctcgcatccaagaatggcaaaaagtgggaaattctgaatttcaaccagtactatgaggcttgtcggaaggctgcaaaatccttgatcaagctgggtttggagcgtttccacggagttggtatcctggggtttaactctgcagagtggtttatcactgctgttggtgccatcctagccgggggtctttgtgttggtatttatgccaccaactctgccgaggcttgtcaatatgtcatcactcatgccaaagtgaacatcttgctggttgagaatgatcaacagttacagaaaatcctttcgattccacagagcagcctagagcccctaaaagcgatcatccagtacagactgccaatgaagaagaacaacaacttgtactcttgggatgatttcatggaacttggcagaagtatccctgacacccaactggagcaggtcatcgagagccagaaggcgaatcaatgcgcagtgctcatctacacttcagggaccacaggcatacccaagggagtgatgctcagtcatgacaacatcacgtggattgcaggagcagtgacaaaggactttaaactgacagacaagcatgagacggtggttagctacctcccactcagccatattgcagcacagatgatggacatctgggtacccataaagattggggcgctcacatactttgctcaagcagatgctctcaagggcaccttggtaagtactctaaaggaggtaaaacctactgtcttcattggagtgcctcaaatttgggagaagatacatgagatggtgaagaaaaatagtgccaagtccatgggcttgaagaagaaggcattcgtgtgggcaagaaacattggcttcaaggtcaactcaaaaaagatgttggggaaatataatactcccgtgagctaccgcatggctaagactctcgtgttcagcaaagtcaagacatcccttggcttggatcactgtcactcttttatcagtgggactgcgcccctcaaccaagagactgccgagttctttctaagcttggacatacctataggcgagttgtatgggttgagtgagagctcgggaccccacacgatatccaaccagaataactacaggcttctaagctgtggcaagatcttgactgggtgtaagaatatgctgttccagcagaacaaggatggcattggggagatctgcctctggggtaggcacatcttcatgggctatctggaaagtgagactgaaactacagaggccatcgatgatgaaggctggctacactctggggatctgggccagctggacggtctgggtttcctctatgtcaccggccacatcaaagaaatccttatcactgctggtggtgaaaatgtgccccccattcctgttgagaccttggttaagaagaagatccccatcatcagtaacgccatgttagtaggagataaactgaagtttctgagcatgttgctgacgctgaagtgtgagatgaatcagatgagcggagaacctctggacaagctgaacttcgaggccatcaacttctgtcggggtctgggcagccaggcatccaccgtgactgagattgtgaagcagcaagaccccctggtctacaaggccatccagcaaggcatcaatgctgtgaaccaggaagccatgaacaatgcacagaggattgaaaagtgggtcatcttggagaaggacttttccatctatggtggagagctaggtccaatgatgaaacttaagagacattttgtagcccagaaatacaaaaaacaaattgatcacatgtaccactgactgctttgatggagctgctctcagctgttctgatgccttcagcaggaagacctcattgcaataagtgaaatgctgctctaggtagaagctctccctgctgtttttaagaagccacattcctcattggtcagtttcttgattgttcgtctgttggagaggtgctccctagaagaacctgccatacgtttcaaagcaataaaatcactgtatatctttctaaggaccttcaagtcatgactccagggaagcctattgggaagtctactaaaaactgcctgatttacaagaaagacctgaacttgtgggctcccatttgatttttttctcctcaggggactcagacattagaaagaaaaagcctcacagatttgaagaactggacccccaaatcaactcacctgcctggaagcaactgggaaacccttccaataagtcctgataataaagcacttcagggtcccatgtcttgatttttggcttgatagaaatactttgtcctttatttagtgtgatggggagggcttggactctgaaatcagttctgggttcaaattgtgaccagctgtgatttcaactgtctgaggctcggagattttaaacctggaaagtagatccccatctcggagggtggccatggaagttcatggagatgatgtacagggaatgcagtatctaactccagaaagtcctcggtttgagttaatggttatcatcaacacagtcactcttggttaactcaagagtcaaggtatgactcttgactaattccgtcattagggaggagttttctgttgtagtaagttaagtaaacttaaagaagatagtttattcctctcccatccaacagtcatattataagcagaccagagctgataaagc

SEQ ID NO: 288007 - DNA, 3019 bp, Homo sapiens
agcggatggaacgttctggaaggaagaagaaaacacctgagtgaccagatgtcccagctccaggtgccttgccagatggccagaaccacacctcttgaagagtgacagtgctgtggagcatggtttctgcacacctggaatgactggaaccccaaagactcaagaaggagctaaagatcttgaagtagacatgaataaaacagaagttactcccaggctgtggaccacctgtcgagatggagaagtccttctgaggctatccaaacacggaccaggccatgagaccccgatgaccatccctgaattttttcgagagtcagtcaaccgatttggaacttatccagccctcgcatccaagaatggcaaaaagtgggaaattctgaatttcaaccagtactatgaggcttgtcggaaggctgcaaaatccttgatcaagctgggtttggagcgtttccacggagttggtatcctggggtttaactctgcagagtggtttatcactgctgttggtgccatcctagccgggggtctttgtgttggtatttatgccaccaactctgccgaggcttgtcaatatgtcatcactcatgccaaagtgaacatcttgctggttgagaatgatcaacagttacagaaaatcctttcgattccacagagcagcctagagcccctaaaagcgatcatccagtacagactgccaatgaagaagaacaacaacttgtactcttgggatgatttcatggaacttggcagaagtatccctgacacccaactggagcaggtcatcgagagccagaaggcgaatcaatgcgcagtgctcatctacacttcagggaccacaggcatacccaagggagtgatgctcagtcatgacaacatcacgtggattgcaggagcagtgacaaaggactttaaactgacagacaagcatgagacggtggttagctacctcccactcagccatattgcagcacagatgatggacatctgggtacccataaagattggggcgctcacatactttgctcaagcagatgctctcaagggcaccttggtaagtactctaaaggaggtaaaacctactgtcttcattggagtgcctcaaatttgggagaagatacatgagatggtgaagaaaaatagtgccaagtccatgggcttgaagaagaaggcattcgtgtgggcaagaaacattggcttcaaggtcaactcaaaaaagatgttggggaaatataatactcccgtgagctaccgcatggctaagactctcgtgttcagcaaagtcaagacatcccttggcttggatcactgtcactcttttatcagtgggactgcgcccctcaaccaagagactgccgagttctttctaagcttggacatacctataggcgagttgtatgggttgagtgagagctcgggaccccacacgatatccaaccagaataactacaggcttctaagctgtggcaagatcttgactgggtgtaagaatatgctgttccagcagaacaaggatggcattggggagatctgcctctggggtaggcacatcttcatgggctatctggaaagtgagactgaaactacagaggccatcgatgatgaaggctggctacactctggggatctgggccagctggacggtctgggtttcctctatgtcaccggccacatcaaagaaatccttatcactgctggtggtgaaaatgtgccccccattcctgttgagaccttggttaagaagaagatccccatcatcagtaacgccatgttagtaggagataaactgaagtttctgagcatgttgctgacgctgaagtgtgagatgaatcagatgagcggagaacctctggacaagctgaacttcgaggccatcaacttctgtcggggtctgggcagccaggcatccaccgtgactgagattgtgaagcagcaagaccccctggtctacaaggccatccagcaaggcatcaatgctgtgaaccaggaagccatgaacaatgcacagaggattgaaaagtgggtcatcttggagaaggacttttccatctatggtggagagctaggtccaatgatgaaacttaagagacattttgtagcccagaaatacaaaaaacaaattgatcacatgtaccactgactgctttgatggagctgctctcagctgttctgatgccttcagcaggaagacctcattgcaataagtgaaatgctgctctaggtagaagctctccctgctgtttttaagaagccacattcctcattggtcagtttcttgattgttcgtctgttggagaggtgctccctagaagaacctgccatacgtttcaaagcaataaaatcactgtatatctttctaaggaccttcaagtcatgactccagggaagcctattgggaagtctactaaaaactgcctgatttacaagaaagacctgaacttgtgggctcccatttgatttttttctcctcaggggactcagacattagaaagaaaaagcctcacagatttgaagaactggacccccaaatcaactcacctgcctggaagcaactgggaaacccttccaataagtcctgataataaagcacttcagggtcccatgtcttgatttttggcttgatagaaatactttgtcctttatttagtgtgatggggagggcttggactctgaaatcagttctgggttcaaattgtgaccagctgtgatttcaactgtctgaggctcggagattttaaacctggaaagtagatccccatctcggagggtggccatggaagttcatggagatgatgtacagggaatgcagtatctaactccagaaagtcctcggtttgagttaatggttatcatcaacacagtcactcttggttaactcaagagtcaaggtatgactcttgactaattccgtcattagggaggagttttctgttgtagtaagttaagtaaacttaaagaagatagtttattcctctcccatccaacagtcatattataagcagaccagagctgataaagc

SEQ ID NO: 288008 - DNA, 2634 bp, Homo sapiens
agcgggggacgttctggaaggtagcgtggggtagaaggcctgttgtggagggaaaccacccatcctcctgcctcccaccaccaccatcatcctggctggacggagagggtgacgggggctgggaaggggcagctcatgttcaggtttccaggaggggctacctgttgactgtctttgcaggaagaagaaaacacctgagtgaccagatgtcccagctccaggtgccttgccagatggccagaaccacacctcttgaagagtgacagtgctgtggagcatggtttctgcacacctggaatgactggaaccccaaagactcaagaaggagctaaagatcttgaagtagacatgaataaaacagaagttactcccaggctgtggaccacctgtcgagatggagaagtccttctgaggctatccaaacacggaccaggccatgagaccccgatgaccatccctgaattttttcgagagtcagtcaaccgatttggaacttatccagccctcgcatccaagaatggcaaaaagtgggaaattctgaatttcaaccagtactatgaggcttgtcggaaggctgcaaaatccttgatcaagctgggtttggagcgtttccacggagttggtatcctggggtttaactctgcagagtggtttatcactgctgttggtgccatcctagccggattccacagagcagcctagagcccctaaaagcgatcatccagtacagactgccaatgaagaagaacaacaacttgtactcttgggatgatttcatggaacttggcagaagtatccctgacacccaactggagcaggtcatcgagagccagaaggcgaatcaatgcgcagtgctcatctacacttcagggaccacaggcatacccaagggagtgatgctcagtcatgacaacatcacgtggattgcaggagcagtgacaaaggactttaaactgacagacaagcatgagacggtggttagctacctcccactcagccatattgcagcacagatgatggacatctgggtacccataaagattggggcgctcacatactttgctcaagcagatgctctcaagggcaccttggtaagtactctaaaggaggtaaaacctactgtcttcattggagtgcctcaaatttgggagaagatacatgagatggtgaagaaaaatagtgccaagtccatgggcttgaagaagaaggcattcgtgtgggcaagaaacattggcttcaaggtcaactcaaaaaagatgttggggaaatataatactcccgtgagctaccgcatggctaagactctcgtgttcagcaaagtcaagacatcccttggcttggatcactgtcactcttttatcagtgggactgcgcccctcaaccaagagactgccgagttctttctaagcttggacatacctataggcgagttgtatgggttgagtgagagctcgggaccccacacgatatccaaccagaataactacaggcttctaagctgtggcaagatcttgactgggtgtaagaatatgctgttccagcagaacaaggatggcattggggagatctgcctctggggtaggcacatcttcatgggctatctggaaagtgagactgaaactacagaggccatcgatgatgaaggctggctacactctggggatctgggccagctggacggtctgggtttcctctatgtcaccggccacatcaaagaaatccttatcactgctggtggtgaaaatgtgccccccattcctgttgagaccttggttaagaagaagatccccatcatcagtaacgccatgttagtaggagataaactgaagtttctgagcatgttgctgacgctgaagtgtgagatgaatcagatgagcggagaacctctggacaagctgaacttcgaggccatcaacttctgtcggggtctgggcagccaggcatccaccgtgactgagattgtgaagcagcaagaccccctggtctacaaggccatccagcaaggcatcaatgctgtgaaccaggaagccatgaacaatgcacagaggattgaaaagtgggtcatcttggagaaggacttttccatctatggtggagagctaggtccaatgatgaaacttaagagacattttgtagcccagaaatacaaaaaacaaattgatcacatgtaccactgactgctttgatggagctgctctcagctgttctgatgccttcagcaggaagacctcattgcaataagtgaaatgctgctctaggtagaagctctccctgctgtttttaagaagccacattcctcattggtcagtttcttgattgttcgtctgttggagaggtgctccctagaagaacctgccatacgtttcaaagcaataaaatcactgtatatctttctaaggaccttcaagtcatgactccagggaagcctattgggaagtctactaaaaactgcctgatttacaagaaagacctgaacttgtgggctcccatttgatttttttctcctcaggggactcagacattagaaagaaaaagcctcacagatttgaagaactggacccccaaatcaactcacctgcctggaagcaactgggaaacccttccaataagtcctgataataaagcacttcaggg

SEQ ID NO: 288009 - DNA, 2622 bp, Homo sapiens
agcggggtgaaaggatgccatcgcaatcctcctggctcccgatcgaacagcacatcgatccgtgactggacggatgaaggcgatgcatcgcgcgtggacatgttgaactgtgccaccttcttgtacaggttactcacgaagcaggctacctgttgactgtctttgcaggaagaagaaaacacctgagtgaccagatgtcccagctccaggtgccttgccagatggccagaaccacacctcttgaagagtgacagtgctgtggagcatggtttctgcacacctggaatgactggaaccccaaagactcaagaaggagctaaagatcttgaagtagacatgaataaaacagaagttactcccaggctgtggaccacctgtcgagatggagaagtccttctgaggctatccaaacacggaccaggccatgagaccccgatgaccatccctgaattttttcgagagtcagtcaaccgatttggaacttatccagccctcgcatccaagaatggcaaaaagtgggaaattctgaatttcaaccagtactatgaggcttgtcggaaggctgcaaaatccttgatcaagctgggtttggagcgtttccacggagttggtatcctggggtttaactctgcagagtggtttatcactgctgttggtgccatcctagccggattccacagagcagcctagagcccctaaaagcgatcatccagtacagactgccaatgaagaagaacaacaacttgtactcttgggatgatttcatggaacttggcagaagtatccctgacacccaactggagcaggtcatcgagagccagaaggcgaatcaatgcgcagtgctcatctacacttcagggaccacaggcatacccaagggagtgatgctcagtcatgacaacatcacgtggattgcaggagcagtgacaaaggactttaaactgacagacaagcatgagacggtggttagctacctcccactcagccatattgcagcacagatgatggacatctgggtacccataaagattggggcgctcacatactttgctcaagcagatgctctcaagggcaccttggtaagtactctaaaggaggtaaaacctactgtcttcattggagtgcctcaaatttgggagaagatacatgagatggtgaagaaaaatagtgccaagtccatgggcttgaagaagaaggcattcgtgtgggcaagaaacattggcttcaaggtcaactcaaaaaagatgttggggaaatataatactcccgtgagctaccgcatggctaagactctcgtgttcagcaaagtcaagacatcccttggcttggatcactgtcactcttttatcagtgggactgcgcccctcaaccaagagactgccgagttctttctaagcttggacatacctataggcgagttgtatgggttgagtgagagctcgggaccccacacgatatccaaccagaataactacaggcttctaagctgtggcaagatcttgactgggtgtaagaatatgctgttccagcagaacaaggatggcattggggagatctgcctctggggtaggcacatcttcatgggctatctggaaagtgagactgaaactacagaggccatcgatgatgaaggctggctacactctggggatctgggccagctggacggtctgggtttcctctatgtcaccggccacatcaaagaaatccttatcactgctggtggtgaaaatgtgccccccattcctgttgagaccttggttaagaagaagatccccatcatcagtaacgccatgttagtaggagataaactgaagtttctgagcatgttgctgacgctgaagtgtgagatgaatcagatgagcggagaacctctggacaagctgaacttcgaggccatcaacttctgtcggggtctgggcagccaggcatccaccgtgactgagattgtgaagcagcaagaccccctggtctacaaggccatccagcaaggcatcaatgctgtgaaccaggaagccatgaacaatgcacagaggattgaaaagtgggtcatcttggagaaggacttttccatctatggtggagagctaggtccaatgatgaaacttaagagacattttgtagcccagaaatacaaaaaacaaattgatcacatgtaccactgactgctttgatggagctgctctcagctgttctgatgccttcagcaggaagacctcattgcaataagtgaaatgctgctctaggtagaagctctccctgctgtttttaagaagccacattcctcattggtcagtttcttgattgttcgtctgttggagaggtgctccctagaagaacctgccatacgtttcaaagcaataaaatcactgtatatctttctaaggaccttcaagtcatgactccagggaagcctattgggaagtctactaaaaactgcctgatttacaagaaagacctgaacttgtgggctcccatttgatttttttctcctcaggggactcagacattagaaagaaaaagcctcacagatttgaagaactggacccccaaatcaactcacctgcctggaagcaactgggaaacccttccaataagtcctgataataaagcacttcaggg

SEQ ID NO: 288010 - DNA, 3132 bp, Homo sapiens
agcgggggacgttctggaaggtagcgtggggtagaaggcctgttgtggagggaaaccacccatcctcctgcctcccaccaccaccatcatcctggctggacggagagggtgacgggggctgggaaggggcagctcatgttcaggtttccaggaggggctacctgttgactgtctttgcaggaagaagaaaacacctgagtgaccagatgtcccagctccagtgctgtggagcatggtttctgcacacctggaatgactggaaccccaaagactcaagaaggagctaaagatcttgaagtagacatgaataaaacagaagttactcccaggctgtggaccacctgtcgagatggagaagtccttctgaggctatccaaacacggaccaggccatgagaccccgatgaccatccctgaattttttcgagagtcagtcaaccgatttggaacttatccagccctcgcatccaagaatggcaaaaagtgggaaattctgaatttcaaccagtactatgaggcttgtcggaaggctgcaaaatccttgatcaagctgggtttggagcgtttccacggagttggtatcctggggtttaactctgcagagtggtttatcactgctgttggtgccatcctagccgggggtctttgtgttggtatttatgccaccaactctgccgaggcttgtcaatatgtcatcactcatgccaaagtgaacatcttgctggttgagaatgatcaacagttacagaaaatcctttcgattccacagagcagcctagagcccctaaaagcgatcatccagtacagactgccaatgaagaagaacaacaacttgtactcttgggatgatttcatggaacttggcagaagtatccctgacacccaactggagcaggtcatcgagagccagaaggcgaatcaatgcgcagtgctcatctacacttcagggaccacaggcatacccaagggagtgatgctcagtcatgacaacatcacgtggattgcaggagcagtgacaaaggactttaaactgacagacaagcatgagacggtggttagctacctcccactcagccatattgcagcacagatgatggacatctgggtacccataaagattggggcgctcacatactttgctcaagcagatgctctcaagggcaccttggtaagtactctaaaggaggtaaaacctactgtcttcattggagtgcctcaaatttgggagaagatacatgagatggtgaagaaaaatagtgccaagtccatgggcttgaagaagaaggcattcgtgtgggcaagaaacattggcttcaaggtcaactcaaaaaagatgttggggaaatataatactcccgtgagctaccgcatggctaagactctcgtgttcagcaaagtcaagacatcccttggcttggatcactgtcactcttttatcagtgggactgcgcccctcaaccaagagactgccgagttctttctaagcttggacatacctataggcgagttgtatgggttgagtgagagctcgggaccccacacgatatccaaccagaataactacaggcttctaagctgtggcaagatcttgactgggtgtaagaatatgctgttccagcagaacaaggatggcattggggagatctgcctctggggtaggcacatcttcatgggctatctggaaagtgagactgaaactacagaggccatcgatgatgaaggctggctacactctggggatctgggccagctggacggtctgggtttcctctatgtcaccggccacatcaaagaaatccttatcactgctggtggtgaaaatgtgccccccattcctgttgagaccttggttaagaagaagatccccatcatcagtaacgccatgttagtaggagataaactgaagtttctgagcatgttgctgacgctgaagtgtgagatgaatcagatgagcggagaacctctggacaagctgaacttcgaggccatcaacttctgtcggggtctgggcagccaggcatccaccgtgactgagattgtgaagcagcaagaccccctggtctacaaggccatccagcaaggcatcaatgctgtgaaccaggaagccatgaacaatgcacagaggattgaaaagtgggtcatcttggagaaggacttttccatctatggtggagagctaggtccaatgatgaaacttaagagacattttgtagcccagaaatacaaaaaacaaattgatcacatgtaccactgactgctttgatggagctgctctcagctgttctgatgccttcagcaggaagacctcattgcaataagtgaaatgctgctctaggtagaagctctccctgctgtttttaagaagccacattcctcattggtcagtttcttgattgttcgtctgttggagaggtgctccctagaagaacctgccatacgtttcaaagcaataaaatcactgtatatctttctaaggaccttcaagtcatgactccagggaagcctattgggaagtctactaaaaactgcctgatttacaagaaagacctgaacttgtgggctcccatttgatttttttctcctcaggggactcagacattagaaagaaaaagcctcacagatttgaagaactggacccccaaatcaactcacctgcctggaagcaactgggaaacccttccaataagtcctgataataaagcacttcagggtcccatgtcttgatttttggcttgatagaaatactttgtcctttatttagtgtgatggggagggcttggactctgaaatcagttctgggttcaaattgtgaccagctgtgatttcaactgtctgaggctcggagattttaaacctggaaagtagatccccatctcggagggtggccatggaagttcatggagatgatgtacagggaatgcagtatctaactccagaaagtcctcggtttgagttaatggttatcatcaacacagtcactcttggttaactcaagagtcaaggtatgactcttgactaattccgtcattagggaggagttttctgttgtagtaagttaagtaaacttaaagaagatagtttattcctctcccatccaacagtcatattataagcagaccagagctgataaagc

SEQ ID NO: 288011 - DNA, 2948 bp, Homo sapiens
agcgggggacgttctggaaggtagcgtggggtagaaggcctgttgtggagggaaaccacccatcctcctgcctcccaccaccaccatcatcctggctggacggagagggtgacgggggctgggaaggggcagctcatgttcaggtttccaggaggggctacctgttgactgtctttgcaggaagaagaaaacacctgagtgaccagatgtcccagctccaggtgccttgccagatggccagaaccacacctcttgaagagtgacagtgctgtggagcatggtttctgcacacctggaatgactggaaccccaaagactcaagaaggagctaaagatcttgaagtagacatgaataaaacagaagttactcccaggctgtggaccacctgtcgagatggagaagtccttctgaggctatccaaacacggaccaggccatgagaccccgatgaccatccctgaattttttcgagagtcagtcaaccgatttggaacttatccagccctcgcatccaagaatggcaaaaagtgggaaattctgaatttcaaccagtactatgaggcttgtcggaaggctgcaaaatccttgatcaagctgggtttggagcgtttccacggagttggtatcctggggtttaactctgcagagtggtttatcactgctgttggtgccatcctagccgggggtctttgtgttggtatttatgccaccaactctgccgaggcttgtcaatatgtcatcactcatgccaaagtgaacatcttgctggttgagaatgatcaacagttacagaaaatcctttcgattccacagagcagcctagagcccctaaaagcgatcatccagtacagactgccaatgaagaagaacaacaacttgtactcttgggatgatttcatggaacttggcagaagtatccctgacacccaactggagcaggtcatcgagagccagaaggcgaatcaatgcgcagtgctcatctacacttcagggaccacaggcatacccaagggagtgatgctcagtcatgacaacatcacgtggattgcaggagcagtgacaaaggactttaaactgacagacaagcatgagacggtggttagctacctcccactcagccatattgcagcacagatgatggacatctgggtacccataaagattggggcgctcacatactttgctcaagcagatgctctcaagggcaccttggtaagtactctaaaggaggtaaaacctactgtcttcattggagtgcctcaaatttgggagaagatacatgagatggtgaagaaaaatagtgccaagtccatgggcttgaagaagaaggcattcgtgtgggcaagaaacattggcttcaaggtcaactcaaaaaagatgttggggaaatataatactcccgtgagctaccgcatggctaagactctcgtgttcagcaaagtcaagacatcccttggcttggatcactgtcactcttttatcagtgggactgcgcccctcaaccaagagactgccgagttctttctaagcttggacatacctataggcgagttgtatgggttgagtgagagctcgggaccccacacgatatccaaccagaataactacaggcttctaagctgtggcaagatcttgactgggtgtaagaatatgctgttccagcagaacaaggatggcattggggagatctgcctctggggtaggcacatcttcatgggctatctggaaagtgagactgaaactacagaggccatcgatgatgaaggctggctacactctggggatctgggccagctggacggtctgggtttcctctatgtcaccggccacatcaaagaaatccttatcactgctggtggtgaaaatgtgccccccattcctgttgagaccttggttaagaagaagatccccatcatcagtaacgccatgttagtaggagataaactgaagtttctgagcatgttgctgacgctgaagtgtgagatgaatcagatgagcggagaacctctggacaagctgaacttcgaggccatcaacttctgtcggggtctgggcagccaggcatccaccgtgactgagattgtgaagcagcaagaccccctggtctacaaggccatccagcaaggcatcaatgctgtgaaccaggaagccatgaacaatgcacagaggattgaaaagtgggtcatcttggagaaggacttttccatctatggtggagagctaggtccaatgatgaaacttaagagacattttgtagcccagaaatacaaaaaacaaattgatcacatgtaccactgactgctttgatggagctgctctcagctgttctgatggtgagattcagttgcttggctttgctgggctatgcattcagagtccaagagagggctccactgtgtggcaggcagatctgtgactggaactgcagaaaacacacacatacacacatacatacacacacacacacacacacacacacacacacacacacactcttagttgcagtggattctgagtagcaggcttcaactcatgctgtctctactctaccagggtcatggtagggtgtgtaaactccttcagctggccaccaatgttgttagctgtgcttcctgccttttctatttgtttctagaaagtaggaggcaatgaatcccaaatgtctcattgggtcttatttggagaaggcctttgtcagaaactttagtggagaaagttctacttgccaggaactcaaggaatgaggtgtgttggcccattacacagataataagggatggaggcttgaacttccactatccaccgtttatcctctcttttccccaagacatgtgcagagggagcctccatgacaccatgaatcactgatagttattgaggtgttttttttttttttcttcactagatgcacagtgcaggcagaaagtagaatgcatcttcaattgtcc

SEQ ID NO: 288012 - DNA, 3011 bp, Homo sapiens
agcgggggacgttctggaaggtagcgtggggtagaaggcctgttgtggagggaaaccacccatcctcctgcctcccaccaccaccatcatcctggctggacggagagggtgacgggggctgggaaggggcagctcatgttcaggtttccaggaggggctacctgttgactgtctttgcaggaagaagaaaacacctgagtgaccagatgtcccagctccagtgctgtggagcatggtttctgcacacctggaatgactggaaccccaaagactcaagaaggagctaaagatcttgaagtagacatgaataaaacagaagttactcccaggctgtggaccacctgtcgagatggagaagtccttctgaggctatccaaacacggaccaggccatgagaccccgatgaccatccctgaattttttcgagagtcagtcaaccgatttggaacttatccagccctcgcatccaagaatggcaaaaagtgggaaattctgaatttcaaccagtactatgaggcttgtcggaaggctgcaaaatccttgatcaagctgggtttggagcgtttccacggagttggtatcctggggtttaactctgcagagtggtttatcactgctgttggtgccatcctagccggattccacagagcagcctagagcccctaaaagcgatcatccagtacagactgccaatgaagaagaacaacaacttgtactcttgggatgatttcatggaacttggcagaagtatccctgacacccaactggagcaggtcatcgagagccagaaggcgaatcaatgcgcagtgctcatctacacttcagggaccacaggcatacccaagggagtgatgctcagtcatgacaacatcacgtggattgcaggagcagtgacaaaggactttaaactgacagacaagcatgagacggtggttagctacctcccactcagccatattgcagcacagatgatggacatctgggtacccataaagattggggcgctcacatactttgctcaagcagatgctctcaagggcaccttggtaagtactctaaaggaggtaaaacctactgtcttcattggagtgcctcaaatttgggagaagatacatgagatggtgaagaaaaatagtgccaagtccatgggcttgaagaagaaggcattcgtgtgggcaagaaacattggcttcaaggtcaactcaaaaaagatgttggggaaatataatactcccgtgagctaccgcatggctaagactctcgtgttcagcaaagtcaagacatcccttggcttggatcactgtcactcttttatcagtgggactgcgcccctcaaccaagagactgccgagttctttctaagcttggacatacctataggcgagttgtatgggttgagtgagagctcgggaccccacacgatatccaaccagaataactacaggcttctaagctgtggcaagatcttgactgggtgtaagaatatgctgttccagcagaacaaggatggcattggggagatctgcctctggggtaggcacatcttcatgggctatctggaaagtgagactgaaactacagaggccatcgatgatgaaggctggctacactctggggatctgggccagctggacggtctgggtttcctctatgtcaccggccacatcaaagaaatccttatcactgctggtggtgaaaatgtgccccccattcctgttgagaccttggttaagaagaagatccccatcatcagtaacgccatgttagtaggagataaactgaagtttctgagcatgttgctgacgctgaagtgtgagatgaatcagatgagcggagaacctctggacaagctgaacttcgaggccatcaacttctgtcggggtctgggcagccaggcatccaccgtgactgagattgtgaagcagcaagaccccctggtctacaaggccatccagcaaggcatcaatgctgtgaaccaggaagccatgaacaatgcacagaggattgaaaagtgggtcatcttggagaaggacttttccatctatggtggagagctaggtccaatgatgaaacttaagagacattttgtagcccagaaatacaaaaaacaaattgatcacatgtaccactgactgctttgatggagctgctctcagctgttctgatgccttcagcaggaagacctcattgcaataagtgaaatgctgctctaggtagaagctctccctgctgtttttaagaagccacattcctcattggtcagtttcttgattgttcgtctgttggagaggtgctccctagaagaacctgccatacgtttcaaagcaataaaatcactgtatatctttctaaggaccttcaagtcatgactccagggaagcctattgggaagtctactaaaaactgcctgatttacaagaaagacctgaacttgtgggctcccatttgatttttttctcctcaggggactcagacattagaaagaaaaagcctcacagatttgaagaactggacccccaaatcaactcacctgcctggaagcaactgggaaacccttccaataagtcctgataataaagcacttcagggtcccatgtcttgatttttggcttgatagaaatactttgtcctttatttagtgtgatggggagggcttggactctgaaatcagttctgggttcaaattgtgaccagctgtgatttcaactgtctgaggctcggagattttaaacctggaaagtagatccccatctcggagggtggccatggaagttcatggagatgatgtacagggaatgcagtatctaactccagaaagtcctcggtttgagttaatggttatcatcaacacagtcactcttggttaactcaagagtcaaggtatgactcttgactaattccgtcattagggaggagttttctgttgtagtaagttaagtaaacttaaagaagatagtttattcctctcccatccaacagtcatattataagcagaccagagctgataaagc

SEQ ID NO: 288013 - DNA, 635 bp, Homo sapiens
taatcaaaaagggaatgtgataatctacaggtcacatttggcagtttagtttaaaagtaaacaggctttccaattaacccaccttgggaaggtcttgtgattcatggtgaaatcttgtccctgaatcttatcatgagtctctcaaattgttgacacagtgattaatgcataacccagtgaccctgaaaaggacactgatttatttctggatcttagagttttactgattgtcttgcatggatacatttgagcctgcatgttgcgatctgtatccaatgattgtaacttctgtattgtatccttcaatgagaaaggacagctctggtgtgaggagtccctctcccttctcctaaactcttctacaaaacaggggtttccaacttccgggataaggacctgtaccaacccatggcctgttaggaaatgggccacacagcagaagctctccaggaacacatctttgaagacaaaatgcctccaagatccccagtactgtagctcttctcctgaaggtctagtgttggcttttcttcctgagaaagttgaaaaacaacataaatgtctctttacattgcaaatagtagtgttttacaaaaccaccattcaaatgcaacttttcaggatcctgtctagaa

SEQ ID NO: 288014 - DNA, 3808 bp, Homo sapiens
ggcctgggccggaggggcggggtgagaaggctgcgcgcgggtaaaggggccgcctcgagcgcggtccgagcgttcagcggacgcgcgcggcctcgatctctggactcgtcacctgcccctccccctcccgccgccgtcacccaggaaaccggccgcaatcgccggccgacctgaagctggtttcatggcagcctcaaagaaggcagttttggggccattggtgggggcggtggaccagggcaccagttcgacgcgctttttggttttcaattcaaaaacagctgaactacttagtcatcatcaagtagaaataaaacaagagttcccaagagaaggatgggtggaacaggaccctaaggaaattctacattctgtctatgagtgtatagagaaaacatgtgagaaacttggacagctcaatattgatatttccaacataaaagctattggtgtcagcaaccagagggaaaccactgtagtctgggacaagataactggagagcctctctacaatgctgtggtgtggcttgatctaagaacccagtctaccgttgagagtcttagtaaaagaattccaggaaataataactttgtcaagtccaagacaggccttccacttagcacttacttcagtgcagtgaaacttcgttggctccttgacaatgtgagaaaagttcaaaaggccgttgaagaaaaacgagctctttttgggactattgattcatggcttatttggagtttgacaggaggagtcaatggaggtgtccactgtacagatgtaacaaatgcaagtaggactatgcttttcaacattcattctttggaatgggataaacaactctgcgaattttttggaattccaatggaaattcttccaaatgtccggagttcttctgagatctatggcctaatgaaagctggggccttggaaggtgtgccaatatctgggtgtttaggggaccagtctgctgcattggtgggacaaatgtgcttccagattggacaagccaaaaatacgtatggaacaggatgtttcttactatgtaatacaggccataagtgtgtattttctgatcatggccttctcaccacagtggcttacaaacttggcagagacaaaccagtatattatgctttggaaggttctgtagctatagctggtgctgttattcgctggctaagagacaatcttggaattataaagacctcagaagaaattgaaaaacttgctaaagaagtaggtacttcttatggctgctacttcgtcccagcattttcggggttatatgcaccttattgggagcccagcgcaagagggataatctgtggactcactcagttcaccaataaatgccatattgcttttgctgcattagaagctgtttgtttccaaactcgagagattttggatgccatgaatcgagactgtggaattccactcagtcatttgcaggtagatggaggaatgaccagcaacaaaattcttatgcagctacaagcagacattctgtatataccagtagtgaagccctcaatgcccgaaaccactgcactgggtgcggctatggcggcaggggctgcagaaggagtcggcgtatggagtctcgaacccgaggatttgtctgccgtcacgatggagcggtttgaacctcagattaatgcggaggaaagtgaaattcgttattctacatggaagaaagctgtgatgaagtcaatgggttgggttacaactcaatctccagaaagtggtattccataaaacctaccaactcatggattcccaagatgtgagctttttacataatgaaagaacccagcaattctgtctcttaatgcaatgacactattcatagactttgattttatttataagccacttgctgcatgaccctccaagtagacctgtggcttaaaataaagaaaatgcagcaaaaagaatgctatagaaatatttggtggttttttttttttttaaacatccacagttaaggttgggccagctacctttggggctgaccccctccattgccataacatcctgctccattccctctaagatgtaggaagaattcggatccttaccattggaatcttccatcgaacatactcaaacacttttggaccaggatttgagtctctgcatgacatatacttgattaaaaggttattactaacctgttaaaaatcagcagctctttgcttttaacagacaccctaaaagtcttcttttctacatagttgaagacagcaacatcttcactgaatgtttgaatagaaacctctactaaattattaaaatagacatttagtgttctcacagcttggatatttttctgaaaagttatttgccaaaactgaaatccttcagatgttttccatggtcccactaattataatgactttctgtctggatcttataggaaaagatactttcttttttcttccatctttcctttttatattttttactttgtatgtataacatacatgcctatatattttatacactgagggtagcccatttataaattaagagcacattatattcagaaggttctaacagggctggtcttaagtgaaccactgtgtatataaatatgttggaaaacagctgtatacatttttgggcaacggttatgcataatatttaccaggagaatttttttcttaacaagccaacatttaaaatttatgttttatgtcaataaaagaaaatatactttattgtgacttcaactatatttcttatcccttacatttttatttaattgtcttagcttaaaaaaagaagaaactgtggaatactacagtaaatattgttttcaaacacaagcaataattcaaatagttatttttcttttgaattaattttagacatattttggatcctattgaggggataagaggatgtcaaaaaagttaaatacctaagtagaaaaaaatatagaaataaagccaagaatctctttcagttcaaatgttatcaattgttaataagaaattgctatctgggatgacagaattacctctgcttagtatctcattataactgaaagaaggtttatcattacaaataccttccaatgaaaccaagaatttctcaaaatatttaatgtcacatattataagaagttacctaatcctgcttcttaacatcaatttttaaaaatatcttaaaattactttgttttgtagtaaacagtgaagaaaagattgcctcctaattatttttttcaatgagtgctgaatgggaaaacatttatatcttactataaaaggttctgttttgtttggaatcaatggtagctttattgactgttctgattgtgctgtttctaatttattgaatctgctaggttttattgatgcagccaccacttaagtgacataaatattatagaaaggtactgtgaaatgatcactttgtggcaggggtacttttaaacataaatgtttctacaaaagtaggttgagttcattgtaaataattgtgaaagccactgttcaaataattttaagattacattaatttttctataaattggaagatttataaatgtttgaaattgtacacattgatatttaatgacaaatttacttaaaataaattgaccccttgttcttacttgcatttctcatttacagactagaacttagttgaaagttaaattaagaaagatgtttcagaggccgggcacggtggctgacgcctgtaatcccagcactttgggaggccgaggtgggcagatcacctgaggtcaggagttcgggactagcctaaccgacatggagaaaccctatctctact

SEQ ID NO: 288015 - DNA, 3895 bp, Homo sapiens
ggcctgggccggaggggcggggtgagaaggctgcgcgcgggtaaaggggccgcctcgagcgcggtccgagcgttcagcggacgcgcgcggcctcgatctctggactcgtcacctgcccctccccctcccgccgccgtcacccaggaaaccggccgcaatcgccggccgacctgaagctggtttcatggcagcctcaaagaaggcagttttggggccattggtgggggcggtggaccagggcaccagttcgacgcgctttttggttttcaattcaaaaacagctgaactacttagtcatcatcaagtagaaataaaacaagagttcccaagagaaggatgggtggaacaggaccctaaggaaattctacattctgtctatgagtgtatagagaaaacatgtgagaaacttggacagctcaatattgatatttccaacataaaagctattggtgtcagcaaccagagggaaaccactgtagtctgggacaagataactggagagcctctctacaatgctgtggtgtggcttgatctaagaacccagtctaccgttgagagtcttagtaaaagaattccaggaaataataactttgtcaagtccaagacaggccttccacttagcacttacttcagtgcagtgaaacttcgttggctccttgacaatgtgagaaaagttcaaaaggccgttgaagaaaaacgagctctttttgggactattgattcatggcttatttggagtttgacaggaggagtcaatggaggtgtccactgtacagatgtaacaaatgcaagtaggactatgcttttcaacattcattctttggaatgggataaacaactctgcgaattttttggaattccaatggaaattcttccaaatgtccggagttcttctgagatctatggcctaatgaaagctggggccttggaaggtgtgccaatatctgggtgtttaggggaccagtctgctgcattggtgggacaaatgtgcttccagattggacaagccaaaaatacgtatggaacaggatgtttcttactatgtaatacaggccataagtgtgtattttctgatcatggccttctcaccacagtggcttacaaacttggcagagacaaaccagtatattatgctttggaaggttctgtagctatagctggtgctgttattcgctggctaagagacaatcttggaattataaagacctcagaagaaattgaaaaacttgctaaagaagtaggtacttcttatggctgctacttcgtcccagcattttcggggttatatgcaccttattgggagcccagcgcaagagggataatctgtggactcactcagttcaccaataaatgccatattgcttttgctgcattagaagctgtttgtttccaaactcgagagattttggatgccatgaatcgagactgtggaattccactcagtcatttgcaggtagatggaggaatgaccagcaacaaaattcttatgcagctacaagcagacattctgtatataccagtagtgaagccctcaatgcccgaaaccactgcactgggtgcggctatggcggcaggggctgcagaaggagtcggcgtatggagtctcgaacccgaggatttgtctgccgtcacgatggagcggtttgaacctcagattaatgcggaggaaagtgaaattcgttattctacatggaagaaagctgtgatgaagtcaatgggttgggttacaactcaatctccagaaagtggtgaccctagtatcttctgtagtctgcccttgggcttttttatagtgagtagcatggtaatgttaatcggagcaaggtacatctcaggtattccataaaacctaccaactcatggattcccaagatgtgagctttttacataatgaaagaacccagcaattctgtctcttaatgcaatgacactattcatagactttgattttatttataagccacttgctgcatgaccctccaagtagacctgtggcttaaaataaagaaaatgcagcaaaaagaatgctatagaaatatttggtggttttttttttttttaaacatccacagttaaggttgggccagctacctttggggctgaccccctccattgccataacatcctgctccattccctctaagatgtaggaagaattcggatccttaccattggaatcttccatcgaacatactcaaacacttttggaccaggatttgagtctctgcatgacatatacttgattaaaaggttattactaacctgttaaaaatcagcagctctttgcttttaacagacaccctaaaagtcttcttttctacatagttgaagacagcaacatcttcactgaatgtttgaatagaaacctctactaaattattaaaatagacatttagtgttctcacagcttggatatttttctgaaaagttatttgccaaaactgaaatccttcagatgttttccatggtcccactaattataatgactttctgtctggatcttataggaaaagatactttcttttttcttccatctttcctttttatattttttactttgtatgtataacatacatgcctatatattttatacactgagggtagcccatttataaattaagagcacattatattcagaaggttctaacagggctggtcttaagtgaaccactgtgtatataaatatgttggaaaacagctgtatacatttttgggcaacggttatgcataatatttaccaggagaatttttttcttaacaagccaacatttaaaatttatgttttatgtcaataaaagaaaatatactttattgtgacttcaactatatttcttatcccttacatttttatttaattgtcttagcttaaaaaaagaagaaactgtggaatactacagtaaatattgttttcaaacacaagcaataattcaaatagttatttttcttttgaattaattttagacatattttggatcctattgaggggataagaggatgtcaaaaaagttaaatacctaagtagaaaaaaatatagaaataaagccaagaatctctttcagttcaaatgttatcaattgttaataagaaattgctatctgggatgacagaattacctctgcttagtatctcattataactgaaagaaggtttatcattacaaataccttccaatgaaaccaagaatttctcaaaatatttaatgtcacatattataagaagttacctaatcctgcttcttaacatcaatttttaaaaatatcttaaaattactttgttttgtagtaaacagtgaagaaaagattgcctcctaattatttttttcaatgagtgctgaatgggaaaacatttatatcttactataaaaggttctgttttgtttggaatcaatggtagctttattgactgttctgattgtgctgtttctaatttattgaatctgctaggttttattgatgcagccaccacttaagtgacataaatattatagaaaggtactgtgaaatgatcactttgtggcaggggtacttttaaacataaatgtttctacaaaagtaggttgagttcattgtaaataattgtgaaagccactgttcaaataattttaagattacattaatttttctataaattggaagatttataaatgtttgaaattgtacacattgatatttaatgacaaatttacttaaaataaattgaccccttgttcttacttgcatttctcatttacagactagaacttagttgaaagttaaattaagaaagatgtttcagaggccgggcacggtggctgacgcctgtaatcccagcactttgggaggccgaggtgggcagatcacctgaggtcaggagttcgggactagcctaaccgacatggagaaaccctatctctact

SEQ ID NO: 288016 - DNA, 642 bp, Homo sapiens
ggcctgggccggaggggcggggtgagaaggctgcgcgcgggtaaaggggccgcctcgagcgcggtccgagcgttcagcggacgcgcgcggcctcgatctctggactcgtcacctgcccctccccctcccgccgccgtcacccaggaaaccggccgcaatcgccggccgacctgaagctggtttcatggcagcctcaaagaaggcagttttggggccattggtgggggcggtggaccagggcaccagttcgacgcgctttttggttttcaattcaaaaacagctgaactacttagtcatcatcaagtagaaataaaacaagagttcccaagagaaggatgggtggaacaggaccctaaggaaattctacattctgtctatgagtgtatagagaaaacatgtgagaaacttggacagctcaatattgatatttccaacataaaagctattggtgtcagcaaccagagggaaaccactgtagtctgggacaagataactggagagcctctctacaatgctgtggattgtcttacaaatgagtgaatgtttgccaaattgttttataacccctgctgtttgtgacatctaaaagagatcttacctccttaccctcaaaaaattaaaattacgtgtgttcacagtca

SEQ ID NO: 288017 - DNA, 3826 bp, Homo sapiens
ggcctgggccggaggggcggggtgagaaggctgcgcgcgggtaaaggggccgcctcgagcgcggtccgagcgttcagcggacgcgcgcggcctcgatctctggactcgtcacctgcccctccccctcccgccgccgtcacccaggaaaccggccgcaatcgccggccgacctgaagctggtttcatggcagcctcaaagaaggcagttttggggccattggtgggggcggtggaccagggcaccagttcgacgcgctttttggttttcaattcaaaaacagctgaactacttagtcatcatcaagtagaaataaaacaagagttcccaagagaaggatgggtggaacaggaccctaaggaaattctacattctgtctatgagtgtatagagaaaacatgtgagaaacttggacagctcaatattgatatttccaacataaaagctattggtgtcagcaaccagagggaaaccactgtagtctgggacaagataactggagagcctctctacaatgctgtggtgtggcttgatctaagaacccagtctaccgttgagagtcttagtaaaagaattccaggaaataataactttgtcaagtccaagacaggccttccacttagcacttacttcagtgcagtgaaacttcgttggctccttgacaatgtgagaaaagttcaaaaggccgttgaagaaaaacgagctctttttgggactattgattcatggcttatttggagtttgacaggaggagtcaatggaggtgtccactgtacagatgtaacaaatgcaagtaggactatgcttttcaacattcattctttggaatgggataaacaactctgcgaattttttggaattccaatggaaattcttccaaatgtccggagttcttctgagatctatggcctaatgaaaatctctcatagcgtgaaagctggggccttggaaggtgtgccaatatctgggtgtttaggggaccagtctgctgcattggtgggacaaatgtgcttccagattggacaagccaaaaatacgtatggaacaggatgtttcttactatgtaatacaggccataagtgtgtattttctgatcatggccttctcaccacagtggcttacaaacttggcagagacaaaccagtatattatgctttggaaggttctgtagctatagctggtgctgttattcgctggctaagagacaatcttggaattataaagacctcagaagaaattgaaaaacttgctaaagaagtaggtacttcttatggctgctacttcgtcccagcattttcggggttatatgcaccttattgggagcccagcgcaagagggataatctgtggactcactcagttcaccaataaatgccatattgcttttgctgcattagaagctgtttgtttccaaactcgagagattttggatgccatgaatcgagactgtggaattccactcagtcatttgcaggtagatggaggaatgaccagcaacaaaattcttatgcagctacaagcagacattctgtatataccagtagtgaagccctcaatgcccgaaaccactgcactgggtgcggctatggcggcaggggctgcagaaggagtcggcgtatggagtctcgaacccgaggatttgtctgccgtcacgatggagcggtttgaacctcagattaatgcggaggaaagtgaaattcgttattctacatggaagaaagctgtgatgaagtcaatgggttgggttacaactcaatctccagaaagtggtattccataaaacctaccaactcatggattcccaagatgtgagctttttacataatgaaagaacccagcaattctgtctcttaatgcaatgacactattcatagactttgattttatttataagccacttgctgcatgaccctccaagtagacctgtggcttaaaataaagaaaatgcagcaaaaagaatgctatagaaatatttggtggttttttttttttttaaacatccacagttaaggttgggccagctacctttggggctgaccccctccattgccataacatcctgctccattccctctaagatgtaggaagaattcggatccttaccattggaatcttccatcgaacatactcaaacacttttggaccaggatttgagtctctgcatgacatatacttgattaaaaggttattactaacctgttaaaaatcagcagctctttgcttttaacagacaccctaaaagtcttcttttctacatagttgaagacagcaacatcttcactgaatgtttgaatagaaacctctactaaattattaaaatagacatttagtgttctcacagcttggatatttttctgaaaagttatttgccaaaactgaaatccttcagatgttttccatggtcccactaattataatgactttctgtctggatcttataggaaaagatactttcttttttcttccatctttcctttttatattttttactttgtatgtataacatacatgcctatatattttatacactgagggtagcccatttataaattaagagcacattatattcagaaggttctaacagggctggtcttaagtgaaccactgtgtatataaatatgttggaaaacagctgtatacatttttgggcaacggttatgcataatatttaccaggagaatttttttcttaacaagccaacatttaaaatttatgttttatgtcaataaaagaaaatatactttattgtgacttcaactatatttcttatcccttacatttttatttaattgtcttagcttaaaaaaagaagaaactgtggaatactacagtaaatattgttttcaaacacaagcaataattcaaatagttatttttcttttgaattaattttagacatattttggatcctattgaggggataagaggatgtcaaaaaagttaaatacctaagtagaaaaaaatatagaaataaagccaagaatctctttcagttcaaatgttatcaattgttaataagaaattgctatctgggatgacagaattacctctgcttagtatctcattataactgaaagaaggtttatcattacaaataccttccaatgaaaccaagaatttctcaaaatatttaatgtcacatattataagaagttacctaatcctgcttcttaacatcaatttttaaaaatatcttaaaattactttgttttgtagtaaacagtgaagaaaagattgcctcctaattatttttttcaatgagtgctgaatgggaaaacatttatatcttactataaaaggttctgttttgtttggaatcaatggtagctttattgactgttctgattgtgctgtttctaatttattgaatctgctaggttttattgatgcagccaccacttaagtgacataaatattatagaaaggtactgtgaaatgatcactttgtggcaggggtacttttaaacataaatgtttctacaaaagtaggttgagttcattgtaaataattgtgaaagccactgttcaaataattttaagattacattaatttttctataaattggaagatttataaatgtttgaaattgtacacattgatatttaatgacaaatttacttaaaataaattgaccccttgttcttacttgcatttctcatttacagactagaacttagttgaaagttaaattaagaaagatgtttcagaggccgggcacggtggctgacgcctgtaatcccagcactttgggaggccgaggtgggcagatcacctgaggtcaggagttcgggactagcctaaccgacatggagaaaccctatctctact

SEQ ID NO: 288018 - DNA, 3449 bp, Homo sapiens
agcggagtgcaagggtagctaagttcaggtgctgtttgattccagactcagacagtatcacctgcatccccctcaagcctgccttttctgggatggctcctgatgtggcatattcaactcccacttcatgagggcagcaggcccaagccacacactgccaagtgtggcttgatctaagaacccagtctaccgttgagagtcttagtaaaagaattccaggaaataataactttgtcaagtccaagacaggccttccacttagcacttacttcagtgcagtgaaacttcgttggctccttgacaatgtgagaaaagttcaaaaggccgttgaagaaaaacgagctctttttgggactattgattcatggcttatttggagtttgacaggaggagtcaatggaggtgtccactgtacagatgtaacaaatgcaagtaggactatgcttttcaacattcattctttggaatgggataaacaactctgcgaattttttggaattccaatggaaattcttccaaatgtccggagttcttctgagatctatggcctaatgaaagctggggccttggaaggtgtgccaatatctgggtgtttaggggaccagtctgctgcattggtgggacaaatgtgcttccagattggacaagccaaaaatacgtatggaacaggatgtttcttactatgtaatacaggccataagtgtgtattttctgatcatggccttctcaccacagtggcttacaaacttggcagagacaaaccagtatattatgctttggaaggttctgtagctatagctggtgctgttattcgctggctaagagacaatcttggaattataaagacctcagaagaaattgaaaaacttgctaaagaagtaggtacttcttatggctgctacttcgtcccagcattttcggggttatatgcaccttattgggagcccagcgcaagagggataatctgtggactcactcagttcaccaataaatgccatattgcttttgctgcattagaagctgtttgtttccaaactcgagagattttggatgccatgaatcgagactgtggaattccactcagtcatttgcaggtagatggaggaatgaccagcaacaaaattcttatgcagctacaagcagacattctgtatataccagtagtgaagccctcaatgcccgaaaccactgcactgggtgcggctatggcggcaggggctgcagaaggagtcggcgtatggagtctcgaacccgaggatttgtctgccgtcacgatggagcggtttgaacctcagattaatgcggaggaaagtgaaattcgttattctacatggaagaaagctgtgatgaagtcaatgggttgggttacaactcaatctccagaaagtggtattccataaaacctaccaactcatggattcccaagatgtgagctttttacataatgaaagaacccagcaattctgtctcttaatgcaatgacactattcatagactttgattttatttataagccacttgctgcatgaccctccaagtagacctgtggcttaaaataaagaaaatgcagcaaaaagaatgctatagaaatatttggtggttttttttttttttaaacatccacagttaaggttgggccagctacctttggggctgaccccctccattgccataacatcctgctccattccctctaagatgtaggaagaattcggatccttaccattggaatcttccatcgaacatactcaaacacttttggaccaggatttgagtctctgcatgacatatacttgattaaaaggttattactaacctgttaaaaatcagcagctctttgcttttaacagacaccctaaaagtcttcttttctacatagttgaagacagcaacatcttcactgaatgtttgaatagaaacctctactaaattattaaaatagacatttagtgttctcacagcttggatatttttctgaaaagttatttgccaaaactgaaatccttcagatgttttccatggtcccactaattataatgactttctgtctggatcttataggaaaagatactttcttttttcttccatctttcctttttatattttttactttgtatgtataacatacatgcctatatattttatacactgagggtagcccatttataaattaagagcacattatattcagaaggttctaacagggctggtcttaagtgaaccactgtgtatataaatatgttggaaaacagctgtatacatttttgggcaacggttatgcataatatttaccaggagaatttttttcttaacaagccaacatttaaaatttatgttttatgtcaataaaagaaaatatactttattgtgacttcaactatatttcttatcccttacatttttatttaattgtcttagcttaaaaaaagaagaaactgtggaatactacagtaaatattgttttcaaacacaagcaataattcaaatagttatttttcttttgaattaattttagacatattttggatcctattgaggggataagaggatgtcaaaaaagttaaatacctaagtagaaaaaaatatagaaataaagccaagaatctctttcagttcaaatgttatcaattgttaataagaaattgctatctgggatgacagaattacctctgcttagtatctcattataactgaaagaaggtttatcattacaaataccttccaatgaaaccaagaatttctcaaaatatttaatgtcacatattataagaagttacctaatcctgcttcttaacatcaatttttaaaaatatcttaaaattactttgttttgtagtaaacagtgaagaaaagattgcctcctaattatttttttcaatgagtgctgaatgggaaaacatttatatcttactataaaaggttctgttttgtttggaatcaatggtagctttattgactgttctgattgtgctgtttctaatttattgaatctgctaggttttattgatgcagccaccacttaagtgacataaatattatagaaaggtactgtgaaatgatcactttgtggcaggggtacttttaaacataaatgtttctacaaaagtaggttgagttcattgtaaataattgtgaaagccactgttcaaataattttaagattacattaatttttctataaattggaagatttataaatgtttgaaattgtacacattgatatttaatgacaaatttacttaaaataaattgaccccttgttcttacttgcatttctcatttacagactagaacttagttgaaagttaaattaagaaagatgtttcagaggccgggcacggtggctgacgcctgtaatcccagcactttgggaggccgaggtgggcagatcacctgaggtcaggagttcgggactagcctaaccgacatggagaaaccctatctctact

SEQ ID NO: 288019 - DNA, 1857 bp, Homo sapiens
ggcctgggccggaggggcggggtgagaaggctgcgcgcgggtaaaggggccgcctcgagcgcggtccgagcgttcagcggacgcgcgcggcctcgatctctggactcgtcacctgcccctccccctcccgccgccgtcacccaggaaaccggccgcaatcgccggccgacctgaagctggtttcatggcagcctcaaagaaggcagttttggggccattggtgggggcggtggaccagggcaccagttcgacgcgctttttggttttcaattcaaaaacagctgaactacttagtcatcatcaagtagaaataaaacaagagttcccaagagaaggatgggtggaacaggaccctaaggaaattctacattctgtctatgagtgtatagagaaaacatgtgagaaacttggacagctcaatattgatatttccaacataaaagctattggtgtcagcaaccagagggaaaccactgtagtctgggacaagataactggagagcctctctacaatgctgtggtgtggcttgatctaagaacccagtctaccgttgagagtcttagtaaaagaattccaggaaataataactttgtcaagtccaagacaggccttccacttagcacttacttcagtgcagtgaaacttcgttggctccttgacaatgtgagaaaagttcaaaaggccgttgaagaaaaacgagctctttttgggactattgattcatggcttatttggagtttgacaggaggagtcaatggaggtgtccactgtacagatgtaacaaatgcaagtaggactatgcttttcaacattcattctttggaatgggataaacaactctgcgaattttttggaattccaatggaaattcttccaaatgtccggagttcttctgagatctatggcctaatgaaagctggggccttggaaggtgtgccaatatctgggtgtttaggggaccagtctgctgcattggtgggacaaatgtgcttccagattggacaagccaaaaatacgtatggaacaggatgtttcttactatgtaatacaggccataagtgtgtattttctgatcatggccttctcaccacagtggcttacaaacttggcagagacaaaccagtatattatgctttggaaggttctgtagctatagctggtgctgttattcgctggctaagagacaatcttggaattataaagacctcagaagaaattgaaaaacttgctaaagaagtaggtacttcttatggctgctacttcgtcccagcattttcggggttatatgcaccttattgggagcccagcgcaagagggataatctgtggactcactcagttcaccaataaatgccatattgcttttgctgcattagaagctgtttgtttccaaactcgagagattttggatgccatgaatcgagactgtggaattccactcagtcatttgcaggtagatggaggaatgaccagcaacaaaattcttatgcagctacaagcagacattctgtatataccagtagtgaagccctcaatgcccgaaaccactgcactgggtgcggctatggcggcaggggctgcagaaggagtcggcgtatggagtctcgaacccgaggatttgtctgccgtcacgatggagcggtttgaacctcagattaatgcggagggtacatttaaagaatgaaatgttcagtgatatactgtgaaaacgaccttagtgcacgggagttttgtttttctgtttagttaaaagttaaggaaccaagtaaaatagtaaatgttatcattgcagattcggctgccaagcatattgggctttactgaataaatgtgaatgagagaaatcgttgcttatca

SEQ ID NO: 288020 - DNA, 432 bp, Homo sapiens
tggcacattgctacttgtgttcactcttgttgcagctatgttagtagagccaaaattttgtgactattcataatcctttttttaaattttattagaaagctggggccttggaaggtgtgccaatatctggggtaagtttcatcaccaagtgtctccccatccccacccttccccatgttatggctttcctcctcttagttcatcagtgtgcctctttttaaactagggaaaacaagtaaaagttgcaaaattggctaattcttgttcttacatgtcatactgtgggccattgagaatcttttgaataaattaattttaactctcccttcccatacctattatcttacatattaacaaatggtattaacaaatggggaaaatggccaaatggagaaaatgcaaggaaatagacagttcattctttgataaata

SEQ ID NO: 288021 - DNA, 854 bp, Homo sapiens
ggaatatattgcataatcttattaatttataatagccatttgtggaagctgctcctggtgatagctcaatttttcttaaaattactggcttaaatggaaatgatgcttcttattctgtatgttcccatgaaagtgaaacttaaaaaaaaattcatgattagggtttcatgaaaggccttgtttctatgaaaattgagacaggttgcatctctctaagctaaaagatgggctatgtgtctagagtcttagacttctaaaatgcatgtggtcactatatgtaggttatctcttcggtgacatacactgcaatttgagagggctggaaattgtttgccttggtaaacgattagcaacagtggcaatatttgttaattttggaattggccctgtttgttgcattttaattgtgaggcatgatttagaaatcatatggactttctagcttaataaatgattgaatcatctgcattgctttaactcctgaattgtatgcatgtattattgacatatatggtttttgttccccatttcaggtattccataaaacctaccaactcatggattcccaagatgtgagctttttacataatgaaagaacccagcaattctgtctcttaatgcaatgacactattcatagactttgattttatttataagccacttgctgcatgaccctccaagtagacctgtggcttaaaataaagaaaatgcagcaaaaagaatgctatagaaatatttggtggttttttttttttttaaacatccacagttaaggttgggccagctacctttggggctgaccccctccattgccataacatcctgctccattccctctaagatgtaggaagaa

SEQ ID NO: 288022 - DNA, 2666 bp, Homo sapiens
  misc_feature (92)..(92): n is a, c, g, or t
gctgaacccccacgaggcagagtccctggcgctggtgggcgccatgattgaccaggtcctggagctacacccaggcgcccagcggctgcacntcgggtgtgatgaggtctattacctcggagagggggaggcctcgcgccggtggctacagcaagagcagaacagcacggggaagttgtgcctgtcacacatgcgggcggtggccagcggcgtgaaggcccggcgccccagcgtgacacccctggtgtgggacgacatgctccgagacctgcctgaggaccagctcgcagcgtccggggtgccgcagctggtggagccggtgctctgggactacacggccgacctggatgtgcacggcaaggtcctcctcatgcagaagtaccggcggtgcggctttccgcagctgtgggcagccagtgccttcaagggtgccacggggcccagccaggccgtgccccctgttgagcaccacctcaggaaccacgtgcagtggctgcaggtggcgggcagcgggcccacggactcactgcagggcatcatcctgaccggctggcagaggtacgaccactactctgtgctgtgcgagctgctgcccgcaggagtcccgtccctggccgcctgcctgcagttgcttctacgcggtatgtctggtctggccaccccaagccccaccggcccctccccgaaagacccggagggcaggaggccaagcacccagtgctccaaccaccctgctggactgtggtggtcctcacagtcggaggatggtctcaccgccccagctcagccacccacctgccctgaagtccacccaggctgggcctgtgtctgggtctccaggcctaagcccaaagcaggctggagagtgacgcgggaggcacccctcagacacagtgaatccgcagaaatgcacgcaggtcggaggtggggaacggctccacctttgctgcacacacgtcctgcccacctggccgagcaggtgtggggctcaggcgcccggccctggaaggccccgcaccctggacccagcactcacacttccaggtctcctgagggagcagcgggacccatgggcaggggcaggcaccggggaacccttggggtcggcagggggcttggccagaggagctgtgtgtgtggaaactcgcaggccacacgggaaattagcgactgcgtggtgctgatgcagaaagaaaaatggccgagacgcgcggagaggtatcccgcaggcgcggcggcccagggacggggacgcggccggtgagaggacgcagaatgagatcagattgacttctcagttgctgactctcaactgcttagaaaggggcagaaacgataaaaacagacacccctgtaccccacactaaagagctgtgttaatattgacggtatttgcagtgtcccttgcccacggccccatccgccacccgtgactggggcacttccctcctgccctctggccgtcagcctcttgcagcaagcatttccatgaacaccaagtcggagattcgtccacgctggtgcctgcaggcctcatgggtttgtttcgggtgctctagaatattccatcgattgtgtaaaacacagtggcaaactctgcgtgagccctggacacctgtgtgggtcgggctgcgcccagcaggaagagccacttgctgtccgggtgttgctgctggcaacacagtcttacttctgttttctgatttttaaaataaggaacgtatttcacgtgtttaaagagaagcagcaggcccatttgcccccaggtccccttggggccggcacacgcggggctgggcctggccagtggctctccattgccgcccgcccactgccccagtacctaggcctgcaggtcccaatgtagccccctcccctcctccagaggcccctccaaccgccccgctcatttgtgatttcaggaggatttgatgaagatgttaaagcgaaagtggagaaccttctcgggatttccagcctggaaaaaacggaccctgttagggagggggccggctccttccctggcagcaacatccttgcccttgtcacacaagtcagcctccatctgcgcagctctgtggatgcgctgctggagggcaacaggtatgtcactggctggttcagcccctaccaccgccagcggaagctcatccacccggtcatggttcagcacatccagcccgcagcgctcagcctcctggcacagtggagcaccctcgtgcaggagctggaggctgccctgcagctggctttctacccggatgccgtggaggagtggctggaggaaaacgtgcaccccagcctgcagcggctgcaagctctgctgcaggacctcagcgaggtgtctgcccccccgctgccacccaccagccctggcagggacgttgctcaggacccctgaggggagagctcatgccagggggctcctgctggaggctgggggggctctgcactgccaaatggcctgggcaatacgggcccacgtgggcgtcgtgccctctggcccagcagtgtcttgcccacactcagttcctgagggccctgggcagcccctgggggagagactagaaaacacagaaggaagcagcacagggagacccgctttgtgatctgcatgtgtgacactgattctttggaaataaagagtggaagctgcaggtgacacg

SEQ ID NO: 288023 - DNA, 1385 bp, Homo sapiens
  misc_feature (92)..(92): n is a, c, g, or t
gctgaacccccacgaggcagagtccctggcgctggtgggcgccatgattgaccaggtcctggagctacacccaggcgcccagcggctgcacntcgggtgtgatgaggtctattacctcggagagggggaggcctcgcgccggtggctacagcaagagcagaacagcacggggaagttgtgcctgtcacacatgcgggcggtggccagcggcgtgaaggcccggcgccccagcgtgacacccctggtgtgggacgacatgctccgagacctgcctgaggaccagctcgcagcgtccggggtgccgcagctggtggagccggtgctctgggactacacggccgacctggatgtgcacggcaaggtcctcctcatgcagaagtaccggcggtgcggctttccgcagctgtgggcagccagtgccttcaagggtgccacggggcccagccaggccgtgccccctgttgagcaccacctcaggaaccacgtgcagtggctgcaggtggcgggcagcgggcccacggactcactgcagggcatcatcctgaccggctggcagaggtacgaccactactctgtgctgtgcgagctgctgcccgcaggagtcccgtccctggccgcctgcctgcagttgcttctacgcggaggatttgatgaagatgttaaagcgaaagtggagaaccttctcgggatttccagcctggaaaaaacggaccctgttagggagggggccggctccttccctggcagcaacatccttgcccttgtcacacaagtcagcctccatctgcgcagctctgtggatgcgctgctggagggcaacaggtatgtcactggctggttcagcccctaccaccgccagcggaagctcatccacccggtcatggttcagcacatccagcccgcagcgctcagcctcctggcacagtggagcaccctcgtgcaggagctggaggctgccctgcagctggctttctacccggatgccgtggaggagtggctggaggaaaacgtgcaccccagcctgcagcggctgcaagctctgctgcaggacctcagcgaggtgtctgcccccccgctgccacccaccagccctggcagggacgttgctcaggacccctgaggggagagctcatgccagggggctcctgctggaggctgggggggctctgcactgccaaatggcctgggcaatacgggcccacgtgggcgtcgtgccctctggcccagcagtgtcttgcccacactcagttcctgagggccctgggcagcccctgggggagagactagaaaacacagaaggaagcagcacagggagacccgctttgtgatctgcatgtgtgacactgattctttggaaataaagagtggaagctgcaggtgacacg

SEQ ID NO: 288024 - DNA, 2004 bp, Homo sapiens
  misc_feature (92)..(92): n is a, c, g, or t
gctgaacccccacgaggcagagtccctggcgctggtgggcgccatgattgaccaggtcctggagctacacccaggcgcccagcggctgcacntcgggtgtgatgaggtctattacctcggagagggggaggcctcgcgccggtggctacagcaagagcagaacagcacggggaagttgtgcctgtcacacatgcgggcggtggccagcggcgtgaaggcccggcgccccagcgtgacacccctggtgtgggacgacatgctccgagacctgcctgaggaccagctcgcagcgtccggggtgccgcagctggtggagccggtgctctgggactacacggccgacctggatgtgcacggcaaggtcctcctcatgcagaagtaccggcggtgcggctttccgcagctgtgggcagccagtgccttcaagggtgccacggggcccagccaggccgtgccccctgttgagcaccacctcaggaaccacgtgcagtggctgcaggtggcgggcagcgggcccacggactcactgcagggcatcatcctgaccggctggcagaggtacgaccactactctgtgctgtgcgagctgctgcccgcaggagtcccgtccctggccgcctgcctgcagttgcttctacgcggtatgtctggtctggccaccccaagccccaccggcccctccccgaaagacccggagggcaggaggccaagcacccagtgctccaaccaccctgctggactgtggtggtcctcacagtcggaggatggtctcaccgccccagctcagccacccacctgccctgaagtccacccaggctgggcctgtgtctgggtctccaggcctaagcccaaagcaggctggagagtgacgcgggaggcacccctcagacacagtgaatccgcagaaatgcacgcaggtcggaggtggggaacggctccacctttgctgcacacacgtcctgcccacctggccgagcaggtgtggggctcaggcgcccggccctggaaggccccgcaccctggacccagcactcacacttccaggtctcctgagggagcagcgggacccatgggcaggggcaggcaccggggaacccttggggtcggcagggggcttggccagaggagctgtgtgtgtggaaactcgcaggccacacgggaaattagcgactgcgtggtgctgatgcagaaagaaaaatggccgagacgcgcggagaggtatcccgcaggcgcggcggcccagggacggggacgcggccggaggatttgatgaagatgttaaagcgaaagtggagaaccttctcgggatttccagcctggaaaaaacggaccctgttagggagggggccggctccttccctggcagcaacatccttgcccttgtcacacaagtcagcctccatctgcgcagctctgtggatgcgctgctggagggcaacaggtatgtcactggctggttcagcccctaccaccgccagcggaagctcatccacccggtcatggttcagcacatccagcccgcagcgctcagcctcctggcacagtggagcaccctcgtgcaggagctggaggctgccctgcagctggctttctacccggatgccgtggaggagtggctggaggaaaacgtgcaccccagcctgcagcggctgcaagctctgctgcaggacctcagcgaggtgtctgcccccccgctgccacccaccagccctggcagggacgttgctcaggacccctgaggggagagctcatgccagggggctcctgctggaggctgggggggctctgcactgccaaatggcctgggcaatacgggcccacgtgggcgtcgtgccctctggcccagcagtgtcttgcccacactcagttcctgagggccctgggcagcccctgggggagagactagaaaacacagaaggaagcagcacagggagacccgctttgtgatctgcatgtgtgacactgattctttggaaataaagagtggaagctgcaggtgacacg

SEQ ID NO: 288025 - DNA, 812 bp, Homo sapiens
caccatacatcagtcatctggcagcagctcgagaagcatgtcctccacgccgtcaatctgagaggcagagagagagagaaggcattgatcggccagagccctccactccctccattcctcactcctgcgccttcccctagctggaaacagcaggctggaatgcaatggtgtgatcttggctcactgcgacctccacctcctgggttcaagcgattctcctgcttctgcctcccgagtagctgggattacagacaaagaattcaagactaaactgggcatggtgacacgcacctgtagtctcagctacttgggaggctgaggcaggagaatcacatgaacctggcaggcggaggttgcagtgagccgagattgtgccactgcactccagcctggccacagagcgagactccgtctcaaaaaaaaaaaaaagagaaaaaaaggaaaaaagaagaagtcaagactaagaagagtgacgtttgaagtaattcacccacagacacccagctagtgagtggcagacctggaagacaaactagttctgtttggcatcagaatctatgctgtcagccacctcaccacattcatgtgacatccaacaaagtggtgccttcacctgctactaagtcttgctagggctagttccagagccaagactatgaagtggacaatgatctatgaagcgctaagtgaacagatgtcatgtaaatagcttggatctctacgtgcatgtgtgcattgtatatgtttaccaaagaccttgttacagtgtttttaggcatggctcactttataaaggtcatcacagttggcca

SEQ ID NO: 288026 - DNA, 939 bp, Homo sapiens
caccatacatcagtcatctggcagcagctcgagaagcatgtcctccacgccgtcaatctgagaggcagagagagagagaaggcattgatcggccagagccctccactccctccattcctcactcctgcgccttcccctagctggaaacagcaggtaggaacccaggtgtgaggatttcaggggctcttggagactgcccctcctcccaccagccttcagcctgtgactgcccaccagagatgtcttcctgcggctagctggtggctgggaggaagtggaggctggaatgcaatggtgtgatcttggctcactgcgacctccacctcctgggttcaagcgattctcctgcttctgcctcccgagtagctgggattacagacaaagaattcaagactaaactgggcatggtgacacgcacctgtagtctcagctacttgggaggctgaggcaggagaatcacatgaacctggcaggcggaggttgcagtgagccgagattgtgccactgcactccagcctggccacagagcgagactccgtctcaaaaaaaaaaaaaagagaaaaaaaggaaaaaagaagaagtcaagactaagaagagtgacgtttgaagtaattcacccacagacacccagctagtgagtggcagacctggaagacaaactagttctgtttggcatcagaatctatgctgtcagccacctcaccacattcatgtgacatccaacaaagtggtgccttcacctgctactaagtcttgctagggctagttccagagccaagactatgaagtggacaatgatctatgaagcgctaagtgaacagatgtcatgtaaatagcttggatctctacgtgcatgtgtgcattgtatatgtttaccaaagaccttgttacagtgtttttaggcatggctcactttataaaggtcatcacagttggcca

SEQ ID NO: 288027 - DNA, 761 bp, Homo sapiens
  misc_feature (761)..(761): n is a, c, g, or t
tgtgaatggctcttgactccagacctagatagccacagagcaagatgacaagctcgctaataagctctgttggggaggtctcagcccaggccagagctgtgaagtgagaaataagtccagtttaaatagtgctgctgggatggacttttgtggccagggaaggggtacccaggagccagtgtggccactgacccagcctcatcaatggccctaggatccagaatgccacaaacaatggagcaagaatcagatctgtgtgtctgggctggaatgcaatggtgtgatcttggctcactgcgacctccacctcctgggttcaagcgattctcctgcttctgcctcccgagtagctgggattacagacaaagaattcaagactaaactgggcatggtgacacgcacctgtagtctcagctacttgggaggctgaggcaggagaatcacatgaacctggcaggcggaggttgcagtgagccgagattgtgccactgcactccagcctggccacagagcgagactccgtctcaaaaaaaaaaaaaagagaaaaaaaggaaaaaaaaaaatccgggggcattatagggcgggggggcgagacaaaagcaggggtatatgaacatgtgcgcacctgtgtggccatcaacgtgtgtttcctggaccccaagtttttttgtgttccccaacgggggaaatctgcggagggatcccataaaagagacacgcatttaaactctcagataagccagggtaccctggattaaggn

SEQ ID NO: 288028 - DNA, 332 bp, Homo sapiens
gggctcagacaaggagctatggtgagaatccggaccagcctgggagttgtgtgtcataggtgccatgatggaggtggtgggtagacatcataatgcctgttagcatgtaatagatgcctatgatgtgcccaaacttgtattggattcatcccatgccttccttcatttgctccttataataaccctacaaagcaggtttcattatcaccatcagttattattattcttatttttcagacaaagaattcaagactaaactgggcatggtgacacgcacctgtagtctcagctacttgggaggctgaggcaggagaatcacatgaacctggcag

SEQ ID NO: 288029 - DNA, 1445 bp, Homo sapiens
ggcgaagggggctgggcgggtggcgccgccgcttgggcgccgggagggtggcagcacgcgtgggcgcggcgagggctgccttctccctcgccctcccgcccccaggagtccggctccccgacggcagagcggcggggaaagggtggggggagggagctggaggaaaagaaggggtcggccgagtctcttaccttgctctccgctgggagttgggcgggctgggtggcccggggaggggaaaagggtcgggggagggggtggggaaaggggggagcccttgcgaggtgtagcttccgagcagctcccgccgccgccacagccggcgcctcctttccgattcactcaaacaaacaagatggctgccgttacgccgcggctcttcctgccgcccaaatcctcggttcaaatcggcaggatgtttacggtcaaaatggtacctgtgcgcctgcgccagcccaagcccccccctccccccagaaggagcggccaggcgcaatgactatttccttttctttggaacccgccctctgtttgtggagtccacaactgagcaagcgcaaagagatctttccagtgatgaaagaaattgaagaggacacacaaaaatggaaatatattccatgttcatggattggaagaatcaatattgttaaaatttccatactacccagagcaatctacagattcaatgtaatccctatcaaaatatcaatgacattcttcacagaaagaggaaaaaaatcctaaaatttatatggaaccacaataagaccaagaatagccaaagcaatcctgagcaaaagaataaagctggaggcatcacattacctgacttcaaattatactacaaagtgatagtaaacaaaacagcatggtgctggcataaaaacagacacatagactaacggaacagaatagaggacctataaataaatcaatacatatacagtcaactaatttctgacaaagctgccaagaacatacgttgggaaaaggatggtctcttccaaaaattgttctggaaaaactagataactatatgtagaagaatgaaacagatcactatcttttgccatattaaaaaaatcaaaacaaaatggcttgaagactggaatctaagatttgaaactattgaaactactagaagaaaacgttagggaaatgctccagaaccaaatatttcttagtaagaccttaaaagcataggcaagcaaagcaaaaatggacaaatgggatcatgccaagctaagaaccttctgcaaagcaaacaacaaagtgaagagacaacccatcaagtgggggaaaatacttgcaaactactcatctatcacagaattaatagccataatatataaggagctcaaacaatataataggaaaataatccaattaaaattgagcaaaagacctgaatggttatttctcaaaaaagacatacaaatggc

SEQ ID NO: 288030 - DNA, 4369 bp, Homo sapiens
  misc_feature (33)..(33): n is a, c, g, or t
  misc_feature (100)..(100): n is a, c, g, or t
  misc_feature (1224)..(1224): n is a, c, g, or t
cccgggcctcctcccgctttctctctccgcttnccctggagcctccgaggagtccgcagccgctgggcgcccgggaagatggcggcggcggcgggagacngcggcggcgaggggggcgcgggcctgggcagcgcggcggggctggggccggggccggggctgcgcgggcagggcccctcagccgaagcgcacgagggcgccccggacccgatgcccgccgcgctgcaccctgaggaggtcgccgcgcgactgcagcggatgcagcgggagctgagcaaccgcaggaaaatcctggtgaaaaacctgccccaggacagcaactgccaggaagttcatgatttgttaaaagactatgacttaaaatattgttatgtggacagaaataaacgaacagcttttgttaccttattgaatggggaacaagcccagaacgcaattcagatgtttcatcaatattcttttagaggaaaagacttaatagtccagcttcagccaacagatgctttgttgtgtattaccaacgtgcccatttcttttacatcagaagagtttgaagaacttgttcgtgcttatggaaatattgagagatgttttctggtctatagtgaagttactggccattccaaaggctatggatttgtggaatacatgaaaaaggactttgctgcaaaggctagactggagctattgggtagacagttgggagcatcagcactctttgcacaatggatggatgttaatctattggcttcagagctcattcattctaagtgcctttgtattgataaactccccagtgactacagggattcagaagagctgttgcaaattttttccagtgtccataaacctgtgttttgccagcttgcacaggatgaaggtagttacgttggtggctttgcagtggttgaatatagcactgcggagcaggctgaagaggtccagcaggcagcagacggtatgaccatcaagggcagcaaagtccaggtttccttctgtgctcctggagcgccagggcgaagtacattagcagcattgatagcggctcaacgtgtgatgcacagtaatcaaaagggcttacttccagagccaaatccagtacaaattatgaaaagtttaaacaaccctgccatgttgcaagttcttctacagccccagttatgtggacgagctgttaaaccagccgttcttggaacacctcacagcttgccacatctgatgaanccatccatctctcctgcatttttacatttgaataaagcacatcagaatctttctcatataccactggcacaacaacaattaatgaagtttgagaatattcatactaataataaacccggcttacttggagagcccccagctgtggtacttcagactgcactagggatagggtcagtgcttccattgaaaaaggagttgggacatcatcatggagaagcacataaaacatctagcctgattccaactcaaacaacgataacagctggaatgggcatgttaccattctttccaaatcagcacattgctggacaggctgggccagggcacagtaatactcaggagaaacagccagccacggtgggaatggcagaaggaaatttctcagggtcgcagccttatcttcagagctttccaaaccttgctgctggaagcttgctggtgggacaccataagcagcagcaaagccagccaaaaggcacagagataagttcaggggctgcctctaagaatcaaacttcactcttgggagaaccaccaaaagaaattcggctcagtaaaaatccatacttgaatttggcaagtgtgttgcccagtgtgtgcttatcatcccctgcaagtaaaaccactcttcataagactggaattgcaagcagcattctggatgcaatctctcagggaagtgaatcacaacacgcattggaaaagtgcattgcttattctccaccttttggtgattatgcacaggtgtcatctttaagaaatgaaaagcgaggctcatcatatctcatctctgccccagaaggtggttcagtggaatgtgttgaccagcattctcagggcacaggagcatattacatggaaacttacttaaaaaagaagcgagtatactgagttaagctctctcctaataaccccctaaggttctctgcagtatctctgctgttcatcgctgccttaacttcattcaaactagccatatcctttaaatacgggtttatagtttcccagaaggaactgtgttgtgcagcaggcagaaatgccaaataaaaaatagcaataagaagagacatcaattgaggacattttccactagagtcagatgcatcttaatcagtgtgctaacttacaatccattggagaaactaacaatgttccaatattccttgatttaggactgggaataattctgacaccatatataaaagaagtttgaagcaataaatgggaaacagtgttgtttcctgagccttagaagaatgagtttcttataagccaatgtgcatttcaatttactttccctagaagtaattgcatttatagatttttaggacttttcctagaactacaagggtgcaagtaccaaatgtgctgatggtaatattataaagatgctctacatgcacactcaattacgcccacaccagccatgcaaaattaaacccggtaagagagtgacagtgatgtccaaggtatccactactaccgatgctttaagatgttgtttaccatttataccttctgtgaaaaatagaaggtattttaagaaaagtaactttggtgatctaataaaagggtttggcaaactacaccctgggtccacatttggtctaccacccgcttttgtgctgcctgcaagctaagactaatgtttacatttttaaatggttggaggaaaaaagaaaacttatgacatgaaatttatatgaaattcagatttcagtgtccataaataaacttttattgggacgttgccatgctcattcatttacgtgttgtctgtggcactcttacgctacaagggcagaactgattagcttcaacagagactgtatggcctacaaagaccatatggcctaaaatttcaagtatctggccatttatatatagtttgctgatccctgatctaatagcactaattctaatagcaactattcctttcaattcacctaaagacagacctttagcctttagacagacttgtaagtggaaaggaacatgggtttctgtgctcatttcatagcgtagactagtaatgatctaatgactagaatggggcctattttgatcactaaatgccctatttccacaatatagtatagtaaagcagtcaatactgcactttctgatggagtcttaaggagtcacagtatttataaccattttgagctaataagctatacctcactctctgctttctctctcactctttttgatagtgtgttagggtgaaaaatcagttatttaacccaatttacttgtgaaagaagttttatctttatggactatgatgacttttgacatcaccatttcttgaagaccttggtattaaatgcatgagaaaccttttgccatctagaaatttctaagtttgtttatgttataagactgtaattaattgatagggaatttgggatctcaatccggggctttttgaaatcagatcattaaatatctcgtcactttggggacttgttatttttaactatgatgtggatatcctgttttaattatgaagtctagaattggtacatatgttgtatgctttgtaaagaatttcacttggtctaatttattgcatatactagcttctgttggaaaatgactgacagctagaaagtttaaggtaatttctaagtatactacctataagtaactgataagaattaggcatcattcagtgatatagcagatgactaatgggtttttcaggccctgcacttctctttcccattttcctgttgcattcagcctcttcaatgcttagtcacacctccactatagtacaaacaaacaaacaaacagaagaaaggaaagatggtgaattttgcaacagagctgcaaaaagtcagtcaaagcaggaagaggttgaaggaactaaaacaaacaaacaaaggtgtctggactacagcacagtggacatgccatccatactggcctgtgccccgttatcaatcactgggcacaacagtgaagaagtgcaaatcaagtggtgtttgtttgtttgtttgtagtaaggaccgtaacccaccccttcctccccccaaaactatactgttatttttctatgtaagcaaattgtttgaaatgctttgaaaatgaaatcttaatattaaaaggcatatgcatgtaaaaatctttagtatat

SEQ ID NO: 288031 - DNA, 641 bp, Homo sapiens
tatgtatatatatcagacagagacattttattatatcattaatgtcacagaatgaagcatattgattttgaaacatttttaacaatgggagaaagttatatttttaaataaaaatttaaaaatgtttaatgcagaaataatgataaaattaattcatgtttctgtaggtctgaaatctaaaagctggacttgaagctataagaaagggacattaggggcttgattcagatctcaggagaactagtgcagtcccattttggttctccgtatacctgactccactgaagagacaagacttagaaaaggtgaagtggggctgaaggtaagggtgagactgaggagtccttgaggcagaattttctgaaaacaaatttcattttgtatttaaagggctacctgctagatgcttatattcttttcagaagaacaacaataataaatatctttaattggactgatagcagatgagcctaatggaattcactgttgacattaacatatcccaaaggaatcttctgagggatagtcaagattcccctttccccaattcttacgatggctttgaaaactagccaccagttcaattattgacatgagcttaaaaattgagcttaagatacattgtattaaaaactggcagt

SEQ ID NO: 288032 - DNA, 3302 bp, Homo sapiens
  misc_feature (33)..(33): n is a, c, g, or t
  misc_feature (100)..(100): n is a, c, g, or t
  misc_feature (1142)..(1142): n is a, c, g, or t
cccgggcctcctcccgctttctctctccgcttnccctggagcctccgaggagtccgcagccgctgggcgcccgggaagatggcggcggcggcgggagacngcggcggcgaggggggcgcgggcctgggcagcgcggcgcgctgcaccctgaggaggtcgccgcgcgactgcagcggatgcagcgggagctgagcaaccgcaggaaaatcctggtgaaaaacctgccccaggacagcaactgccaggaagttcatgatttgttaaaagactatgacttaaaatattgttatgtggacagaaataaacgaacagcttttgttaccttattgaatggggaacaagcccagaacgcaattcagatgtttcatcaatattcttttagaggaaaagacttaatagtccagcttcagccaacagatgctttgttgtgtattaccaacgtgcccatttcttttacatcagaagagtttgaagaacttgttcgtgcttatggaaatattgagagatgttttctggtctatagtgaagttactggccattccaaaggctatggatttgtggaatacatgaaaaaggactttgctgcaaaggctagactggagctattgggtagacagttgggagcatcagcactctttgcacaatggatggatgttaatctattggcttcagagctcattcattctaagtgcctttgtattgataaactccccagtgactacagggattcagaagagctgttgcaaattttttccagtgtccataaacctgtgttttgccagcttgcacaggatgaaggtagttacgttggtggctttgcagtggttgaatatagcactgcggagcaggctgaagaggtccagcaggcagcagacggtatgaccatcaagggcagcaaagtccaggtttccttctgtgctcctggagcgccagggcgaagtacattagcagcattgatagcggctcaacgtgtgatgcacagtaatcaaaagggcttacttccagagccaaatccagtacaaattatgaaaagtttaaacaaccctgccatgttgcaagttcttctacagccccagttatgtggacgagctgttaaaccagccgttcttggaacacctcacagcttgccacatctgatgaanccatccatctctcctgcatttttacatttgaataaagcacatcagaatctttctcatataccactggcacaacaacaattaatgaagtttgagaatattcatactaataataaacccggcttacttggagagcccccagctgtggtacttcagactgcactagggatagggtcagtgcttccattgaaaaaggagttgggacatcatcatggagaagcacataaaagctgcctctaagaatcaaacttcactcttgggagaaccaccaaaagaaattcggctcagtaaaaatccatacttgaatttggcaagtgtgttgcccagtgtgtgcttatcatcccctgcaagtaaaaccactcttcataagactggaattgcaagcagcattctggatgcaatctctcagggaagtgaatcacaacacgcattggaaaagtgcattgcttattctccaccttttggtgattatgcacaggtaaataattcccaggttctgatgatactcagaaaaattggttcaactatatattgagttcactgaatatgaaattgtgatttctatattattaacgtaggcaaatcaaattgcactgatctatgtatttcttactcatcatttgaaatttgggaatgtgttcaagacattatttagtatcattttgcactagatatttacctctcactgtttacctagtggttggcaaactacagcccatagaacaaatctagcccaccacctggttttgtaaataaatttgtattgtaatacagccatgtccattcattaacatattgtctatggtgctgtcatgctataataaaagagttgagtgatgacagtagagactatgtggcctgcaagattaaatatttactatctggttctttatagaaaaatgctgctaacctctggtttgcactagtgtagacctaagaaacccaagggaatgcctctgttcttctccactgattgtagatggagaaagatgatcatatttacagacactactgtgctaacttctaaaccagccaatcaataacataaaaatattatgttcataagatgtcctgtgtcattacttaaatatttcagttttgctttggcccttcttcagcttactcttagtggtgtaagctgaatatatatcatgttagccctgtgtgattatggaatcataagagtccacaagagtcttataattatcagttctgactcttactttcctagaacagccagcttcttctcagatctatcctgttcgttggagtcttgtctccactttgatttccctggagcagctttgtgtttgcctgacccatccctaataaacttagaaaagaaaaccacttagaacaattgacgcctgattataagagtactagaacagcccaagttctgtaaaaatggtgcagctggatattagtgaaatatttgccatctcttatatacctgggacaagacggaaaaatatgggttgggtagatgatgtaattaggtgacagtatatctatatttagagaacagtgatcacaaattgctgcagtctgaaggcattctcttatattgattcataagagtcatcttcagtcctttattagataacatttgaagtaatgacttagataaagacattaattgtaaaatttacaagatatagtcctgtacaattccaatttgtttcttttcaagaaacaaactttttataaacaggagaagcacaataaattttttaaaaattcattaaatacatatttaagctttaaaaattttttgaacttttatttctttttaaatttgcctttttcttagcagttttgcttattagattactgtgatttattgtatacttatatccatggaaagactttctcattcacacatggagaaattctgtgataatgatgccttttgcattactgtatgtcttctgcctccacacttgcttgcccagagatatggtggggaaatgaatcctccctgcactgttcagtgtctcctttgacagtccctgcttctagcgcacgcttgttcataaaatgggatttgttctctctctcgtgttctttcttccttataaacttaattaaatgttactaatggaacattaaagtacatggaattaaactaatggaatactaaaataaccattatagaaaaag

SEQ ID NO: 288033 - DNA, 4425 bp, Homo sapiens
  misc_feature (33)..(33): n is a, c, g, or t
  misc_feature (100)..(100): n is a, c, g, or t
  misc_feature (1142)..(1142): n is a, c, g, or t
cccgggcctcctcccgctttctctctccgcttnccctggagcctccgaggagtccgcagccgctgggcgcccgggaagatggcggcggcggcgggagacngcggcggcgaggggggcgcgggcctgggcagcgcggcgcgctgcaccctgaggaggtcgccgcgcgactgcagcggatgcagcgggagctgagcaaccgcaggaaaatcctggtgaaaaacctgccccaggacagcaactgccaggaagttcatgatttgttaaaagactatgacttaaaatattgttatgtggacagaaataaacgaacagcttttgttaccttattgaatggggaacaagcccagaacgcaattcagatgtttcatcaatattcttttagaggaaaagacttaatagtccagcttcagccaacagatgctttgttgtgtattaccaacgtgcccatttcttttacatcagaagagtttgaagaacttgttcgtgcttatggaaatattgagagatgttttctggtctatagtgaagttactggccattccaaaggctatggatttgtggaatacatgaaaaaggactttgctgcaaaggctagactggagctattgggtagacagttgggagcatcagcactctttgcacaatggatggatgttaatctattggcttcagagctcattcattctaagtgcctttgtattgataaactccccagtgactacagggattcagaagagctgttgcaaattttttccagtgtccataaacctgtgttttgccagcttgcacaggatgaaggtagttacgttggtggctttgcagtggttgaatatagcactgcggagcaggctgaagaggtccagcaggcagcagacggtatgaccatcaagggcagcaaagtccaggtttccttctgtgctcctggagcgccagggcgaagtacattagcagcattgatagcggctcaacgtgtgatgcacagtaatcaaaagggcttacttccagagccaaatccagtacaaattatgaaaagtttaaacaaccctgccatgttgcaagttcttctacagccccagttatgtggacgagctgttaaaccagccgttcttggaacacctcacagcttgccacatctgatgaanccatccatctctcctgcatttttacatttgaataaagcacatcagaatctttctcatataccactggcacaacaacaattaatgaagtttgagaatattcatactaataataaacccggcttacttggagagcccccagctgtggtacttcagactgcactagggatagggtcagtgcttccattgaaaaaggagttgggacatcatcatggagaagcacataaaacatctagcctgattccaactcaaacaacgataacagctggaatgggcatgttaccattctttccaaatcagcacattgctggacaggctgggccagggcacagtaatactcaggagaaacagccagccacggtgggaatggcagaaggaaatttctcagggtcgcagccttatcttcagagctttccaaaccttgctgctggaagcttgctggtgggacaccataagcagcagcaaagccagccaaaaggcacagagataagttcaggggctgcctctaagaatcaaacttcactcttgggagaaccaccaaaagaaattcggctcagtaaaaatccatacttgaatttggcaagtgtgttgcccagtgtgtgcttatcatcccctgcaagtaaaaccactcttcataagactggaattgcaagcagcattctggatgcaatctctcagggaagtgaatcacaacacgcattggaaaagtgcattgcttattctccaccttttggtgattatgcacaggtctgaaatctaaaagctggacttgaagctataagaaagggacattaggggcttgattcagatctcaggagaactagtgcagtcccattttggttctccgtatacctgactccactgaagagacaagacttagaaaaggtgtcatctttaagaaatgaaaagcgaggctcatcatatctcatctctgccccagaaggtggttcagtggaatgtgttgaccagcattctcagggcacaggagcatattacatggaaacttacttaaaaaagaagcgagtatactgagttaagctctctcctaataaccccctaaggttctctgcagtatctctgctgttcatcgctgccttaacttcattcaaactagccatatcctttaaatacgggtttatagtttcccagaaggaactgtgttgtgcagcaggcagaaatgccaaataaaaaatagcaataagaagagacatcaattgaggacattttccactagagtcagatgcatcttaatcagtgtgctaacttacaatccattggagaaactaacaatgttccaatattccttgatttaggactgggaataattctgacaccatatataaaagaagtttgaagcaataaatgggaaacagtgttgtttcctgagccttagaagaatgagtttcttataagccaatgtgcatttcaatttactttccctagaagtaattgcatttatagatttttaggacttttcctagaactacaagggtgcaagtaccaaatgtgctgatggtaatattataaagatgctctacatgcacactcaattacgcccacaccagccatgcaaaattaaacccggtaagagagtgacagtgatgtccaaggtatccactactaccgatgctttaagatgttgtttaccatttataccttctgtgaaaaatagaaggtattttaagaaaagtaactttggtgatctaataaaagggtttggcaaactacaccctgggtccacatttggtctaccacccgcttttgtgctgcctgcaagctaagactaatgtttacatttttaaatggttggaggaaaaaagaaaacttatgacatgaaatttatatgaaattcagatttcagtgtccataaataaacttttattgggacgttgccatgctcattcatttacgtgttgtctgtggcactcttacgctacaagggcagaactgattagcttcaacagagactgtatggcctacaaagaccatatggcctaaaatttcaagtatctggccatttatatatagtttgctgatccctgatctaatagcactaattctaatagcaactattcctttcaattcacctaaagacagacctttagcctttagacagacttgtaagtggaaaggaacatgggtttctgtgctcatttcatagcgtagactagtaatgatctaatgactagaatggggcctattttgatcactaaatgccctatttccacaatatagtatagtaaagcagtcaatactgcactttctgatggagtcttaaggagtcacagtatttataaccattttgagctaataagctatacctcactctctgctttctctctcactctttttgatagtgtgttagggtgaaaaatcagttatttaacccaatttacttgtgaaagaagttttatctttatggactatgatgacttttgacatcaccatttcttgaagaccttggtattaaatgcatgagaaaccttttgccatctagaaatttctaagtttgtttatgttataagactgtaattaattgatagggaatttgggatctcaatccggggctttttgaaatcagatcattaaatatctcgtcactttggggacttgttatttttaactatgatgtggatatcctgttttaattatgaagtctagaattggtacatatgttgtatgctttgtaaagaatttcacttggtctaatttattgcatatactagcttctgttggaaaatgactgacagctagaaagtttaaggtaatttctaagtatactacctataagtaactgataagaattaggcatcattcagtgatatagcagatgactaatgggtttttcaggccctgcacttctctttcccattttcctgttgcattcagcctcttcaatgcttagtcacacctccactatagtacaaacaaacaaacaaacagaagaaaggaaagatggtgaattttgcaacagagctgcaaaaagtcagtcaaagcaggaagaggttgaaggaactaaaacaaacaaacaaaggtgtctggactacagcacagtggacatgccatccatactggcctgtgccccgttatcaatcactgggcacaacagtgaagaagtgcaaatcaagtggtgtttgtttgtttgtttgtagtaaggaccgtaacccaccccttcctccccccaaaactatactgttatttttctatgtaagcaaattgtttgaaatgctttgaaaatgaaatcttaatattaaaaggcatatgcatgtaaaaatctttagtatat

SEQ ID NO: 288034 - DNA, 3477 bp, Homo sapiens
  misc_feature (33)..(33): n is a, c, g, or t
  misc_feature (100)..(100): n is a, c, g, or t
  misc_feature (1142)..(1142): n is a, c, g, or t
  misc_feature (3441)..(3441): n is a, c, g, or t
  misc_feature (3455)..(3455): n is a, c, g, or t
  misc_feature (3476)..(3476): n is a, c, g, or t
cccgggcctcctcccgctttctctctccgcttnccctggagcctccgaggagtccgcagccgctgggcgcccgggaagatggcggcggcggcgggagacngcggcggcgaggggggcgcgggcctgggcagcgcggcgcgctgcaccctgaggaggtcgccgcgcgactgcagcggatgcagcgggagctgagcaaccgcaggaaaatcctggtgaaaaacctgccccaggacagcaactgccaggaagttcatgatttgttaaaagactatgacttaaaatattgttatgtggacagaaataaacgaacagcttttgttaccttattgaatggggaacaagcccagaacgcaattcagatgtttcatcaatattcttttagaggaaaagacttaatagtccagcttcagccaacagatgctttgttgtgtattaccaacgtgcccatttcttttacatcagaagagtttgaagaacttgttcgtgcttatggaaatattgagagatgttttctggtctatagtgaagttactggccattccaaaggctatggatttgtggaatacatgaaaaaggactttgctgcaaaggctagactggagctattgggtagacagttgggagcatcagcactctttgcacaatggatggatgttaatctattggcttcagagctcattcattctaagtgcctttgtattgataaactccccagtgactacagggattcagaagagctgttgcaaattttttccagtgtccataaacctgtgttttgccagcttgcacaggatgaaggtagttacgttggtggctttgcagtggttgaatatagcactgcggagcaggctgaagaggtccagcaggcagcagacggtatgaccatcaagggcagcaaagtccaggtttccttctgtgctcctggagcgccagggcgaagtacattagcagcattgatagcggctcaacgtgtgatgcacagtaatcaaaagggcttacttccagagccaaatccagtacaaattatgaaaagtttaaacaaccctgccatgttgcaagttcttctacagccccagttatgtggacgagctgttaaaccagccgttcttggaacacctcacagcttgccacatctgatgaanccatccatctctcctgcatttttacatttgaataaagcacatcagaatctttctcatataccactggcacaacaacaattaatgaagtttgagaatattcatactaataataaacccggcttacttggagagcccccagctgtggtacttcagactgcactagggatagggtcagtgcttccattgaaaaaggagttgggacatcatcatggagaagcacataaaacatctagcctgattccaactcaaacaacgataacagctggaatgggcatgttaccattctttccaaatcagcacattgctggacaggctgggccagggcacagtaatactcaggagaaacagccagccacggtgggaatggcagaaggaaatttctcagggtcgcagccttatcttcagagctttccaaaccttgctgctggaagcttgctggtgggacaccataagcagcagcaaagccagccaaaaggcacagagataagttcaggggctgcctctaagaatcaaacttcactcttgggagaaccaccaaaagaaattcggctcagtaaaaatccatacttgaatttggcaagtgtgttgcccagtgtgtgcttatcatcccctgcaagtaaaaccactcttcataagactggaattgcaagcagcattctggatgcaatctctcagggaagtgaatcacaacacgcattggaaaagtgcattgcttattctccaccttttggtgattatgcacaggtgtcatctttaagaaatgaaaagcgaggctcatcatatctcatctctgccccagaaggtggttcagtggaatgtgttgaccagcattctcagggcacaggagcatattacatggaaacttacttaaaaaagaagcgagtatactgagttaagctctctcctaataaccccctaaggttctctgcagtatctctgctgttcatcgctgccttaacttcattcaaactagccatatcctttaaatacgggtttatagtttcccagaaggaactgtgttgtgcagcaggcagaaatgccaaataaaaaatagcaataagaagagacatcaattgaggacattttccactagagtcagatgcatcttaatcagtgtgctaacttacaatccattggagaaactaacaatgttccaatattccttgatttaggactgggaataattctgacaccatatataaaagaagtttgaagcaataaatgggaaacagtgttgtttcctgagccttagaagaatgagtttcttataagccaatgtgcatttcaatttactttccctagaagtaattgcatttatagatttttaggacttttcctagaactacaagggtgcaagtaccaaatgtgctgatggtaatattataaagatgctctacatgcacactcaattacgcccacaccagccatgcaaaattaaacccggtaagagagtgacagtgatgtccaaggtatccactactaccgatgctttaagatgttgtttaccatttataccttctgtgaaaaatagaaggtattttaagaaaagtaactttggtgatctaataaaagggtttggcaaactacaccctgggtccacatttggtctaccacccgcttttgtgctgcctgcaagctaagactaatgtttacatttttaaatggttggaggaaaaaagaaaacttatgacatgaaatttatatgaaattcagatttcagtgtccataaataaacttttattgggacgttgccatgctcattcatttacgtgttgtctgtggcactcttacgctacaagggcagaactgattagcttcaacagagactgtatggcctacaaagaccatatggcctaaaatttcaagtatctggccatttatatatagtttgctgatccctgatctaatagcactaattctaatagcaactattcctttcaattcacctaaagacagacctttagcctttagacagacttgtaagtggaaaggaacatgggtttctgtgctcatttcatagcgtagactagtaatgatctaatgactagaatggggcctattttgatcactaaatgccctatttccacaatatagtatagtaaagcagtcaatactgcactttctgatggagtcttaaggagtcacagtatttataaccattttgagctaataagctatacctcactctctgctttctctctcactctttttgatagtgtgttagggtgaaaaatcagttatttaacccaatttacttgtgaaagaagttttatctttatgacaccgtggggggatcctnaagagtcggggtgnttccaaagagttcacatattna

SEQ ID NO: 288035 - DNA, 2888 bp, Homo sapiens
  misc_feature (33)..(33): n is a, c, g, or t
  misc_feature (100)..(100): n is a, c, g, or t
  misc_feature (1142)..(1142): n is a, c, g, or t
cccgggcctcctcccgctttctctctccgcttnccctggagcctccgaggagtccgcagccgctgggcgcccgggaagatggcggcggcggcgggagacngcggcggcgaggggggcgcgggcctgggcagcgcggcgcgctgcaccctgaggaggtcgccgcgcgactgcagcggatgcagcgggagctgagcaaccgcaggaaaatcctggtgaaaaacctgccccaggacagcaactgccaggaagttcatgatttgttaaaagactatgacttaaaatattgttatgtggacagaaataaacgaacagcttttgttaccttattgaatggggaacaagcccagaacgcaattcagatgtttcatcaatattcttttagaggaaaagacttaatagtccagcttcagccaacagatgctttgttgtgtattaccaacgtgcccatttcttttacatcagaagagtttgaagaacttgttcgtgcttatggaaatattgagagatgttttctggtctatagtgaagttactggccattccaaaggctatggatttgtggaatacatgaaaaaggactttgctgcaaaggctagactggagctattgggtagacagttgggagcatcagcactctttgcacaatggatggatgttaatctattggcttcagagctcattcattctaagtgcctttgtattgataaactccccagtgactacagggattcagaagagctgttgcaaattttttccagtgtccataaacctgtgttttgccagcttgcacaggatgaaggtagttacgttggtggctttgcagtggttgaatatagcactgcggagcaggctgaagaggtccagcaggcagcagacggtatgaccatcaagggcagcaaagtccaggtttccttctgtgctcctggagcgccagggcgaagtacattagcagcattgatagcggctcaacgtgtgatgcacagtaatcaaaagggcttacttccagagccaaatccagtacaaattatgaaaagtttaaacaaccctgccatgttgcaagttcttctacagccccagttatgtggacgagctgttaaaccagccgttcttggaacacctcacagcttgccacatctgatgaanccatccatctctcctgcatttttacatttgaataaagcacatcagaatctttctcatataccactggcacaacaacaattaatgaagtttgagaatattcatactaataataaacccggcttacttggagagcccccagctgtggtacttcagactgcactagggatagggtcagtgcttccattgaaaaaggagttgggacatcatcatggagaagcacataaaacatctagcctgattccaactcaaacaacgataacagctggaatgggcatgttaccattctttccaaatcagcacattgctggacaggctgggccagggcacagtaatactcaggagaaacagccagccacggtgggaatggcagaaggaaatttctcagggtcgcagccttatcttcagagctttccaaaccttgctgctggaagcttgctggtgggacaccataagcagcagcaaagccagccaaaaggcacagagataagttcaggggctgcctctaagaatcaaacttcactcttgggagaaccaccaaaagaaattcggctcagtaaaaatccatacttgaatttggcaagtgtgttgcccagtgtgtgcttatcatcccctgcaagtaaaaccactcttcataagactggaattgcaagcagcattctggatgcaatctctcagggaagtgaatcacaacacgcattggaaaagtgcattgcttattctccaccttttggtgattatgcacaggtgtcatctttaagaaatgaaaagcgaggctcatcatatctcatctctgccccagaaggtggttcagtggaatgtgttgaccagcattctcagggcacaggagcatattacatggaaacttacttaaaaaagaagcgagtatactgagttaagctctctcctaataaccccctaaggttctctgcagtatctctgctgttcatcgctgccttaacttcattcaaactagccatatcctttaaatacgggtttatagtttcccagaaggaactgtgttgtgcagcaggcagaaatgccaaataaaaaatagcaataagaagagacatcaattgaggacattttccactagagtcagatgcatcttaatcagtgtgctaacttacaatccattggagaaactaacaatgttccaatattccttgatttaggactgggaataattctgacaccatatataaaagaagtttgaagcaataaatgggaaacagtgttgtttcctgagccttagaagaatgagtttcttataagccaatgtgcatttcaatttactttccctagaagtaattgcatttatagatttttaggacttttcctagaactacaagggtgcaagtaccaaatgtgctgatggtaatattataaagatgctctacatgcacactcaattacgcccacaccagccatgcaaaattaaacccggtaagagagtgacagtgatgtccaaggtatccactactaccgatgctttaagatgttgtttaccatttataccttctgtgaaaaatagaaggtattttaagaaaagtaactttggtgatctaataaaagggtttggcaaactacaccctgggtccacatttggtctaccacccgcttttgtgctgcctgcaagctaagactaatgtttacatttttaaatggttggaggaaaaaagaaaacttatgacatgaaatttatatgaaattcagatttcagtgtccataaataaacttttattggga

SEQ ID NO: 288036 - DNA, 2360 bp, Homo sapiens
  misc_feature (33)..(33): n is a, c, g, or t
  misc_feature (100)..(100): n is a, c, g, or t
  misc_feature (1142)..(1142): n is a, c, g, or t
cccgggcctcctcccgctttctctctccgcttnccctggagcctccgaggagtccgcagccgctgggcgcccgggaagatggcggcggcggcgggagacngcggcggcgaggggggcgcgggcctgggcagcgcggcgcgctgcaccctgaggaggtcgccgcgcgactgcagcggatgcagcgggagctgagcaaccgcaggaaaatcctggtgaaaaacctgccccaggacagcaactgccaggaagttcatgatttgttaaaagactatgacttaaaatattgttatgtggacagaaataaacgaacagcttttgttaccttattgaatggggaacaagcccagaacgcaattcagatgtttcatcaatattcttttagaggaaaagacttaatagtccagcttcagccaacagatgctttgttgtgtattaccaacgtgcccatttcttttacatcagaagagtttgaagaacttgttcgtgcttatggaaatattgagagatgttttctggtctatagtgaagttactggccattccaaaggctatggatttgtggaatacatgaaaaaggactttgctgcaaaggctagactggagctattgggtagacagttgggagcatcagcactctttgcacaatggatggatgttaatctattggcttcagagctcattcattctaagtgcctttgtattgataaactccccagtgactacagggattcagaagagctgttgcaaattttttccagtgtccataaacctgtgttttgccagcttgcacaggatgaaggtagttacgttggtggctttgcagtggttgaatatagcactgcggagcaggctgaagaggtccagcaggcagcagacggtatgaccatcaagggcagcaaagtccaggtttccttctgtgctcctggagcgccagggcgaagtacattagcagcattgatagcggctcaacgtgtgatgcacagtaatcaaaagggcttacttccagagccaaatccagtacaaattatgaaaagtttaaacaaccctgccatgttgcaagttcttctacagccccagttatgtggacgagctgttaaaccagccgttcttggaacacctcacagcttgccacatctgatgaanccatccatctctcctgcatttttacatttgaataaagcacatcagaatctttctcatataccactggcacaacaacaattaatgaagtttgagaatattcatactaataataaacccggcttacttggagagcccccagctgtggtacttcagactgcactagggatagggtcagtgcttccattgaaaaaggagttgggacatcatcatggagaagcacataaaacatctagcctgattccaactcaaacaacgataacagctggaatgggcatgttaccattctttccaaatcagcacattgctggacaggctgggccagggcacagtaatactcaggagaaacagccagccacggtgggaatggcagaaggaaatttctcagggtcgcagccttatcttcagagctttccaaaccttgctgctggaagcttgctggtgggacaccataagcagcagcaaagccagccaaaaggcacagagataagttcaggggctgcctctaagaatcaaacttcactcttgggagaaccaccaaaagaaattcggctcagtaaaaatccatacttgaatttggcaagtgtgttgcccagtgtgtgcttatcatcccctgcaagtaaaaccactcttcataagactggaattgcaagcagcattctggatgcaatctctcagggaagtgaatcacaacacgcattggaaaagtgcattgcttattctccaccttttggtgattatgcacaggtctgaaatctaaaagctggacttgaagctataagaaagggacattaggggcttgattcagatctcaggagaactagtgcagtcccattttggttctccgtatacctgactccactgaagagacaagacttagaaaaggtgaagtggggctgaaggtaagggtgagactgaggagtccttgaggcagaattttctgaaaacaaatttcattttgtatttaaagggctacctgctagatgcttatattcttttcagaagaacaacaataataaatatctttaattggactgatagcagatgagcctaatggaattcactgttgacattaacatatcccaaaggaatcttctgagggatagtcaagattcccctttccccaattcttacgatggctttgaaaactagccaccagttcaattattgacatgagcttaaaaattgagcttaagatacattgtattaaaaactggcagt

SEQ ID NO: 288037 - DNA, 553 bp, Homo sapiens
gctgttcttatttgctgaaagagaaaagaccacagaattgaataccagtgatttcccgttttcttaactctactgaaaagtcataaaactgcattagcaataattacaactacagttgacccttgaacaacatgggattaaactgtgtgggtccacttacatgcagattttcttccacttctgccaccctgaggcagcaagtcagctcctctgctccctccttctcctcagcctactctccacaaagatgataaagaagacctttatatgatccacttccacttaattaatatgtatccaaatcatgagcagcatcttgtgaccctagaagaaataaatgataccaccttgaacacaaatataatcatcttgaacttttatataaatttctacagcaattctgttattaaaaaaaaaagaccaacaacttggaaggaccttagtccaactttctgaagggcaatttgataacagtcatcctacataaactcctggactctgaaatcctacttctaaaaatttgtcctaaaagttatagatgttgcaaagatta

SEQ ID NO: 288038 - DNA, 460 bp, Homo sapiens
atgccaaaacaagaaatcaagacagaggctaagagagagaaattctcaatttaaaacaaagaaaaatgtgcttgaaaatcataaaactgcattagcaataattacaactacagttgacccttgaacaacatgggattaaactgtgtgggtccacttacatgcagattttcttccacttctgccaccctgaggcagcaagtcagctcctctgctccctccttctcctcagcctactctccacaaagatgataaagaagacctttatatgatccacttccacttaattaatactgctccatgaagccagaatttggacatatggaaggtcttgcatttttcaccaaagaaaaagcactggtaaatgaggtttgttcagaattcatcaggaaacctattacaattgcagcagccctggaaacgcctgcattacaatgaacaagaaccactccatcctacaaaa

SEQ ID NO: 288039 - DNA, 3070 bp, Homo sapiens
gcaccccgcccctgcggccgcctctcgcggctcccggggtccccagctccctgtccccggagccagagcccggctcccgcgcggctcccagccccgccgcgccgccccccgcatgctaatggccgggccgcctcccgccgcacacaatgcgggccagggccgggggcgggggaccggggagggggcgggggccgggccgggggcgggggggccggggcccggcgcatctcccccggccccacgtaacgctgacgcccgcgccgccggcccgccgcccgccgccgccgccgccgccgccgcccgctccgccgccgcccgcccggggctcctccacagcacctgttgccttcattagcagcttttcctcctcttccctgcacttcccagaaccaaagaatgtgaagggggtccatggagggctcacgtccccgcgccccgagcggccacttagcgccgtcgccgccggctttcgacggcgagctggatctgcagcgatactccaacgggccagccgtgagcgcagggtcgctcgggatgggagcggtgagctggtctgagagtcgtgcaggcgaacggcgcttcccctgccctgtatgcgggaagcgcttccgcttcaactctatccttgctttgcacctgcgggcgcacccaggagcccaggccttccagtgccctcactgcggccaccgcgcggcgcagcgggctctgctgcgctcgcacctgcgcacacaccagcccgagcgcccacgtagtcctgctgcacgcctgttgctggagttggaagagcgcgcgctactacgcgaggcccgactggggagagcccgaagctcagggggcatgcaggccacccctgccactgagggtctggcgcggccccaggctccttcatcgtccgccttccgttgcccctactgcaaaggcaagtttcgcacctcggcggagcgcgaacgccacctgcacatcctgcataggccctggaagtgcggcctgtgcagtttcggctccagccaggaggaggagctgctgcaccacagcctgacggcccacggggctcccgagcgtcccctggcggccacctccgctgcgcctccgcctcagcctcagcctcagcctccaccccagcccgaacccagatcagtcccccagccggagccggagccggagcccgaacgtgaggcaaccccgaccccagctcctgccgctcccgaggagcccccagcgcctccggagttccgctgccaagtgtgcggccagagctttacacagtcttggtttctcaagggccacatgcgtaagcacaaggcctccttcgatcatgcgtgtccggtgtgcggccgctgcttcaaggagccctggttccttaagaaccacatgaaggtgcacgccagcaagctgggcccactgcgtgccccggggcctgcctccgggcctgcccgcgccccccagcctcctgacctcggcctgctggcctatgagccgttgggcccagcgctcctcttggccccggctcccaccccggccgagcgccgtgagcccccgagcctcttgggctacctgagcctgcgagctggcgagggccggcccaacggcgagggtgctgagcccggtcccggccgcagcttcggaggcttccgcccgctgtcctctgctctcccggcccgggctcgccggcaccgtgcggaggagcctgaggaagaagaggaggtggtggaggccgaggaggaaacctgggcccggggcaggtcgctgggctctctggcttccctgcacccgcgcccgggtgagggaccggggcactctgcctctgctgctggggcccaggcaagatcgaccgccacgcaggaagagaatgggctgttggttggagggacccggcctgaagggggccggggcgccaccggcaaggattgtcctttctgcggaaaatctttccgctcagcacatcacctcaaagtgcatctgcgagtgcacacaggcgagcggccctacaagtgtccgcactgcgactacgcgggcacccagtccggctcgctcaagtatcacctacagcgccaccaccgggagcagaggagcggggccggccccgggccacccccggagccaccgcctccttcccagcggggttcggccccgcaatctggagccaagccgtctccgcagcctgcgacctgggtggagggcgcctcaagtccccggcctccttctagcggtgctgggccggggtcccgtcggaagcccgccagccctgggaggaccctgcgcaacgggcgaggcggtgaggccgaacccctggacctgtccttgcgggcagggccgggaggcgaggccgggcctgggggtgccctccaccgctgcctcttctgcccgttcgccactggagccccagagctcatggccttgcaccttcaagtgcaccacagccgccgggctaggggccgccggccaccccaggctgacgcgtccccgccctatgcccgagtaccatcaggagagacccctcccagtccttcgcaggaaggggaggagggctccgggctgtccagacccggagaggcagggctgggggggcaagaacggtagtgggccctcaggggcgattagcttagtgagcttaccccgccggagcgggggagcgctagaggtagttgggtagagaagccagcagggggcagcgtgggacccatatcccagccccaggcggaccagaggtggaaggcgcggcgggcgtaggagggtgggctggcggtacccacccagcccaagggagtcacagtgccttagaagtggcagaggtgagggtcaaagaacggggtccctgggctggcagagaaggtttgtgtccctgttgaggagccactctgccagtctttgctggtccataggcgtgagagtttatttttgtacaaggggtgagggtggggggcactgtacccttctagccccatcaggggccctgtagacgtcgctatttttggtacgattcctgtcatccctattgcagagtcgtgtccccaataaacaggtgtcttgaggcacagggccctgtgtctgtctgcctacctatgtcctg

SEQ ID NO: 288040 - DNA, 2191 bp, Homo sapiens
gcaccccgcccctgcggccgcctctcgcggctcccggggtccccagctccctgtccccggagccagagcccggctcccgcgcggctcccagccccgccgcgccgccccccgcatgctaatggccgggccgcctcccgccgcacacaatgcgggccagggccgggggcgggggaccggggagggggcgggggccgggccgggggcgggggggccggggcccggcgcatctcccccggccccacgtaacgctgacgcccgcgccgccggcccgccgcccgccgccgccgccgccgccgccgcccgctccgccgccgcccgcccggggctcctccacagcacctgttgccttcattagcagcttttcctcctcttccctgcacttcccagaaccaaagaatgtgaagggggtccatggagggctcacgtccccgcgccccgagcggccacttagcgccgtcgccgccggctttcgacggcgagctggatctgcagcgatactccaacgggccagccgtgagcgcagggtcgctcgggatgggagcggtgagctggtctgagagtcgtgcaggcgaacggcgcttcccctgccctgtatgcgggaagcgcttccgcttcaactctatccttgctttgcacctgcgggcgcacccaggagcccaggccttccagtgccctcactgcggccaccgcgcggcgcagcgggctctgctgcgctcgcacctgcgcacacaccagcccgagcgcccacgtagtcctgctgcacgcctgttgctggagttggaagagcgcgcgctactacgcgaggcccgactggggagagcccgaagctcagggggcatgcaggccacccctgccactgagggtctggcgcggccccaggctccttcatcgtccgccttccgttgcccctactgcaaaggcaagtttcgcacctcggcggagcgcgaacgccacctgcacatcctgcataggccctggaagtgcggcctgtgcagtttcggctccagccaggaggaggagctgctgcaccacagcctgacggcccacggggctcccgagcgtcccctggcggccacctccgctgcgcctccgcctcagcctcagcctcagcctccaccccagcccgaacccagatcagtcccccagccggagccggagccggagcccgaacgtgaggcaaccccgaccccagctcctgccgctcccgaggagcccccagcgcctccggagttccgctgccaagtgtgcggccagagctttacacagtcttggtttctcaagggccacatgcgtaagcacaaggcctccttcgatcatgcgtgtccggtgtgcggccgctgcttcaaggagccctggttccttaagaaccacatgaaggtgcacgccagcaagctgggcccactgcgtgccccggggcctgcctccgggcctgcccgcgccccccagcctcctgacctcggcctgctggcctatgagccgttgggcccagcgctcctcttggccccggctcccaccccggccgagcgccgtgagcccccgagcctcttgggctacctgagcctgcgagctggcgagggccggcccaacggcgagggtgctgagcccggtcccggccgcagcttcggaggcttccgcccgctgtcctctgctctcccggcccgggctcgccggcaccgtgcggaggagcctgaggaagaagaggaggtggtggaggccgaggaggaaacctgggcccggggcaggtcgctgggctctctggcttccctgcacccgcgcccgggtgagggaccggggcactctgcctctgctgctggggcccaggcaagatcgaccgccacgcaggaagagaatgggctgttggttggagggacccggcctgaagggggccggggcgccaccggcaaggattgtcctttctgcggaaaatctttccgctcagcacatcacctcaaagtgcatctgcgagtgcacacaggcgagcggccctacaagtgtccgcactgcgactacgcgggcacccagtccggctcgctcaagtatcacctacagcgccgctcccgaggagcccccagcgcctccggagttccgctgccaagtgtgcggccagagctttacacagtcttggtttctcaagggccacatgcgtaagcacaaggcctccttcgatcatgcgtgtccggtgtgcggccgc

SEQ ID NO: 288041 - DNA, 2135 bp, Homo sapiens
gcaccccgcccctgcggccgcctctcgcggctcccggggtccccagctccctgtccccggagccagagcccggctcccgcgcggctcccagccccgccgcgccgccccccgcatgctaatggccgggccgcctcccgccgcacacaatgcgggccagggccgggggcgggggaccggggagggggcgggggccgggccgggggcgggggggccggggcccggcgcatctcccccggccccacgtaacgctgacgcccgcgccgccggcccgccgcccgccgccgccgccgccgccgccgcccgctccgccgccgcccgcccggggctcctccacagcacctgttgccttcattagcagcttttcctcctcttccctgcacttcccagaaccaaagaatgtgaagggggtccatggagggctcacgtccccgcgccccgagcggccacttagcgccgtcgccgccggctttcgacggcgagctggatctgcagcgatactccaacgggccagccgtgagcgcagggtcgctcgggatgggagcggtgagctggtctgagagtcgtgcaggcgaacggcgcttcccctgccctgtatgcgggaagcgcttccgcttcaactctatccttgctttgcacctgcgggcgcacccaggagcccaggccttccagtgccctcactgcggccaccgcgcggcgcagcgggctctgctgcgctcgcacctgcgcacacaccagcccgagcgcccacgtagtcctgctgcacgcctgttgctggagttggaagagcgcgcgctactacgcgaggcccgactggggagagcccgaagctcagggggcatgcaggccacccctgccactgagggtctggcgcggccccaggctccttcatcgtccgccttccgttgcccctactgcaaaggcaagtttcgcacctcggcggagcgcgaacgccacctgcacatcctgcataggccctggaagtgcggcctgtgcagtttcggctccagccaggaggaggagctgctgcaccacagcctgacggcccacggggctcccgagcgtcccctggcggccacctccgctgcgcctccgcctcagcctcagcctcagcctccaccccagcccgaacccagatcagtcccccagccggagccggagccggagcccgaacgtgaggcaaccccgaccccagctcctgccgctcccgaggagcccccagcgcctccggagttccgctgccaagtgtgcggccagagctttacacagtcttggtttctcaagggccacatgcgtaagcacaaggcctccttcgatcatgcgtgtccggtgtgcggccgctgcttcaaggagccctggttccttaagaaccacatgaaggtgcacgccagcaagctgggcccactgcgtgccccggggcctgcctccgggcctgcccgcgccccccagcctcctgacctcggccttgcaccttcaagtgcaccacagccgccgggctaggggccgccggccaccccaggctgacgcgtccccgccctatgcccgagtaccatcaggagagacccctcccagtccttcgcaggaaggggaggagggctccgggctgtccagacccggagaggcagggctgggggggcaagaacggtagtgggccctcaggggcgattagcttagtgagcttaccccgccggagcgggggagcgctagaggtagttgggtagagaagccagcagggggcagcgtgggacccatatcccagccccaggcggaccagaggtggaaggcgcggcgggcgtaggagggtgggctggcggtacccacccagcccaagggagtcacagtgccttagaagtggcagaggtgagggtcaaagaacggggtccctgggctggcagagaaggtttgtgtccctgttgaggagccactctgccagtctttgctggtccataggcgtgagagtttatttttgtacaaggggtgagggtggggggcactgtacccttctagccccatcaggggccctgtagacgtcgctatttttggtacgattcctgtcatccctattgcagagtcgtgtccccaataaacaggtgtcttgaggcacagggccctgtgtctgtctgcctacctatgtcctg

SEQ ID NO: 288042 - DNA, 339 bp, Homo sapiens
ctttactgctgaaaactagggctcatcttttcctccaaatctgtctcttgctttagctccacagcacctgttgccttcattagcagcttttcctcctcttccctgcacttcccagaaccaaagaatgtgaagggggtccatggaggtgagtgaagctctggcttcaacctacaagtacctacaactgtatactccctctcctgcctacctctctctctctttgacctcccattattagaagttaactccttggccctgacatctcgattcccatacacctccccccaccccatcttcccgaggtgagtagcaccctgtgttcctagttcaggccccagc

SEQ ID NO: 288043 - DNA, 2869 bp, Homo sapiens
gcaccccgcccctgcggccgcctctcgcggctcccggggtccccagctccctgtccccggagccagagcccggctcccgcgcggctcccagccccgccgcgccgccccccgcatgctaatggccgggccgcctcccgccgcacacaatgcgggccagggccgggggcgggggaccggggagggggcgggggccgggccgggggcgggggggccggggcccggcgcatctcccccggccccacgtaacgctgacgcccgcgccgccggcccgccgcccgccgccgccgccgccgccgccgcccgctccgccgccgcccgcccggggctcctccacagcacctgttgccttcattagcagcttttcctcctcttccctgcacttcccagaaccaaagaatgtgaagggggtccatggagggctcacgtccccgcgccccgagcggccacttagcgccgtcgccgccggctttcgacggcgagctggatctgcagcgatactccaacgggccagccgtgagcgcagggtcgctcgggatgggagcggtgagctggtctgagagtcgtgcaggcgaacggcgcttcccctgccctgtatgcgggaagcgcttccgcttcaactctatccttgctttgcacctgcgggcgcacccaggagcccaggccttccagtgccctcactgcggccaccgcgcggcgcagcgggctctgctgcgctcgcacctgcgcacacaccagcccgagcgcccacgtagtcctgctgcacgcctgttgctggagttggaagagcgcgcgctactacgcgaggcccgactggggagagcccgaagctcagggggcatgcaggccacccctgccactgagggtctggcgcggccccaggctccttcatcgtccgccttccgttgcccctactgcaaaggcaagtttcgcacctcggcggagcgcgaacgccacctgcacatcctgcataggccctggaagtgcggcctgtgcagtttcggctccagccaggaggaggagctgctgcaccacagctgccaagtgtgcggccagagctttacacagtcttggtttctcaagggccacatgcgtaagcacaaggcctccttcgatcatgcgtgtccggtgtgcggccgctgcttcaaggagccctggttccttaagaaccacatgaaggtgcacgccagcaagctgggcccactgcgtgccccggggcctgcctccgggcctgcccgcgccccccagcctcctgacctcggcctgctggcctatgagccgttgggcccagcgctcctcttggccccggctcccaccccggccgagcgccgtgagcccccgagcctcttgggctacctgagcctgcgagctggcgagggccggcccaacggcgagggtgctgagcccggtcccggccgcagcttcggaggcttccgcccgctgtcctctgctctcccggcccgggctcgccggcaccgtgcggaggagcctgaggaagaagaggaggtggtggaggccgaggaggaaacctgggcccggggcaggtcgctgggctctctggcttccctgcacccgcgcccgggtgagggaccggggcactctgcctctgctgctggggcccaggcaagatcgaccgccacgcaggaagagaatgggctgttggttggagggacccggcctgaagggggccggggcgccaccggcaaggattgtcctttctgcggaaaatctttccgctcagcacatcacctcaaagtgcatctgcgagtgcacacaggcgagcggccctacaagtgtccgcactgcgactacgcgggcacccagtccggctcgctcaagtatcacctacagcgccaccaccgggagcagaggagcggggccggccccgggccacccccggagccaccgcctccttcccagcggggttcggccccgcaatctggagccaagccgtctccgcagcctgcgacctgggtggagggcgcctcaagtccccggcctccttctagcggtgctgggccggggtcccgtcggaagcccgccagccctgggaggaccctgcgcaacgggcgaggcggtgaggccgaacccctggacctgtccttgcgggcagggccgggaggcgaggccgggcctgggggtgccctccaccgctgcctcttctgcccgttcgccactggagccccagagctcatggccttgcaccttcaagtgcaccacagccgccgggctaggggccgccggccaccccaggctgacgcgtccccgccctatgcccgagtaccatcaggagagacccctcccagtccttcgcaggaaggggaggagggctccgggctgtccagacccggagaggcagggctgggggggcaagaacggtagtgggccctcaggggcgattagcttagtgagcttaccccgccggagcgggggagcgctagaggtagttgggtagagaagccagcagggggcagcgtgggacccatatcccagccccaggcggaccagaggtggaaggcgcggcgggcgtaggagggtgggctggcggtacccacccagcccaagggagtcacagtgccttagaagtggcagaggtgagggtcaaagaacggggtccctgggctggcagagaaggtttgtgtccctgttgaggagccactctgccagtctttgctggtccataggcgtgagagtttatttttgtacaaggggtgagggtggggggcactgtacccttctagccccatcaggggccctgtagacgtcgctatttttggtacgattcctgtcatccctattgcagagtcgtgtccccaataaacaggtgtcttgaggcacagggccctgtgtctgtctgcctacctatgtcctg

SEQ ID NO: 288044 - DNA, 5145 bp, Homo sapiens
  misc_feature (1094)..(1095): n is a, c, g, or t
acccgaaggtgcctgggaggcgggaggggggttggggcttctcagcgccgattccgcgggaagggccctgggacctcacacttctagtcgcgggagctgcaggtcttacccggagagacgctgcacgtggagccctcgccgctgccgttctcagccggctctggagtgcgggcgggggcgacagggccgattccggagtgggactgatcctttgaaatactccagccatgactaaaagagaagcagaggagctgatagaaattgagattgatggaacagagaaagcagagtgcacagaagaaagcattgtagaacaaacctacgcgccagctgaatgtgtaagccaggccatagacatcaatgaaccaataggcaatttaaagaaactgctagaaccaagactacagtgttctttggatgctcatgaaatttgtctgcaagatatccagctggatccagaacgaagtttatttgaccaaggagtaaaaacagatggaactgtacagcttagtgtacaggtaatttcttaccaaggaattgaaccaaagttaaacatccttgaaattgttaaacctgcggacactgttgaggttgttattgatccagatgcccaccatgctgaatcagaagcacatcttgttgaagaagctcaagtgataactcttgatggcacaaaacacatcacaaccatttcagatgaaacttcagaacaagtgacaagatgggctgctgcactggaaggctataggaaagaacaagaacgccttgggataccctatgatcccatacagtggtccacagaccaagtcctgcattgggtggtttgggtaatgaaggaattcagcatgaccgatatagacctcaccacactcaacatttcggggagagaattatgtagtctcaaccaagaagatttttttcagcgggttcctcggggagaaattctctggagtcatctggaacttctccgaaaatatgtattggcaagtcaagaacaacagatgaatgaaatagttacaattgatcaacctgtgcaaattattccagcatcagtgcaatctgctacacctactaccattaaagttataaatagnngtgcgaaagcagccaaagtacaaagagcgccgaggatttcaggagaagatagaagctcacctgggaacagaacaggaaacaatggccaaatccaactatggcagtttttgctagaacttcttactgataaggacgctcgagactgcatttcttgggttggtgatgaaggtgaatttaagctaaatcagcctgaactggttgcacagaaatggggacagcgtaaaaataagcctacgatgaactatgagaaactcagtcgtgcattaagatattattacgatggggacatgatttgtaaagttcaaggcaagagatttgtgtacaagtttgtctgtgacttgaagactcttattggatacagtgcagcggagttgaaccgtttggtcacagaatgtgaacagaagaaacttgcaaagatgcagctccatggaattgcccagccagtcacagcagtagctctggctactgcttctctgcaaacggaaaaggataattgagccccaggacattctgagactccaaagtctttcttaaaatgtttagagcaagtatagctcttacctttattactgaatttgaatcttcttttatttctaggctgtacagtctgatgcatgatttttttataaatatttcatactcttgtgaatttggatctttttactttgagcatatattttagaatatgtgtatgttaaaggatctccacaatgtctgcagtgtgaaggcaggttcattgtggaatagtttaacagtcaggaaggctaaactggtcagtattaatgtgtagccctaccaaaaatagccagtagtatctgaaaatgaaaaataaatgaagtatctctaggaaacagtctggcttaactatttttgaaaatataactgtttcccctctctgctgctttagatgttgctttacatagaaccagaaaatggaatttctcagctaaagcatgtgtgcctgtttcatctaatcaagcagagctaaaatgttcataccgaataaatttatattaataaattactaaactaagagtatcaggttatttatatatttgcaagcaaaggacagtaagaagttgactggcaaaagagcagtgctgaaggaggagatccaggtttaaatctggcttattaactcaagccaattttaaggattttctgtatagattactcatgtcagaccaagaatttaaattattttgagagaggcatttaattctaataaaccagctgttataaaaattataaaatgatctctgtttttcctgtcagagatttaaaaaactgaaaaggtatacctcaacccaaaaataaaggtttgttttggtttgttatggcttccttttttaaaaaattaccctgtagtgccagtttattatgcaaagcagcttatattcctttgtttctgataaaatgaagactttaaatcagtcagtagtactttacctttcaaggcattagtaaattacttgcaaatagttttaaaaggaaaatacgacctttgttataggcagtcttctctttaagacaatacttttccacttgttttccttttccatattatatatgtgtattcatatagctgtatacatattcagttgatcattttataaacatatgaaggcataaagatatacagaagaaaaattattaaacaactcattttaagattcaaattaactaattcctgcatatatgacattccttacataagcgaacactaaacaaaaatggctagaaatgtctttttctttcttttctctctttgttgtttaaggtattaagcacgaattattacatgagactggcagatagctattaatcctcttacagatttgagaaagttgattctcaaatatttatgcaccttctccttcattgttttctttaaatctgtcctcttaaaaagcttcttaagagctcagttaatgcttttgacttaactaggagaaaaaggcatgataatacaggcaagatggcattgttagcaattctggtagtggtttggaatgaatcctaagaggcagggatcttaaggacaaggaagagaagagagagagggagggatctttgatctctttctctggtaatcttaatgcataattttactaaaacatgttctcaattcattcatattattaagctcttcctgcagttgatatctgagcagagtaagatttgtatttccatttttacttttttgaaagagaatatatggacagattattagtacaatttgggcactgtggttttaagaatatctgagtaaaataacaatatgaaataataaacagaagctctaacgtcaggtaacaaatagacagcaagaaaggttttgcaccatcctcttacggcctagagagttgacaagttgcttgtagttttaaaaaaataataaagtatacccttctggtatatcatcaagagcttaagaatcttggctttcatatttaaaatgcttttggggagacatatattaaaattttagccaagatgatagacatgtctcaattatatatgtgtgtgtatgtttttaaagctaaaaacattacttttagatccctagaatgaaaatttttttctcatctatgcaattcccatatggttttttttaaatcatattttattcattttctccctttagcaattttcattttatttctcataatttgaacagagacagttctcatacatgatcagatgctttttttttcttcttaccatcatttatgcatgacataggtaatgtgactaatttctccagttgattcaagaaactcattactttgcctcaaattatatgtaaaatatttgttttacttaggttacagttatcagaaaggtagtttttttcttctattaaaatataacattgtgaaagaaaataaaatttatgctattctttgctttgtttttataaatgaatttttcatagaatttacagtatattcaaaggaagaaagataaaattattggtcatcatttgtaccttagaagtacaagaatttaagtaaaagaaatgttcatttttgttttaaaatttgttttccatgtgaagtttttattgagccaactttcatacatatcttgctagcctaaagtctaaatatttgtgttggcatcagaaaaacaaatgaggcagaattgctatgtgtggttgatcttcagataaattgactgatcacagttatttttgtatcagtctatgttattaggaaaaattgtttagttgttttctcccctgattaatggtgatattcaagtatgatacaaaaagaattgtaccaccaaatatttttgtgaggtctgctgttttccatattcattttatgctactgcctttaagaaagaactagtgtatccttgaaatagcacaaaaatgttttaaaattcataattgcaaaacaaatctgtgactaacttaatgtcttcagatctaaagggtgtaaaaatattgatacttcaatatttcacttgctgccaggaaaaacaaaattctcaatcttttgtaaatgggaggaggacttttgcatacatttttactctttaaataacgacaacgacacttatactgtcataataacaattatgtatttctttgtggttttaattttttttgtaattttacataaaacagttattttctatttttacgcagataaatatttgtgcataaaatgtaaaaatagtaaaatgagaaaaataaaactattatacagtaaaaaaaaaaaaaaaaaaaaaaaaaaacacaacaacaaaaaaacaaaaaaaaaaacccaggcccccccccccacaaagcacaacgatcggcacaacccgcaaacccctcagagaacggaggcgccacgcgaggcgagcacaccgaaaccgtacaactaaaacacgacgacaacacagacagacgatctctaacacagcgcacaacgacaagagcaacccaaacaagcaccgcgacagacaacacgtcacatcgctccacggacaacgagcccaccaccgaagtaacaaagacacacaacgaaaacaaacaagcgcacaaacaaaacc

SEQ ID NO: 288045 - DNA, 5091 bp, Homo sapiens
  misc_feature (1094)..(1095): n is a, c, g, or t
acccgaaggtgcctgggaggcgggaggggggttggggcttctcagcgccgattccgcgggaagggccctgggacctcacacttctagtcgcgggagctgcaggtcttacccggagagacgctgcacgtggagccctcgccgctgccgttctcagccggctctggagtgcgggcgggggcgacagggccgattccggagtgggactgatcctttgaaatactccagccatgactaaaagagaagcagaggagctgatagaaattgagattgatggaacagagaaagcagagtgcacagaagaaagcattgtagaacaaacctacgcgccagctgaatgtgtaagccaggccatagacatcaatgaaccaataggcaatttaaagaaactgctagaaccaagactacagtgttctttggatgctcatgaaatttgtctgcaagatatccagctggatccagaacgaagtttatttgaccaaggagtaaaaacagatggaactgtacagcttagtgtacaggtaatttcttaccaaggaattgaaccaaagttaaacatccttgaaattgttaaacctgcggacactgttgaggttgttattgatccagatgcccaccatgctgaatcagaagcacatcttgttgaagaagctcaagtgataactcttgatggcacaaaacacatcacaaccatttcagatgaaacttcagaacaagtgacaagatgggctgctgcactggaaggctataggaaagaacaagaacgccttgggataccctatgatcccatacagtggtccacagaccaagtcctgcattgggtggtttgggtaatgaaggaattcagcatgaccgatatagacctcaccacactcaacatttcggggagagaattatgtagtctcaaccaagaagatttttttcagcgggttcctcggggagaaattctctggagtcatctggaacttctccgaaaatatgtattggcaagtcaagaacaacagatgaatgaaatagttacaattgatcaacctgtgcaaattattccagcatcagtgcaatctgctacacctactaccattaaagttataaatagnngtgcgaaagcagccaaagtacaaagagcgccgaggatttcaggagaagatagaagctcacctgggaacagaacaggaaacaatggccaaatccaactatggcagtttttgctagaacttcttactgataaggacgctcgagactgcatttcttgggttggtgatgaaggtgaatttaagctaaatcagcctgaactggttgcacagaaatggggacagcgtaaaaataagcctacgatgaactatgagaaactcagtcgtgcattaagatattattacgatggggacatgatttgtaaagttcaaggcaagagatttgtgtacaagtttgtctgtgacttgaagactcttattggatacagtgcagcggagttgaaccgtttggtcacagaatgtgaacagaagaaacttgcaaagatgcagctccatggaattgcccagccagtcacagcagtagctctggctactgcttctctgcaaacggaaaaggataattgagccccaggacattctgagactccaaagtctttcttaaaatgtttagagcaagtatagctcttacctttattactgaatttgaatcttcttttatttctaggctgtacagtctgatgcatgatttttttataaatatttcatactcttgtgaatttggatctttttactttgagcatatattttagaatatgtgtatgttaaaggatctccacaatgtctgcagtgtgaaggcaggttcattgtggaatagtttaacagtcaggaaggctaaactggtcagtattaatgtgtagccctaccaaaaatagccagtagtatctgaaaatgaaaaataaatgaagtatctctaggaaacagtctggcttaactatttttgaaaatataactgtttcccctctctgctgctttagatgttgctttacatagaaccagaaaatggaatttctcagctaaagcatgtgtgcctgtttcatctaatcaagcagagctaaaatgttcataccgaataaatttatattaataaattactaaactaagagtatcaggttatttatatatttgcaagcaaaggacagtaagaagttgactggcaaaagagcagtgctgaaggaggagatccaggtttaaatctggcttattaactcaagccaattttaaggattttctgtatagattactcatgtcagaccaagaatttaaattattttgagagaggcatttaattctaataaaccagctgttataaaaattataaaatgatctctgtttttcctgtcagagatttaaaaaactgaaaaggtatacctcaacccaaaaataaaggtttgttttggtttgttatggcttccttttttaaaaaattaccctgtagtgccagtttattatgcaaagcagcttatattcctttgtttctgataaaatgaagactttaaatcagtcagtagtactttacctttcaaggcattagtaaattacttgcaaatagttttaaaaggaaaatacgacctttgttataggcagtcttctctttaagacaatacttttccacttgttttccttttccatattatatatgtgtattcatatagctgtatacatattcagttgatcattttataaacatatgaaggcataaagatatacagaagaaaaattattaaacaactcattttaagattcaaattaactaattcctgcatatatgacattccttacataagcgaacactaaacaaaaatggctagaaatgtctttttctttcttttctctctttgttgtttaaggtattaagcacgaattattacatgagactggcagatagctattaatcctcttacagatttgagaaagttgattctcaaatatttatgcaccttctccttcattgttttctttaaatctgtcctcttaaaaagcttcttaagagctcagttaatgcttttgacttaactaggagaaaaaggcatgataatacaggcaagatggcattgttagcaattctggtagtggtttggaatgaatcctaagaggcagggatcttaaggacaaggaagagaagagagagagggagggatctttgatctctttctctggtaatcttaatgcataattttactgagcagagtaagatttgtatttccatttttacttttttgaaagagaatatatggacagattattagtacaatttgggcactgtggttttaagaatatctgagtaaaataacaatatgaaataataaacagaagctctaacgtcaggtaacaaatagacagcaagaaaggttttgcaccatcctcttacggcctagagagttgacaagttgcttgtagttttaaaaaaataataaagtatacccttctggtatatcatcaagagcttaagaatcttggctttcatatttaaaatgcttttggggagacatatattaaaattttagccaagatgatagacatgtctcaattatatatgtgtgtgtatgtttttaaagctaaaaacattacttttagatccctagaatgaaaatttttttctcatctatgcaattcccatatggttttttttaaatcatattttattcattttctccctttagcaattttcattttatttctcataatttgaacagagacagttctcatacatgatcagatgctttttttttcttcttaccatcatttatgcatgacataggtaatgtgactaatttctccagttgattcaagaaactcattactttgcctcaaattatatgtaaaatatttgttttacttaggttacagttatcagaaaggtagtttttttcttctattaaaatataacattgtgaaagaaaataaaatttatgctattctttgctttgtttttataaatgaatttttcatagaatttacagtatattcaaaggaagaaagataaaattattggtcatcatttgtaccttagaagtacaagaatttaagtaaaagaaatgttcatttttgttttaaaatttgttttccatgtgaagtttttattgagccaactttcatacatatcttgctagcctaaagtctaaatatttgtgttggcatcagaaaaacaaatgaggcagaattgctatgtgtggttgatcttcagataaattgactgatcacagttatttttgtatcagtctatgttattaggaaaaattgtttagttgttttctcccctgattaatggtgatattcaagtatgatacaaaaagaattgtaccaccaaatatttttgtgaggtctgctgttttccatattcattttatgctactgcctttaagaaagaactagtgtatccttgaaatagcacaaaaatgttttaaaattcataattgcaaaacaaatctgtgactaacttaatgtcttcagatctaaagggtgtaaaaatattgatacttcaatatttcacttgctgccaggaaaaacaaaattctcaatcttttgtaaatgggaggaggacttttgcatacatttttactctttaaataacgacaacgacacttatactgtcataataacaattatgtatttctttgtggttttaattttttttgtaattttacataaaacagttattttctatttttacgcagataaatatttgtgcataaaatgtaaaaatagtaaaatgagaaaaataaaactattatacagtaaaaaaaaaaaaaaaaaaaaaaaaaaacacaacaacaaaaaaacaaaaaaaaaaacccaggcccccccccccacaaagcacaacgatcggcacaacccgcaaacccctcagagaacggaggcgccacgcgaggcgagcacaccgaaaccgtacaactaaaacacgacgacaacacagacagacgatctctaacacagcgcacaacgacaagagcaacccaaacaagcaccgcgacagacaacacgtcacatcgctccacggacaacgagcccaccaccgaagtaacaaagacacacaacgaaaacaaacaagcgcacaaacaaaacc

SEQ ID NO: 288046 - DNA, 4819 bp, Homo sapiens
  misc_feature (1094)..(1095): n is a, c, g, or t
acccgaaggtgcctgggaggcgggaggggggttggggcttctcagcgccgattccgcgggaagggccctgggacctcacacttctagtcgcgggagctgcaggtcttacccggagagacgctgcacgtggagccctcgccgctgccgttctcagccggctctggagtgcgggcgggggcgacagggccgattccggagtgggactgatcctttgaaatactccagccatgactaaaagagaagcagaggagctgatagaaattgagattgatggaacagagaaagcagagtgcacagaagaaagcattgtagaacaaacctacgcgccagctgaatgtgtaagccaggccatagacatcaatgaaccaataggcaatttaaagaaactgctagaaccaagactacagtgttctttggatgctcatgaaatttgtctgcaagatatccagctggatccagaacgaagtttatttgaccaaggagtaaaaacagatggaactgtacagcttagtgtacaggtaatttcttaccaaggaattgaaccaaagttaaacatccttgaaattgttaaacctgcggacactgttgaggttgttattgatccagatgcccaccatgctgaatcagaagcacatcttgttgaagaagctcaagtgataactcttgatggcacaaaacacatcacaaccatttcagatgaaacttcagaacaagtgacaagatgggctgctgcactggaaggctataggaaagaacaagaacgccttgggataccctatgatcccatacagtggtccacagaccaagtcctgcattgggtggtttgggtaatgaaggaattcagcatgaccgatatagacctcaccacactcaacatttcggggagagaattatgtagtctcaaccaagaagatttttttcagcgggttcctcggggagaaattctctggagtcatctggaacttctccgaaaatatgtattggcaagtcaagaacaacagatgaatgaaatagttacaattgatcaacctgtgcaaattattccagcatcagtgcaatctgctacacctactaccattaaagttataaatagnngtgcgaaagcagccaaagtacaaagagcgccgaggatttcaggagaagatagaagctcacctgggaacagaacaggaaacaatggccaaatccaactatggcagtttttgctagaacttcttactgataaggacgctcgagactgcatttcttgggttggtgatgaaggtgaatttaagctaaatcagcctgaactggttgcacagaaatggggacagcgtaaaaataagcctacgatgaactatgagaaactcagtcgtgcattaagatattattacgatggggacatgatttgtaaagttcaaggcaagagatttgtgtacaagtttgtctgtgacttgaagactcttattggatacagtgcagcggagttgaaccgtttggtcacagaatgtgaacagaagaaacttgcaaagatgcagctccatggaattgcccagccagtcacagcagtagctctggctactgcttctctgcaaacggaaaaggataattgagccccaggacattctgagactccaaagtctttcttaaaatgtttagagcaagtatagctcttacctttattactgaatttgaatcttcttttatttctaggctgtacagtctgatgcatgatttttttataaatatttcatactcttgtgaatttggatctttttactttgagcatatattttagaatatgtgtatgttaaaggatctccacaatgtctgcagtgtgaaggcaggttcattgtggaatagtttaacagtcaggaaggctaaactggtcagtattaatgtgtagccctaccaaaaatagccagtagtatctgaaaatgaaaaataaatgaagtatctctaggaaacagtctggcttaactatttttgaaaatataactgtttcccctctctgctgctttagatgttgctttacatagaaccagaaaatggaatttctcagctaaagcatgtgtgcctgtttcatctaatcaagcagagctaaaatgttcataccgaataaatttatattaataaattactaaactaagagtatcaggttatttatatatttgcaagcaaaggacagtaagaagttgactggcaaaagagcagtgctgaaggaggagatccaggtttaaatctggcttattaactcaagccaattttaaggattttctgtatagattactcatgtcagaccaagaatttaaattattttgagagaggcatttaattctaataaaccagctgttataaaaattataaaatgatctctgtttttcctgtcagagatttaaaaaactgaaaaggtatacctcaacccaaaaataaaggtttgttttggtttgttatggcttccttttttaaaaaattaccctgtagtgccagtttattatgcaaagcagcttatattcctttgtttctgataaaatgaagactttaaatcagtcagtagtactttacctttcaaggcattagtaaattacttgcaaatagttttaaaaggaaaatacgacctttgttataggcagtcttctctttaagacaatacttttccacttgttttccttttccatattatatatgtgtattcatatagctgtatacatattcagttgatcattttataaacatatgaaggcataaagatatacagaagaaaaattattaaacaactcattttaagattcaaattaactaattcctgcatatatgacattccttacataagcgaacactaaacaaaaatggctagaaatgtctttttctttcttttctctctttgttgtttaaggtattaagcacgaattattacatgagactggcagatagctattaatcctcttacagatttgagaaagttgattctcaaatatttatgcaccttctccttcattgttttctttaaatctgtcctcttaaaaagcttcttaagagctcagttaatgcttttgacttaactaggagaaaaaggcatgataatacaggcaagatggcattgttagcaattctggtagtggtttggaatgaatcctaagaggcagggatcttaaggacaaggaagagaagagagagagggagggatctttgatctctttctctggtaatcttaatgcataattttactaaaacatgttctcaattcattcatattattaagctcttcctgcagttgatatctgagcagagtaagatttgtatttccatttttacttttttgaaagagaatatatggacagattattagtacaatttgggcactgtggttttaagaatatctgagtaaaataacaatatgaaataataaacagaagctctaacgtcaggtaacaaatagacagcaagaaaggttttgcaccatcctcttacggcctagagagttgacaagttgcttgtagttttaaaaaaataataaagtatacccttctggtatatcatcaagagcttaagaatcttggctttcatatttaaaatgcttttggggagacatatattaaaattttagccaagatgatagacatgtctcaattatatatgtgtgtgtatgtttttaaagctaaaaacattacttttagatccctagaatgaaaatttttttctcatctatgcaattcccatatggttttttttaaatcatattttattcattttctccctttagcaattttcattttatttctcataatttgaacagagacagttctcatacatgatcagatgctttttttttcttcttaccatcatttatgcatgacataggtaatgtgactaatttctccagttgattcaagaaactcattactttgcctcaaattatatgtaaaatatttgttttacttaggttacagttatcagaaaggtagtttttttcttctattaaaatataacattgtgaaagaaaataaaatttatgctattctttgctttgtttttataaatgaatttttcatagaatttacagtatattcaaaggaagaaagataaaattattggtcatcatttgtaccttagaagtacaagaatttaagtaaaagaaatgttcatttttgttttaaaatttgttttccatgtgaagtttttattgagccaactttcatacatatcttgctagcctaaagtctaaatatttgtgttggcatcagaaaaacaaatgaggcagaattgctatgtgtggttgatcttcagataaattgactgatcacagttatttttgtatcagtctatgttattaggaaaaattgtttagttgttttctcccctgattaatggtgatattcaagtatgatacaaaaagaattgtaccaccaaatatttttgtgaggtctgctgttttccatattcattttatgctactgcctttaagaaagaactagtgtatccttgaaatagcacaaaaatgttttaaaattcataattgcaaaacaaatctgtgactaacttaatgtcttcagatctaaagggtgtaaaaatattgatacttcaatatttcacttgctgccaggaaaaacaaaattctcaatcttttgtaaatgggaggaggacttttgcatacatttttactctttaaataacgacaacgacacttatactgtcataataacaattatgtatttctttgtggttttaattttttttgtaattttacataaaacagttattttctatttttacgcagataaatatttgtgcataaaatgtaaaaatagtaaaatgagaaaaataaaactattatacagta

SEQ ID NO: 288047 - DNA, 4858 bp, Homo sapiens
  misc_feature (1094)..(1095): n is a, c, g, or t
acccgaaggtgcctgggaggcgggaggggggttggggcttctcagcgccgattccgcgggaagggccctgggacctcacacttctagtcgcgggagctgcaggtcttacccggagagacgctgcacgtggagccctcgccgctgccgttctcagccggctctggagtgcgggcgggggcgacagggccgattccggagtgggactgatcctttgaaatactccagccatgactaaaagagaagcagaggagctgatagaaattgagattgatggaacagagaaagcagagtgcacagaagaaagcattgtagaacaaacctacgcgccagctgaatgtgtaagccaggccatagacatcaatgaaccaataggcaatttaaagaaactgctagaaccaagactacagtgttctttggatgctcatgaaatttgtctgcaagatatccagctggatccagaacgaagtttatttgaccaaggagtaaaaacagatggaactgtacagcttagtgtacaggtaatttcttaccaaggaattgaaccaaagttaaacatccttgaaattgttaaacctgcggacactgttgaggttgttattgatccagatgcccaccatgctgaatcagaagcacatcttgttgaagaagctcaagtgataactcttgatggcacaaaacacatcacaaccatttcagatgaaacttcagaacaagtgacaagatgggctgctgcactggaaggctataggaaagaacaagaacgccttgggataccctatgatcccatacagtggtccacagaccaagtcctgcattgggtggtttgggtaatgaaggaattcagcatgaccgatatagacctcaccacactcaacatttcggggagagaattatgtagtctcaaccaagaagatttttttcagcgggttcctcggggagaaattctctggagtcatctggaacttctccgaaaatatgtattggcaagtcaagaacaacagatgaatgaaatagttacaattgatcaacctgtgcaaattattccagcatcagtgcaatctgctacacctactaccattaaagttataaatagnngtgcgaaagcagccaaagtacaaagagcgccgaggatttcaggagaagatagaagctcacctgggaacagaacaggaaacaatggccaaatccaactatggcagtttttgctagaacttcttactgataaggacgctcgagactgcatttcttgggttggtgatgaaggtgaatttaagctaaatcagcctgaactggttgcacagaaatggggacagcgtaaaaataagcctacgatgaactatgagaaactcagtcgtgcattaagatattattacgatggggacatgatttgtaaagttcaaggcaagagatttgtgtacaagtttgtctgtgacttgaagactcttattggatacagtgcagcggagttgaaccgtttggtcacagaatgtgaacagaagaaacttgcaaagatgcagctccatggaattgcccagccagtcacagcagtagctctggctactgcttctctgcaaacggaaaaggataattgagccccaggacattctgagactccaaagtctttcttaaaatgtttagagcaagtatagctcttacctttattactgaatttgaatcttcttttatttctaggctgtacagtctgatgcatgatttttttataaatatttcatactcttgtgaatttggatctttttactttgagcatatattttagaatatgtgtatgttaaaggatctccacaatgtctgcagtgtgaaggcaggttcattgtggaatagtttaacagtcaggaaggctaaactggtcagtattaatgtgtagccctaccaaaaatagccagtagtatctgaaaatgaaaaataaatgaagtatctctaggaaacagtctggcttaactatttttgaaaatataactgtttcccctctctgctgctttagatgttgctttacatagaaccagaaaatggaatttctcagctaaagcatgtgtgcctgtttcatctaatcaagcagagctaaaatgttcataccgaataaatttatattaataaattactaaactaagagtatcaggttatttatatatttgcaagcaaaggacagtaagaagttgactggcaaaagagcagtgctgaaggaggagatccaggtttaaatctggcttattaactcaagccaattttaaggattttctgtatagattactcatgtcagaccaagaatttaaattattttgagagaggcatttaattctaataaaccagctgttataaaaattataaaatgatctctgtttttcctgtcagagatttaaaaaactgaaaaggtatacctcaacccaaaaataaaggtttgttttggtttgttatggcttccttttttaaaaaattaccctgtagtgccagtttattatgcaaagcagcttatattcctttgtttctgataaaatgaagactttaaatcagtcagtagtactttacctttcaaggcattagtaaattacttgcaaatagttttaaaaggaaaatacgacctttgttataggcagtcttctctttaagacaatacttttccacttgttttccttttccatattatatatgtgtattcatatagctgtatacatattcagttgatcattttataaacatatgaaggcataaagatatacagaagaaaaattattaaacaactcattttaagattcaaattaactaattcctgcatatatgacattccttacataagcgaacactaaacaaaaatggctagaaatgtctttttctttcttttctctctttgttgtttaaggtattaagcacgaattattacatgagactggcagatagctattaatcctcttacagatttgagaaagttgattctcaaatatttatgcaccttctccttcattgttttctttaaatctgtcctcttaaaaagcttcttaagagctcagttaatgcttttgacttaactaggagaaaaaggcatgataatacaggcaagatggcattgttagcaattctggtagtggtttggaatgaatcctaagaggcagggatcttaaggacaaggaagagaagagagagagggagggatctttgatctctttctctggtaatcttaatgcataattttactaaaacatgttctcaattcattcatattattaagctcttcctgcagttgatatctgagcagagtaagatttgtatttccatttttacttttttgaaagagaatatatggacagattattagtacaatttgggcactgtggttttaagaatatctgagtaaaataacaatatgaaataataaacagaagctctaacgtcaggtaacaaatagacagcaagaaaggttttgcaccatcctcttacggcctagagagttgacaagttgcttgtagttttaaaaaaataataaagtatacccttctggtatatcatcaagagcttaagaatcttggctttcatatttaaaatgcttttggggagacatatattaaaattttagccaagatgatagacatgtctcaattatatatgtgtgtgtatgtttttaaagctaaaaacattacttttagatccctagaatgaaaatttttttctcatctatgcaattcccatatggttttttttaaatcatattttattcattttctccctttagcaattttcattttatttctcataatttgaacagagacagttctcatacatgatcagatgctttttttttcttcttaccatcatttatgcatgacataggtaatgtgactaatttctccagttgattcaagaaactcattactttgcctcaaattatatgtaaaatatttgttttacttaggttacagttatcagaaaggtagtttttttcttctattaaaatataacattgtgaaagaaaataaaatttatgctattctttgctttgtttttataaatgaatttttcatagaatttacagtatattcaaaggaagaaagataaaattattggtcatcatttgtaccttagaagtacaagaatttaagtaaaagaaatgttcatttttgttttaaaatttgttttccatgtgaagtttttattgagccaactttcatacatatcttgctagcctaaagtctaaatatttgtgttggcatcagaaaaacaaatgaggcagaattgctatgtgtggttgatcttcagataaattgactgatcacagttatttttgtatcagtctatgttattaggaaaaattgtttagttgttttctcccctgattaatggtgatattcaagtatgatacaaaaagaattgtaccaccaaatatttttgtgaggtctgctgttttccatattcattttatgctactgcctttaagaaagaactagtgtatccttgaaatagcacaaaaatgttttaaaattcataattgcaaaacaaatctgtgactaacttaatgtcttcagatctaaagggtgtaaaaatattgatacttcaatatttcacttgctgccaggaaaaacaaaattctcaatcttttgtaaatgggaggaggacttttgcatacatttttactctttaaataacgacaacgacacttatactgtcataataacaattatgtatttctttgtggttttaattttttttgtaattttacataaaacagttattttctatttttacgcagataaatatgggcctaccctgtccctccgtcccctgggaaattaaactattttccgccaacaaacacaacaacacacccccacacacacacagcgcgccaccc

SEQ ID NO: 288048 - DNA, 2592 bp, Homo sapiens
tcgaggacttagccattcagtttagtgttcgcttatgaaaggaatgtcatatatgcaggaattagttaatttgaatcttaaaatgagttgttttccttttccatattatatatgtgtattcatatagctgtatacatattcagttgatcattttataaacatatgaaggcataaagatatacagaagaaaaattattaaacaactcattttaagattcaaattaactaattcctgcatatatgacattccttacataagcgaacactaaacaaaaatggctagaaatgtctttttctttcttttctctctttgttgtttaaggtattaagcacgaattattacatgagactggcagatagctattaatcctcttacagatttgagaaagttgattctcaaatatttatgcaccttctccttcattgttttctttaaatctgtcctcttaaaaagcttcttaagagctcagttaatgcttttgacttaactaggagaaaaaggcatgataatacaggcaagatggcattgttagcaattctggtagtggtttggaatgaatcctaagaggcagggatcttaaggacaaggaagagaagagagagagggagggatctttgatctctttctctggtaatcttaatgcataattttactaaaacatgttctcaattcattcatattattaagctcttcctgcagttgatatctgagcagagtaagatttgtatttccatttttacttttttgaaagagaatatatggacagattattagtacaatttgggcactgtggttttaagaatatctgagtaaaataacaatatgaaataataaacagaagctctaacgtcaggtaacaaatagacagcaagaaaggttttgcaccatcctcttacggcctagagagttgacaagttgcttgtagttttaaaaaaataataaagtatacccttctggtatatcatcaagagcttaagaatcttggctttcatatttaaaatgcttttggggagacatatattaaaattttagccaagatgatagacatgtctcaattatatatgtgtgtgtatgtttttaaagctaaaaacattacttttagatccctagaatgaaaatttttttctcatctatgcaattcccatatggttttttttaaatcatattttattcattttctccctttagcaattttcattttatttctcataatttgaacagagacagttctcatacatgatcagatgctttttttttcttcttaccatcatttatgcatgacataggtaatgtgactaatttctccagttgattcaagaaactcattactttgcctcaaattatatgtaaaatatttgttttacttaggttacagttatcagaaaggtagtttttttcttctattaaaatataacattgtgaaagaaaataaaatttatgctattctttgctttgtttttataaatgaatttttcatagaatttacagtatattcaaaggaagaaagataaaattattggtcatcatttgtaccttagaagtacaagaatttaagtaaaagaaatgttcatttttgttttaaaatttgttttccatgtgaagtttttattgagccaactttcatacatatcttgctagcctaaagtctaaatatttgtgttggcatcagaaaaacaaatgaggcagaattgctatgtgtggttgatcttcagataaattgactgatcacagttatttttgtatcagtctatgttattaggaaaaattgtttagttgttttctcccctgattaatggtgatattcaagtatgatacaaaaagaattgtaccaccaaatatttttgtgaggtctgctgttttccatattcattttatgctactgcctttaagaaagaactagtgtatccttgaaatagcacaaaaatgttttaaaattcataattgcaaaacaaatctgtgactaacttaatgtcttcagatctaaagggtgtaaaaatattgatacttcaatatttcacttgctgccaggaaaaacaaaattctcaatcttttgtaaatgggaggaggacttttgcatacatttttactctttaaataacgacaacgacacttatactgtcataataacaattatgtatttctttgtggttttaattttttttgtaattttacataaaacagttattttctatttttacgcagataaatatttgtgcataaaatgtaaaaatagtaaaatgagaaaaataaaactattatacagtaaaaaaaaaaaaaaaaaaaaaaaaaaacacaacaacaaaaaaacaaaaaaaaaaacccaggcccccccccccacaaagcacaacgatcggcacaacccgcaaacccctcagagaacggaggcgccacgcgaggcgagcacaccgaaaccgtacaactaaaacacgacgacaacacagacagacgatctctaacacagcgcacaacgacaagagcaacccaaacaagcaccgcgacagacaacacgtcacatcgctccacggacaacgagcccaccaccgaagtaacaaagacacacaacgaaaacaaacaagcgcacaaacaaaacc

SEQ ID NO: 288049 - DNA, 1169 bp, Homo sapiens
aattattggtcatcatttgtaccttagaagtacaagaattttatctttcttcctttgaatttacagtatattcaaaggaagaaagataaaattattggtcatcatttgtaccttagaagtacaagaatttaagtaaaagaaatgttcatttttgttttaaaatttgttttccatgtgaagtttttattgagccaactttcatacatatcttgctagcctaaagtctaaatatttgtgttggcatcagaaaaacaaatgaggcagaattgctatgtgtggttgatcttcagataaattgactgatcacagttatttttgtatcagtctatgttattaggaaaaattgtttagttgttttctcccctgattaatggtgatattcaagtatgatacaaaaagaattgtaccaccaaatatttttgtgaggtctgctgttttccatattcattttatgctactgcctttaagaaagaactagtgtatccttgaaatagcacaaaaatgttttaaaattcataattgcaaaacaaatctgtgactaacttaatgtcttcagatctaaagggtgtaaaaatattgatacttcaatatttcacttgctgccaggaaaaacaaaattctcaatcttttgtaaatgggaggaggacttttgcatacatttttactctttaaataacgacaacgacacttatactgtcataataacaattatgtatttctttgtggttttaattttttttgtaattttacataaaacagttattttctatttttacgcagataaatatttgtgcataaaatgtaaaaatagtaaaatgagaaaaataaaactattatacagtaaaaaaaaaaaaaaaaaaaaaaaaaaacacaacaacaaaaaaacaaaaaaaaaaacccaggcccccccccccacaaagcacaacgatcggcacaacccgcaaacccctcagagaacggaggcgccacgcgaggcgagcacaccgaaaccgtacaactaaaacacgacgacaacacagacagacgatctctaacacagcgcacaacgacaagagcaacccaaacaagcaccgcgacagacaacacgtcacatcgctccacggacaacgagcccaccaccgaagtaacaaagacacacaacgaaaacaaacaagcgcacaaacaaaacc

SEQ ID NO: 288050 - DNA, 404 bp, Homo sapiens
aatattaattgctattgtggcggatgcagtactctactaggcttctgcttatggaatagtctgtaaattattgtaagaagtctcattttttctgaagtctctaatttttttttctctttttgaagatattattacgatggggacatgatttgtaaagttcaaggcaagagatttgtgtacaagtttgtctgtgacttgaagactcttattggatacagtgcagcggagttgaaccgtttggtcacagaatgtgaacagaagaaacttgcaaagatgcagctccatggaattgcccagccagtcacagcagtagctctggctactgcttctctgcaaacggaaaaggataattgagccccaggacattctgagactccaaagtctttcttaaaatgtttagagca

SEQ ID NO: 288051 - DNA, 350 bp, Homo sapiens
gaaaaggtatacctcaacccaaaaataaaggtttgttttggtttgttatggcttccttttttaaaaaattaccctgtagtgccagtttattatgcaaagcagcttatattcctttgtttctgataaaatgaagactttaaatcagtcagtagtactttacctttcaaggcattagtaaattacttgcaaatagttttaaaaggaaaatacgacctttgttataggcagtcttctctttaagacaatacttttccacttgttttccttttccatattatatatgtgtattcatatagctgtatacatattcagttgatcattttataaacatatgaaggcataaagatata

SEQ ID NO: 288052 - DNA, 311 bp, Homo sapiens
gcaggtagaactgccaggtaggtgtactgactaatttcttttcttttgctactatctaaataacaaagcatgcttttccaactgcagataaacgaagaaaggaatcaggtaagtgagtgctggtttggcattttgtggtgtgagttgacagctactgtaaatcattatggctaagacttgattagtgctgcaaaaaatccataaaaatcttattttagtttgtttaaactttcttgtactttacttttcagcaaaactgctcattgaaagtcatctcattgaatcctaatgacctgtcagttaggtctagg

SEQ ID NO: 288053 - DNA, 635 bp, Homo sapiens
gcccaaccttcctctgcagcgccctaccgacccgcgctccgcagctcctgagggctttcgagcccagatggtcatctgagacgagaggtggcggcgaaggagagtctcgcctgtcacgctcccggagcaggggcttcatgaggtggccatggaaacagcctggcagactcccatctctcctggtgccatctccggagcggaaagtggagcgccccgctggcgaccaaggccgcactgagagccctggtttggtcaacagttgggctccaaggagccctggtattccttgaacatgcatacctttcccagcgtgagggacatggaccgtgccgtgcgagggaccccatcttctgcagcaggagggagcagagaagagaacacagggattcctgttgctaaaaggtctgttttctcctgctagccaccctcatcagccagagttcaaaccctgacagtgcccatggagagatctggtccaaggcaccaacctcttcctgctggactgagaaagagcctcctactgtgtctctctttacctcagcttttgcacacctccaatatattgtccactgaagtcagaataatctaaaaataaaggctgattacctcatgtggtataaacttaaaaaaaactc

SEQ ID NO: 288054 - DNA, 865 bp, Homo sapiens
aaaaaattgtaaccaccttggcagattgtggtgtaagcacaaaaagagttatcatttgcaaagaacgctgagctgccaacaccatgctgagggcagtgggacttcccagagtagtagaatacatgcagcctggtgtatattgagtttttgagcctatcactcagattctattctggaaatttcctctccttgttgaccctgcccccatttggtcaccctccctgccctaggactgagtacgaaggaaaggttattctactattctgtgctgggaggcagacatcgtcatacttaccaaggctgcttatgagatcttggagatacagaatggaaatgaccccacagtctctgggtaacaccctggagactgtattcaagctgcctgtagcaatatgaaggcttatgatcatttcatgttcatttaagggatgtatacatagttaaggaaaccatgagcaagaaaggagccctggtattccttgaacatgcatacctttcccagcgtgagggacatggaccgtgccgtgcgagggaccccatcttctgcagcaggagggagcagagaagagaacacaggttcagggtacatgtgcaggtgcattacataaacttgtcatgaagatttgttgtacagattatttcgtcacccagccaccctcatcagccagagttcaaaccctgacagtgcccatggagagatctggtccaaggcaccaacctcttcctgctggactgagaaagagcctcctactgtgtctctctttacctcagcttttgcacacctccaatatattgtccactgaagtcagaataatctaaaaataaaggctgattacctcatgtggtataaacttaaaaaaaactc

SEQ ID NO: 288055 - DNA, 874 bp, Homo sapiens
gcccaaccttcctctgcagcgccctaccgacccgcgctccgcagctcctgagggctttcgagcccagatggtcatctgagacgagaggtggcggcgaaggagagtctcgcctgtcacgctcccggagcaggggcttcatgaggtggccatggaaacagcctggcagactcccatctctcctggtgccatctccggagcggaaagtggagcgccccgctggcgaccaaggccgcactgagagccctggtttggtcaacagttgggctccaagaagtctcttcctttcactctgctgagtgaagcccttcctgccctcaggctggaccatggcttccatgctgcccctcttttcaaggctgcttgtctacagttctacaggtttctaggcccttggtgagtgaagagcagttcattacgaaatgacctccaagaacaaggctcagcattctctgaaatctcatgaagcagtgtaaccagctctcaagtatcttcctgtgaactagccacagggagccctggtattccttgaacatgcatacctttcccagcgtgagggacatggaccgtgccgtgcgagggaccccatcttctgcagcaggagggagcagagaagagaacacagggattcctgttgctaaaaggtctgttttctcctgctagccaccctcatcagccagagttcaaaccctgacagtgcccatggagagatctggtccaaggcaccaacctcttcctgctggactgagaaagagcctcctactgtgtctctctttacctcagcttttgcacacctccaatatattgtccactgaagtcagaataatctaaaaataaaggctgattacctcatgtggtataaacttaaaaaaaactc

SEQ ID NO: 288056 - DNA, 424 bp, Homo sapiens
gctgggagtttggccaggcagattcagggcattaaacttaggaaccacagcaacgctgaccctccggcgaggcatattctgcaggaagagaagtgaccaggctcactgtcttggaggtagcaatagccatagttcagaagggctgggaaaaagcctcctcatttctaatgctgtaatggcattcactggatattttggttttgcagtagcaatgatagaattggtgtggagagagtggccaaagttgacccaaattttctgttgttggtgagtgaacgctcaatctgttctattttagcttatgagatcttggagatacagaatggaaatgaccccacagtctctgggtaacaccctggagactgtattcaagctgcctgtagcaatatgaaggcttatgatcatttcatgttcatttaaggga

SEQ ID NO: 288057 - DNA, 597 bp, Homo sapiens
gcccaaccttcctctgcagcgccctaccgacccgcgctccgcagctcctgagggctttcgagcccagatggtcatctgagacgagaggtggcggcgaaggagagtctcgcctgtcacgctcccggagcaggggcttcatgaggtggccatggaaacagcctggcagactcccatctctcctggtgccatctccggagcggaaagtggagcgccccgctggcgaccaaggccgcactgagagccctggtttggtcaacagttgggctccaaggagccctggtattccttgaacatgcatacctttcccagcgtgagggacatggaccgtgccgtgcgagggaccccatcttctgcagcaggagggagcagagaagagaacacagccaccctcatcagccagagttcaaaccctgacagtgcccatggagagatctggtccaaggcaccaacctcttcctgctggactgagaaagagcctcctactgtgtctctctttacctcagcttttgcacacctccaatatattgtccactgaagtcagaataatctaaaaataaaggctgattacctcatgtggtataaacttaaaaaaaactc

SEQ ID NO: 288058 - DNA, 702 bp, Homo sapiens
cgcggagctcggagccagaagcagggacaagctccctcaaccgagccaacggtcctccgccacagacaaggggatgcgggaggaggaagggtgtgctctctgcccgcggtccggaggccccacgccccggtcccaagtccccggctgccgtctctccccgctccccacgtgacccggcccgggggactctggccgccctgctctcacctgtggggatgcccagctgcttggagccgcggccgaagccccgcaccacttgaccccggcagaagtaaggcaggtgcctcataatgcagtccgctcggggcatgggctgcggcccggtctgcgcgtcctgcggggccgccgtcgacgcggcgcccagaccccggaccagccgggggacaggagcgtgagctctgcctgccgcgggggcgcaccagtggccggacgacgccgaccacaggccactgcgaatccctgacgccgccgacccaacaaataccgccgggcgcctgaggagctgcgtctccgctggagggcagcggagacagccgaagccaggcttggtggctcacgcctgtattcccagtagtttgagaggccgacgcgggaggattgattgagcccaggaggtcgaggctgcactgagctatgataacgccactgcactccagactgggcgacacaatttctttaaagactcgtgcagcacatcattat

SEQ ID NO: 288059 - DNA, 1696 bp, Homo sapiens
cgcggagctcggagccagaagcagggacaagctccctcaaccgagccaacggtcctccgccacagacaaggggatgcgggaggaggaagggtgtgctctctgcccgcggtccggaggccccacgccccggtcccaagtccccggctgccgtctctccccgctccccacgtgacccggcccgggggactctggccgccctgctctcacctgtggggatgcccagctgcttggagccgcggccgaagccccgcaccacttgaccccggcagaagtaaggcaggtgcctcataatgcagtccgctcggggcatgggctgcggcccggtctgcgcgtcctgcggggccgccgtcgacgcggcgcccagaccccggaccagccgggggacaggagcgtgagctctgcctgccgcgggggcgcaccagtggccggacgacgccgaccacaggccactgcgaatccctgacgccgccgacccaacaaataccgccgggcgcctgaggagctgcgtctccgctggagggcagcggagacagccgaagccaggcttggtggctcacgcctgtattcccagtagtttgagaggccgacgcgggaggattgattgagcccaggaggtcgaggctgcactgagctatgataacgccactgcactccagactgggcgacacaaggggcccatacggcgttgttctggattcccgtcgtaacttaaagggaaactttcacaatgtccggagcccttgatgtcctgcaaatgaaggaggaggatgtccttaagttccttgcagcaggaacccacttaggtggcaccaatcttgacttccagatggaacagtacatctgtaaaaggaaaagtaatggcatctatatcataaatctgaagaggacctgggagaagcttctgctggcagctagtgctattgttgccattgaaaaaccctgctgagtgtcagtgttatatccctccaggaatactggccagagggctgtgctgaagtttgctgctgccactggagccactccaattgctggccgcttcactcctggaaccttcactaaccagatccaggcagccttccgggagccacggcttcttgtggttactgaccccagggctgaccaccagcctctcacggaggcatcttatgttaacctacctaccattgcgctgtgtaacacagattctcctctgcgctatgtggacattgccatcccatgcaacaacaagggagctcactcagtgggtttgatgtggtggatgctggctcgggaagttctgcgcatgcgtggcaccatttcccgtgaacacccgtgggaggtcatgcctgatctgtacttctacagagatcctgaagagattgaaaaagaagagcaggctgctgctgagaaggcagtgaccaaggaggaatttcagggtgaatggactgctcccgctcctgagttcactgctactcagcctgaggttgcagactggtctgaaggtgtacaggtgccctctgtgcctattcagcaattccctactgaagactggagcgctcagcctgccacggaagactggtctgcagctcccactgctcaggccactgaatgggtaggagcacccactgactggtcttaagctgttcttgcataggctcttaagcagcatggaaaaatggttgatggaaaataaacatcagtttcttaaaaaaaaaaa

SEQ ID NO: 288060 - DNA, 1497 bp, Homo sapiens
ttaaattaaatgaggtcataagagtggggccctagtctgataggactggtgtccttacaagaagagggagagtcctcagagagtcctctctctcggcatggacacaaaagaaaagccatgtgaggacacagagagaaggtggctgtctacgagctaggaagaaaggcctcaccggaaaccaaccctcacagcagctccatcttggacttccagcctccggaactgtgagaaaataaatgtttgcaattcaggctcagagccactcagacattgggaagcaagtttgtcaagatgacagagaaccgaggtaatggattcgagtgatgaaacaggaagttcattcatgagtttttggccacacctccaaagtgacgacttagccagaaatgggataactgggtttccctacttctcttttatcatcctcaatgagagtgaccaaatattagagctagatggaaccttagtgaaaatctggctactcgtcccgtcccaccagcctgccacccatttcaagtttgaagagacaaagacacatggaccttatgtaattactggggattaccccaggagtctgtggcaaaagtcagtttcttccctccctgcttccccgccctgtctctggtactttctaccaacactgggctgtttctgtgatcacacttaagcgtacctaacctgcgaatgctgtatagaaggtgctaatgaacatgatttagctttaacactcagttttctaaagggacacgtgggggcagcaaatgtttaggcaaaaacaattcccagttctagcctctactgtctacatatgtgtatacatttgggaaacgtttgggaaagggatatttgagagcttctttttcttttttgtggtttagttatttgatgatattgagattgtttctgagccatgtgcttcaacatcggattggggatttcagaaaaagttttagtcactgtgattccatttagcttccaaatgtgtctctgctaagagacttaaaagcactcataaatagcacgtgtgtcttctttgcagtgtttgctaattttgagtcacatctttttagaaaatcatgagatttggtgtcacagagactggaataaatatagtcaaacttattggtgaagatttcctttagctgttttcataatccatttccattgttatgattattgatgaataaaacattttctttaggtagatacttcttttttccccccaccttgatttaatgtttccactcttattgtcaagtttcttattactccctaataactctcaataaaataatgattcctgggagattattcctgctttcctactatcaccagttgatttgaaaagacagaacaataccgtagaagcttcactaatacattgaaagataaaatgataatactaaatactaaaatatgaaaagtgatactaaaagtggagtcctggcactagtatttttttttttgagtctttaaattttatttatttatttttga

SEQ ID NO: 288061 - DNA, 1805 bp, Homo sapiens
ttaaattaaatgaggtcataagagtggggccctagtctgataggactggtgtccttacaagaagagggagagtcctcagagagtcctctctctcggcatggacacaaaagaaaagccatgtgaggacacagagagaaggtggctgtctacgagctaggaagaaaggcctcaccggaaaccaaccctcacagcagctccatcttggacttccagcctccggaactgtgagaaaataaatgtttgcaattcaggtcggttgtattttgtgaaggccatcctagcaaatgaatactcctaacattgtctctttaagagctcaccagcctgaggtaggaatcattccatctgtgttactaatgagaccgctgaggatcaaaggggttttccaccacatccactcacctctacatggcgaaaaccaagggttcactctctgtcttcagggagctccacccagcagcagcgtttgacagagctgttcacttcctcttcctggagctgtggcttccagagcccatgctcagcagttcccctccttcttcgactgctcctctcttaggctcagagccactcagacattgggaagcaagtttgtcaagatgacagagaaccgaggtaatggattcgagtgatgaaacaggaagttcattcatgagtttttggccacacctccaaagtgacgacttagccagaaatgggataactgggtttccctacttctcttttatcatcctcaatgagagtgaccaaatattagagctagatggaaccttagtgaaaatctggctactcgtcccgtcccaccagcctgccacccatttcaagtttgaagagacaaagacacatggaccttatgtaattactggggattaccccaggagtctgtggcaaaagtcagtttcttccctccctgcttccccgccctgtctctggtactttctaccaacactgggctgtttctgtgatcacacttaagcgtacctaacctgcgaatgctgtatagaaggtgctaatgaacatgatttagctttaacactcagttttctaaagggacacgtgggggcagcaaatgtttaggcaaaaacaattcccagttctagcctctactgtctacatatgtgtatacatttgggaaacgtttgggaaagggatatttgagagcttctttttcttttttgtggtttagttatttgatgatattgagattgtttctgagccatgtgcttcaacatcggattggggatttcagaaaaagttttagtcactgtgattccatttagcttccaaatgtgtctctgctaagagacttaaaagcactcataaatagcacgtgtgtcttctttgcagtgtttgctaattttgagtcacatctttttagaaaatcatgagatttggtgtcacagagactggaataaatatagtcaaacttattggtgaagatttcctttagctgttttcataatccatttccattgttatgattattgatgaataaaacattttctttaggtagatacttcttttttccccccaccttgatttaatgtttccactcttattgtcaagtttcttattactccctaataactctcaataaaataatgattcctgggagattattcctgctttcctactatcaccagttgatttgaaaagacagaacaataccgtagaagcttcactaatacattgaaagataaaatgataatactaaatactaaaatatgaaaagtgatactaaaagtggagtcctggcactagtatttttttttttgagtctttaaattttatttatttatttttga

SEQ ID NO: 288062 - DNA, 2031 bp, Homo sapiens
ttaaattaaatgaggtcataagagtggggccctagtctgataggactggtgtccttacaagaagagggagagtcctcagagagtcctctctctcggcatggacacaaaagaaaagccatgtgaggacacagagagaaggtggctgtctacgagctaggaagaaaggcctcaccggaaaccaaccctcacagcagctccatcttggacttccagcctccggaactgtgagaaaataaatgtttgcaattcaggtcggttgtattttgtgaaggccatcctagcaaatgaatactcctaacattgtctctttaagagctcaccagcctgaggtaggaatcattccatctgtgttactaatgagaccgctgaggatcaaaggggttttccaccacatccactcacctctacatggcgaaaaccaagggttcactctctgtcttcagggagctccacccagcagcagcgtttgacagagctgttcacttcctcttcctggagctgtggcttccagagcccatgctcagcagttcccctccttcttcgactgctcctctcttaggctcaaaacctgtaacaatgcatggcacacggaagatgtgagaatttgctgaataactgaatggcaccatgttgcctcacctaaggataatgactaagaataggaaaaatttactgtgcaaagatcagttcttaatagctgtctacatctcagaacaaaaaaaattagatgtaaaccattgcacaaaggattagatgaaatttttttgaaaaatcagacattggaggctcagagccactcagacattgggaagcaagtttgtcaagatgacagagaaccgaggtaatggattcgagtgatgaaacaggaagttcattcatgagtttttggccacacctccaaagtgacgacttagccagaaatgggataactgggtttccctacttctcttttatcatcctcaatgagagtgaccaaatattagagctagatggaaccttagtgaaaatctggctactcgtcccgtcccaccagcctgccacccatttcaagtttgaagagacaaagacacatggaccttatgtaattactggggattaccccaggagtctgtggcaaaagtcagtttcttccctccctgcttccccgccctgtctctggtactttctaccaacactgggctgtttctgtgatcacacttaagcgtacctaacctgcgaatgctgtatagaaggtgctaatgaacatgatttagctttaacactcagttttctaaagggacacgtgggggcagcaaatgtttaggcaaaaacaattcccagttctagcctctactgtctacatatgtgtatacatttgggaaacgtttgggaaagggatatttgagagcttctttttcttttttgtggtttagttatttgatgatattgagattgtttctgagccatgtgcttcaacatcggattggggatttcagaaaaagttttagtcactgtgattccatttagcttccaaatgtgtctctgctaagagacttaaaagcactcataaatagcacgtgtgtcttctttgcagtgtttgctaattttgagtcacatctttttagaaaatcatgagatttggtgtcacagagactggaataaatatagtcaaacttattggtgaagatttcctttagctgttttcataatccatttccattgttatgattattgatgaataaaacattttctttaggtagatacttcttttttccccccaccttgatttaatgtttccactcttattgtcaagtttcttattactccctaataactctcaataaaataatgattcctgggagattattcctgctttcctactatcaccagttgatttgaaaagacagaacaataccgtagaagcttcactaatacattgaaagataaaatgataatactaaatactaaaatatgaaaagtgatactaaaagtggagtcctggcactagtatttttttttttgagtctttaaattttatttatttatttttga

SEQ ID NO: 288063 - DNA, 1161 bp, Homo sapiens
gtgagaaaatggctcgtcaccttggataccaatgttttacatcagggattggtcactcctgctgctgtcagcactgtaaacactgctggggggagtcagcccaagtccccaccccccagccaggtctcatagagggaattgttcttcaggctcggaggggcctgcctgtcactgcgcccccgaccctagctcagggactgcagaactcaagataccatcccgtttctcctggctgaggaagggaagggaacatccacatcttctgtactcgtccattctgtgtccccggggcctggagtaaagacaccttcaaatgcagagactcttcagattcagctttcctggaaactgatcttcaatgcactaagagaaggagactctcaaaccaaaaatgacctggaggcaccatgtcaggcttctgtttacggtcagtttggcattacagatcatcaatttgggaaacagctatcaaagagagaaacataacggcggtagagaggaagtcaccaaggttgccactcagaagcaccgacagtcaccgctcaactggacctccagtcatttcggagaggtgactgggagcgccgagggctgggggccggaggagccgctcccctactcccgggctttcggagagggtgcgtccgcgcggccgcgctgctgcaggaacggcggtacctgcgtgctgggcagcttctgcgtgtgcccggcccacttcaccggccgctactgcgagcatgaccagaggcgcagtgaatgcggcgccctggagcacggagcctggaccctccgcgcctgccacctctgcaggtgcatcttcggggccctgcactgcctccccctccagacgcctgaccgctgtgacccgaaagacttcctggcctcccacgctcacgggccgagcgccgggggcgcgcccagcctgctactcttgctgccctgcgcactcctgcaccgcctcctgcgcccggatgcgcccgcgcaccctcggtccctggtcccttccgtcctccagcgggagcggcgcccctgcggaaggccgggacttgggcatcgcctttaattttctatgttgtaaataatagatgtgtttagtttaccgtaagctgaagcactgggtgaatatttttattgggtaataaatattttcatgaaagcgcc

SEQ ID NO: 288064 - DNA, 1209 bp, Homo sapiens
gtgagaaaatggctcgtcaccttggataccaatgttttacatcagggattggtcactcctgctgctgtcagcactgtaaacactgctggggggagtcagcccaagtccccaccccccagccaggtctcatagagggaattgttcttcaggctcggaggggcctgcctgtcactgcgcccccgaccctagctcagggactgcagaactcaagataccatcccgtttctcctggctgaggaagggaagggaacatccacatcttctgtactcgtccattctgtgtccccggggcctggagtaaagacaccttcaaatgcagagactcttcagattcagctttcctggaaactgatcttcaatgcactaagagaaggagactctcaaaccaaaaatgacctggaggcaccatgtcaggcttctgtttacggtcagtttggcattacagatcatcaatttgggaaacagctatcaaagagagaaacataacggcggtagagaggaagtcaccaaggttgccactcagaagcaccgacagtcaccgctcaactggacctccagtcatttcggagaggtgactgggagcgccgagggctgggggccggaggagccgctcccctactcccgggctttcggagagggtgcgtccgcgcggccgcgctgctgcaggaacggcggtacctgcgtgctgggcagcttctgcgtgtgcccggcccacttcaccggccgctactgcgagcatgaccagaggcgcagtgaatgcggcgccctggagcacggagcctggaccctccgcgcctgccacctctgcaggtgcatcttcggggccctgcactgcctccccctccagacgcctgaccgctgtgacccgaaagacttcctggcctcccacgctcacgggccgagcgccgggggcgcgcccagcctgctactcttgctgccctgcgcactcctgcaccgcctcctgcgcccggatgcgcccgcgcaccctcggtccctggtcccttccgtcctccagcgggagcggcgcccctgcggaaggccgggacttgggcatcgcctttaattttctatgttgtaaataatagatgtgtttagtttaccgtaagctgaagcactgggtgaatatttttattgggtaataaatattttcatgaaagcgcctttggctccagatccttgggagagggacacgtgtgtccccagcaccac

SEQ ID NO: 288065 - DNA, 1045 bp, Homo sapiens
gtgagaaaatggctcgtcaccttggataccaatgttttacatcagggattggtcactcctgctgctgtcagcactgtaaacactgctggggggagtcagcccaagtccccaccccccagccaggtctcatagagggaattgttcttcaggctcggaggggcctgcctgtcactgcgcccccgaccctagctcagggactgcagaactcaagataccatcccgtttctcctggctgaggaagggaagggaacatccacatcttctgtactcgtccattctgtgtccccggggcctggagtaaagacaccttcaaatgcagagactcttcagattcagctttcctggaaactgatcttcaatgcactaagagaaggagactctcaaaccaaaaatgacctggaggcaccatgtcaggcttctgtttacggtcagtttggcattacagatcatcaatttgggaaacagctatcaaagagagaaacataacggcggtagagaggaagtcaccaaggttgccactcagaagcaccgacagtcaccgctcaactggacctccagtcatttcggagaggtgactgggagcgccgagggctgggggccggaggagccgctcccctactcccgggctttcggagagggtgcgtccgcgcggccgcgctgctgcaggaacggcggtacctgcgtgctgggcagcttctgcgtgtgcccggcccacttcaccggccgctactgcgagcatgaccagaggcgcagtgaatgcggcgccctggagcacggagcctggaccctccgcgcctgccacctctgcaggtgcatcttcggggccctgcactgcctccccctccagacgcctgaccgctgtggtaagaggccctgtgattcggtccccagctcacccccgcacgcggttgcgccttcattgcggctcaccctccataccgatccacagtgcatcttccagtgccaggccacatagcatttagcaaagtagatcgattcatcattgaagaaagtcgcattcattgggaatcatatagtgaattaa

SEQ ID NO: 288066 - DNA, 736 bp, Homo sapiens
acggaagcgagctgatttatatactatagcactgttttaaatcgggtctatgtgccccatcgctcaatgacctggagcgggactccctgaaaggtcacgggccaaatgaaaaagacggaagggctgttcttcgttccccctttaaacacagtactgtaattctccttcagctctccgagttctacaaacatttagaggcttccctctgtgcagccggccgggactggcctccgcacacctcaccctgcagcgcgtcccagggacagagcctagtgagggcgcaggagaaaagggcctgcagaaggcagggagcaggcgtttctattgcactctctcaaaccgagccggaacactttatttcatacatctccggtttctctgtttttccagacccgaaagacttcctggcctcccacgctcacgggccgagcgccgggggcgcgcccagcctgctactcttgctgccctgcgcactcctgcaccgcctcctgcgcccggatgcgcccgcgcaccctcggtccctggtcccttccgtcctccagcgggagcggcgcccctgcggaaggccgggacttgggcatcgcctttaattttctatgttgtaaataatagatgtgtttagtttaccgtaagctgaagcactgggtgaatatttttattgggtaataaatattttcatgaaagcgcctttggctccagatccttgggagagggacacgtgtgtccccagcaccac

SEQ ID NO: 288067 - DNA, 742 bp, Homo sapiens
ctcactctgtcacctaggctggagtgcagtggcgcaatctccactcactgcaagctccgcctcccgagttccagttattctgcatcagcctcccgggtagccaggactacaggcacgtgcaagcacgcccggctaattttgtatttttagtagagacaggtttcaccatgttggtcaggagattgagaccatcctggccaacacggtgcaacaccgtctctactaaaaatacaaaaaaattagctgggcgtggtggtgggcacctgtagtcccagctactcgggagctgggattacaagtgcccgccaccacgcctggtctgccaatactttctatcagtctgtcatgtttactgtcttttcctccatacagaagtttttccttctcagttgggtcaagtccattgacctttctgttacagcttgagttttgtgtcttacgtagaaaaggtgcccctgctctcactttctgcacagctatcaggtccagctcatagcagttcttctatttatccatccactgccccaggagctgcctgggcattcactgccccgcacccctctccagccccaaggtagagctcgggccctgggagtcccaggaccatcccggactggggagctgcttggtgtccagccccgggctcaagctcttctccagctctgcagctacctgaggggtagcagcccggatagcatcctggatgttggttaggtcccactgggtcctcaggagggcactg

SEQ ID NO: 288068 - DNA, 576 bp, Homo sapiens
tgtggtggctcacggctgtaatcccagtactttgggaggccaagccaggcggatcacgaggtcaggagattgagaccatcctggccaacacggtgcaacaccgtctctactaaaaatacaaaaaaattagctgggcgtggtggtgggcacctgtagtcccagctactcgggaggctgaggcaggagaatggcgtgaacctgggaagcggaggttgcagtgagcctagatcgcaccactgcactccagcctgggccacaaagcaagtctcaaaaacaaaaacaaaaacaaaaaaatgattaacatttcaatcagtcaatgggtagactttgagtcacgctgattatccaccacaattgtgggcggagctcattcaataaactgaagacctttaagagaaaagactgaggtcccggccaggtgcggtggctcacgcctgtaatcccagcactttgggaggctgagccaggccaacatggtgaaacctcatctcggatacaaaaaattagccaggtgtggtggcgggcgcctgtgaccccagctacttgggaggctgaggcaggagaatcacttgaacc

SEQ ID NO: 288069 - DNA, 574 bp, Homo sapiens
tgcggccgcggctccagagcccctgggcctcgcgctctgagagcctgagccgcttgaggaggccaagcgcccacgaaccgcattccctgccttgctagttagttctccaacacgcgaaaaaggtagacgaggactggttttctttgcagctaaaatgaatcaagcctctgagattagttgtcactgtgttgcccaggctggtcttaaactcctaggctcgaaggagccttctacctcagcctcccaagtagctgagactataggcgagcacctccacaacatgcactttttatttcctttattttaatttttttttatttttttattatttttagagatggggtcttgctccgtcacccaggctggagttcactgcagcctcaaactcctgggctcactcaaccctcctgcctcagcctcccaaagtattaagatcacaggcataagctaccacgcccagcctgtaccttttatttctttttattgcctaattatagccctatccgttttggtgtcattttaaagtctaaatatatgatgtgtttttttgtcaatatatcacaaattacatatt

SEQ ID NO: 288070 - DNA, 608 bp, Homo sapiens
agtcatgtgtaggtggtcggtcccattgacaacctcaaatgagctgccagccaacaaccagcatcaactgccagtcagcttttgatgccattgtatctgacatcattctaacaggatcaaattgagcaacaacagcaacctaaaaatgagaaagcatggctacttggaacaagatgaagaaataaagcttacggaggttaagtaaatgacctgtttccagtgccggactccaggctctgctggttttacttctaatgcttccatcggaggacaacaatggttacattgacttaagatctgatgcaaatgtttaccttttggggtctgtcataccatgaagcaaacagacagaaaagaaggaaacagatggcacactgaaaattaggataagttaagaagaatgtaataagcggacaaccgacaaaggagggtgggaatgcagggcaaccgcaagggctcatacagtgctgggtgaggaggacccctgacgggagctgagatctttggtgaaggacacaactggtcagtacaaccctgcagggcaaggagctgcagaaacaactatccaaaccccacacctctccctcaccttgatctcccatgttcca

SEQ ID NO: 288071 - DNA, 2497 bp, Homo sapiens
acaggaagcgggcgcgcgacggctcctccgggcagcgcagcgcgggcgcctcttccactgtgaccacgggcgcgcgggccaagggggcgcggcggggcctcccgggctgatcggccgaagcccgggccccgcgcggcctctggcgggctgacgccgggaggaggggcgggggctggccagatgactgtatctatgcaaaggcggaggcggtgggcggggagggggctggattcagtagagggcaaggggcactcacatccccggcgcgccactcgcggggctcctttctgcacgtgccccgggcctctcccgctcgctcaacctgtctgcggagggcgcgctctcgcgcaccctgctcccgcgttcgcttctttgttcccgcccacgcgaggcccattttgacggatccagttcgaggcctgacggcggccaatcggcgctggcgccttcaccctccccgccccgccgaacccgtcaagggccgccccttttcctgcccacgtggtctcgggctcctgccccgtcctgctcacgagttcagggctcctgggcggccgccttttccagttccaggtgtgcagaagtgtcctctccccacgcgcggcgggctgcacttggtcgctggctccgagatcgcgcggggccgccggaagcccaagacggtaccgggggccgcagccgcagccggcgccgccctccgccctccccaacagcaggccgagtcccgtagcatccggtagggaaatggtcgtgctttcggtccccgccgaagtcaccgtgatcctgttagatatcgaaggtaccacaaccccgattgctttcgtgaaggacattttatttccttacatcgaagaaaatgttaaagagtatctgcagacacattgggaagaagaggagtgccagcaggatgtcagtcttttgaggaaacaggctgaagaggacgcccacctggatggggctgttcctatccctgcagcatctgggaatggagtggatgatctgcaacagatgatccaggccgtggtagataatgtgtgctggcagatgtccctggatcgaaagaccactgcactcaaacagctgcagggccacatgtggagggcggcattcacagctgggcgcatgaaagcagagttctttgcagatgtagttccagcagtcaggaagtggagagaggccggaatgaaggtgtacatctattcctcagggagtgtggaggcacagaaactgttattcgggcattctacggagggagatattcttgagcttgttgatggtcactttgataccaagattggacacaaagtagagagtgaaagttaccgaaagattgcagacagcattgggtgctcaaccaacaacattttgtttctgacagatgttactcgagaggccagtgctgctgaggaagcagatgtgcacgtagctgtggtggtgagaccaggcaacgcaggattaacagatgatgagaagacttactacagcctcatcacatccttcagtgaactatacctgccttcctcaacctagagaagggttgttaaggcagaccgccctgttccccagagttgtccctgtagtgtctaggtttattctaatggtaaaagtaacttacttaaaaaacatatgtacacatatgtatgcaagtatgtatatatgtgtatgctcagattaacttccataggtacataagtgaaagaagtctcagttcagtgaacacaaaacttatttaaagatgctttatatgtagaaattgtttcaaatcatactctaacccttagtgagggcaaagtgtagttggtagaagaaattgctaaatacctatctaatgtgctatgtttatcaaatcgtgtactaaaatggaaagctagttttgagaaattattcagaagccttgttattttaaaaatgaaatatttcaaagactgaatattttcaaagaaaatgaataattcattgcccttgtgatttagaagattataacagctgtatttcatatttgcctccttatatatatcaaagaccaaggtatttccttctgcttcaaaagaacaaaattgggaaagaaaactcacttgagtcttgatcaaacaagtgtcttttacttaagaagaaacttggtaatcattgtggcacccacagcaagcagttgccttaccagtgaaaaaggtgcactgaggtaacatctaaaacagagatgtggttcttaatgtttaacagaacagttctaatcctgccacgtgttatcattatagattttatagttgcctttctaactacttagcacagtttgagaatacgttaattgctatttactatttaaaaagttttactgaaatcagtccataacattaagatgagccctaatatgtaagattttcctctggaatggatgtgagaaatgtaaattttataacagcagtatttatcctggtttaattctaatacgatgtcatgttaatttcatgttgtgattaataaaagcattttttcttca

SEQ ID NO: 288072 - DNA, 2018 bp, Homo sapiens
ggaaattaaggctaggtacgaggcctggtggtgctcctgccccgtcctgctcacgagttcagggctcctgggcggccgccttttccagttccaggtgtgcagaagtgtcctctccccacgcgcggcgggctgcacttggtcgctggctccgagatcgcgcggggccgccggaagcccaagacggtaccgggggccgcagccgcagccggcgccgccctccgccctccccaacagcaggccgagtcccgtagcatccggtagggaaatggtcgtgctttcggtccccgccgaagtcaccgtgatcctgttagatatcgaaggtaccacaaccccgattgctttcgtgaaggacattttatttccttacatcgaagaaaatgttaaagagtatctgcagacacattgggaagaagaggagtgccagcaggatgtcagtcttttgaggaaacaggctgaagaggacgcccacctggatggggctgttcctatccctgcagcatctgggaatggagtggatgatctgcaacagatgatccaggccgtggtagataatgtgtgctggcagatgtccctggatcgaaagaccactgcactcaaacagctgcagggccacatgtggagggcggcattcacagctgggcgcatgaaagcagagttctttgcagatgtagttccagcagtcaggaagtggagagaggccggaatgaaggtgtacatctattcctcagggagtgtggaggcacagaaactgttattcgggcattctacggagggagatattcttgagcttgttgatggtcactttgataccaagattggacacaaagtagagagtgaaagttaccgaaagattgcagacagcattgggtgctcaaccaacaacattttgtttctgacagatgttactcgagaggccagtgctgctgaggaagcagatgtgcacgtagctgtggtggtgagaccaggcaacgcaggattaacagatgatgagaagacttactacagcctcatcacatccttcagtgaactatacctgccttcctcaacctagagaagggttgttaaggcagaccgccctgttccccagagttgtccctgtagtgtctaggtttattctaatggtaaaagtaacttacttaaaaaacatatgtacacatatgtatgcaagtatgtatatatgtgtatgctcagattaacttccataggtacataagtgaaagaagtctcagttcagtgaacacaaaacttatttaaagatgctttatatgtagaaattgtttcaaatcatactctaacccttagtgagggcaaagtgtagttggtagaagaaattgctaaatacctatctaatgtgctatgtttatcaaatcgtgtactaaaatggaaagctagttttgagaaattattcagaagccttgttattttaaaaatgaaatatttcaaagactgaatattttcaaagaaaatgaataattcattgcccttgtgatttagaagattataacagctgtatttcatatttgcctccttatatatatcaaagaccaaggtatttccttctgcttcaaaagaacaaaattgggaaagaaaactcacttgagtcttgatcaaacaagtgtcttttacttaagaagaaacttggtaatcattgtggcacccacagcaagcagttgccttaccagtgaaaaaggtgcactgaggtaacatctaaaacagagatgtggttcttaatgtttaacagaacagttctaatcctgccacgtgttatcattatagattttatagttgcctttctaactacttagcacagtttgagaatacgttaattgctatttactatttaaaaagttttactgaaatcagtccataacattaagatgagccctaatatgtaagattttcctctggaatggatgtgagaaatgtaaattttataacagcagtatttatcctggtttaattctaatacgatgtcatgttaatttcatgttgtgattaataaaagcattttttcttca

SEQ ID NO: 288073 - DNA, 3139 bp, Homo sapiens
acaggaagcgggcgcgcgacggctcctccgggcagcgcagcgcgggcgcctcttccactgtgaccacgggcgcgcgggccaagggggcgcggcggggcctcccgggctgatcggccgaagcccgggccccgcgcggcctctggcgggctgacgccgggaggaggggcgggggctggccagatgactgtatctatgcaaaggcggaggcggtgggcggggagggggctggattcagtagagggcaaggggcactcacatccccggcgcgccactcgcggggctcctttctgcacgtgccccgggcctctcccgctcgctcaacctgtctgcggagggcgcgctctcgcgcaccctgctcccgcgttcgcttctttgttcccgcccacgcgaggcccattttgacggatccagttcgaggcctgacggcggccaatcggcgctggcgccttcaccctccccgccccgccgaacccgtcaagggccgccccttttcctgcccacgtggtctcgggctcctgccccgtcctgctcacgagttcagggctcctgggcggccgccttttccagttccaggtgtgcagaagtgtcctctccccacgcgcggcgggctgcacttggtcgctggctccgagatcgcgcggggccgccggaagcccaagacggtaccgggggccgcagccgcagccggcgccgccctccgccctccccaacagcaggccgagtcccgtagcatccggtagggaaatggtcgtgctttcggtccccgccgaagtcaccgtgatcctgttagatatcgaaggtaccacaaccccgattgctttcgtgaaggacattttatttccttacatcgaagaaaatgttaaagagtatctgcagacacattgggaagaagaggagtgccagcaggatgtcagtcttttgaggaaacaggctgaagaggacgcccacctggatggggctgttcctatccctgcagcatctgggaatggagtggatgatctgcaacagatgatccaggccgtggtagataatgtgtgctggcagatgtccctggatcgaaagaccactgcactcaaacagctgcagggccacatgtggagggcggcattcacagctgggcgcatgaaagcagagttctttgcagatgtagttccagcagtcaggaagtggagagaggccggaatgaaggtgtacatctattcctcagggagtgtggaggcacagaaactgttattcgggcattctacggagggagatattcttgagcttgttgatggtcactttgataccaagattggacacaaagtagagagtgaaagttaccgaaagattgcagacagcattgggtgctcaaccaacaacattttgtttctgacagatgttactcgagaggccagtgctgctgaggaagcagatgtgcacgtagctgtggtggtgagaccaggcaacgcaggattaacagatgatgagaagacttactacagcctcatcacatccttcagtgaactatacctgccttcctcaacctagagaagggttgttaaggcagaccgccctgttccccagagttgtccctgtagtgtctaggtttattctaatggtaaaagtaacttacttaaaaaacatatgtacacatatgtatgcaagtatgtatatatgtgtatgctcagattaacttccataggtacataagtgaaagaagtctcagttcagtgaacacaaaacttatttaaagatgctttatatgtagaaattgtttcaaatcatactctaacccttagtgagggcaaagtgtagttggtagaagaaattgctaaatacctatctaatgtgctatgtttatcaaatcgtgtactaaaatggaaagctagttttgagaaattattcagaagccttgttattttaaaaatgaaatatttcaaagactgaatattttcaaagaaaatgaataattcattgcccttgtgatttagaagattataacagctgtatttcatatttgcctccttatatatatcaaagaccaaggtatttccttctgcttcaaaagaacaaaattgggaaagaaaactcacttgagtcttgatcaaacaagtgtcttttacttaagaagaaacttggtaatcattgtggcacccacagcaagcagttgccttaccagtgaaaaaggtgcactgaggtaacatctaaaacagagatgtggttcttaatgtttaacagaacagttctaatcctgccacgtgttatcattatagattttatagttgcctttctaactacttagcacagtttgagaatacgttaattgctatttactatttaaaaagttttactgaaatcagtccataacattaagatgagccctaatatgtaagattttcctctggaatggatgtgagaaatgtaaattttataacagcagtatttatcctggtttaattctaatacgatgtcatgttaatttcatgttgtgattaataaaagcattttttcttcaaaaaaaaaaaaaaaaaaaaaaaaaaaaaaaaaaaaaaaaaaaaaaaaaaaaaaaaaaaaaaaaaaaaaaaaaaaaaaaaagagagggcgggcgcgcgcgccgcgacaaaatactatcccccgagggcgcgccgcacaatagccgccggcacgccgacgttttttgaaagcagagggcggcgctctccacaatatagggagcggatgatattataatataagaccgagagagcggcgcggcgcagcgcagtataatcagaacacgagcggcgggagcaaggggaggaaaatagcgagcgagcacgagcgagggacactagtggggaagaaagagcaccccaacaaatacgggggggggggagcaaaacaagttatggagacaacaaacatcaccaaccgaagaaagtaatctacacaacagccgcacgggagggggacaaataaaataaagaaaatgaggcgagcagagacagtacaagggggaggtgaaacaacacaaacgaacgagaggaaaaatacgtaacgctcgggagcgaaggcaagatacatcatggggagacaaaacgaagtaataaaacgagtcgaagaggcaaaaaactttatcaaagcgggggaaggagacgacataaacacacacagagga

SEQ ID NO: 288074 - DNA, 2265 bp, Homo sapiens
acaggaagcgggcgcgcgacggctcctccgggcagcgcagcgcgggcgcctcttccactgtgaccacgggcgcgcgggccaagggggcgcggcggggcctcccgggctgatcggccgaagcccgggccccgcgcggcctctggcgggctgacgccgggaggaggggcgggggctggccagatgactgtatctatgcaaaggcggaggcggtgggcggggagggggctggattcagtagagggcaaggggcactcacatccccggcgcgccactcgcggggctcctttctgcacgtgccccgggcctctcccgctcgctcaacctgtctgcggagggcgcgctctcgcgcaccctgctcccgcgttcgcttctttgttcccgcccacgcgaggcccattttgacggatccagttcgaggcctgacggcggccaatcggcgctggcgccttcaccctccccgccccgccgaacccgtcaagggccgccccttttcctgcccacgtggtctcgggctcctgccccgtcctgctcacgagttcagggctcctgggcggccgccttttccagttccaggtgtgcagaagtgtcctctccccacgcgcggcgggctgcacttggtcgctggctccgagatcgcgcggggccgccggaagcccaagacggtaccgggggccgcagccgcagccggcgccgccctccgccctccccaacagcaggccgagtcccgtagcatccggtagggaaatggtcgtgctttcggtccccgccgaagtcaccgtgatcctgttagatatcgaaggacattttatttccttacatcgaagaaaatgttaaagagtatctgcagacacattgggaagaagaggagtgccagcaggatgtcagtcttttgaggaaacaggttctttgcagatgtagttccagcagtcaggaagtggagagaggccggaatgaaggtgtacatctattcctcagggagtgtggaggcacagaaactgttattcgggcattctacggagggagatattcttgagcttgttgatggtcactttgataccaagattggacacaaagtagagagtgaaagttaccgaaagattgcagacagcattgggtgctcaaccaacaacattttgtttctgacagatgttactcgagaggccagtgctgctgaggaagcagatgtgcacgtagctgtggtggtgagaccaggcaacgcaggattaacagatgatgagaagacttactacagcctcatcacatccttcagtgaactatacctgccttcctcaacctagagaagggttgttaaggcagaccgccctgttccccagagttgtccctgtagtgtctaggtttattctaatggtaaaagtaacttacttaaaaaacatatgtacacatatgtatgcaagtatgtatatatgtgtatgctcagattaacttccataggtacataagtgaaagaagtctcagttcagtgaacacaaaacttatttaaagatgctttatatgtagaaattgtttcaaatcatactctaacccttagtgagggcaaagtgtagttggtagaagaaattgctaaatacctatctaatgtgctatgtttatcaaatcgtgtactaaaatggaaagctagttttgagaaattattcagaagccttgttattttaaaaatgaaatatttcaaagactgaatattttcaaagaaaatgaataattcattgcccttgtgatttagaagattataacagctgtatttcatatttgcctccttatatatatcaaagaccaaggtatttccttctgcttcaaaagaacaaaattgggaaagaaaactcacttgagtcttgatcaaacaagtgtcttttacttaagaagaaacttggtaatcattgtggcacccacagcaagcagttgccttaccagtgaaaaaggtgcactgaggtaacatctaaaacagagatgtggttcttaatgtttaacagaacagttctaatcctgccacgtgttatcattatagattttatagttgcctttctaactacttagcacagtttgagaatacgttaattgctatttactatttaaaaagttttactgaaatcagtccataacattaagatgagccctaatatgtaagattttcctctggaatggatgtgagaaatgtaaattttataacagcagtatttatcctggtttaattctaatacgatgtcatgttaatttcatgttgtgattaataaaagcattttttcttca

SEQ ID NO: 288075 - DNA, 2294 bp, Homo sapiens
acaggaagcgggcgcgcgacggctcctccgggcagcgcagcgcgggcgcctcttccactgtgaccacgggcgcgcgggccaagggggcgcggcggggcctcccgggctgatcggccgaagcccgggccccgcgcggcctctggcgggctgacgccgggaggaggggcgggggctggccagatgactgtatctatgcaaaggcggaggcggtgggcggggagggggctggattcagtagagggcaaggggcactcacatccccggcgcgccactcgcggggctcctttctgcacgtgccccgggcctctcccgctcgctcaacctgtctgcggagggcgcgctctcgcgcaccctgctcccgcgttcgcttctttgttcccgcccacgcgaggcccattttgacggatccagttcgaggcctgacggcggccaatcggcgctggcgccttcaccctccccgccccgccgaacccgtcaagggccgccccttttcctgcccacgtggtctcgggctcctgccccgtcctgctcacgagttcagggctcctgggcggccgccttttccagttccaggtgtgcagaagtgtcctctccccacgcgcggcgggctgcacttggtcgctggctccgagatcgcgcggggccgccggaagcccaagacggtaccgggggccgcagccgcagccggcgccgccctccgccctccccaacagcaggccgagtcccgtagcatccggtagggaaatggtcgtgctttcggtccccgccgaagtcaccgtgatcctgttagatatcgaaggtaccacaaccccgattgctttcgtgaaggacattttatttccttacatcgaagaaaatgttaaagagtatctgcagacacattgggaagaagaggagtgccagcaggatgtcagtcttttgaggaaacaggttctttgcagatgtagttccagcagtcaggaagtggagagaggccggaatgaaggtgtacatctattcctcagggagtgtggaggcacagaaactgttattcgggcattctacggagggagatattcttgagcttgttgatggtcactttgataccaagattggacacaaagtagagagtgaaagttaccgaaagattgcagacagcattgggtgctcaaccaacaacattttgtttctgacagatgttactcgagaggccagtgctgctgaggaagcagatgtgcacgtagctgtggtggtgagaccaggcaacgcaggattaacagatgatgagaagacttactacagcctcatcacatccttcagtgaactatacctgccttcctcaacctagagaagggttgttaaggcagaccgccctgttccccagagttgtccctgtagtgtctaggtttattctaatggtaaaagtaacttacttaaaaaacatatgtacacatatgtatgcaagtatgtatatatgtgtatgctcagattaacttccataggtacataagtgaaagaagtctcagttcagtgaacacaaaacttatttaaagatgctttatatgtagaaattgtttcaaatcatactctaacccttagtgagggcaaagtgtagttggtagaagaaattgctaaatacctatctaatgtgctatgtttatcaaatcgtgtactaaaatggaaagctagttttgagaaattattcagaagccttgttattttaaaaatgaaatatttcaaagactgaatattttcaaagaaaatgaataattcattgcccttgtgatttagaagattataacagctgtatttcatatttgcctccttatatatatcaaagaccaaggtatttccttctgcttcaaaagaacaaaattgggaaagaaaactcacttgagtcttgatcaaacaagtgtcttttacttaagaagaaacttggtaatcattgtggcacccacagcaagcagttgccttaccagtgaaaaaggtgcactgaggtaacatctaaaacagagatgtggttcttaatgtttaacagaacagttctaatcctgccacgtgttatcattatagattttatagttgcctttctaactacttagcacagtttgagaatacgttaattgctatttactatttaaaaagttttactgaaatcagtccataacattaagatgagccctaatatgtaagattttcctctggaatggatgtgagaaatgtaaattttataacagcagtatttatcctggtttaattctaatacgatgtcatgttaatttcatgttgtgattaataaaagcattttttcttca

SEQ ID NO: 288076 - DNA, 1856 bp, Homo sapiens
atgaacgaggctgaatcgtgagtttatagcttgagccttcaaacttggtttgattattttgggtgcagatctttctaaaagcatttccatgctttcttaaagcacagtggacataatttaaccttttcttgtcatgaagaacatcaaagattatattatatcattgctgttgtttgcttttttgagttcttcgggaatttaaaaaacactttcccatttcatccttttatctgtagtccctttttactgtcactagtggctgtctgttcaaaactatcctcctttccacatagattgttgcttctaatctgctgtgagcctggaacttgggcagtacgtttattagaactgcaggagtttgtaatctcagggagctgcttctcaggttaccatgtgggcacaaagagagaaacatatggcatctgttttgacaggtttttatctggctagatgaggtgttcctgtattttaacttagtggtcttccctctaggttctttgcagatgtagttccagcagtcaggaagtggagagaggccggaatgaaggtgtacatctattcctcagggagtgtggaggcacagaaactgttattcgggcattctacggagggagatattcttgagcttgttgatggtcactttgataccaagattggacacaaagtagagagtgaaagttaccgaaagattgcagacagcattgggtgctcaaccaacaacattttgtttctgacagatgttactcgagaggccagtgctgctgaggaagcagatgtgcacgtagctgtggtggtgagaccaggcaacgcaggattaacagatgatgagaagacttactacagcctcatcacatccttcagtgaactatacctgccttcctcaacctagagaagggttgttaaggcagaccgccctgttccccagagttgtccctgtagtgtctaggtttattctaatggtaaaagtaacttacttaaaaaacatatgtacacatatgtatgcaagtatgtatatatgtgtatgctcagattaacttccataggtacataagtgaaagaagtctcagttcagtgaacacaaaacttatttaaagatgctttatatgtagaaattgtttcaaatcatactctaacccttagtgagggcaaagtgtagttggtagaagaaattgctaaatacctatctaatgtgctatgtttatcaaatcgtgtactaaaatggaaagctagttttgagaaattattcagaagccttgttattttaaaaatgaaatatttcaaagactgaatattttcaaagaaaatgaataattcattgcccttgtgatttagaagattataacagctgtatttcatatttgcctccttatatatatcaaagaccaaggtatttccttctgcttcaaaagaacaaaattgggaaagaaaactcacttgagtcttgatcaaacaagtgtcttttacttaagaagaaacttggtaatcattgtggcacccacagcaagcagttgccttaccagtgaaaaaggtgcactgaggtaacatctaaaacagagatgtggttcttaatgtttaacagaacagttctaatcctgccacgtgttatcattatagattttatagttgcctttctaactacttagcacagtttgagaatacgttaattgctatttactatttaaaaagttttactgaaatcagtccataacattaagatgagccctaatatgtaagattttcctctggaatggatgtgagaaatgtaaattttataacagcagtatttatcctggtttaattctaatacgatgtcatgttaatttcatgttgtgattaataaaagcattttttcttca

SEQ ID NO: 288077 - DNA, 2585 bp, Homo sapiens
acaggaagcgggcgcgcgacggctcctccgggcagcgcagcgcgggcgcctcttccactgtgaccacgggcgcgcgggccaagggggcgcggcggggcctcccgggctgatcggccgaagcccgggccccgcgcggcctctggcgggctgacgccgggaggaggggcgggggctggccagatgactgtatctatgcaaaggcggaggcggtgggcggggagggggctggattcagtagagggcaaggggcactcacatccccggcgcgccactcgcggggctcctttctgcacgtgccccgggcctctcccgctcgctcaacctgtctgcggagggcgcgctctcgcgcaccctgctcccgcgttcgcttctttgttcccgcccacgcgaggcccattttgacggatccagttcgaggcctgacggcggccaatcggcgctggcgccttcaccctccccgccccgccgaacccgtcaagggccgccccttttcctgcccacgtggtctcgggctcctgccccgtcctgctcacgagttcagggctcctgggcggccgccttttccagttccaggtgtgcagaagtgtcctctccccacgcgcggcgggctgcacttggtcgctggctccgagatcgcgcggggccgccggaagcccaagacggtaccgggggccgcagccgcagccggcgccgccctccgccctccccaacagcaggccgagtcccgtagcatccggtagggaaatggtcgtgctttcggtccccgccgaagtcaccgtgatcctgttagatatcgaaggtaccacaaccccgattgctttcgtgaaggacattttatttccttacatcgaagaaaatgttaaagagtatctgcagacacattgggaagaagaggagtgccagcaggatgtcagtcttttgaggaaacaggctgaagaggacgcccacctggatggggctgttcctatccctgcagcatctgggaatggagtggatgatctgcaacagatgatccaggccgtggtagataatgtgtgctggcagatgtccctggatcgaaagaccactgcactcaaacagctgcagggccacatgtggagggcggcattcacagctgggcgcatgaaagcagagttctttgcagatgtagttccagcagtcaggaagtggagagaggccggaatgaaggtgtacatctattcctcagggagtgtggaggcacagaaactgttattcgggcattctacggagggagatattcttgagcttgttgatggtcactttgataccaagattggacacaaagtagagagtgaaagttaccgaaagattgcagacagcattgggtgctcaaccaacaacattttgtttctgacagatgttactcgagaggccagtgctgctgaggaagcagatgtgcacgtagctgtggtggtgagaccaggcaacgcaggattaacagatgatgagaagacttactacagcctcatcacatccttcagtgaactatacctgccttcctcaacctagagaagggttgttaaggcagaccgccctgttccccagagttgtccctgtagtgtctaggtttattctaatggtaaaagtaacttacttaaaaaacatatgtacacatatgtatgcaagtatgtatatatgtgtatgctcagattaacttccataggtacataagtgaaagaagtctcagttcagtgaacacaaaacttatttaaagatgctttatatgtagaaattgtttcaaatcatactctaacccttagtgagggcaaagtgtagttggtagaagaaattgctaaatacctatctaatgtgctatgtttatcaaatcgtgtactaaaatggaaagctagttttgagaaattattcagaagccttgttattttaaaaatgaaatatttcaaagactgaatattttcaaagaaaatgaataattcattgcccttgtgatttagaagattataacagctgtatttcatatttgcctccttatatatatcaaagaccaaggtatttccttctgcttcaaaagaacaaaattgggaaagaaaactcacttgagtcttgatcaaacaagtgtcttttacttaagaagaaacttggtaatcattgtggcacccacagcaagcagttgccttaccagtgaaaaaggtgcactgaggtaacatctaaaacagagatgtggttcttaatgtttaacagaacagttctaatcctgccacgtgttatcattatagattttatagttgcctttctaactacttagcacagtttgagaatacgttaattgctatttactatttaaaaagttttactgaaatcagtccataacattaagatgagccctaatatgtaagattttcctctggaatggatgtgagaaatgtaaattttataacagcagtatttatcctggtttaattctaatacgatgtcatgttaatttcatgttgtgattaataaaagcattttttcttcactcagttttatataggttcctgaactctatccacatgccgccatagcaaaagagaaactgaaaaacaagaatatttagctcttatctt

SEQ ID NO: 288078 - DNA, 1006 bp, Homo sapiens
ctagaggatccccgttcacttgctacaccctcaacctagagaagggttgttaaggcagaccgccctgttccccagagttgtccctgtagtgtctaggtttattctaatggtaaaagtaacttacttaaaaaacatatgtacacatatgtatgcaagtatgtatatatgtgtatgctcagattaacttccataggtacataagtgaaagaagtctcagttcagtgaacacaaaacttatttaaagatgctttatatgtagaaattgtttcaaatcatactctaacccttagtgagggcaaagtgtagttggtagaagaaattgctaaatacctatctaatgtgctatgtttatcaaatcgtgtactaaaatggaaagctagttttgagaaattattcagaagccttgttattttaaaaatgaaatatttcaaagactgaatattttcaaagaaaatgaataattcattgcccttgtgatttagaagattataacagctgtatttcatatttgcctccttatatatatcaaagaccaaggtatttccttctgcttcaaaagaacaaaattgggaaagaaaactcacttgagtcttgatcaaacaagtgtcttttacttaagaagaaacttggtaatcattgtggcacccacagcaagcagttgccttaccagtgaaaaaggtgcactgaggtaacatctaaaacagagatgtggttcttaatgtttaacagaacagttctaatcctgccacgtgttatcattatagattttatagttgcctttctaactacttagcacagtttgagaatacgttaattgctatttactatttaaaaagttttactgaaatcagtccataacattaagatgagccctaatatgtaagattttcctctggaatggatgtgagaaatgtaaattttataacagcagtatttatcctggtttaattctaatacgatgtcatgttaatttcatgttgtgattaataaaagcattttttcttca

SEQ ID NO: 288079 - DNA, 1162 bp, Homo sapiens
  misc_feature (218)..(218): n is a, c, g, or t
aatctagatagaacagttgttggggacgcggatgtgctcgttacttgagtgtggacatcggtgtaccctaggtagatccggtgcttgaataatgcattgagattctcatcaatatacctaaagtcgcaaggctgataactgcattgcttctagacctaagaatcacaggagtgtgtgtaacgtgcaggatcgtctcactggtgactcttatgaaatcnggtccgtgcaaggcgtacgtatgcgtataatcacatatataggtcaccacggttactgttacttaaaaaacatatgtacacatatgtatgcaagtatgtatatatgtgtatgctcagattaacttccataggtacataagtgaaagaagtctcagttcagtgaacacaaaacttatttaaagatgctttatatgtagaaattgtttcaaatcatactctaacccttagtgagggcaaagtgtagttggtagaagaaattgctaaatacctatctaatgtgctatgtttatcaaatcgtgtactaaaatggaaagctagttttgagaaattattcagaagccttgttattttaaaaatgaaatatttcaaagactgaatattttcaaagaaaatgaataattcattgcccttgtgatttagaagattataacagctgtatttcatatttgcctccttatatatatcaaagaccaaggtatttccttctgcttcaaaagaacaaaattgggaaagaaaactcacttgagtcttgatcaaacaagtgtcttttacttaagaagaaacttggtaatcattgtggcacccacagcaagcagttgccttaccagtgaaaaaggtgcactgaggtaacatctaaaacagagatgtggttcttaatgtttaacagaacagttctaatcctgccacgtgttatcattatagattttatagttgcctttctaactacttagcacagtttgagaatacgttaattgctatttactatttaaaaagttttactgaaatcagtccataacattaagatgagccctaatatgtaagattttcctctggaatggatgtgagaaatgtaaattttataacagcagtatttatcctggtttaattctaatacgatgtcatgttaatttcatgttgtgattaataaaagcattttttcttca

SEQ ID NO: 288080 - DNA, 1480 bp, Homo sapiens
acaggaagcgggcgcgcgacggctcctccgggcagcgcagcgcgggcgcctcttccactgtgaccacgggcgcgcgggccaagggggcgcggcggggcctcccgggctgatcggccgaagcccgggccccgcgcggcctctggcgggctgacgccgggaggaggggcgggggctggccagatgactgtatctatgcaaaggcggaggcggtgggcggggagggggctggattcagtagagggcaaggggcactcacatccccggcgcgccactcgcggggctcctttctgcacgtgccccgggcctctcccgctcgctcaacctgtctgcggagggcgcgctctcgcgcaccctgctcccgcgttcgcttctttgttcccgcccacgcgaggcccattttgacggatccagttcgaggcctgacggcggccaatcggcgctggcgccttcaccctccccgccccgccgaacccgtcaagggccgccccttttcctgcccacgtggtctcgggctcctgccccgtcctgctcacgagttcagggctcctgggcggccgccttttccagttccaggtgtgcagaagtgtcctctccccacgcgcggcgggctgcacttggtcgctggctccgagatcgcgcggggccgccggaagcccaagacggtaccgggggccgcagccgcagccggcgccgccctccgccctccccaacagcaggccgagtcccgtagcatccggtagggaaatggtcgtgctttcggtccccgccgaagtcaccgtgatcctgttagatatcgaaggtaccacaaccccgattgctttcgtgaaggacattttatttccttacatcgaagaaaatgttaaagagtatctgcagacacattgggaagaagaggagtgccagcaggatgtcagtcttttgaggaaacaggctgaagaggacgcccacctggatggggctgttcctatccctgcagcatctgggaatggagtggatgatctgcaacagatgatccaggccgtggtagataatgtgtgctggcagatgtccctggatcgaaagaccactgcactcaaacagctgcagggccacatgtggagggcggcattcacagctgggcgcatgaaagcagagttctttgcagatgtagttccagcagtcaggaagtggagagaggccggaatgaaggtgtacatctattcctcagggagtgtggaggcacagaaactgttattcgggcattctacggagggagatattcttgaggtaggttacctagtttactttgttgttttgacgctatcaaagcataaaataatgaatcttaatggaaaactaattggaactaatagaatgcttttttttttttggttgtttaaaattaggtaagaagaaaataatcacttttaattatattgtatttacagtttcttctatataaggttgttatataaagtttattctgtgtcttgaaaaataa

SEQ ID NO: 288081 - DNA, 2468 bp, Homo sapiens
acaggaagcgggcgcgcgacggctcctccgggcagcgcagcgcgggcgcctcttccactgtgaccacgggcgcgcgggccaagggggcgcggcggggcctcccgggctgatcggccgaagcccgggccccgcgcggcctctggcgggctgacgccgggaggaggggcgggggctggccagatgactgtatctatgcaaaggcggaggcggtgggcggggagggggctggattcagtagagggcaaggggcactcacatccccggcgcgccactcgcggggctcctttctgcacgtgccccgggcctctcccgctcgctcaacctgtctgcggagggcgcgctctcgcgcaccctgctcccgcgttcgcttctttgttcccgcccacgcgaggcccattttgacggatccagttcgaggcctgacggcggccaatcggcgctggcgccttcaccctccccgccccgccgaacccgtcaagggccgccccttttcctgcccacgtggtctcgggctcctgccccgtcctgctcacgagttcagggctcctgggcggccgccttttccagttccaggtgtgcagaagtgtcctctccccacgcgcggcgggctgcacttggtcgctggctccgagatcgcgcggggccgccggaagcccaagacggtaccgggggccgcagccgcagccggcgccgccctccgccctccccaacagcaggccgagtcccgtagcatccggtagggaaatggtcgtgctttcggtccccgccgaagtcaccgtgatcctgttagatatcgaaggacattttatttccttacatcgaagaaaatgttaaagagtatctgcagacacattgggaagaagaggagtgccagcaggatgtcagtcttttgaggaaacaggctgaagaggacgcccacctggatggggctgttcctatccctgcagcatctgggaatggagtggatgatctgcaacagatgatccaggccgtggtagataatgtgtgctggcagatgtccctggatcgaaagaccactgcactcaaacagctgcagggccacatgtggagggcggcattcacagctgggcgcatgaaagcagagttctttgcagatgtagttccagcagtcaggaagtggagagaggccggaatgaaggtgtacatctattcctcagggagtgtggaggcacagaaactgttattcgggcattctacggagggagatattcttgagcttgttgatggtcactttgataccaagattggacacaaagtagagagtgaaagttaccgaaagattgcagacagcattgggtgctcaaccaacaacattttgtttctgacagatgttactcgagaggccagtgctgctgaggaagcagatgtgcacgtagctgtggtggtgagaccaggcaacgcaggattaacagatgatgagaagacttactacagcctcatcacatccttcagtgaactatacctgccttcctcaacctagagaagggttgttaaggcagaccgccctgttccccagagttgtccctgtagtgtctaggtttattctaatggtaaaagtaacttacttaaaaaacatatgtacacatatgtatgcaagtatgtatatatgtgtatgctcagattaacttccataggtacataagtgaaagaagtctcagttcagtgaacacaaaacttatttaaagatgctttatatgtagaaattgtttcaaatcatactctaacccttagtgagggcaaagtgtagttggtagaagaaattgctaaatacctatctaatgtgctatgtttatcaaatcgtgtactaaaatggaaagctagttttgagaaattattcagaagccttgttattttaaaaatgaaatatttcaaagactgaatattttcaaagaaaatgaataattcattgcccttgtgatttagaagattataacagctgtatttcatatttgcctccttatatatatcaaagaccaaggtatttccttctgcttcaaaagaacaaaattgggaaagaaaactcacttgagtcttgatcaaacaagtgtcttttacttaagaagaaacttggtaatcattgtggcacccacagcaagcagttgccttaccagtgaaaaaggtgcactgaggtaacatctaaaacagagatgtggttcttaatgtttaacagaacagttctaatcctgccacgtgttatcattatagattttatagttgcctttctaactacttagcacagtttgagaatacgttaattgctatttactatttaaaaagttttactgaaatcagtccataacattaagatgagccctaatatgtaagattttcctctggaatggatgtgagaaatgtaaattttataacagcagtatttatcctggtttaattctaatacgatgtcatgttaatttcatgttgtgattaataaaagcattttttcttca

SEQ ID NO: 288082 - DNA, 2413 bp, Homo sapiens
acaggaagcgggcgcgcgacggctcctccgggcagcgcagcgcgggcgcctcttccactgtgaccacgggcgcgcgggccaagggggcgcggcggggcctcccgggctgatcggccgaagcccgggccccgcgcggcctctggcgggctgacgccgggaggaggggcgggggctggccagatgactgtatctatgcaaaggcggaggcggtgggcggggagggggctggattcagtagagggcaaggggcactcacatccccggcgcgccactcgcggggctcctttctgcacgtgccccgggcctctcccgctcgctcaacctgtctgcggagggcgcgctctcgcgcaccctgctcccgcgttcgcttctttgttcccgcccacgcgaggcccattttgacggatccagttcgaggcctgacggcggccaatcggcgctggcgccttcaccctccccgccccgccgaacccgtcaagggccgccccttttcctgcccacgtggtctcgggctcctgccccgtcctgctcacgagttcagggctcctgggcggccgccttttccagttccaggtgtgcagaagtgtcctctccccacgcgcggcgggctgcacttggtcgctggctccgagatcgcgcggggccgccggaagcccaagacggtaccgggggccgcagccgcagccggcgccgccctccgccctccccaacagcaggccgagtcccgtagcatccggtagggaaatggtcgtgctttcggtccccgccgaagtcaccgtgatcctgttagatatcgaagacattttatttccttacatcgaagatgtcagtcttttgaggaaacaggctgaagaggacgcccacctggatggggctgttcctatccctgcagcatctgggaatggagtggatgatctgcaacagatgatccaggccgtggtagataatgtgtgctggcagatgtccctggatcgaaagaccactgcactcaaacagctgcagggccacatgtggagggcggcattcacagctgggcgcatgaaagcagagttctttgcagatgtagttccagcagtcaggaagtggagagaggccggaatgaaggtgtacatctattcctcagggagtgtggaggcacagaaactgttattcgggcattctacggagggagatattcttgagcttgttgatggtcactttgataccaagattggacacaaagtagagagtgaaagttaccgaaagattgcagacagcattgggtgctcaaccaacaacattttgtttctgacagatgttactcgagaggccagtgctgctgaggaagcagatgtgcacgtagctgtggtggtgagaccaggcaacgcaggattaacagatgatgagaagacttactacagcctcatcacatccttcagtgaactatacctgccttcctcaacctagagaagggttgttaaggcagaccgccctgttccccagagttgtccctgtagtgtctaggtttattctaatggtaaaagtaacttacttaaaaaacatatgtacacatatgtatgcaagtatgtatatatgtgtatgctcagattaacttccataggtacataagtgaaagaagtctcagttcagtgaacacaaaacttatttaaagatgctttatatgtagaaattgtttcaaatcatactctaacccttagtgagggcaaagtgtagttggtagaagaaattgctaaatacctatctaatgtgctatgtttatcaaatcgtgtactaaaatggaaagctagttttgagaaattattcagaagccttgttattttaaaaatgaaatatttcaaagactgaatattttcaaagaaaatgaataattcattgcccttgtgatttagaagattataacagctgtatttcatatttgcctccttatatatatcaaagaccaaggtatttccttctgcttcaaaagaacaaaattgggaaagaaaactcacttgagtcttgatcaaacaagtgtcttttacttaagaagaaacttggtaatcattgtggcacccacagcaagcagttgccttaccagtgaaaaaggtgcactgaggtaacatctaaaacagagatgtggttcttaatgtttaacagaacagttctaatcctgccacgtgttatcattatagattttatagttgcctttctaactacttagcacagtttgagaatacgttaattgctatttactatttaaaaagttttactgaaatcagtccataacattaagatgagccctaatatgtaagattttcctctggaatggatgtgagaaatgtaaattttataacagcagtatttatcctggtttaattctaatacgatgtcatgttaatttcatgttgtgattaataaaagcattttttcttca

SEQ ID NO: 288083 - DNA, 2153 bp, Homo sapiens
acaggaagcgggcgcgcgacggctcctccgggcagcgcagcgcgggcgcctcttccactgtgaccacgggcgcgcgggccaagggggcgcggcggggcctcccgggctgatcggccgaagcccgggccccgcgcggcctctggcgggctgacgccgggaggaggggcgggggctggccagatgactgtatctatgcaaaggcggaggcggtgggcggggagggggctggattcagtagagggcaaggggcactcacatccccggcgcgccactcgcggggctcctttctgcacgtgccccgggcctctcccgctcgctcaacctgtctgcggagggcgcgctctcgcgcaccctgctcccgcgttcgcttctttgttcccgcccacgcgaggcccattttgacggatccagttcgaggcctgacggcggccaatcggcgctggcgccttcaccctccccgccccgccgaacccgtcaagggccgccccttttcctgcccacgtggtctcgggctcctgccccgtcctgctcacgagttcagggctcctgggcggccgccttttccagttccaggtgtgcagaagtgtcctctccccaacagcaggccgagtcccgtagcatccggtagggaaatggtcgtgctttcggtccccgccgaagtcaccgtgatcctgttagatatcgaaggacattttatttccttacatcgaagaaaatgttaaagagtatctgcagacacattgggaagaagaggagtgccagcaggatgtcagtcttttgaggaaacaggttctttgcagatgtagttccagcagtcaggaagtggagagaggccggaatgaaggtgtacatctattcctcagggagtgtggaggcacagaaactgttattcgggcattctacggagggagatattcttgagcttgttgatggtcactttgataccaagattggacacaaagtagagagtgaaagttaccgaaagattgcagacagcattgggtgctcaaccaacaacattttgtttctgacagatgttactcgagaggccagtgctgctgaggaagcagatgtgcacgtagctgtggtggtgagaccaggcaacgcaggattaacagatgatgagaagacttactacagcctcatcacatccttcagtgaactatacctgccttcctcaacctagagaagggttgttaaggcagaccgccctgttccccagagttgtccctgtagtgtctaggtttattctaatggtaaaagtaacttacttaaaaaacatatgtacacatatgtatgcaagtatgtatatatgtgtatgctcagattaacttccataggtacataagtgaaagaagtctcagttcagtgaacacaaaacttatttaaagatgctttatatgtagaaattgtttcaaatcatactctaacccttagtgagggcaaagtgtagttggtagaagaaattgctaaatacctatctaatgtgctatgtttatcaaatcgtgtactaaaatggaaagctagttttgagaaattattcagaagccttgttattttaaaaatgaaatatttcaaagactgaatattttcaaagaaaatgaataattcattgcccttgtgatttagaagattataacagctgtatttcatatttgcctccttatatatatcaaagaccaaggtatttccttctgcttcaaaagaacaaaattgggaaagaaaactcacttgagtcttgatcaaacaagtgtcttttacttaagaagaaacttggtaatcattgtggcacccacagcaagcagttgccttaccagtgaaaaaggtgcactgaggtaacatctaaaacagagatgtggttcttaatgtttaacagaacagttctaatcctgccacgtgttatcattatagattttatagttgcctttctaactacttagcacagtttgagaatacgttaattgctatttactatttaaaaagttttactgaaatcagtccataacattaagatgagccctaatatgtaagattttcctctggaatggatgtgagaaatgtaaattttataacagcagtatttatcctggtttaattctaatacgatgtcatgttaatttcatgttgtgattaataaaagcattttttcttca

SEQ ID NO: 288084 - DNA, 1558 bp, Homo sapiens
acaggaagcgggcgcgcgacggctcctccgggcagcgcagcgcgggcgcctcttccactgtgaccacgggcgcgcgggccaagggggcgcggcggggcctcccgggctgatcggccgaagcccgggccccgcgcggcctctggcgggctgacgccgggaggaggggcgggggctggccagatgactgtatctatgcaaaggcggaggcggtgggcggggagggggctggattcagtagagggcaaggggcactcacatccccggcgcgccactcgcggggctcctttctgcacgtgccccgggcctctcccgctcgctcaacctgtctgcggagggcgcgctctcgcgcaccctgctcccgcgttcgcttctttgttcccgcccacgcgaggcccattttgacggatccagttcgaggcctgacggcggccaatcggcgctggcgccttcaccctccccgccccgccgaacccgtcaagggccgccccttttcctgcccacgtggtctcgggctcctgccccgtcctgctcacgagttcagggctcctgggcggccgccttttccagttccaggtgtgcagaagtgtcctctccccacgcgcggcgggctgcacttggtcgctggctccgagatcgcgcggggccgccggaagcccaagacggtaccgggggccgcagccgcagccggcgccgccctccgccctccccaacagcaggccgagtcccgtagcatccggtagggaaatggtcgtgctttcggtccccgccgaagtcaccgtgatcctgttagatatcgaaggtaccacaaccccgattgctttcgtgaaggacattttatttccttacatcgaagaaaatgttaaagagtatctgcagacacattgggaagaagaggagtgccagcaggatgtcagtcttttgaggaaacaggctgaagaggacgcccacctggatggggctgttcctatccctgcagcatctgggaatggagtggatgatctgcaacagatgatccaggccgtggtagataatgtgtgctggcagatgtccctggatcgaaagaccactgcactcaaacagctgcagggccacatgtggagggcggcattcacagctgggcgcatgaaagcagagttctttgcagatgtagttccagcagtcaggaagtggagagaggccggaatgaaggtgtacatctattcctcagggagtgtggaggcacagaaactgttattcgggcattctacggagggagatattcttgagcttgttgatggtcactttgataccaagattggacacaaagtagagagtgaaagttaccgaaagattgcagacagcattgggtgctcaaccaacaacattttgtttctgacagatgttactcgaggtgagtaatagacttcttatattatatactccaggatatgaactgagcctggcactacaaatacattgcctctttaaagaaactttatatggggatccttgaaaaataaaacagttttacggttttatataaagaaacagtgtctggttcaagttcatgtttgaatta

SEQ ID NO: 288085 - DNA, 1061 bp, Homo sapiens
acaggaagcgggcgcgcgacggctcctccgggcagcgcagcgcgggcgcctcttccactgtgaccacgggcgcgcgggccaagggggcgcggcggggcctcccgggctgatcggccgaagcccgggccccgcgcggcctctggcgggctgacgccgggaggaggggcgggggctggccagatgactgtatctatgcaaaggcggaggcggtgggcggggagggggctggattcagtagagggcaaggggcactcacatccccggcgcgccactcgcggggctcctttctgcacgtgccccgggcctctcccgctcgctcaacctgtctgcggagggcgcgctctcgcgcaccctgctcccgcgttcgcttctttgttcccgcccacgcgaggcccattttgacggatccagttcgaggcctgacggcggccaatcggcgctggcgccttcaccctccccgccccgccgaacccgtcaagggccgccccttttcctgcccacgtggtctcgggctcctgccccgtcctgctcacgagttcagggctcctgggcggccgccttttccagttccaggtgtgcagaagtgtcctctccccacgcgcggcgggctgcacttggtcgctggctccgagatcgcgcggggccgccggaagcccaagacggtaccgggggccgcagccgcagccggcgccgccctccgccctccccaacagcaggccgagtcccgtagcatccggtagggaaatggtcgtgctttcggtccccgccgaagtcaccgtgatcctgttagatatcgaaggtaccacaaccccgattgctttcgtgaaggacattttatttccttacatcgaagaaaatgttaaagagtatctgcagacacattgggaagaagaggagtgccagcaggatgtcagtcttttgaggaaacaggctgaagaggacgcccacctggatggggctgttcctatccctgcagcatctgggaatggagtggatgatctgcaacagatgatccaggccgtggtagataatgtgtgcagtctgggcactcggcgtgtgca

SEQ ID NO: 288086 - DNA, 672 bp, Homo sapiens
ggaactagccttagcgaggccatgggggaaaaagtctaactggcggaactcctgggaactggggcgatgggctcttagtatcggaggattggagccatctgatttttacctgaaattccttagtctctcctgtgttggggaaatggtcaccttgccttcagggacctgggctttcagctgtccatacctggccctggttgatggcggcatgctgggcagtgcacgtgaagacgcacatgagacagcatctcgtatgttgcccaggctggccttgaaagcctggcctcaagccatcttcctgcctcagcctcccaagtagctgggatcacagggttgtggcatcacagctggctatattcttaacattattttgtaaccattccaacccccagaaatttctctctggctgacttgatccacagcgcctccatcgccatccctgagtgccttgttgtggaaaatcttactttatcttggttctgtttggtataatcggggaaagtctgtattctttcattatgtaaaacaacttatctctcattgtttcatctcctttctgagctctgctctgccagctctctttccaaaaccaaaatggctcttcaagttattttgtaaataataatgggccatctacttcttaacataaatgaatgattttccaaggtcaag

SEQ ID NO: 288087 - DNA, 836 bp, Homo sapiens
ggaactagccttagcgaggccatgggggaaaaagtctaactggcggaactcctgggaactggggcgatgggctcttagtatcggaggattggagccatctgatttttacctgaaattccttagtctctcctgtgttggggaaatgagaccgggacttgctgtgttgcccaggctggtcttgaactcctggtcttaagcaatcatactgctttggccacccaaagcactgggattacaggcgtgaaccaccacacccagctcttaaaaccacagtatttctaggtcagtataacacacctgccccagggacttacaggtgtggcagaagcttggacttctggcttttctctctcttgcacccaggcacgctgcagctaccatttcctcccttcactacgttttagattctttccttttcattcctgtcattaccatgctaacgtacatctctatccaccttgctgttgggcaggtatgagcggcttgctggctgttcttccttgccttttggtctgtttctacttagctgactcctcaattgggtagaaacattcttcatcaatactatactgttataggctgtcccttgtgatttcaaactctagtaccagatactgttctctggttggttcttatgggcatcacttgtttttctggctaaatactagatctaaggtaggaatatggcttttgttttactagcagtgttcaagccctactgtgagcgcactgctagactgtcagatctctgagaatttcagaggattcctatataatgttaagtgactaaacttaataaacttaattaaaatcaacatctcaagatattgaaaaaa

SEQ ID NO: 288088 - DNA, 945 bp, Homo sapiens
aagcctggtcgcgctagctgggtaacctcgagggatactctaagagcaaagttactggcggaactcctgggaactggggcgatgggctcttagtatcggaggattggagccatctgatttttacctgaaattccttagtctctcctgtgttggggaaatggtcaccttgccttcagggacctgggctttcagctgtccatacctggccctggttgatggcggcatgctgggcagtgcacgtgaagacgcacatgagaccgggacttgctgtgttgcccaggctggtcttgaactcctggtcttaagcaatcatactgctttggccacccaaagcactgggattacaggcgtgaaccaccacacccagctcttaaaaccacagtatttctaggtcagtataacacacctgccccagggacttacaggtgtggcagaagcttggacttctggcttttctctctcttgcacccaggcacgctgcagctaccatttcctcccttcactacgttttagattctttccttttcattcctgtcattaccatgctaacgtacatctctatccaccttgctgttgggcaggtatgagcggcttgctggctgttcttccttgccttttggtctgtttctacttagctgactcctcaattgggtagaaacattcttcatcaatactatactgttataggctgtcccttgtgatttcaaactctagtaccagatactgttctctggttggttcttatgggcatcacttgtttttctggctaaatactagatctaaggtaggaatatggcttttgttttactagcagtgttcaagccctactgtgagcgcactgctagactgtcagatctctgagaatttcagaggattcctatataatgttaagtgactaaacttaataaacttaattaaaatcaacatctcaagatattgaaaaaa

SEQ ID NO: 288089 - DNA, 930 bp, Homo sapiens
ggaactagccttagcgaggccatgggggaaaaagtctaactggcggaactcctgggaactggggcgatgggctcttagtatcggaggattggagccatctgatttttacctgaaattccttagtctctcctgtgttggggaaatggtcaccttgccttcagggacctgggctttcagctgtccatacctggccctggttgatggcggcatgctgggcagtgcacgtgaagacgcacatgagaccgggacttgctgtgttgcccaggctggtcttgaactcctggtcttaagcaatcatactgctttggccacccaaagcactgggattacaggcgtgaaccaccacacccagctcttaaaaccacagtatttctaggtcagtataacacacctgccccagggacttacaggtgtggcagaagcttggacttctggcttttctctctcttgcacccaggcacgctgcagctaccatttcctcccttcactacgttttagattctttccttttcattcctgtcattaccatgctaacgtacatctctatccaccttgctgttgggcaggtatgagcggcttgctggctgttcttccttgccttttggtctgtttctacttagctgactcctcaattgggtagaaacattcttcatcaatactatactgttataggctgtcccttgtgatttcaaactctagtaccagatactgttctctggttggttcttatgggcatcacttgtttttctggctaaatactagatctaaggtaggaatatggcttttgttttactagcagtgttcaagccctactgtgagcgcactgctagactgtcagatctctgagaatttcagaggattcctatataatgttaagtgactaaacttaataaacttaattaaaatcaacatctcaagatattgaaaaaa

SEQ ID NO: 288090 - DNA, 902 bp, Homo sapiens
ggaactagccttagcgaggccatgggggaaaaagtctaactggcggaactcctgggaactggggcgatgggctcttagtatcggaggattggagccatctgatttttacctgaaattccttagtctctcctgtgttggggaaatgtcccctctcaccatgtctggctggcggcgactcagatgccatgagatggccatttgaagacaggcctgccggacatcaggtcaccttgccttcagggacctgggctttcagctgtccatacctggccctggttgatggcggcatgctgggcagtgcacgtgaagacgcacatgagaccgggacttgctgtgttgcccaggctggtcttgaactcctggtcttaagcaatcatactgctttggccacccaaagcactgggattacaggcgtgaaccaccacacccagctcttaaaaccacagtatttctagcacaggactgcaccaaggggcaacgcagtactgcagccttcctctgactcagtttggattctctctgtccgttctcaccacactactaaggagagaacagtgccaggcaggggaaggagaggtacctgaagttctttctccagttgagcccgaagctcttccatccctgagggcagcactagcctggagggcagagaggtcgagcgtctcaacagcatggggttggcaccattgaggaactggtagctgaacaactcatcatcctgccagcactggcgaaccttctctttggtgggcggtgaaaggaggatatatgtaccacagcctgcatatcccttctccaaaatctaccccaggggttcaggtatataaccctccctgaacccagcttctgcgttttcattctcaaggcctctctgagttgaccagatatgataaggtctcttc

SEQ ID NO: 288091 - DNA, 598 bp, Homo sapiens
ctaagtcaatgttatgattccatgctgcaaacaaggaaattaagcctcagcaatcctgatattctggaacagaacaatcctttaagagatttggtattgaagaccttgttggaaatggatcagacattgcccagaccactgtccagacccaacactggaataacccaggagagcttcgtgcttacctcccatcggcggtcattggtgaaaatctcatcattggctaagtccagctggttccactccagcagaagcttcagctgcccattccagttatccttgtcttgctcactggtgctgaaggctgtgagagggcaggaaaagactcaactcaccaaaggctcagaaataagagtgagaaccattcagtgtggccaattatcagagctgtttatcacagatcgtatttgttcttaaatggtatctaccagaagaagacagccagcttttgatactaacaaaccacaatggaagatggccgtatttatcattgcctttagcatgttaaagggtacataccacattgaccctggcagaagcattcctgatgtgttggaaaaattaagagaaataacagttctttggcaataaaaatacc

SEQ ID NO: 288092 - DNA, 4280 bp, Homo sapiens
atgcgcccagctcttggaggtaagcggctgtgtgcgggtggtcgcggtgagtgtgcaaggccgcggtggccgcgtgacaagcctgcgctaccagtgcgcccgccggccaggagaacggagcttgtgatagatcctttcgtaacaccaagtattgtaccaggacctgcggctccgccccagaggccgccatcttcctgaccacccgaaaggccggacctactccccggtgcatcttgggatcagggcggggccctgagcgccgccatgcttttgtacggcaggatcgcaaagcacgccgggaccggttggtttggttttgaagacgtggatggcgggaattctcgcttctggcctgggtgttttagctcacttggaaaggctagagacccaagtgagcagatcccgtaaacagtctgaagagctgcagagcgtgcaggcccaggaaggtgctcttggaaccaagattcataaactaaggcgtctgcgagatgagctgagggctgtggtgcggcaccggcgagccagcgtgaaagcatgtattgccaatgtagaacccaaccaaacagtggagatcaatgagcaagaagcattggaagagaaattggaaaatgtgaaagccattctgcaggcatatcattttacaggcctcagtggtaaactgaccagccgaggagtttgtgtctgcatcagtactgcttttgaggggaacctattggattcctattttgtggaccttgtcatacagaaaccactccggatacatcaccattcagtcccagtcttcattcccctggaagagatagctgcaaaatatttacagaccaacatccagcacttcctgttcagtctctgcgagtacctgaatgcttactctgggaggaagtaccaggcagaccggcttcagagtgactttgcagccctcctgactgggcccttgcagagaaacccactgtgtaacttgctgtcatttacttacaaactggatccagggggtcagtccttcccgttctgtgctagattgctgtataaggacctcacagcaactcttcccactgacgtcaccgtgacatgtcaaggagtggaagtattatccacttcatgggaggagcaacgagcatctcatgaaactctgttctgtacgaagcccttgcatcaagtgtttgcctcatttacaagaaaaggagaaaagttggatatgagtctggtctcctaatagattgttttcactgcactgggagcacatcagagaaataaatcccccctcccctgccaggtgaaaggaaatattgcactttctgttctcatgactaaggggacaggagttccagaagaacctttcaagatgatcaggaacaccaggacgagggccgtctcacctcactcggaccacatggagacctcccttcaaaatgggagccatgtcctgccccaccaagccctgtctgaagtggagcttccccgcctgtgctccctccacagtcccggaaagcccagcggcaaaggcagctttgtcccagctctgccaccctcctgctcacagtggtcagggcccctcaggggcaaggacggcagggattggaacgagggctctggaaggactgttcagccctatgcctaagacccctatgctggggacactacaggcacacagaggaatagcagggccaccctcagagctcacacatccacgaacaaatgaaggctgaggaggtttctaaacctaaagtccatgagtgtgcacttcaatccaggaaggtcgggacttccttcagtttcaaaaaataaattctcccttccggtttggactgttgcaggctcgaggccattcaggagttgtccaccacctggtggggcagtgtgacagaggggccattggggaaggtggctagcttatcccgccccttcaagaagaaggtcagcagctcccccttccccttcacaaagatggggcctcgcctcacaaagcggaagccgtactctcggaggatgacttgggtttcttctaccacctggagagggagggggagcaagaacgtggcgttacggggggagcctagactgagggcgggtgggggctttgggtggttggagccgagcactgatccatgggtcccaagcagtacgggacactccccaaacctcccagggccaagcccttccacccgtggcgagcagcgggtgggaaggagaaccctggagtgactggctgggggcctcctctcatccagagacttctctcctaggatggccatggtcacctgggtggcagcactgttacctggaaactgccactgcctgctcttctgtccctttgcccctttcgtggagcttttctgccagacgccactgagacagatcacaaggtattagaaggttcatacccaaaggtaggccatatgcatctagaacttcagcccagattttgtggatgggtggaagtgtttcttcctgtgctgaggctagctattgcagagattcttttccacttgccccacgtctctgcctctggacttactgttcagggccagggtgggaggcaggggcacgtgggaaagcactgttccggttttgttctcatgccgagtctgagcacgtgccagctgtgccactggacatacctgaatgttgcccatgacccccgtggactccatcctgctggctacattgactgtattgccccagatgtcgtagtgtggtttccgggctccgatgaccccagccagaaccccgcctttgttcatgcctagggtagaggcataaagttcagcacagccacaggccacaccttgttatgggcctcagaagccatctcctctccagacctgtaccacaaagctcctaatgtaacacatcattgtcctcattcaacttggctgtatgctattggagggtggaaatcacatctcctgtttatccgtgtgcttgttaggtgtcagccgccaccccccccccatatgcagatttactcggcatggtagtggccagcttctaacacagctggtatttcaagtctcctgggacctcactcaggaatgataccccctcagtagaagcagcaggtgatcttaactcctttcaaagagcaggcctgtctgggaagccatgtcctcagcaggcacagcaacccctctggaaatggatcacaaactcacttctcagccaggcaggccaagcttctattgtaacagtaggcacagtatagtcggatcatcacatcagctgggtttttggtttagtcatctagagtcgtctggactaaaggtctttcaggtctccttgccctgtgagtgcgtgaacctccccacccgaattgcctcagttgtcctgagcctcatgtctctcctggtggtgggccaggcccctgcatgggaagggagcctgctgcggggcaggccagctgggggtgctcacctatgcgcagcatgaagttattgaaggactggttgttgatgttggtgagcgtatccttcatggccagcgcgaagtcggccaggtcagccaggtgctgccagcgctctctctcggacttgtcttcctgtgccaggggaccgtggagaaagtgtcaggggccgctcactgcagcagcctgctctgctgccttccctggcagtgttctgggggtggattccctacacctagatgttcaaggccttacttttcctcccacaaaggagtcgcagccacgctagctctgacttgccactgtgacaaagttcacgtagcaggtctaggcaaagactgggcaattgagcagaggagacggacctgtgagtctgaccacgaggcggaccccttcaccttggctgggcctggtcctggtccttaggttttgtcaggttgtccttgtttggatccctcaactaggtgataagcactggagggggatgacccgccttggacgtgtttctttaacctcatccatataatagggccgtgggatggttgtagaggtaaagcaggatgatggtgttttaagaccagagcttgggaccagggctcctacacctaattttctctcctggtagctgaacaaaggtctaaattagcttaacaaaagaacaggctgccgtcagccagagttctgaaggccatgctttcagtttcccttgttgacaattgctctccagttcctatgaaagcacagagccttagggggcctggccacagaacacaaccatcttaggcctgagctgtgaacagcagggggttgtgtgtctgttctgtttctctgcttgccgaactttctcaataaaccctatttcttatttataaaaaaatgg

SEQ ID NO: 288093 - DNA, 1056 bp, Homo sapiens
atgcgcccagctcttggaggtaagcggctgtgtgcgggtggtcgcggtgagtgtgcaaggccgcggtggccgcgtgacaagcctgcgctaccagtgcgcccgccggccaggagaacggagcttgtgatagatcctttcgtaacaccaagtattgtaccaggacctgcggctccgccccagaggccgccatcttcctgaccacccgaaaggccggacctactccccggtgcatcttgggatcagggcggggccctgagcgccgccatgcttttgtacggcaggatcgcaaagcacgccgggaccggttggtttggttttgaagacgtggatggcgggaattctcgcttctggcctggcaaggacattggagtccctatcaccggttgcctagacaacttcatgggaaggcccttgggaatctgagatggagcaggcgaaccctttacgtccagatggcgagtccaaaggaggtgttttagctcacttggaaaggctagagacccaagtgagcagatcccgtaaacagtctgaagagctgcagagcgtgcaggcccaggaaggtgctcttggaaccaagattcataaactaaggcgtctgcgagatgagctgagggctgtggtgcggcaccggcgagccagcgtgaaagcatgtattgccaatgtagaacccaaccaaacagtggagatcaatgagcaagaagcattggaagagaaattggaaaatgtgaaagccattctgcaggcatatcattttacaggtttgtttgtttttttaacctaatttagtctgggtctgcctctagtgagttagtttgtagatgtgttatcagtcctggaattatttcataatttatagtattttacaccctctgccctcatcactcacacaaaaaaacagacacacacacagctgacgtgctatttgtaggcctatcttcacctacaagatgtgattggcccttttgtacagagtcagttggtgggtggttattccatcatcttaacagttcgtcatgtgccagaccttgtactagaactgtctttactgctggcttg

SEQ ID NO: 288094 - DNA, 4413 bp, Homo sapiens
atgcgcccagctcttggaggtaagcggctgtgtgcgggtggtcgcggtgagtgtgcaaggccgcggtggccgcgtgacaagcctgcgctaccagtgcgcccgccggccaggagaacggagcttgtgatagatcctttcgtaacaccaagtattgtaccaggacctgcggctccgccccagaggccgccatcttcctgaccacccgaaaggccggacctactccccggtgcatcttgggatcagggcggggccctgagcgccgccatgcttttgtacggcaggatcgcaaagcacgccgggaccggttggtttggttttgaagacgtggatggcgggaattctcgcttctggcctgggtgagctagaagggagaagcaaggacattggagtccctatcaccggttgcctagacaacttcatgggaaggcccttgggaatctgagatggagcaggcgaaccctttacgtccagatggcgagtccaaaggaggtgttttagctcacttggaaaggctagagacccaagtgagcagatcccgtaaacagtctgaagagctgcagagcgtgcaggcccaggaaggtgctcttggaaccaagattcataaactaaggcgtctgcgagatgagctgagggctgtggtgcggcaccggcgagccagcgtgaaagcatgtattgccaatgtagaacccaaccaaacagtggagatcaatgagcaagaagcattggaagagaaattggaaaatgtgaaagccattctgcaggcatatcattttacaggcctcagtggtaaactgaccagccgaggagtttgtgtctgcatcagtactgcttttgaggggaacctattggattcctattttgtggaccttgtcatacagaaaccactccggatacatcaccattcagtcccagtcttcattcccctggaagagatagctgcaaaatatttacagaccaacatccagcacttcctgttcagtctctgcgagtacctgaatgcttactctgggaggaagtaccaggcagaccggcttcagagtgactttgcagccctcctgactgggcccttgcagagaaacccactgtgtaacttgctgtcatttacttacaaactggatccagggggtcagtccttcccgttctgtgctagattgctgtataaggacctcacagcaactcttcccactgacgtcaccgtgacatgtcaaggagtggaagtattatccacttcatgggaggagcaacgagcatctcatgaaactctgttctgtacgaagcccttgcatcaagtgtttgcctcatttacaagaaaaggagaaaagttggatatgagtctggtctcctaatagattgttttcactgcactgggagcacatcagagaaataaatcccccctcccctgccaggtgaaaggaaatattgcactttctgttctcatgactaaggggacaggagttccagaagaacctttcaagatgatcaggaacaccaggacgagggccgtctcacctcactcggaccacatggagacctcccttcaaaatgggagccatgtcctgccccaccaagccctgtctgaagtggagcttccccgcctgtgctccctccacagtcccggaaagcccagcggcaaaggcagctttgtcccagctctgccaccctcctgctcacagtggtcagggcccctcaggggcaaggacggcagggattggaacgagggctctggaaggactgttcagccctatgcctaagacccctatgctggggacactacaggcacacagaggaatagcagggccaccctcagagctcacacatccacgaacaaatgaaggctgaggaggtttctaaacctaaagtccatgagtgtgcacttcaatccaggaaggtcgggacttccttcagtttcaaaaaataaattctcccttccggtttggactgttgcaggctcgaggccattcaggagttgtccaccacctggtggggcagtgtgacagaggggccattggggaaggtggctagcttatcccgccccttcaagaagaaggtcagcagctcccccttccccttcacaaagatggggcctcgcctcacaaagcggaagccgtactctcggaggatgacttgggtttcttctaccacctggagagggagggggagcaagaacgtggcgttacggggggagcctagactgagggcgggtgggggctttgggtggttggagccgagcactgatccatgggtcccaagcagtacgggacactccccaaacctcccagggccaagcccttccacccgtggcgagcagcgggtgggaaggagaaccctggagtgactggctgggggcctcctctcatccagagacttctctcctaggatggccatggtcacctgggtggcagcactgttacctggaaactgccactgcctgctcttctgtccctttgcccctttcgtggagcttttctgccagacgccactgagacagatcacaaggtattagaaggttcatacccaaaggtaggccatatgcatctagaacttcagcccagattttgtggatgggtggaagtgtttcttcctgtgctgaggctagctattgcagagattcttttccacttgccccacgtctctgcctctggacttactgttcagggccagggtgggaggcaggggcacgtgggaaagcactgttccggttttgttctcatgccgagtctgagcacgtgccagctgtgccactggacatacctgaatgttgcccatgacccccgtggactccatcctgctggctacattgactgtattgccccagatgtcgtagtgtggtttccgggctccgatgaccccagccagaaccccgcctttgttcatgcctagggtagaggcataaagttcagcacagccacaggccacaccttgttatgggcctcagaagccatctcctctccagacctgtaccacaaagctcctaatgtaacacatcattgtcctcattcaacttggctgtatgctattggagggtggaaatcacatctcctgtttatccgtgtgcttgttaggtgtcagccgccaccccccccccatatgcagatttactcggcatggtagtggccagcttctaacacagctggtatttcaagtctcctgggacctcactcaggaatgataccccctcagtagaagcagcaggtgatcttaactcctttcaaagagcaggcctgtctgggaagccatgtcctcagcaggcacagcaacccctctggaaatggatcacaaactcacttctcagccaggcaggccaagcttctattgtaacagtaggcacagtatagtcggatcatcacatcagctgggtttttggtttagtcatctagagtcgtctggactaaaggtctttcaggtctccttgccctgtgagtgcgtgaacctccccacccgaattgcctcagttgtcctgagcctcatgtctctcctggtggtgggccaggcccctgcatgggaagggagcctgctgcggggcaggccagctgggggtgctcacctatgcgcagcatgaagttattgaaggactggttgttgatgttggtgagcgtatccttcatggccagcgcgaagtcggccaggtcagccaggtgctgccagcgctctctctcggacttgtcttcctgtgccaggggaccgtggagaaagtgtcaggggccgctcactgcagcagcctgctctgctgccttccctggcagtgttctgggggtggattccctacacctagatgttcaaggccttacttttcctcccacaaaggagtcgcagccacgctagctctgacttgccactgtgacaaagttcacgtagcaggtctaggcaaagactgggcaattgagcagaggagacggacctgtgagtctgaccacgaggcggaccccttcaccttggctgggcctggtcctggtccttaggttttgtcaggttgtccttgtttggatccctcaactaggtgataagcactggagggggatgacccgccttggacgtgtttctttaacctcatccatataatagggccgtgggatggttgtagaggtaaagcaggatgatggtgttttaagaccagagcttgggaccagggctcctacacctaattttctctcctggtagctgaacaaaggtctaaattagcttaacaaaagaacaggctgccgtcagccagagttctgaaggccatgctttcagtttcccttgttgacaattgctctccagttcctatgaaagcacagagccttagggggcctggccacagaacacaaccatcttaggcctgagctgtgaacagcagggggttgtgtgtctgttctgtttctctgcttgccgaactttctcaataaaccctatttcttatttataaaaaaatgg

SEQ ID NO: 288095 - DNA, 4293 bp, Homo sapiens
atgcgcccagctcttggaggtaagcggctgtgtgcgggtggtcgcggtgagtgtgcaaggccgcggtggccgcgtgacaagcctgcgctaccagtgcgcccgccggccaggagaacggagcttgtgatagatcctttcgtaacaccaagtattgtaccaggacctgcggctccgccccagaggccgccatcttcctgaccacccgaaaggccggacctactccccggtgcatcttgggatcagggcggggccctgagcgccgccatgcttttgtacggcaggatcgcaaagcacgccgggaccggttggtttggttttgaagacgtggatggcgggaattctcgcttctggcctggcaaggacattggagtccctatcaccggttgcctagacaacttcatgggaaggcccttgggaatctgagatggagcaggcgaaccctttacgtccagatggcgagtccaaaggaggtgttttagctcacttggaaaggctagagacccaagtgagcagatcccgtaaacagtctgaagagctgcagagcgtgcaggcccaggaaggtgctcttggaaccaagattcataaactaaggcgtctgcgagatgagctgagggctgtggtgcggcaccggcgagccagcgtgaaagcatgtattgccaatgtagaacccaaccaaacagtggagatcaatgagcaagaagcattggaagagaaattggaaaatgtgaaagccattctgcaggcatatcattttacagaaaccactccggatacatcaccattcagtcccagtcttcattcccctggaagagatagctgcaaaatatttacagaccaacatccagcacttcctgttcagtctctgcgagtacctgaatgcttactctgggaggaagtaccaggcagaccggcttcagagtgactttgcagccctcctgactgggcccttgcagagaaacccactgtgtaacttgctgtcatttacttacaaactggatccagggggtcagtccttcccgttctgtgctagattgctgtataaggacctcacagcaactcttcccactgacgtcaccgtgacatgtcaaggagtggaagtattatccacttcatgggaggagcaacgagcatctcatgaaactctgttctgtacgaagcccttgcatcaagtgtttgcctcatttacaagaaaaggagaaaagttggatatgagtctggtctcctaatagattgttttcactgcactgggagcacatcagagaaataaatcccccctcccctgccaggtgaaaggaaatattgcactttctgttctcatgactaaggggacaggagttccagaagaacctttcaagatgatcaggaacaccaggacgagggccgtctcacctcactcggaccacatggagacctcccttcaaaatgggagccatgtcctgccccaccaagccctgtctgaagtggagcttccccgcctgtgctccctccacagtcccggaaagcccagcggcaaaggcagctttgtcccagctctgccaccctcctgctcacagtggtcagggcccctcaggggcaaggacggcagggattggaacgagggctctggaaggactgttcagccctatgcctaagacccctatgctggggacactacaggcacacagaggaatagcagggccaccctcagagctcacacatccacgaacaaatgaaggctgaggaggtttctaaacctaaagtccatgagtgtgcacttcaatccaggaaggtcgggacttccttcagtttcaaaaaataaattctcccttccggtttggactgttgcaggctcgaggccattcaggagttgtccaccacctggtggggcagtgtgacagaggggccattggggaaggtggctagcttatcccgccccttcaagaagaaggtcagcagctcccccttccccttcacaaagatggggcctcgcctcacaaagcggaagccgtactctcggaggatgacttgggtttcttctaccacctggagagggagggggagcaagaacgtggcgttacggggggagcctagactgagggcgggtgggggctttgggtggttggagccgagcactgatccatgggtcccaagcagtacgggacactccccaaacctcccagggccaagcccttccacccgtggcgagcagcgggtgggaaggagaaccctggagtgactggctgggggcctcctctcatccagagacttctctcctaggatggccatggtcacctgggtggcagcactgttacctggaaactgccactgcctgctcttctgtccctttgcccctttcgtggagcttttctgccagacgccactgagacagatcacaaggtattagaaggttcatacccaaaggtaggccatatgcatctagaacttcagcccagattttgtggatgggtggaagtgtttcttcctgtgctgaggctagctattgcagagattcttttccacttgccccacgtctctgcctctggacttactgttcagggccagggtgggaggcaggggcacgtgggaaagcactgttccggttttgttctcatgccgagtctgagcacgtgccagctgtgccactggacatacctgaatgttgcccatgacccccgtggactccatcctgctggctacattgactgtattgccccagatgtcgtagtgtggtttccgggctccgatgaccccagccagaaccccgcctttgttcatgcctagggtagaggcataaagttcagcacagccacaggccacaccttgttatgggcctcagaagccatctcctctccagacctgtaccacaaagctcctaatgtaacacatcattgtcctcattcaacttggctgtatgctattggagggtggaaatcacatctcctgtttatccgtgtgcttgttaggtgtcagccgccaccccccccccatatgcagatttactcggcatggtagtggccagcttctaacacagctggtatttcaagtctcctgggacctcactcaggaatgataccccctcagtagaagcagcaggtgatcttaactcctttcaaagagcaggcctgtctgggaagccatgtcctcagcaggcacagcaacccctctggaaatggatcacaaactcacttctcagccaggcaggccaagcttctattgtaacagtaggcacagtatagtcggatcatcacatcagctgggtttttggtttagtcatctagagtcgtctggactaaaggtctttcaggtctccttgccctgtgagtgcgtgaacctccccacccgaattgcctcagttgtcctgagcctcatgtctctcctggtggtgggccaggcccctgcatgggaagggagcctgctgcggggcaggccagctgggggtgctcacctatgcgcagcatgaagttattgaaggactggttgttgatgttggtgagcgtatccttcatggccagcgcgaagtcggccaggtcagccaggtgctgccagcgctctctctcggacttgtcttcctgtgccaggggaccgtggagaaagtgtcaggggccgctcactgcagcagcctgctctgctgccttccctggcagtgttctgggggtggattccctacacctagatgttcaaggccttacttttcctcccacaaaggagtcgcagccacgctagctctgacttgccactgtgacaaagttcacgtagcaggtctaggcaaagactgggcaattgagcagaggagacggacctgtgagtctgaccacgaggcggaccccttcaccttggctgggcctggtcctggtccttaggttttgtcaggttgtccttgtttggatccctcaactaggtgataagcactggagggggatgacccgccttggacgtgtttctttaacctcatccatataatagggccgtgggatggttgtagaggtaaagcaggatgatggtgttttaagaccagagcttgggaccagggctcctacacctaattttctctcctggtagctgaacaaaggtctaaattagcttaacaaaagaacaggctgccgtcagccagagttctgaaggccatgctttcagtttcccttgttgacaattgctctccagttcctatgaaagcacagagccttagggggcctggccacagaacacaaccatcttaggcctgagctgtgaacagcagggggttgtgtgtctgttctgtttctctgcttgccgaactttctcaataaaccctatttcttatttataaaaaaatgg

SEQ ID NO: 288096 - DNA, 1162 bp, Homo sapiens
atgcgcccagctcttggaggtaagcggctgtgtgcgggtggtcgcggtgagtgtgcaaggccgcggtggccgcgtgacaagcctgcgctaccagtgcgcccgccggccaggagaacggagcttgtgatagatcctttcgtaacaccaagtattgtaccaggacctgcggctccgccccagaggccgccatcttcctgaccacccgaaaggccggacctactccccggtgcatcttgggatcagggcggggccctgagcgccgccatgcttttgtacggcaggatcgcaaagcacgccgggaccggttggtttggttttgaagacgtggatggcgggaattctcgcttctggcctgggtgttttagctcacttggaaaggctagagacccaagtgagcagatcccgtaaacagtctgaagagctgcagagcgtgcaggcccaggaaggtgctcttggaaccaagattcataaactaaggcgtctgcgagatgagctgagggctgtggtgcggcaccggcgagccagcgtgaaagcatgtattgccaatgtagaacccaaccaaacagtggagatcaatgagcaagaagcattggaagagaaattggaaaatgtgaaagccattctgcaggcatatcattttacaggcctcagtggtaaactgaccagccgaggagtttgtgtctgcatcagtactgcttttgaggggaacctattggattcctattttgtggaccttgtcatacagaaaccactccggatacatcaccattcagtcccagtcttcattcccctggaagagatagctgcaaaatatttacagaccaacatccagcacttcctgttcagtctctgcgagtacctgaatgcttactctgggaggaagtaccaggcagaccggcttcagagtgactttgcagccctcctgactgggcccttgcagagaaacccactgtgtaacttgctgtcatttacttacaaactggatccagggggtcagtccttcccgttctgtgctagattgctgtataaggacctcacagcaactcttcccactttggtgttaccctggcacaggttacgggaatgtaagtaataattcactgcttggataggagcctccttcctgtttcaggaaacatttgttctgttctgaagcactttg

SEQ ID NO: 288097 - DNA, 1943 bp, Homo sapiens
atgcgcccagctcttggaggtaagcggctgtgtgcgggtggtcgcggtgagtgtgcaaggccgcggtggccgcgtgacaagcctgcgctaccagtgcgcccgccggccaggagaacggagcttgtgatagatcctttcgtaacaccaagtattgtaccaggacctgcggctccgccccagaggccgccatcttcctgaccacccgaaaggccggacctactccccggtgcatcttgggatcagggcggggccctgagcgccgccatgcttttgtacggcaggatcgcaaagcacgccgggaccggttggtttggttttgaagacgtggatggcgggaattctcgcttctggcctgggtgagctagaagggagaagcaaggacattggagtccctatcaccggttgcctagacaacttcatgggaaggcccttgggaatctgagatggagcaggcgaaccctttacgtccagatggcgagtccaaaggaggtgttttagctcacttggaaaggctagagacccaagtgagcagatcccgtaaacagtctgaagagctgcagagcgtgcaggcccaggaaggtgctcttggaaccaagattcataaactaaggcgtctgcgagatgagctgagggctgtggtgcggcaccggcgagccagcgtgaaagcatgtattgccaatgtagaacccaaccaaacagtggagatcaatgagcaagaagcattggaagagaaattggaaaatgtgaaagccattctgcaggcatatcattttacaggcctcagtggtaaactgaccagccgaggagtttgtgtctgcatcagtactgcttttgaggggaacctattggattcctattttgtggaccttgtcatacagaaaccactccggatacatcaccattcagtcccagtcttcattcccctggaagagatagctgcaaaatatttacagaccaacatccagcacttcctgttcagtctctgcgagtacctgaatgcttactctgggaggaagtaccaggcagaccggcttcagagtgactttgcagccctcctgactgggcccttgcagagaaacccactgtgtaacttgctgtcatttacttacaaactggatccagggggtcagtccttcccgttctgtgctagattgctgtataaggacctcacagcaactcttcccactgacgtcaccgtgacatgtcaaggagtggaagtattatccacttcatgggaggagcaacgagcatctcatgaaactctgttctgtacgaagcccttgcatcaagtgtttgcctcatttacaagaaaaggagaaaagttggatatgagtctggtctcctaatagattgttttcactgcactgggagcacatcagagaaataaatcccccctcccctgccaggtgaaaggaaatattgcactttctgttctcatgactaaggggacaggagttccagaagaacctttcaagatgatcaggaacaccaggacgagggccgtctcacctcactcggaccacatggagacctcccttcaaaatgggagccatgtcctgccccaccaagccctgtctgaagtggagcttccccgcctgtgctccctccacagtcccggaaagcccagcggcaaaggcagctttgtcccagctctgccaccctcctgctcacagtggtcagggcccctcaggggcaaggacggcagggattggaacgagggctctggaaggactgttcagccctatgcctaagacccctatgctggggacactacaggcacacagaggaatagcagggccaccctcagagctcacacatccacgaacaaatgaaggctgaggaggtttctaaacctaaagtccatgagtgtgcacttcaatccaggaaggtcgggacttccttcagtttcaaaaaataaattctcccttccggtttggactgtt

SEQ ID NO: 288098 - DNA, 4394 bp, Homo sapiens
atgcgcccagctcttggaggtaagcggctgtgtgcgggtggtcgcggtgagtgtgcaaggccgcggtggccgcgtgacaagcctgcgctaccagtgcgcccgccggccaggagaacggagcttgtgatagatcctttcgtaacaccaagtattgtaccaggacctgcggctccgccccagaggccgccatcttcctgaccacccgaaaggccggacctactccccggtgcatcttgggatcagggcggggccctgagcgccgccatgcttttgtacggcaggatcgcaaagcacgccgggaccggttggtttggttttgaagacgtggatggcgggaattctcgcttctggcctggcaaggacattggagtccctatcaccggttgcctagacaacttcatgggaaggcccttgggaatctgagatggagcaggcgaaccctttacgtccagatggcgagtccaaaggaggtgttttagctcacttggaaaggctagagacccaagtgagcagatcccgtaaacagtctgaagagctgcagagcgtgcaggcccaggaaggtgctcttggaaccaagattcataaactaaggcgtctgcgagatgagctgagggctgtggtgcggcaccggcgagccagcgtgaaagcatgtattgccaatgtagaacccaaccaaacagtggagatcaatgagcaagaagcattggaagagaaattggaaaatgtgaaagccattctgcaggcatatcattttacaggcctcagtggtaaactgaccagccgaggagtttgtgtctgcatcagtactgcttttgaggggaacctattggattcctattttgtggaccttgtcatacagaaaccactccggatacatcaccattcagtcccagtcttcattcccctggaagagatagctgcaaaatatttacagaccaacatccagcacttcctgttcagtctctgcgagtacctgaatgcttactctgggaggaagtaccaggcagaccggcttcagagtgactttgcagccctcctgactgggcccttgcagagaaacccactgtgtaacttgctgtcatttacttacaaactggatccagggggtcagtccttcccgttctgtgctagattgctgtataaggacctcacagcaactcttcccactgacgtcaccgtgacatgtcaaggagtggaagtattatccacttcatgggaggagcaacgagcatctcatgaaactctgttctgtacgaagcccttgcatcaagtgtttgcctcatttacaagaaaaggagaaaagttggatatgagtctggtctcctaatagattgttttcactgcactgggagcacatcagagaaataaatcccccctcccctgccaggtgaaaggaaatattgcactttctgttctcatgactaaggggacaggagttccagaagaacctttcaagatgatcaggaacaccaggacgagggccgtctcacctcactcggaccacatggagacctcccttcaaaatgggagccatgtcctgccccaccaagccctgtctgaagtggagcttccccgcctgtgctccctccacagtcccggaaagcccagcggcaaaggcagctttgtcccagctctgccaccctcctgctcacagtggtcagggcccctcaggggcaaggacggcagggattggaacgagggctctggaaggactgttcagccctatgcctaagacccctatgctggggacactacaggcacacagaggaatagcagggccaccctcagagctcacacatccacgaacaaatgaaggctgaggaggtttctaaacctaaagtccatgagtgtgcacttcaatccaggaaggtcgggacttccttcagtttcaaaaaataaattctcccttccggtttggactgttgcaggctcgaggccattcaggagttgtccaccacctggtggggcagtgtgacagaggggccattggggaaggtggctagcttatcccgccccttcaagaagaaggtcagcagctcccccttccccttcacaaagatggggcctcgcctcacaaagcggaagccgtactctcggaggatgacttgggtttcttctaccacctggagagggagggggagcaagaacgtggcgttacggggggagcctagactgagggcgggtgggggctttgggtggttggagccgagcactgatccatgggtcccaagcagtacgggacactccccaaacctcccagggccaagcccttccacccgtggcgagcagcgggtgggaaggagaaccctggagtgactggctgggggcctcctctcatccagagacttctctcctaggatggccatggtcacctgggtggcagcactgttacctggaaactgccactgcctgctcttctgtccctttgcccctttcgtggagcttttctgccagacgccactgagacagatcacaaggtattagaaggttcatacccaaaggtaggccatatgcatctagaacttcagcccagattttgtggatgggtggaagtgtttcttcctgtgctgaggctagctattgcagagattcttttccacttgccccacgtctctgcctctggacttactgttcagggccagggtgggaggcaggggcacgtgggaaagcactgttccggttttgttctcatgccgagtctgagcacgtgccagctgtgccactggacatacctgaatgttgcccatgacccccgtggactccatcctgctggctacattgactgtattgccccagatgtcgtagtgtggtttccgggctccgatgaccccagccagaaccccgcctttgttcatgcctagggtagaggcataaagttcagcacagccacaggccacaccttgttatgggcctcagaagccatctcctctccagacctgtaccacaaagctcctaatgtaacacatcattgtcctcattcaacttggctgtatgctattggagggtggaaatcacatctcctgtttatccgtgtgcttgttaggtgtcagccgccaccccccccccatatgcagatttactcggcatggtagtggccagcttctaacacagctggtatttcaagtctcctgggacctcactcaggaatgataccccctcagtagaagcagcaggtgatcttaactcctttcaaagagcaggcctgtctgggaagccatgtcctcagcaggcacagcaacccctctggaaatggatcacaaactcacttctcagccaggcaggccaagcttctattgtaacagtaggcacagtatagtcggatcatcacatcagctgggtttttggtttagtcatctagagtcgtctggactaaaggtctttcaggtctccttgccctgtgagtgcgtgaacctccccacccgaattgcctcagttgtcctgagcctcatgtctctcctggtggtgggccaggcccctgcatgggaagggagcctgctgcggggcaggccagctgggggtgctcacctatgcgcagcatgaagttattgaaggactggttgttgatgttggtgagcgtatccttcatggccagcgcgaagtcggccaggtcagccaggtgctgccagcgctctctctcggacttgtcttcctgtgccaggggaccgtggagaaagtgtcaggggccgctcactgcagcagcctgctctgctgccttccctggcagtgttctgggggtggattccctacacctagatgttcaaggccttacttttcctcccacaaaggagtcgcagccacgctagctctgacttgccactgtgacaaagttcacgtagcaggtctaggcaaagactgggcaattgagcagaggagacggacctgtgagtctgaccacgaggcggaccccttcaccttggctgggcctggtcctggtccttaggttttgtcaggttgtccttgtttggatccctcaactaggtgataagcactggagggggatgacccgccttggacgtgtttctttaacctcatccatataatagggccgtgggatggttgtagaggtaaagcaggatgatggtgttttaagaccagagcttgggaccagggctcctacacctaattttctctcctggtagctgaacaaaggtctaaattagcttaacaaaagaacaggctgccgtcagccagagttctgaaggccatgctttcagtttcccttgttgacaattgctctccagttcctatgaaagcacagagccttagggggcctggccacagaacacaaccatcttaggcctgagctgtgaacagcagggggttgtgtgtctgttctgtttctctgcttgccgaactttctcaataaaccctatttcttatttataaaaaaatgg

SEQ ID NO: 288099 - DNA, 1506 bp, Homo sapiens
atgcgcccagctcttggaggtaagcggctgtgtgcgggtggtcgcggtgagtgtgcaaggccgcggtggccgcgtgacaagcctgcgctaccagtgcgcccgccggccaggagaacggagcttgtgatagatcctttcgtaacaccaagtattgtaccaggacctgcggctccgccccagaggccgccatcttcctgaccacccgaaaggccggacctactccccggtgcatcttgggatcagggcggggccctgagcgccgccatgcttttgtacggcaggatcgcaaagcacgccgggaccggttggtttggttttgaagacgtggatggcgggaattctcgcttctggcctgggtgttttagctcacttggaaaggctagagacccaagtgagcagatcccgtaaacagtctgaagagctgcagagcgtgcaggcccaggaaggtgctcttggaaccaagattcataaactaaggcgtctgcgagatgagctgagggctgtggtgcggcaccggcgagccagcgtgaaagcatgtattgccaatgtagaacccaaccaaacagtggagatcaatgagcaagaagcattggaagagaaattggaaaatgtgaaagccattctgcaggcatatcattttacaggcctcagtggtaaactgaccagccgaggagtttgtgtctgcatcagtactgcttttgaggggaacctattggattcctattttgtggaccttgtcatacagaaaccactccggatacatcaccattcagtcccagtcttcattcccctggaagagatagctgcaaaatatttacagaccaacatccagcacttcctgttcagtctctgcgagtacctgaatgcttactctgggaggaagtaccaggcagaccggcttcagagtgactttgcagccctcctgactgggcccttgcagagaaacccactgtgtaacttgctgtcatttacttacaaactggatccagggggtcagtccttcccgttctgtgctagattgctgtataaggacctcacagcaactcttcccactgacgtcaccgtgacatgtcaaggagtggaagtattatccacttcatgggaggagcaacgagcatctcatgaaactctgttctgtacgaagcccttgcatcaagtgtttgcctcatttacaagaaaaggagaaaagttggatatgagtctggtctcctaatagattgttttcactgcactgggagcacatcagaggtaagtaaccagtactgaagacagtaccaggtgggtagtactgtctgatgaagggtacatcacccttctgatgaaaacagacacctacctgttcatctggatggaagagcaggtttgagtatagacactggcatttttgaacaattcccatgatcacctggtcccttcttaaaatgctcaagatgttttttaaaggtattagttgatcatacattttagttgaaaatcatttgtggggcaataaaagccattttttga

SEQ ID NO: 288100 - DNA, 404 bp, Homo sapiens
aggtgtcttcttgtttgcctcaggcctcagtggtaaactgaccagccgaggagtttgtgtctgcatcagtactgcttttgaggggaacctattggattcctattttgtggaccttgtcatacagaaaccactccggatacatcaccattcagtcccagtcttcattcccctggaagagatagctgcaaaatatttacagaccaacatccagcacttcctgttcagtctctgcgagtacctgaatgcttactctgggaggaagtaccaggcagaccggcttcaggtatctctctgggatgttatatgcctcatccgtgggcccaagatcaacttaaaagggggatgttttttgtattttcagtgtttcctaactgtgagttagaagtttgaccgttacctttccg

SEQ ID NO: 288101 - DNA, 430 bp, Homo sapiens
ccaccattccttttgtgaggccttcagcaatggcaaagcagcagtaagttccagagcctttcattactgaagccactagtggaaatccagaaaattgtcagctgttcagttcttgttgctaatgagctaggtactctcaatctggttcctaatcaactgggcattcaaattttgaaaaatttccatgtttctagaagatgttgccagacctatcctgttaaaaactggtaggttctaagtgccagagatttttagctgacttctctgaccagcactaaactcagcaaatagtttccctaatcaaaaatttacacttttcccccaaaccctcaggatttggctgctctgcctgtgccaatgccatctcatttcttgatttcctcccttacctcatttccttcttccatttcaatccctgtgcctctcttaa

SEQ ID NO: 288102 - DNA, 926 bp, Homo sapiens
tctcggctcactgcaatctctgcctcccgggttcaagcaattcttctgcctcagccttgcaagtaactgggattacaggcatgcaccaccatgcctggctaattttctatatctttttagtagagatggagtttcaccatgttggtcaggctggtctcaaactcctgacctcaagtgatccgctcgccttggcctcccaaagtttgggactacaggcgccggccaccacgcccggctaattttttgtatttttagcagagacagggtttcactgtgttagccaggatggtctcaatcttctgacctcgtgatccgcctttctcggcctctgaaagtgctgcgattataggcgtgagccacggcgcccggcctttggcctcataattctttatttccttcctaggtctcttattacttttaatatttacccaacctttttgagtcatccataatgaatgtatagttcatttgatttgatttgatttatttttttgagatggagtctcgctctgtcacccagactggagttcagtggtgtgatcttgtcccactgcagcctccacctcctgggttctagtgattctcctgccttagcctcccaggtagctgggagtacaagcacgtgccaccacacttggctaatttttgtatttctagtagagacggagtttcaccatgttgaccaggctggtctcaaactcctgacttcaggggatctgcccgcctcggactcccaaagtgctaggattgcaggagtgagccactgcgtctggccatgaatgtatagttcaaatacctagtccactgaccttgccttttaaaacagttgtgtctgggctcagtggctcaggcctgtaatctcagcactttgggaggccaaagcaggaggattgcttgagtacaggagttcgagaccagcctgggca

SEQ ID NO: 288103 - DNA, 886 bp, Homo sapiens
ggtcccataaggcagcctcaccctcctcctcagagtcctctagcttcaccatgacaggcccctcatcttctgggggtgctcggtctggggagcccagcaccgcaggcctcatagagggtaccaggtcaggtatctgaggccagtgtctgcccctggtgaagaaataggatgaggctgttgcaaaaggagtacagtgaatgcttcactgcctagtctatgctgtaccgtttgatcctcagacctaccccatgtggaaggcagatgaggaaacaggcaaagaaaggccatctacaacccacagacttatgcagctggaagccctcccttagccacctgtatccctggtcttctctccgcttgggcctgtgcaaagtctctgacagtctccctgctccaaacacaggcttttttttcttttctttgagacatgctgtcagtcagttgcccaggctgaagtgcagtggcgagatcatgcgtcactgcagacttgacctcccgggctccagagatcggcctcccaagtagctgagacaacaggtgtgtgccacgacatccggctaatttcttaatttttctgtagggatgggatcttactatgttgcctaggctgttcttgaactcctgggctcaagcagatgatcctcttaccttgacctcccgaagtgctgggacttacaggtttgttccaccatgccagcccacaggctgttttttaggactagaagacacttctctcccctgtatccttcccttcttctacatgtgcaacctcattcctgcgctacagctctctctttaccaggtggatggcacctatacacctacagcctgggcatcagcatcactgctggcgtctccccctacccaacgccagcccttacttcac

SEQ ID NO: 288104 - DNA, 724 bp, Homo sapiens
tcacctccgctgctgccgccacccgcccggcctgcctttgaccctatgggtcacagacaaggcagggtgatcgcggcaagaccctgagtgagactagatgcgttacccagagggtgcgaggtcgagtaccttccctgtcccatcgcaaacccaaagatccccgttcctggagattctgattgaggtcccagccctacctgtcctgatgcctgaccagcaggatgcaagcccaggaggccatccaggataccaggactgggagagaatgcccagtggtgattcctgcatagtcctaggaggtgtcttgggcccaggctctggagttggaggctcagtttcagggatgggatcttactatgttgcctaggctgttcttgaactcctgggctcaagcagatgatcctcttaccttgacctcccgaagtgctgggacttacagctgcggctttaggaaggaatctgcgtttatgaaggggatggcaccgcagaatcattcccccgtgggtggcatcgatttcgagggccgcctcatcctgggggccaagcctccactcttcaaggtgccaagtcaacctgaaaccctgggagagacttgggtcatagccaagatggcaggtacctacggagggtcccgaaatacacttcccagaagtccaggcggcaacttccgctccagggtgccaagccctgggcgctcccgcaaggactgcccggattcgttccc

SEQ ID NO: 288105 - DNA, 425 bp, Homo sapiens
aaatagagtagaaagacaaaggaatggaaaattggagtgaaaagataagaacattaaaggacccatcccagatgccaatagccaagtaagaggcatcccagaaacagggagcagagcaatagaagggaaggaaataaaaaaaaatttcaaggcagtttcccagaactgagagatgtgaatttcaaactgaaaaagctcaccaacaatagtgataaaaaaaggtctgtgactgtactaataaaaagaattcttccagccaaacttcaatctaatgttgagggctagacaatgtgtttcagatatgggacatgtcagaattttatcttccacaccagaacacccacaaagctccaccaaaacaaaggtgtgaactaagaaagaggagaccctgggtctcaggaacaggaaggaacataacagaagat

SEQ ID NO: 288106 - DNA, 442 bp, Homo sapiens
caggaaggaacataacagaagatgggttgtaggaggagcctggatgatgccagacaaaggtggtggctgagaggtagatggcagggggcctctggtccgtaatgcttcgatgattgggcaggatccctatcctgtgtcaaggtccctcctgcccacctgctctgtctactaacctgctgtccttgtcaggtcccagccctacctgtcctgatgcctgaccagcaggatgcaagcccaggaggccatccaggataccaggactgggagagaatgtgggtacggggaatactcgccctgcttgcaaaaggttttactagggtggggagtttctagaaagtagaggggctgtgggatcagtggtagtggtgggtggctttttttgagggcagaagatgctagaggaggttgaaccttataggggatgatctagggaatgggggaa

SEQ ID NO: 288107 - DNA, 504 bp, Homo sapiens
atgatttctacaggtaacttagaaatatatttgagtcctgaaaagaggaagactgatttcctttttaaattagcaatgcctagcatttttggctatttgccggtgttgagactataactaactgaaaattttatcatcaatctacttgaagatcgtgtttaagactgtaactgtgggtaggcgtggtggcttatgcctgtaatcctagcactttgggaggctgaagtgggaggatcactggagcccaggagttctaaaccagcctgggcaacatagggagaccctgtctctacaaaacaaaacaaagaccataactatggaaaaacctaatgctacagtaactgatgtcattcatgtaactcatgttgtgtaatgttttcctagaaatttcaaggtaaagatgtcggggttaagtgtttgatatatcccagtcactgtgacagttttgactcttcacgcctccaaaaattgttttcagcccagaaacatttgagaggcttttaa

SEQ ID NO: 288108 - DNA, 1440 bp, Homo sapiens
ccaggcggaagtgcgtaccggaagtgccagcggcagtgtgtaagacgctcacgggcgcgcggactatcgggcggctaggctctctgaggaggctgccacagtgaagcagccgtgacaagtggtgcccgaccagggacctgaacgaggaaggtctgccagagcagagaaagtgaaactgatcagacgaactacgaacccctggacgggagagtctgccggcggagaatataaggagatggacaaaccgtgtgggtgccctccaggtgtgtgtgaccatggaacgggagaccggagggatccatggtattcaaccgtgggcctgttacctccagtacgagccatgagccagcggaatctgaatgcaaagacagaacaagggccgaccggagtcacaatgacatccaaccccataacatggggacagatcaagaaaacgacacaagaagctgagaaactactggagcgccagggtcaggcaaaaacccctgactccatgttcttggccatgctagctgtagtgtcctgtgcgtctataggatcgggtgaaccaccaaccggcaattgaaagctgcacagcctgaaattacctttattcaattaatgcaaaaacaaaaggggagatgttggaggccgaaggaatgagggtcgtgaccaactcagtataccactggaggctctgtgagcaaacagcaaactgttctcatgaaagcaggatgttggcgaactgacaaactctgtctgccgccagaaggaatgctgggggcagtcatgtcccaggtcccgtgctccttgaggttatccacaggaacatccagaacctgttgaacaaagaaaggaatcatgtgggcctgtgttaaatcaaatagctgaccgacagttatcccttcctccctattcactctacctaataaatatgaagggctgtaaaagctcaggtccctgttccctaatatcaaggagccccctgaccccttctttcaaacagatccttttgtctgtctcatttctgcattcgtcgtccttcgttcggtccagaagcaaccgcgacagtcctgcatgtgttgatgccacctgtatgtgcaggtgtgacctcaggtgtgtgagtatccctcataccccttatcatcactgcctattcgctcttcctccagcctctggcaaccactaatccacgttatatgtctagatttgcctcttctggacacttcatataaatggagtcatacaatatgtggtttcttgtgtctggctttttaccactgaacgttttcagagttcatccatgttgtagcatgtatcagtttttcattcctctttatggctgaataatactgcattgtatggatataccacagtttgtttactcattagttcatagacattggggttgtttccaactctctgatattataaatgctactgctgtgaaaattcaaaaca

SEQ ID NO: 288109 - DNA, 1391 bp, Homo sapiens
ccaggcggaagtgcgtaccggaagtgccagcggcagtgtgtaagacgctcacgggcgcgcggactatcgggcggctaggctctctgaggaggctgccacagtgaagcagccgtgacaagtggtgcccgaccagggacctgaacgaggaaggtctgccagagcagagaaagtgaaactgatcagacgaactacgaacccctggacgggagagtctgccggcggagaatataaggagatggacaaaccgtgtgggtgccctccaggtgtgtgtgaccatggaacgggagaccggagggatccatggtattcaaccgtgggcctgttacctccagtacgagccatgagccagcggaatctgaatgcaaagacagaacaagggccgaccggagtcacaatgacatccaaccccataacatggggacagatcaagaaaacgacacaagaagctgagaaactactggagcgccagggtcaggcaaaaacccctgactccatgttcttggccatgctagctgtagtgtcctgtgcgtctataggatcgggtgaaccaccaaccggcaattgaaagctgcacagcctgaaattacctttattcaattaatgcaaaaacaaaaggggagatgttggaggccgaaggaatgagggtcgtgaccaactcagtataccactggaggctctgtgagcaaacagcaaactgttctcatgaaagcaggatgttggcgaactgacaaactctgtctgccgccagaaggaatgctgggggcagtcatgtcccaggtcccgtgctccttgaggttatccacaggaacatccagaacctgttgaacaaagaaaggaatcatgtgggcctgtgttaaatcaaatagctgaccgacagttatcccttcctccctattcactctacctaataaatatgaagggctgtaaatcaaacagatccttttgtctgtctcatttctgcattcgtcgtccttcgttcggtccagaagcaaccgcgacagtcctgcatgtgttgatgccacctgtatgtgcaggtgtgacctcaggtgtgtgagtatccctcataccccttatcatcactgcctattcgctcttcctccagcctctggcaaccactaatccacgttatatgtctagatttgcctcttctggacacttcatataaatggagtcatacaatatgtggtttcttgtgtctggctttttaccactgaacgttttcagagttcatccatgttgtagcatgtatcagtttttcattcctctttatggctgaataatactgcattgtatggatataccacagtttgtttactcattagttcatagacattggggttgtttccaactctctgatattataaatgctactgctgtgaaaattcaaaaca

SEQ ID NO: 288110 - DNA, 1409 bp, Homo sapiens
ccaggcggaagtgcgtaccggaagtgccagcggcagtgtgtaagacgctcacgggcgcgcggactatcgggcggctaggctctctgaggaggctgccacagtgaagcagccgtgacaagtggtgcccgaccagggacctgaacgaggaaggtctgccagagcagagaaagtgaaactgatcagacgaactacgaacccctggacgggagagtctgccggcggagaatataaggtgtgtgtgaccatggaacgggagaccggagggatccatggtattcaaccgtgggcctgttacctccagtacgagccatgagccagcggaatctgaatgcaaagacagaacaagggccgaccggagtcacaatgacatccaaccccataacatggggacagatcaagaaaacgacacaagaagctgagaaactactggagcgccagggtcaggcaaaaacccctgactccatgttcttggccatgctagctgtagtgtcctgtgcgtctataggatcgggtgaaccaccaaccggcaattgaaagctgcacagcctgaaattacctttattcaattaatgcaaaaacaaaaggggagatgttggaggccgaaggaatgagggtcgtgaccaactcagtataccactggaggctctgtgagcaaacagcaaactgttctcatgaaagcaggatgttggcgaactgacaaactctgtctgccgccagaaggaatgctgggggcagtcatgtcccaggtcccgtgctccttgaggttatccacaggaacatccagaacctgttgaacaaagaaaggaatcatgtgggcctgtgttaaatcaaatagctgaccgacagttatcccttcctccctattcactctacctaataaatatgaagggctgtaaaagctcaggtccctgttccctaatatcaaggagccccctgaccccttctttcaaacagatccttttgtctgtctcatttctgcattcgtcgtccttcgttcggtccagaagcaaccgcgacagtcctgcatgtgttgatgccacctgtatgtgcaggtgtgacctcaggtgtgtgagtatccctcataccccttatcatcactgcctattcgctcttcctccagcctctggcaaccactaatccacgttatatgtctagatttgcctcttctggacacttcatataaatggagtcatacaatatgtggtttcttgtgtctggctttttaccactgaacgttttcagagttcatccatgttgtagcatgtatcagtttttcattcctctttatggctgaataatactgcattgtatggatataccacagtttgtttactcattagttcatagacattggggttgtttccaactctctgatattataaatgctactgctgtgaaaattcaaaaca

SEQ ID NO: 288111 - DNA, 1381 bp, Homo sapiens
ccaggcggaagtgcgtaccggaagtgccagcggcagtgtgtaagacgctcacgggcgcgcggactatcgggcggctaggctctctgaggaggctgccacagtgaagcagccgtgacaagtggtgcccgaccagggacctgaacgaggaaggtctgccagagcagagaaagtgaaactgatcagacgaactacgaacccctggacgggagagtctgccggcggagaatataaggagatggacaaaccgtgtgggtgccctccaggtgtgtgtgaccatggaacgggagaccggagggatccatggtattcaaccgtgggcctgttacctccagtacgagccatgagccagcggaatctgaatgcaaagacagaacaagggccgaccggagtcacaatgacatccaaccccataacatggggacagatcaagaaaacgacacaagaagctgagaaactactggagcgccaggtctataggatcgggtgaaccaccaaccggcaattgaaagctgcacagcctgaaattacctttattcaattaatgcaaaaacaaaaggggagatgttggaggccgaaggaatgagggtcgtgaccaactcagtataccactggaggctctgtgagcaaacagcaaactgttctcatgaaagcaggatgttggcgaactgacaaactctgtctgccgccagaaggaatgctgggggcagtcatgtcccaggtcccgtgctccttgaggttatccacaggaacatccagaacctgttgaacaaagaaaggaatcatgtgggcctgtgttaaatcaaatagctgaccgacagttatcccttcctccctattcactctacctaataaatatgaagggctgtaaaagctcaggtccctgttccctaatatcaaggagccccctgaccccttctttcaaacagatccttttgtctgtctcatttctgcattcgtcgtccttcgttcggtccagaagcaaccgcgacagtcctgcatgtgttgatgccacctgtatgtgcaggtgtgacctcaggtgtgtgagtatccctcataccccttatcatcactgcctattcgctcttcctccagcctctggcaaccactaatccacgttatatgtctagatttgcctcttctggacacttcatataaatggagtcatacaatatgtggtttcttgtgtctggctttttaccactgaacgttttcagagttcatccatgttgtagcatgtatcagtttttcattcctctttatggctgaataatactgcattgtatggatataccacagtttgtttactcattagttcatagacattggggttgtttccaactctctgatattataaatgctactgctgtgaaaattcaaaaca

SEQ ID NO: 288112 - DNA, 1143 bp, Homo sapiens
ccaggcggaagtgcgtaccggaagtgccagcggcagtgtgtaagacgctcacgggcgcgcggactatcgggcggctaggctctctgaggaggctgccacagtgaagcagccgtgacaagtggtgcccgaccagggacctgaacgaggaaggtctgccagagcagagaaagtgaaactgatcagacgaactacgaacccctggacgggagagtctgccggcggagaatataagtctataggatcgggtgaaccaccaaccggcaattgaaagctgcacagcctgaaattacctttattcaattaatgcaaaaacaaaaggggagatgttggaggccgaaggaatgagggtcgtgaccaactcagtataccactggaggctctgtgagcaaacagcaaactgttctcatgaaagcaggatgttggcgaactgacaaactctgtctgccgccagaaggaatgctgggggcagtcatgtcccaggtcccgtgctccttgaggttatccacaggaacatccagaacctgttgaacaaagaaaggaatcatgtgggcctgtgttaaatcaaatagctgaccgacagttatcccttcctccctattcactctacctaataaatatgaagggctgtaaaagctcaggtccctgttccctaatatcaaggagccccctgaccccttctttcaaacagatccttttgtctgtctcatttctgcattcgtcgtccttcgttcggtccagaagcaaccgcgacagtcctgcatgtgttgatgccacctgtatgtgcaggtgtgacctcaggtgtgtgagtatccctcataccccttatcatcactgcctattcgctcttcctccagcctctggcaaccactaatccacgttatatgtctagatttgcctcttctggacacttcatataaatggagtcatacaatatgtggtttcttgtgtctggctttttaccactgaacgttttcagagttcatccatgttgtagcatgtatcagtttttcattcctctttatggctgaataatactgcattgtatggatataccacagtttgtttactcattagttcatagacattggggttgtttccaactctctgatattataaatgctactgctgtgaaaattcaaaaca

SEQ ID NO: 288113 - DNA, 437 bp, Homo sapiens
  misc_feature (283)..(283): n is a, c, g, or t
  misc_feature (293)..(293): n is a, c, g, or t
  misc_feature (302)..(302): n is a, c, g, or t
  misc_feature (431)..(431): n is a, c, g, or t
ccaggcggaagtgcgtaccggaagtgccagcggcagtgtgtaagacgctcacgggcgcgcggactatcgggcggctaggctctctgaggaggctgccacagtgaagcagccgtgacaagtggtgcccgaccagggacctgaacgaggaaggtctgccagagcagagaaagtgaaactgatcagacgaactacgaacccctggacgggagagtctgccggcggagaatataaggagatggacaaaccgtgtgggtgccctccaggtgtgtgtgaccatggaaangcgcagaaangcaggcgcntaaatgcgctattaaaaagctgcgcgcaatgcttaaataaagctaagcagcaaatcgcagcaaagcagcgcaatatcgcaatgcaaaagcaaagcaaaaagcgcgcaagcaaagtcgtcagctaaaaantgcaaa

SEQ ID NO: 288114 - DNA, 593 bp, Homo sapiens
aagacacaagacaaagagataaaaggcagctgggcctgggggaccactaccaccaatgcgcggagaccggtagtggccccgaatgtctggctgcgctcttatttattggatacaaagcaaaaggggcagggtaaagagtgtgagtcatctccaatgataggtaaggtcacgtgggtcatgtgtccactggtcagggggcccttccctgcatgtgttgatgccacctgtatgtgcaggtgtgacctcaggtgtgtgagtatccctcataccccttatcatcactgcctattcgctcttcctccagcctctggcaaccactaatccacgttatatgtctagatttgcctcttctggacacttcatataaatggagtcatacaatatgtggtttcttgtgtctggctttttaccactgaacgttttcagagttcatccatgttgtagcatgtatcagtttttcattcctctttatggctgaataatactgcattgtatggatataccacagtttgtttactcattagttcatagacattggggttgtttccaactctctgatattataaatgctactgctgtgaaaattcaaaaca

SEQ ID NO: 288115 - DNA, 572 bp, Homo sapiens
gtgacttatggagggagtgctcctaggagaaacctggcatagtgaagcaaggatatagtttccaggaagcccagccacaaccagatcttgagggaggtctggaacataaatttcaggtctttcctgcctgaaggtgaaggagcagggcgttagaaccccacctaccaggcagtcattggaaccaaggcttgccgggttggagctgtaactcccacacccttccaggcaaggcactctgagaaaaggatccaccaagatctgggtggggtaccaacagcgtcttgcatagtgccttgcccaccccaaagaaatgtcacttgcctgatgacatatcacagtgattctcatgaaattagatcccttccttagatccatgtgatgcttatggtccgtgcattccatttgcaaatctgtgaagactaataaggctcacactaatcaataccagttaagggtgtggggttgtacagcacagaagtggatgggtttaggctcttgatctacaaatctctgggatgtgaagtgagttgacctttctgtcatcttgataacccattagccccagagcactt

SEQ ID NO: 288116 - DNA, 132 bp, Homo sapiens
ggggatgttctgagcaagaacatccggaccgatgacattacaagcggatacatgactgatggtggacttggcctctatacccgtcgcctgaaccggctccctgatgggatggctgtggtacgggagaccctg

SEQ ID NO: 288117 - DNA, 571 bp, Homo sapiens
  misc_feature (13)..(13): n is a, c, g, or t
  misc_feature (17)..(18): n is a, c, g, or t
  misc_feature (69)..(69): n is a, c, g, or t
  misc_feature (99)..(99): n is a, c, g, or t
  misc_feature (102)..(102): n is a, c, g, or t
gggggggaggggngggnngggcgcaggagggcggagggggagtacaggggggagggatttagaaagaantctacatttctgaaggaacccactcaacanaanaagactcaataagcagataaatgacaaagagcgagtggcagctgcaatggaaaaccccaacttacgggaaattgtggaacagtgtgtccttgaacctgactgatagctgttttaagagccactggcctgtaattgtttgatatatttgtttaaactctttgtataatgtcagagactcatgtttaatacataggtgatttgtacctcagagcattttttaaaggattctttccaagcgagatttaattataaggtagtacctaatttgttcaatgtataacattctcaggatttgtaacacttaaatgatcagacagaataatattttctagttattatgtgtaagatgagttgctatttttctgatgctcattctgatacaactatttttcgtgtcaaatatctactgtgcccaaatgtactcaatttaaatcattactctgtaaaataaataagcagatgattctta

SEQ ID NO: 288118 - DNA, 1713 bp, Homo sapiens
  misc_feature (22)..(22): n is a, c, g, or t
  misc_feature (24)..(24): n is a, c, g, or t
aagcgtggtatcaacgcagagngnccattatggccggggaatgtgctgacgagccgcgaagattgtttttgtcccgccgaaatcgagcaaagcacgctggaacttgtagtccttgaggccccttccctaggtccttcgagctactccgtctggccccgccttttctctgctctcctgaacctttaggcttgtctcggcccatttgaagaccaggaagttgatcaatcccgaggctgctgagagacggtggcgcgattgggacagtcgccagggatggctgagcgtgaagatgcagcgggtgtccgggctgctctcctggacgctgagcagagtcctgtggctctccggcctctctgagccgggagctgcccggcagccccggatcatggaagagaaagcgctagaggtttatgatttgattagaactatccgggacccagaaaagcccaatactttagaagaactggaagtggtctcggaaagttgtgtggaagttcaggagataaatgaagaagaatatctggttattatcaggttcacgccaacagtacctcattgctctttggcgactcttattgggctgtgcttaagagtaaaacttcagcgatgtttaccatttaaacataagttggaaatctacatttctgaaggaacccactcaacagaagaagacatcaataagcagataaatgacaaagagcgagtggcagctgcaatggaaaaccccaacttacgggaaattgtggaacagtgtgtccttgaacctgactgatagctgttttaagagccactggcctgtaattgtttgatatatttgtttaaactctttgtataatgtcagagactcatgtttaatacataggtgatttgtacctcagagcattttttaaaggattctttccaagcgagatttaattataaggtagtacctaatttgttcaatgtataacattctcaggatttgtaacacttaaatgatcagacagaataatattttctagttattatgtgtaagatgagttgctatttttctgatgctcattctgatacaactatttttcgtgtcaaatatctactgtgcccaaatgtactcaatttaaatcattactctgtaaaataaataagcagatgattcttaaaaaaaaaaaaaaaaaaaaaaaaaaaaaaaaaaaaaaaaaaaaaaaaaaaaaaaaaaaaaaaaaaaaaaaaaaaaaaaaaaacctttctcgttccccggccatcttagcggctgctgttggttgggggccgtcccgctcctaaggcaggaagatggtggccgcaaagaagacgaaaaagtcgctggagtcgatcaactctaggctccaactcgttatgaaaagtgggaagtacgtcctggggtacaagcagactctgaagatgatcagacaaggcaaagcgaaattggtcattctcgctaacaactgcccagctttgaggaaatctgaaatagagtactatgctatgttggctaaaactggtgtccatcactacagtggcaataatattgaactgggcacagcatgcggaaaatactacagagtgtgcacactggctatcattgatccaggtgactctgacatcattagaagcatgccagaacagactggtgaaaagtaaaccttttcacctacaaaatttcacctgcaaaccttaaacctgcaaaattttcctttaataaaatttgcttgtttt

SEQ ID NO: 288119 - DNA, 913 bp, Homo sapiens
  misc_feature (22)..(22): n is a, c, g, or t
  misc_feature (24)..(24): n is a, c, g, or t
aagcgtggtatcaacgcagagngnccattatggccggggtcgccagggatggctgagcgtgaagatgcagcgggtgtccgggctgctctcctggacgctgagcagagtcctgtggctctccggcctctctgagccgggagctgcccggcagccccggatcatggaagagaaagcgctagaggtttatgatttgattagaactatccgggacccagaaaagcccaatactttagaagaactggaagtggtctcggaaagttgtgtggaagttcaggagataaatgaagaagaatatctggttattatcaggttcacgccaacagtacctcattgctctttggcgactcttattgggctgtgcttaagagtaaaacttcagcgatgtttaccatttaaacataagttggaaatctacatttctgaaggaacccactcaacagaagaagacatcaataagcagataaatgacaaagagcgagtggcagctgcaatggaaaaccccaacttacgggaaattgtggaacagtgtgtccttgaacctgactgatagctgttttaagagccactggcctgtaattgtttgatatatttgtttaaactctttgtataatgtcagagactcatgtttaatacataggtgatttgtacctcagagcattttttaaaggattctttccaagcgagatttaattataaggtagtacctaatttgttcaatgtataacattctcaggatttgtaacacttaaatgatcagacagaataatattttctagttattatgtgtaagatgagttgctatttttctgatgctcattctgatacaactatttttcgtgtcaaatatctactgtgcccaaatgtactcaatttaaatcattactctgtaaaataaataagcagatgattctta

SEQ ID NO: 288120 - DNA, 1088 bp, Homo sapiens
  misc_feature (22)..(22): n is a, c, g, or t
  misc_feature (24)..(24): n is a, c, g, or t
aagcgtggtatcaacgcagagngnccattatggccggggaatgtgctgacgagccgcgaagattgtttttgtcccgccgaaatcgagcaaagcacgctggaacttgtagtccttgaggccccttccctaggtccttcgagctactccgtctggccccgccttttctctgctctcctgaacctttaggcttgtctcggcccatttgaagaccaggaagttgatcaatcccgaggctgctgagagacggtggcgcgattgggacagtcgccagggatggctgagcgtgaagatgcagcgggtgtccgggctgctctcctggacgctgagcagagtcctgtggctctccggcctctctgagccgggagctgcccggcagccccggatcatggaagagaaagcgctagaggtttatgatttgattagaactatccgggacccagaaaagcccaatactttagaagaactggaagtggtctcggaaagttgtgtggaagttcaggagataaatgaagaagaatatctggttattatcaggttcacgccaacagtacctcattgctctttggcgactcttattgttggaaatctacatttctgaaggaacccactcaacagaagaagacatcaataagcagataaatgacaaagagcgagtggcagctgcaatggaaaaccccaacttacgggaaattgtggaacagtgtgtccttgaacctgactgatagctgttttaagagccactggcctgtaattgtttgatatatttgtttaaactctttgtataatgtcagagactcatgtttaatacataggtgatttgtacctcagagcattttttaaaggattctttccaagcgagatttaattataaggtagtacctaatttgttcaatgtataacattctcaggatttgtaacacttaaatgatcagacagaataatattttctagttattatgtgtaagatgagttgctatttttctgatgctcattctgatacaactatttttcgtgtcaaatatctactgtgcccaaatgtactcaatttaaatcattactctgtaaaataaataagcagatgattctta

SEQ ID NO: 288121 - DNA, 1058 bp, Homo sapiens
  misc_feature (22)..(22): n is a, c, g, or t
  misc_feature (24)..(24): n is a, c, g, or t
aagcgtggtatcaacgcagagngnccattatggccggggaatgtgctgacgagccgcgaagattgtttttgtcccgccgaaatcgagcaaagcacgctggaacttgtagtccttgaggccccttccctaggtccttcgagctactccgtctggccccgccttttctctgctctcctgaacctttaggcttgtctcggcccatttgaagaccaggaagttgatcaatcccgaggctgctgagagacggtggcgcgattgggacagtcgccagggatggctgagcgtgaagatgcagcgggtgtccgggctgctctcctggacgctgagcagagtcctgtggctctccggcctctctgagccgggagctgcccggcagccccggatcatggaagagaaagcgctagaggtttatgatttgattagaactatccgggacccagaaaagcccaatactttagaagaactggaagtggtctcggaaagttgtgtggaagttcaggagataaatgaagaagaatatctggttattatcaggttcacgccaacagtacctcattgctctttggcgactcttattgggctgtgcttaagagtaaaacttcagcgatgtttaccatttaaacataagttggaaatctacatttctgaaggaacccactcaacagaagaagacatcaataagcagataaatgacaaagagcgagtggcagctgcaatggaaaaccccaacttacgggaaattgtggaacagtgtgtccttgaacctgactgatagctgttttaagagccactggcctgtaattgtttgatatatttgtttaaactctttgtataatgtcagagactcatgtttaatacataggtgatttgtacctcagagcattttttaaaggattctttcaggagattatataggtgtactaattgtcagttacatctcgattgtaccttaggtcgacgatatattcacgttaggtgaaggagggcaattcgaggcctcggtaacatttggggaattagggccgtgtcctaaatatcgttgaaaaggggttttaaac

SEQ ID NO: 288122 - DNA, 714 bp, Homo sapiens
  misc_feature (22)..(22): n is a, c, g, or t
  misc_feature (24)..(24): n is a, c, g, or t
  misc_feature (691)..(691): n is a, c, g, or t
  misc_feature (702)..(702): n is a, c, g, or t
aagcgtggtatcaacgcagagngnccattatggccggggaatgtgctgacgagccgcgaagattgtttttgtcccgccgaaatcgagcaaagcacgctggaacttgtagtccttgaggccccttccctaggtccttcgagctactccgtctggccccgccttttctctgctctcctgaacctttaggcttgtctcggcccatttgaagaccaggaagttgatcaatcccgaggctgctgagagacggtggcgcgattgggacagtcgccagggatggctgagcgtgaagatgcagcgggtgtccgggctgctctcctggacgctgagcagagtcctgtggctctccggcctctctgagccgggagctgcccggcagccccggatcatggaagagaaagcgctagaggtttatgatttgattagaactatccgggacccagaaaagcccaatactttagaagaactggaagtggtctcggaaagttgtgtggaagttcaggagataaatgaagaaaatttttggggaattaacaagggttaccgcaaacaaccccccttttgtttttttgggggaattttttattgggctttttgtttttaaaaattctttttttgcgggggggcccccctttttttttcatcacatcccctcttttttggccctggaacccccccccccccggtgtggggntttttttctcnataatccacccg

SEQ ID NO: 288123 - DNA, 629 bp, Homo sapiens
cttaagtctgccttctagatgggaaattacattatgagtaattagccaaaaacaggtttaagttctcaaggagttaaagtttttgtttcagcaggctaataaaaatactgtctggtgctgtatattgacacagttcttctgctaacttttgtctgtgtatttttcagtcaataagcagataaatgacaaagagcgagtggcagctgcaatggaaaaccccaacttacgggaaattgtggaacagtgtgtccttgaacctgactgatagctgttttaagagccactggcctgtaattgtttgatatatttgtttaaactctttgtataatgtcagagactcatgtttaatacataggtgatttgtacctcagagcattttttaaaggattctttccaagcgagatttaattataaggtagtacctaatttgttcaatgtataacattctcaggatttgtaacacttaaatgatcagacagaataatattttctagttattatgtgtaagatgagttgctatttttctgatgctcattctgatacaactatttttcgtgtcaaatatctactgtgcccaaatgtactcaatttaaatcattactctgtaaaataaataagcagatgattct

SEQ ID NO: 288124 - DNA, 1138 bp, Homo sapiens
  misc_feature (22)..(22): n is a, c, g, or t
  misc_feature (24)..(24): n is a, c, g, or t
aagcgtggtatcaacgcagagngnccattatggccggggaatgtgctgacgagccgcgaagattgtttttgtcccgccgaaatcgagcaaagcacgctggaacttgtagtccttgaggccccttccctaggtccttcgagctactccgtctggccccgccttttctctgctctcctgaacctttaggcttgtctcggcccatttgaagaccaggaagttgatcaatcccgaggctgctgagagacggtggcgcgattgggacagtcgccagggatggctgagcgtgaagatgcagcgggtgtccgggctgctctcctggacgctgagcagagtcctgtggctctccggcctctctgagccgggagctgcccggcagccccggatcatggaagagaaagcgctagaggtttatgatttgattagaactatccgggacccagaaaagcccaatactttagaagaactggaagtggtctcggaaagttgtgtggaagttcaggagataaatgaagaagaatatctggttattatcaggttcacgccaacagtacctcattgctctttggcgactcttattgggctgtgcttaagagtaaaacttcagcgatgtttaccatttaaacataagttggaaatctacatttctgaaggaacccactcaacagaagaagacatcaataagcagataaatgacaaagagcgagtggcagctgcaatggaaaaccccaacttacgggaaattgtggaacagtgtgtccttgaacctgactgatagctgttttaagagccactggcctgtaattgtttgatatatttgtttaaactctttgtataatgtcagagactcatgtttaatacataggtgatttgtacctcagagcattttttaaaggattctttccaagcgagatttaattataaggtagtacctaatttgttcaatgtataacattctcaggatttgtaacacttaaatgatcagacagaataatattttctagttattatgtgtaagatgagttgctatttttctgatgctcattctgatacaactatttttcgtgtcaaatatctactgtgcccaaatgtactcaatttaaatcattactctgtaaaataaataagcagatgattctta

SEQ ID NO: 288125 - DNA, 1307 bp, Homo sapiens
  misc_feature (22)..(22): n is a, c, g, or t
  misc_feature (24)..(24): n is a, c, g, or t
aagcgtggtatcaacgcagagngnccattatggccggggaatgtgctgacgagccgcgaagattgtttttgtcccgccgaaatcgagcaaagcacgctggaacttgtagtccttgaggccccttccctaggtccttcgagctactccgtctggccccgccttttctctgctctcctgaacctttaggcttgtctcggcccatttgaagaccaggaagttgatcaatcccgaggctgctgagagacggtggcgcgattgggacagtcgccagggatggctgagcgtgaagatgcagcgggtgtccgggctgctctcctggacgctgagcagagtcctgtggctctccggcctctctgagccgggagctgcccggcagccccggatcatggaagagaaagcgctagaggtttatgatttgattagaactatccgggacccagaaaagcccaatactttagaagaactggaagtggtctcggaaagttgtgtggaagttcaggagataaatgaagaagaatatctggttattatcaggttcacgccaacagtacctcattgctctttggcgactcttattgggctgtgcttaagagtaaaacttcagcgatgtttaccatttaaacataagttggaaatctacatttctgaaggaacccactcaacagaagaagacatcaataagcagataaatgacaaagagcgagtggcagctgcaatggaaaaccccaacttacgggaaattgtggaacagtgtgtccttgaacctgactgatagctgttttaagagccactggcctgtaattgtttgatatatttgtttaaactctttgtataatgtcagagactcatgtttaatacataggtgatttgtacctcagagcattttttaaaggattctttccaagcgagatttaattataaggtagtacctaatttgttcaatgtataacattctcaggatttgtaacacttaaatgatcagacagaataatattttctagttattatgtgtaagatgagttgctatttttctgatgctcattctgatacaactatttttcgtgtcaaatatctactgtgcccaaatgtactcaatttaaatcattactctgcaacctaataggaaaatagaacattttccatgtgcatatattagttcttcttgcatgaatttcctgttcatgtctctattaatctactagattttttttaaaattagtttgaatggatcttcatataataaaggtattggcccattatgttttctgtaattagctaacaacattcttaatagaagagttcacaag

SEQ ID NO: 288126 - DNA, 1060 bp, Homo sapiens
  misc_feature (22)..(22): n is a, c, g, or t
  misc_feature (24)..(24): n is a, c, g, or t
aagcgtggtatcaacgcagagngnccattatggccggggaatgtgctgacgagccgcgaagattgtttttgtcccgccgaaatcgagcaaagcacgctggaacttgtagtccttgaggccccttccctaggtccttcgagctactccgtctggccccgccttttctctgctctcctgaacctttaggcttgtctcggcccatttgaagaccaggaagttgatcaatcccgaggctgctgagagacggtggcgcgattgggacagtcgccagggatggctgagcgtgaagatgcagcggccccggatcatggaagagaaagcgctagaggtttatgatttgattagaactatccgggacccagaaaagcccaatactttagaagaactggaagtggtctcggaaagttgtgtggaagttcaggagataaatgaagaagaatatctggttattatcaggttcacgccaacagtacctcattgctctttggcgactcttattgggctgtgcttaagagtaaaacttcagcgatgtttaccatttaaacataagttggaaatctacatttctgaaggaacccactcaacagaagaagacatcaataagcagataaatgacaaagagcgagtggcagctgcaatggaaaaccccaacttacgggaaattgtggaacagtgtgtccttgaacctgactgatagctgttttaagagccactggcctgtaattgtttgatatatttgtttaaactctttgtataatgtcagagactcatgtttaatacataggtgatttgtacctcagagcattttttaaaggattctttccaagcgagatttaattataaggtagtacctaatttgttcaatgtataacattctcaggatttgtaacacttaaatgatcagacagaataatattttctagttattatgtgtaagatgagttgctatttttctgatgctcattctgatacaactatttttcgtgtcaaatatctactgtgcccaaatgtactcaatttaaatcattactctgtaaaataaataagcagatgattctta

SEQ ID NO: 288127 - DNA, 1168 bp, Homo sapiens
  misc_feature (22)..(22): n is a, c, g, or t
  misc_feature (24)..(24): n is a, c, g, or t
  misc_feature (1091)..(1091): n is a, c, g, or t
  misc_feature (1093)..(1093): n is a, c, g, or t
aagcgtggtatcaacgcagagngnccattatggccggggaatgtgctgacgagccgcgaagattgtttttgtcccgccgaaatcgagcaaagcacgctggaacttgtagtccttgaggccccttccctaggtccttcgagctactccgtctggccccgccttttctctgctctcctgaacctttaggcttgtctcggcccatttgaagaccaggaagttgatcaatcccgaggctgctgagagacggtggcgcgattgggacagtcgccagggatggctgagcgtgaagatgcagcgggtgtccgggctgctctcctggacgctgagcagagtcctgtggctctccggcctctctgagccgggagctgcccggcagccccggatcatggaagagaaagcgctagaggtttatgatttgattagaactatccgggacccagaaaagcccaatactttagaagaactggaagtggtctcggaaagttgtgtggaagttcaggagataaatgaagaagaatatctggttattatcaggttcacgccaacagtacctcattgctctttggcgactcttattgttggaaatctacatttctgaaggaacccactcaacagaagaagacatcaataagcagataaatgacaaagagcgagtggcagctgcaatggaaaaccccaacttacgggaaattgtggaacagtgtgtccttgaacctgactgatagctgttttaagagccactggcctgtaattgtttgatatatttgtttaaactctttgtataatgtcagagactcatgtttaatacataggtgatttgtacctcagagcattttttaaaggattctttccaagcgagatttaattataaggtagtacctaatttgttcaatgtataacattctcaggatttgtaacacttaaatgatcagacagaataatattttctagttattatgtgtaagatgagttgctatttttctgatgctcattctgatacaactatttttcgtgtcaaatatctactgtgcccaaatgtactcaatttaaatcattactctgtaaaataaataagcagatgattcttatananaacaaagatgcagacaaaaacgaaaaaaaaaagagggcggcgccaaaaaaccccagggggccaagatacgtcacc

SEQ ID NO: 288128 - DNA, 593 bp, Homo sapiens
ctcatagctgcttgcttacacactcacaccccagctgcacctggctcccaaacactcctcgcctgcccacgtttcctcacacacactcacacccgaatcatacagaggtgtgctctcaaatgcacacacacatacattcactcagcaaataggtgcagactccccaaaacaaacccagtctctgagccccctccaccaccctcccctctcccgacctcactcccaagggccttgcctcagtggaacactgtgatttggacagggaatgcatcctgacttctgcacaccggtatatcacctttcctgcatccttaattaaacaaatcctgagcatttacaattcaaccagtatgcattcagcacctactgtgagccaggcccagttctaggagctgggagagaagggcggtgacaaaagagaccaaaaatctctcacagagatgataatgtgtcccacatcgccgggcacagtggctcatgcctgtaatccaagcactttgggaggccgaggcgggtggatcacttgaggtcaagagttcgatgccactgcactccagcctagacaacagagcaagactctgtctcaaaaaaaa

SEQ ID NO: 288129 - DNA, 443 bp, Homo sapiens
gggatatcttccaggccggaccctccagagacaggtccacatcaatctggttatccttggttgctctgcccagggtgatctggggaaatggggcaggtacctcacggaagccggctttggccctgcggctgctaccgtcgccgcggagaaattgttggatctggcagtctaggaatgaatctcctctcagcctttaagctcacctggtcagaatccttggatgagcctgtgggaccgttcctcctagcccggtggtttggaaccagtggctttgggactgtaagaggatggacaaagattctcaggggctgctagattcatccctgatggcatcaggcactgccagccgctcagaggatgaggagtcactggcagggcagaagcgagcctcctcccaggccttgggcaccatccctaaacggagaagctcctccaggtagtaa

SEQ ID NO: 288130 - DNA, 827 bp, Homo sapiens
cagaaggtaaaccatctctaagcacaacagcacgggaggcgccttgctgtgggcacggctgggtcactcaccggtcagatgcatggtctccaggagcttggacaccagcgccccgtcttcctccagctccacctgcacgaggcccagcttcctgcgcatcttctgcaggccaccgacgctcctgggaggcagtcagtgccgtctccctgcgtcactggcagaagactgaggctcagaggggcagagtgacctgccttgaccacccacgcatgtctatgccggagcaccaggctgccccagcggctcctcccggccttctgcagccccatcgcccacccacatggaacatggctggggtggactgcagggatggagctggggcaggacacagccctaggagcacctgcctggcgccagcttctgctgacggcagcccaacagcccccagccacgtggcaaagcgggtccccacgcagccctggctgcagctgctccaggggtggcctgagacttctcaaagaagatgctgtgcccggtcccccggaacccctacttggcctgaccccgctgatgctgcaggcccccagcccagccaggtgaggtgccgggttcccccaccgtgtgctgaatgccctgtgacaaggacgatgccatcaagccatgtgggacgtctgtggtgtccgtggggcggggacccagaccccaggtgggcactcagcatctccccagtcaggacccggctggctgccctgggcatcaagacgtatcgacccacgtgggaggtgcccagcccatggtccttccacccaagccagctcccaccccgc

SEQ ID NO: 288131 - DNA, 778 bp, Homo sapiens
gtaaccttgagaataggggccaatcaacaggggggccaggagcccccaaggtgcagggtgcactgagggccccaccggccctgctgaacacaggcctgacaccacctctctccttcaaggccaccgacgctcctgggaggcagtcagtgccgtctccctgcgtcactggcagaagactgaggctcagaggggcagagtgacctgccttgaccacccacgcatgtctatgccggagcaccaggctgccccagcggctcctcccggccttctgcagccccatcgcccacccacatggaacatggctggggtggactgcagggatggagctggggcaggacacagccctaggagcacctgcctggcgccagcttctgctgacggcagcccaacagcccccagccacgtggcaaagcgggtccccacgcagccctggctgcagctgctccaggggtggcctgagacttctcaaagaagatgctgtgcccggtcccccggaacccctacttggcctgaccccgctgatgctgcaggcccccagcccagccaggtgaggtgccgggttcccccaccgtgtgctgaatgccctgtgacaaggacgatgccatcaagccatgtgggacgtctgtggtgtccgtggggcggggacccagaccccaggtgggcactcagcatctccccagtcaggacccggctggctgccctgggcatcaagacgtatcgacccacgtgggaggtgcccagcccatggtccttccacccaagccagctcccaccccgc

SEQ ID NO: 288132 - DNA, 317 bp, Homo sapiens
aagtgcactccccgtcttctctgggtgatgaagacaaagaaactctggaccacccgctgcctcaacaacctcagagattctgactctaaagagcccccctcctgtaagtcctccagcggccacagccggttacgagcacccacaggcggctgtcaccaaaagatctcatcagatggcaaaaccagatgcttccccagatgccgttccgcaagatggagctctctggagtgctggttacttctgcgcccaagccagtgggctgtctctcctggatgccaaattagggaagcactccctgattagtatccacgtgacct

SEQ ID NO: 288133 - DNA, 2920 bp, Homo sapiens
gagactgtgttaggggcgggggtatggaacgtagtggaaagggcagaaatttggatctcagttcgcgcccaccccgcaggcgcctcccgcgagccgggccctctgtgagtgagacaagctccccttcctttacgcgcctcacctggcgcgtggggagaggtcggcagccctccgccgcagaacctccggaagggatgtcctctgccctgcgcctctggccggggctgtggtccctccaggccgtcgaggggatgctgaggccggtccccagaggagcatgacttggctggtccggaggagctctgagggcatgggcaatcttggctcgctgcaacctcagcttccagagttcaagcgagtctcctgcttcagcctcatgagtagctgggactacagatgcgtgccactacgtccgtctgatgtttgtatttttagtagagacagggtttcaccatgttggtcaggctgctctcgaactccagatctcgtgatccgcccgcctgggcctactaaagtgctgggattacaggcgtgagctagatctgactttctagtgtcctagccttggcccgatggacatgtcatttctctcagctcgtttctgtcccctaaagtgagaatattgcctgggaagattacattagacgatgtatatgcgaagacacttgatagctggtattgtcatgattctgattatttcactactgctactttccctgtggcctaggctttgcctatttccagtgggcgagctagctagatcctcctcccttaaataagccagtgtttttaagacagaatactacttgcatagtggacaataatatcttaaagaactgagcaggatgaaaagaatttgatagaaagcaggtttgaggagcacattggaggttggcaggtttcgaggctgcttgagaggacttgggccgatctgggctgggcttggacgtgaccctggcacccaggcaggtggatcccagctggggcttccattcacgactttctggtccctggcaggacagagcgggatgccaccagcttgtccaaagggaagttccaggagctcctggtgggcatcgttgtggagaatgacgctggccgcggcgagatcaacgagttgaagcaggtggaaggggaggcttcgtgcagcagccgcaaaggaaagctgattttcttctatgagtggaacatcaaactgggctggaaaggcatcgttaaagaatctggagtgaagcacaagggattgattgaaatacccaatctttctgaggaaaatgaagtagatgacactgagaatttacaacgggaatgattttaccaacgaaagctatggcaacccaggaattgactgtcaaaagaaaactgagtgggaataccctgcaggttcaggcctcatctccagtggcactgggtgtaaggattcccactgtggctcttcacatgatggaactgtttgacacaactgtagagcagctgtatagcatcttcactgtaaaggaggtaagtaactccctaagctagcatgttaagtgctgacattgggagaaaatacattacaaagaacaggagctggtttttggttttccttgtggctgtgtttttgattgaagggatgtgggatggtggtgacagaagtctgagcatagtttctgaataattggaggggagatgggcattctttgggactatgtccgcattacattgagttttctccctctaggaagagagagtttgtgttttattttctgtaagtaaaagctacatgtttaggatttttaaaccatattaattgttatattttgtatttcataattatattatgtgttagtgtgtactggaataacatgttttatttggttagttggtgcaaaagttttctaaatctactgctgtattagaaactgaaaagggagggaaattccagatgtttgatgggaacatcactggtgaatatctaggattggtaagtagactcaaggttgaagaagtaaggtgggattaactcttaatattactttttgtatatgctgtttttagcaccgaaatcacgagggtctgtgttgcctcaaccttaacagcagccctctgttctggttactattactgtacttaaaacattattatatattcctgctgtccttgatgttactgctgttctgagacattttggcaataaagacaattatcagtggtgctgatgtataaactggaagaaggaccgtatgttgttcattgattcttctaggagtttcaatgaaaggatttttctgtgttgtattgtgggaagtcttaaaagattttcagtggaatttcccctctcttttcagttaacaaataagaagatcatcatgaaatggagatgtgggaactggccagaagaacactatgccatggttgcactgaattttgtgcctactctagggcaaacagaattacaattgaaggagttcctatctatctgtaaagaagagaacatgaaattctgttggcagaagcagcattttgaagaaataaaaggttcactgcagctgacccccctaaatggttgaattaaaatttattataaggcattactttttgtaagcggaaaaagtgtcacatttacctcttccctatcttttgtttaaaaggactgtctttattttatattggatgaaatctatgaacatatatacaatgtaaagcattgtttgactctttattataactagacactgcattgatttaaaagtagcaaacaacctgaaattaagtattaacctgaccttccatcgatattcctctggaaataggtaagtcctgagtgcagatagttgatgtttcccaagctgaagcttgtcctatagcaagcttgcttgcagctgtacttttagttcaagatgacaaaaaataaatggcatgttgacactaaaaaaaaaaa

SEQ ID NO: 288134 - DNA, 2193 bp, Homo sapiens
acttcccccgcgcgcacttgcctaaagaaatccatcctcctcccttaaataagccagtgtttttaagacagaatactacttgcatagtggacaataatatcttaaagaactgagcaggatgaaaagaatttgatagaaagcaggtttgaggagcacattggaggttggcaggtttcgaggctgcttgagaggacttgggccgatctgggctgggcttggacgtgaccctggcacccaggcaggtggatcccagctggggcttccattcacgactttctggtccctggcaggacagagcgggatgccaccagcttgtccaaagggaagttccaggagctcctggtgggcatcgttgtggagaatgacgctggccgcggcgagatcaacgagttgaagcaggtggaaggggaggcttcgtgcagcagccgcaaaggaaagctgattttcttctatgagtggaacatcaaactgggctggaaaggcatcgttaaagaatctggagtgaagcacaagggattgattgaaatacccaatctttctgaggaaaatgaagtagatgacactgagaatttacaacgggaatgattttaccaacgaaagctatggcaacccaggaattgactgtcaaaagaaaactgagtgggaataccctgcaggttcaggcctcatctccagtggcactgggtgtaaggattcccactgtggctcttcacatgatggaactgtttgacacaactgtagagcagctgtatagcatcttcactgtaaaggaggtaagtaactccctaagctagcatgttaagtgctgacattgggagaaaatacattacaaagaacaggagctggtttttggttttccttgtggctgtgtttttgattgaagggatgtgggatggtggtgacagaagtctgagcatagtttctgaataattggaggggagatgggcattctttgggactatgtccgcattacattgagttttctccctctaggaagagagagtttgtgttttattttctgtaagtaaaagctacatgtttaggatttttaaaccatattaattgttatattttgtatttcataattatattatgtgttagtgtgtactggaataacatgttttatttggttagttggtgcaaaagttttctaaatctactgctgtattagaaactgaaaagggagggaaattccagatgtttgatgggaacatcactggtgaatatctaggattggtaagtagactcaaggttgaagaagtaaggtgggattaactcttaatattactttttgtatatgctgtttttagcaccgaaatcacgagggtctgtgttgcctcaaccttaacagcagccctctgttctggttactattactgtacttaaaacattattatatattcctgctgtccttgatgttactgctgttctgagacattttggcaataaagacaattatcagtggtgctgatgtataaactggaagaaggaccgtatgttgttcattgattcttctaggagtttcaatgaaaggatttttctgtgttgtattgtgggaagtcttaaaagattttcagtggaatttcccctctcttttcagttaacaaataagaagatcatcatgaaatggagatgtgggaactggccagaagaacactatgccatggttgcactgaattttgtgcctactctagggcaaacagaattacaattgaaggagttcctatctatctgtaaagaagagaacatgaaattctgttggcagaagcagcattttgaagaaataaaaggttcactgcagctgacccccctaaatggttgaattaaaatttattataaggcattactttttgtaagcggaaaaagtgtcacatttacctcttccctatcttttgtttaaaaggactgtctttattttatattggatgaaatctatgaacatatatacaatgtaaagcattgtttgactctttattataactagacactgcattgatttaaaagtagcaaacaacctgaaattaagtattaacctgaccttccatcgatattcctctggaaataggtaagtcctgagtgcagatagttgatgtttcccaagctgaagcttgtcctatagcaagcttgcttgcagctgtacttttagttcaagatgacaaaaaataaatggcatgttgacactaaaaaaaaaaa

SEQ ID NO: 288135 - DNA, 3039 bp, Homo sapiens
gagactgtgttaggggcgggggtatggaacgtagtggaaagggcagaaatttggatctcagttcgcgcccaccccgcaggcgcctcccgcgagccgggccctctgtgagtgagacaagctccccttcctttacgcgcctcacctggcgcgtggggagaggtcggcagccctccgccgcagaacctccggaagggatgtcctctgccctgcgcctctggccggggctgtggtccctccaggccgtcgaggggatgctgaggccggtccccagaggagcatgacttggctggtccggaggagctctgagggcatgggcaatcttggctcgctgcaacctcagcttccagagttcaagcgagtctcctgcttcagcctcatgagtagctgggactacagatgcgtgccactacgtccgtctgatgtttgtatttttagtagagacagggtttcaccatgttggtcaggctgctctcgaactccagatctcgtgatccgcccgcctgggcctactaaagtgctgggattacaggcgtgagctagatctgactttctagtgtcctagccttggcccgatggacatgtcatttctctcagctcgtttctgtcccctaaagtgagaatattgcctgggaagattacattagacgatgtatatgcgaagacacttgatagctggtattgtcatgattctgattatttcactactgctactttccctgtggcctaggctttgcctatttccagtgggcgagctagctagatcctcctcccttaaataagccagtgtttttaagacagaatactacttgcatagtggacaataatatcttaaagaactgagcaggatgaaaagaatttgatagaaagcaggtttgaggagcacattggaggttggcaggtttcgaggctgcttgagaggacttgggccgatctgggctgggcttggacgtgaccctggcacccaggcaggtggatcccagctggggcttccattcacgactttctggtccctggcaggacagagcgggatgccaccagcttgtccaaagggaagttccaggagctcctggtgggcatcgttgtggagaatgacgctggccgcggcgagatcaacgagttgaagcaggtggaaggggaggcttcgtgcagcagccgcaaaggaaagctgattttcttctatgagtggaacatcaaactgggctggaaaggcatcgttaaagaatctggagtgaagcacaagggattgattgaaatacccaatctttctgaggaaaatgaagtagatgacactgagaatttacaacgggaatgattttaccaacgaaagctatggcaacccaggaattgactgtcaaaagaaaactgagtgggaataccctgcaggttcaggcctcatctccagtggcactgggtgtaaggattcccactgtggctcttcacatgatggaactgtttgacacaactgtagagcagctgtatagcatcttcactgtaaaggaggtaagtaactccctaagctagcatgttaagtgctgacattgggagaaaatacattacaaagaacaggagctggtttttggttttccttgtggctgtgtttttgattgaagggatgtgggatggtggtgacagaagtctgagcatagtttctgaataattggaggggagatgggcattctttgggactatgtccgcattacattgagttttctccctctaggaagagagagtttgtgttttattttctgtaagtaaaagctacatgtttaggatttttaaaccatattaattgttatattttgtatttcataattatattatgtgttagtgtgtactggaataacatgttttatttggttagttggtgcaaaagttttctaaatctactgctgtattagaaactgaaaagggagggaaattccagatgtttgatgggaacatcactggtgaatatctaggattggtaagtagactcaaggttgaagaagtaaggtgggattaactcttaatattactttttgtatatgctgtttttagcaccgaaatcacgagggtctgtgttgcctcaaccttaacagcagccctctgttctggttactattactgtacttaaaacattattatatattcctgctgtccttgatgttactgctgttctgagacattttggcaataaagacaattatcagtggtgctgatgtataaactggaagaaggaccgtatgttgttcattgattcttctaggagtttcaatgaaaggatttttctgtgttgtattgtgggaagtcttaaaagattttcagtggaatttcccctctcttttcagttaacaaataagaagatcatcatgaaatggagatgtgggaactggccagaaggtatgttactaattactgcccttcatattaaaggtcccaaaacactaaggctaggtttttcgtatggataaattttccttttcataatgcggtaataaggttcctattttttttcttagaacactatgccatggttgcactgaattttgtgcctactctagggcaaacagaattacaattgaaggagttcctatctatctgtaaagaagagaacatgaaattctgttggcagaagcagcattttgaagaaataaaaggttcactgcagctgacccccctaaatggttgaattaaaatttattataaggcattactttttgtaagcggaaaaagtgtcacatttacctcttccctatcttttgtttaaaaggactgtctttattttatattggatgaaatctatgaacatatatacaatgtaaagcattgtttgactctttattataactagacactgcattgatttaaaagtagcaaacaacctgaaattaagtattaacctgaccttccatcgatattcctctggaaataggtaagtcctgagtgcagatagttgatgtttcccaagctgaagcttgtcctatagcaagcttgcttgcagctgtacttttagttcaagatgacaaaaaataaatggcatgttgacactaaaaaaaaaaa

SEQ ID NO: 288136 - DNA, 2195 bp, Homo sapiens
gagactgtgttaggggcgggggtatggaacgtagtggaaagggcagaaatttggatctcagttcgcgcccaccccgcaggcgcctcccgcgagccgggccctctgtgagtgagacaagctccccttcctttacgcgcctcacctggcgcgtggggagaggtcggcagccctccgccgcagaacctccggaagggatgtcctctgccctgcgcctctggccggggctgtggtccctccaggccgtcgaggggatgctgaggccggtccccagaggagcatgacttggctggtccggaggagctctgagggcatgggcaatcttggctcgctgcaacctcagcttccagagttcaagcgagtctcctgcttcagcctcatgagtagctgggactacagatgcgtgccactacgtccgtctgatgtttgtatttttagtagagacagggtttcaccatgttggtcaggctgctctcgaactccagatctcgtgatccgcccgcctgggcctactaaagtgctgggattacaggcgtgagctagatctgactttctagtgtcctagccttggcccgatggacatgtcatttctctcagctcgtttctgtcccctaaagtgagaatattgcctgggaagattacattagacgatgtatatgcgaagacacttgatagctggtattgtcatgattctgattatttcactactgctactttccctgtggcctaggctttgcctatttccagtgggcgagctagctagatcctcctcccttaaataagccagtgtttttaagacagaatactacttgcatagtggacaataatatcttaaagaactgagcaggatgaaaagaatttgatagaaagcaggtttgaggagcacattggaggttggcaggtttcgaggctgcttgagaggacttgggccgatctgggctgggcttggacgtgaccctggcacccaggcaggtggatcccagctggggcttccattcacgactttctggtccctggcaggacagagcgggatgccaccagcttgtccaaagggaagttccaggagctcctggtgggcatcgttgtggagaatgacgctggccgcggcgagatcaacgagttgaagcaggtggaaggggaggcttcgtgcagcagccgcaaaggaaagctgattttcttctatgagtggaacatcaaactgggctggaaaggcatcgttaaagaatctggagtgaagcacaagggattgattgaaatacccaatctttctgaggaaaatgaagtagatgacactgagaatttacaacgggaatgattttaccaacgaaagctatggcaacccaggaattgactgtcaaaagaaaactgagtgggaataccctgcaggttcaggcctcatctccagtggcactgggtgtaaggattcccactgtggctcttcacatgatggaactgtttgacacaactgtagagcagctgtatagcatcttcactgtaaaggagttggtgcaaaagttttctaaatctactgctgtattagaaactgaaaagggagggaaattccagatgtttgatgggaacatcactggtgaatatctaggattgttaacaaataagaagatcatcatgaaatggagatgtgggaactggccagaagaacactatgccatggttgcactgaattttgtgcctactctagggcaaacagaattacaattgaaggagttcctatctatctgtaaagaagagaacatgaaattctgttggcagaagcagcattttgaagaaataaaaggttcactgcagctgacccccctaaatggttgaattaaaatttattataaggcattactttttgtaagcggaaaaagtgtcacatttacctcttccctatcttttgtttaaaaggactgtctttattttatattggatgaaatctatgaacatatatacaatgtaaagcattgtttgactctttattataactagacactgcattgatttaaaagtagcaaacaacctgaaattaagtattaacctgaccttccatcgatattcctctggaaataggtaagtcctgagtgcagatagttgatgtttcccaagctgaagcttgtcctatagcaagcttgcttgcagctgtacttttagttcaagatgacaaaaaataaatggcatgttgacactaaaaaaaaaaa

SEQ ID NO: 288137 - DNA, 2120 bp, Homo sapiens
gagactgtgttaggggcgggggtatggaacgtagtggaaagggcagaaatttggatctcagttcgcgcccaccccgcaggcgcctcccgcgagccgggccctctgtgagtgagacaagctccccttcctttacgcgcctcacctggcgcgtggggagaggtcggcagccctccgccgcagaacctccggaagggatgtcctctgccctgcgcctctggccggggctgtggtccctccaggccgtcgaggggatgctgaggccggtccccagaggagcatgacttggctggtccggaggagctctgagggcatgggcaatcttggctcgctgcaacctcagcttccagagttcaagcgagtctcctgcttcagcctcatgagtagctgggactacagatgcgtgccactacgtccgtctgatgtttgtatttttagtagagacagggtttcaccatgttggtcaggctgctctcgaactccagatctcgtgatccgcccgcctgggcctactaaagtgctgggattacaggcgtgagctagatctgactttctagtgtcctagccttggcccgatggacatgtcatttctctcagctcgtttctgtcccctaaagtgagaatattgcctgggaagattacattagacgatgtatatgcgaagacacttgatagctggtattgtcatgattctgattatttcactactgctactttccctgtggcctaggctttgcctatttccagtgggcgagctagctagatcctcctcccttaaataagccagtgtttttaagacagaatactacttgcatagtggacaataatatcttaaagaactgagcaggatgaaaagaatttgatagaaagcaggtttgaggagcacattggaggttggcaggtttcgaggctgcttgagaggacttgggccgatctgggctgggcttggacgtgaccctggcacccaggcaggtggatcccagctggggcttccattcacgactttctggtccctggcaggacagagcgggatgccaccagcttgtccaaagggaagttccaggagctcctggtgggcatcgttgtggagaatgacgctggccgcggcgagatcaacgagttgaagcaggtggaaggggaggcttcgtgcagcagccgcaaaggaaagctgattttcttctatgagtggaacatcaaactgggctggaaaggcatcgttaaagaatctggagtgaagcacaagggattgattgaaatacccaatctttctgaggaaaatgaagtagatgacactgagaatttacaacgggaatgattttaccaacgaaagctatggcaacccaggaattgactgtcaaaagaaaactgagtgggaataccctgcaggttcaggcctcatctccagtggcactgggtgtaaggattcccactgtggctcttcacatgatggaactgtttgacacaactgtagagcagctgtatagcatcttcactgtaaaggaggaagagagagtttgtgttttattttctttaacaaataagaagatcatcatgaaatggagatgtgggaactggccagaagaacactatgccatggttgcactgaattttgtgcctactctagggcaaacagaattacaattgaaggagttcctatctatctgtaaagaagagaacatgaaattctgttggcagaagcagcattttgaagaaataaaaggttcactgcagctgacccccctaaatggttgaattaaaatttattataaggcattactttttgtaagcggaaaaagtgtcacatttacctcttccctatcttttgtttaaaaggactgtctttattttatattggatgaaatctatgaacatatatacaatgtaaagcattgtttgactctttattataactagacactgcattgatttaaaagtagcaaacaacctgaaattaagtattaacctgaccttccatcgatattcctctggaaataggtaagtcctgagtgcagatagttgatgtttcccaagctgaagcttgtcctatagcaagcttgcttgcagctgtacttttagttcaagatgacaaaaaataaatggcatgttgacactaaaaaaaaaaa

SEQ ID NO: 288138 - DNA, 1586 bp, Homo sapiens
gagactgtgttaggggcgggggtatggaacgtagtggaaagggcagaaatttggatctcagttcgcgcccaccccgcaggcgcctcccgcgagccgggccctctgtgagtgagacaagctccccttcctttacgcgcctcacctggcgcgtggggagaggtcggcagccctccgccgcagaacctccggaagggatgtcctctgccctgcgcctctggccggggctgtggtccctccaggccgtcgaggggatgctgaggccggtccccagaggagcatgacttggctggtccggaggagctctgagggcatgggcaatcttggctcgctgcaacctcagcttccagagttcaagcgagtctcctgcttcagcctcatgagtagctgggactacagatgcgtgccactacgtccgtctgatgtttgtatttttagtagagacagggtttcaccatgttggtcaggctgctctcgaactccagatctcgtgatccgcccgcctgggcctactaaagtgctgggattacaggcgtgagctagatctgactttctagtgtcctagccttggcccgatggacatgtcatttctctcagctcgtttctgtcccctaaagtgagaatattgcctgggaagattacattagacgatgtatatgcgaagacacttgatagctggtattgtcatgattctgattatttcactactgctactttccctgtggcctaggctttgcctatttccagtgggcgagctagctagatcctcctcccttaaataagccagtgtttttaagacagaatactacttgcatagtggacaataatatcttaaagaactgagcaggatgaaaagaatttgatagaaagcaggtttgaggagcacattggaggttggcaggtttcgaggctgcttgagaggacttgggccgatctgggctgggcttggacgtgaccctggcacccaggcaggtggatcccagctggggcttccattcacgactttctggtccctggcaggacagagcgggatgccaccagcttgtccaaagggaagttccaggagctcctggtgggcatcgttgtggagaatgacgctggccgcggcgagatcaacgagttgaagcaggtggaaggggaggcttcgtgcagcagccgcaaaggaaagctgattttcttctatgagtggaacatcaaactgggctggaaaggcatcgttaaagaatctggagtgaagcacaagggattgattgaaatacccaatctttctgaggaaaatgaagtagatgacactgaggtatgtgatcaagtttctatttcttttgttcttttttcagtcaagcttctgctacagacattgggcatttcaaatagtgttgatcagactgtgtggttcctgtgtggtagttcgggtgccttgtggagggcctgtttgccgagaaggattgccgtactgtgggggcagcgtgttgtgtggagctggagtggtacaggaaagagagtaagccccaggaagccctgagctcccccgaggaccaggcaaggggcctgggcagctggctgcaccctccttagcctcctcatctgtg

SEQ ID NO: 288139 - DNA, 2093 bp, Homo sapiens
gagactgtgttaggggcgggggtatggaacgtagtggaaagggcagaaatttggatctcagttcgcgcccaccccgcaggcgcctcccgcgagccgggccctctgtgagtgagacaagctccccttcctttacgcgcctcacctggcgcgtggggagaggtcggcagccctccgccgcagaacctccggaagggatgtcctctgccctgcgcctctggccggggctgtggtccctccaggccgtcgaggggatgctgaggccggtccccagaggagcatgacttggctggtccggaggagctctgagggcatgggcaatcttggctcgctgcaacctcagcttccagagttcaagcgagtctcctgcttcagcctcatgagtagctgggactacagatgcgtgccactacgtccgtctgatgtttgtatttttagtagagacagggtttcaccatgttggtcaggctgctctcgaactccagatctcgtgatccgcccgcctgggcctactaaagtgctgggattacaggcgtgagctagatctgactttctagtgtcctagccttggcccgatggacatgtcatttctctcagctcgtttctgtcccctaaagtgagaatattgcctgggaagattacattagacgatgtatatgcgaagacacttgatagctggtattgtcatgattctgattatttcactactgctactttccctgtggcctaggctttgcctatttccagtgggcgagctagctagatcctcctcccttaaataagccagtgtttttaagacagaatactacttgcatagtggacaataatatcttaaagaactgagcaggatgaaaagaatttgatagaaagcaggtttgaggagcacattggaggttggcaggtttcgaggctgcttgagaggacttgggccgatctgggctgggcttggacgtgaccctggcacccaggcaggtggatcccagctggggcttccattcacgactttctggtccctggcaggacagagcgggatgccaccagcttgtccaaagggaagttccaggagctcctggtgggcatcgttgtggagaatgacgctggccgcggcgagatcaacgagttgaagcaggtggaaggggaggcttcgtgcagcagccgcaaaggaaagctgattttcttctatgagtggaacatcaaactgggctggaaaggcatcgttaaagaatctggagtgaagcacaagggattgattgaaatacccaatctttctgaggaaaatgaagtagatgacactgagaatttacaacgggaatgattttaccaacgaaagctatggcaacccaggaattgactgtcaaaagaaaactgagtgggaataccctgcaggttcaggcctcatctccagtggcactgggtgtaaggattcccactgtggctcttcacatgatggaactgtttgacacaactgtagagcagctgtatagcatcttcactgtaaaggagttaacaaataagaagatcatcatgaaatggagatgtgggaactggccagaagaacactatgccatggttgcactgaattttgtgcctactctagggcaaacagaattacaattgaaggagttcctatctatctgtaaagaagagaacatgaaattctgttggcagaagcagcattttgaagaaataaaaggttcactgcagctgacccccctaaatggttgaattaaaatttattataaggcattactttttgtaagcggaaaaagtgtcacatttacctcttccctatcttttgtttaaaaggactgtctttattttatattggatgaaatctatgaacatatatacaatgtaaagcattgtttgactctttattataactagacactgcattgatttaaaagtagcaaacaacctgaaattaagtattaacctgaccttccatcgatattcctctggaaataggtaagtcctgagtgcagatagttgatgtttcccaagctgaagcttgtcctatagcaagcttgcttgcagctgtacttttagttcaagatgacaaaaaataaatggcatgttgacactaaaaaaaaaaa

SEQ ID NO: 288140 - DNA, 2878 bp, Homo sapiens
gagactgtgttaggggcgggggtatggaacgtagtggaaagggcagaaatttggatctcagttcgcgcccaccccgcaggcgcctcccgcgagccgggccctctgtgagtgagacaagctccccttcctttacgcgcctcacctggcgcgtggggagaggtcggcagccctccgccgcagaacctccggaagggatgtcctctgccctgcgcctctggccggggctgtggtccctccaggccgtcgaggggatgctgaggccggtccccagaggagcatgacttggctggtccggaggagctctgagggcatgggcaatcttggctcgctgcaacctcagcttccagagttcaagcgagtctcctgcttcagcctcatgagtagctgggactacagatgcgtgccactacgtccgtctgatgtttgtatttttagtagagacagggtttcaccatgttggtcaggctgctctcgaactccagatctcgtgatccgcccgcctgggcctactaaagtgctgggattacaggcgtgagctagatctgactttctagtgtcctagccttggcccgatggacatgtcatttctctcagctcgtttctgtcccctaaagtgagaatattgcctgggaagattacattagacgatgtatatgcgaagacacttgatagctggtattgtcatgattctgattatttcactactgctactttccctgtggcctaggctttgcctatttccagtgggcgagctagctagatcctcctcccttaaataagccagtgtttttaagacagaatactacttgcatagtggacaataatatcttaaagaactgagcaggatgaaaagaatttgatagaaagcaggtttgaggagcacattggaggttggcaggtttcgaggctgcttgagaggacttgggccgatctgggctgggcttggacgtgaccctggcacccaggcaggtggatcccagctggggcttccattcacgactttctggtccctggcaggacagagcgggatgccaccagcttgtccaaagggaagttccaggagctcctggtgggcatcgttgtggagaatgacgctggccgcggcgagatcaacgagttgaagcaggtggaaggggaggcttcgtgcagcagccgcaaaggaaagctgattttcttctatgagtggaacatcaaactgggctggaaaggcatcgttaaagaatctggagtgaagcacaagggattgattgaaatacccaatctttctgaggaaaatgaagtagatgacactgagaatttacaacgggaatgattttaccaacgaaagctatggcaacccaggaattgactgtcaaaagaaaactgagtgggaataccctgcaggttcaggcctcatctccagtggcactgggtgtaaggattcccactgtggctcttcacatgatggaactgtttgacacaactgtagagcagctgtatagcatcttcactgtaaaggaggtaagtaactccctaagctagcatgttaagtgctgacattgggagaaaatacattacaaagaacaggagctggtttttggttttccttgtggctgtgtttttgattgaagggatgtgggatggtggtgacagaagtctgagcatagtttctgaataattggaggggagatgggcattctttgggactatgtccgcattacattgagttttctccctctaggaagagagagtttgtgttttattttctgtaagtaaaagctacatgtttaggatttttaaaccatattaattgttatattttgtatttcataattatattatgtgttagtgtgtactggaataacatgttttatttggttagttggtgcaaaagttttctaaatctactgctgtattagaaactgaaaagggagggaaattccagatgtttgatgggaacatcactggtgaatatctaggattggtaagtagactcaaggttgaagaagtaaggtgggattaactcttaatattactttttgtatatgctgtttttagcaccgaaatcacgagggtctgtgttgcctcaaccttaacagcagccctctgttctggttactattactgtacttaaaacattattatatattcctgctgtccttgatgttactgctgttctgagacattttggcaataaagacaattatcagtggtgctgatgtataaactggaagaaggaccgtatgttgttcattgattcttctaggagtttcaatgaaaggatttttctgtgttgtattgtgggaagtcttaaaagattttcagtggaatttcccctctcttttcagttaacaaataagaagatcatcatgaaatggagatgtgggaactggccagaagggcaaacagaattacaattgaaggagttcctatctatctgtaaagaagagaacatgaaattctgttggcagaagcagcattttgaagaaataaaaggttcactgcagctgacccccctaaatggttgaattaaaatttattataaggcattactttttgtaagcggaaaaagtgtcacatttacctcttccctatcttttgtttaaaaggactgtctttattttatattggatgaaatctatgaacatatatacaatgtaaagcattgtttgactctttattataactagacactgcattgatttaaaagtagcaaacaacctgaaattaagtattaacctgaccttccatcgatattcctctggaaataggtaagtcctgagtgcagatagttgatgtttcccaagctgaagcttgtcctatagcaagcttgcttgcagctgtacttttagttcaagatgacaaaaaataaatggcatgttgacactaaaaaaaaaaa

SEQ ID NO: 288141 - DNA, 2212 bp, Homo sapiens
gagactgtgttaggggcgggggtatggaacgtagtggaaagggcagaaatttggatctcagttcgcgcccaccccgcaggcgcctcccgcgagccgggccctctgtgagtgagacaagctccccttcctttacgcgcctcacctggcgcgtggggagaggtcggcagccctccgccgcagaacctccggaagggatgtcctctgccctgcgcctctggccggggctgtggtccctccaggccgtcgaggggatgctgaggccggtccccagaggagcatgacttggctggtccggaggagctctgagggcatgggcaatcttggctcgctgcaacctcagcttccagagttcaagcgagtctcctgcttcagcctcatgagtagctgggactacagatgcgtgccactacgtccgtctgatgtttgtatttttagtagagacagggtttcaccatgttggtcaggctgctctcgaactccagatctcgtgatccgcccgcctgggcctactaaagtgctgggattacaggcgtgagctagatctgactttctagtgtcctagccttggcccgatggacatgtcatttctctcagctcgtttctgtcccctaaagtgagaatattgcctgggaagattacattagacgatgtatatgcgaagacacttgatagctggtattgtcatgattctgattatttcactactgctactttccctgtggcctaggctttgcctatttccagtgggcgagctagctagatcctcctcccttaaataagccagtgtttttaagacagaatactacttgcatagtggacaataatatcttaaagaactgagcaggatgaaaagaatttgatagaaagcaggtttgaggagcacattggaggttggcaggtttcgaggctgcttgagaggacttgggccgatctgggctgggcttggacgtgaccctggcacccaggcaggtggatcccagctggggcttccattcacgactttctggtccctggcaggacagagcgggatgccaccagcttgtccaaagggaagttccaggagctcctggtgggcatcgttgtggagaatgacgctggccgcggcgagatcaacgagttgaagcaggtggaaggggaggcttcgtgcagcagccgcaaaggaaagctgattttcttctatgagtggaacatcaaactgggctggaaaggcatcgttaaagaatctggagtgaagcacaagggattgattgaaatacccaatctttctgaggaaaatgaagtagatgacactgagaatttacaacgggaatgattttaccaacgaaagctatggcaacccaggaattgactgtcaaaagaaaactgagtgggaataccctgcaggttcaggcctcatctccagtggcactgggtgtaaggattcccactgtggctcttcacatgatggaactgtttgacacaactgtagagcagctgtatagcatcttcactgtaaaggagttaacaaataagaagatcatcatgaaatggagatgtgggaactggccagaaggtatgttactaattactgcccttcatattaaaggtcccaaaacactaaggctaggtttttcgtatggataaattttccttttcataatgcggtaataaggttcctattttttttcttagaacactatgccatggttgcactgaattttgtgcctactctagggcaaacagaattacaattgaaggagttcctatctatctgtaaagaagagaacatgaaattctgttggcagaagcagcattttgaagaaataaaaggttcactgcagctgacccccctaaatggttgaattaaaatttattataaggcattactttttgtaagcggaaaaagtgtcacatttacctcttccctatcttttgtttaaaaggactgtctttattttatattggatgaaatctatgaacatatatacaatgtaaagcattgtttgactctttattataactagacactgcattgatttaaaagtagcaaacaacctgaaattaagtattaacctgaccttccatcgatattcctctggaaataggtaagtcctgagtgcagatagttgatgtttcccaagctgaagcttgtcctatagcaagcttgcttgcagctgtacttttagttcaagatgacaaaaaataaatggcatgttgacactaaaaaaaaaaa

SEQ ID NO: 288142 - DNA, 3231 bp, Homo sapiens
acagagcgctcccttggaggcacccagggacctggccagccgtgcagctgcccaggcgctatggcgagtgcggtcagggggtcgaggccgtggccccggctggggctccagctccagttcgcggcgctgctgctcgggacgctgagtccacaggttcacactctcaggccagagaacctcctgctggtgtccaccttggatggaagtctccacgcactaagcaagcagacaggggacctgaagtggactctgagggatgatcccgtcatcgaaggaccaatgtacgtcacagaaatggcctttctctctgacccagcggatggcagcctgtacatcttggggacccaaaaacaactgggattaatgaaactgccattcaccatccctgagctggttcatgcttctccctgccgcagctctgatggggtcttctacacaggccggaagcaggatgcctggtttgtggtggaccctgagtcaggggagacccagatgacactgaccacagcgggtccctccaccccccgcctctacatcggccgaacacagtatacggtcaccatgcatgacccaagagccccagccctgcgctggaacaccacctaccgccgctactcagcgccccccatggatggctcacctgggaaatacatgagccacctggcgtcctgtgggatgggcctgctgctcactgtggacccagaaagtggggcagtgctgtggacacaagacctgggcatgcctgtgatgggcgtttacacctggcaccaggacggcctgcgccagctgccgcatctcaccctggctcgagacactctgcatttcctcgccctccgctggggccacatccgactgcctgcctcaggcccccaggacacagccaccctcttctctgccttggatacccagctgctgatgacactgtatgtagggaaggatgaaactggcttctatgtctctaaagcactggtccacacaggagtggccctggtgcctcgtggactgaccctggcccccgcagatggccccaccacagatgaggtgacactccaagtctcaggagagcgagagggctcacccagcactgctgttagatacccctcaggcagtgtggccctcccaagccagtggctgctcattggacaccacgagctacccccagtcctgcacaccaccatgctgagggtccatcccaccctggggagtggaactgcagagacaagacctccagagaatacccaggccccagccttcttcttggagctattgagcctgagccgagagaaactttgggactccgagctgcatccagaagaaaaaactccagactcttacttggggctgggaccccaagacctgctggcagctagcctcactgctgtcctcctgggagggtggattctctttgtgatgaggcagcaacagccgcaggtggtggagaagcagcaggagacccccctggcacctgcagactttgctcacatctcccaggatgcccagtccctgcactcgggggccacccggaggagccagaagaggcttcagagtccctcaaagcaagcccagccactcgacgaccctgaagctgagcaactcaccgtagtggggaagatttccttcaatcccaaggacgtgctgggccacggggcaggcgggactttcgttttccggggacagtttgagggacgggcagtggctgtcaagcggctcctccgcgagtgctttggcctggttcggcgggaagttcaactgctgcaggagtctgacaggcaccccaacgtgctccgctacttctgcaccgagcggggaccccagttccactacattgccctggagctctgccgggcctccttgcaggagtacgtagaaaacccggacctggatcgcgggggcctggagcccgaggtcgtgctgcagcagctgatgtctggcctggcccacctgcactctttacacatagtgcaccgggacctgaagccaggaaatattctcatcaccgggcctgacagccagggcctgggcagagtggtgctctcagacttcggcctctgcaagaagctgcctgctggccgctgtagcttcagcctccactccggcatccccggcacggaaggctggatggcgcccgagcttctgcagctcctgccaccagacagtcctaccagcgctgtggacatcttctctgcaggctgcgtgttctactacgtgctttctggtggcagccacccctttggagacagtctttatcgccaggcaaacatcctcacaggggttccctgtctggctcacctggaggaagaggtccacgacaaggtggttgcccgggacctggttggagccatgttgagcccactgccgcagccacgcccctctgccccccaggtgctggcccaccccttcttttggagcagagccaagcaactccagttcttccaggacgtcagtgactggctggagaaggagtccgagcaggagcccctggtgagggcactggaggcgggaggctgcgcagtggtccgggacaactggcacgagcacatctccatgccgctgcagacagatctgagaaagttccggtcctataaggggacatcagtgcgagacctgctccgtgctgtgaggaacaagaagcaccactacagggagctcccagttgaggtgcgacaggcactcggccaagtccctgatggcttcgtccagtacttcacaaaccgcttcccacggctgctcctccacacgcaccgagccatgaggagctgcgcctctgagagcctcttcctgccctactacccaccagactcagaggccagggggccgtgccctggggctgcagggaggtgaagtgggccggaggccacacaaatggtctccatgctggctcactgaagagctgagcctgtggctggcctcagaatcaggctgggtgcagtggctcacacctgtaatcccagcattttgggaggctgaggtgggagaatcacttgagcccaggagttcgaggctgcagtgagccaggatcatgccactgcactccagcctggtccacagagagacactgtcaccccctttcccccacaagactggcagaggctgggcagcctggggctgatgaagcagagatgttcgctggatcccaggccctggcacccctcaggaaatacaagaaaaagaatattcacatctgtttaatgtgcataaagccaaggaaaggacagttccgaattcaataga

SEQ ID NO: 288143 - DNA, 3156 bp, Homo sapiens
tgacactgggtgtgggaatttctgcatttcctcaagaggctgtgtagcaaaatgattcagtgtgctggctctggagcctgactgcctgggttcaaggccaggctctgccatttagtagctgtgtgacattagccaagttacatggcctctccaagccccagtttccttacctgaaaagtggaaatgatagtaatacctgttaattggttgctatggaaatgggctcacctggcacagtgagcactgtgtgttgctgctcttactccttcctgtaaattttccgtctcctagaaactgccattcaccatccctgagctggttcatgcttctccctgccgcagctctgatggggtcttctacacaggccggaagcaggatgcctggtttgtggtggaccctgagtcaggggagacccagatgacactgaccacagcgggtccctccaccccccgcctctacatcggccgaacacagtatacggtcaccatgcatgacccaagagccccagccctgcgctggaacaccacctaccgccgctactcagcgccccccatggatggctcacctgggaaatacatgagccacctggcgtcctgtgggatgggcctgctgctcactgtggacccagaaagtggggcagtgctgtggacacaagacctgggcatgcctgtgatgggcgtttacacctggcaccaggacggcctgcgccagctgccgcatctcaccctggctcgagacactctgcatttcctcgccctccgctggggccacatccgactgcctgcctcaggcccccaggacacagccaccctcttctctgccttggatacccagctgctgatgacactgtatgtagggaaggatgaaactggcttctatgtctctaaagcactggtccacacaggagtggccctggtgcctcgtggactgaccctggcccccgcagatggccccaccacagatgaggtgacactccaagtctcaggagagcgagagggctcacccagcactgctgttagatacccctcaggcagtgtggccctcccaagccagtggctgctcattggacaccacgagctacccccagtcctgcacaccaccatgctgagggtccatcccaccctggggagtggaactgcagagacaagacctccagagaatacccaggccccagccttcttcttggagctattgagcctgagccgagagaaactttgggactccgagctgcatccagaagaaaaaactccagactcttacttggggctgggaccccaagacctgctggcagctagcctcactgctgtcctcctgggagggtggattctctttgtgatgaggcagcaacagccgcaggtggtggagaagcagcaggagacccccctggcacctgcagactttgctcacatctcccaggatgcccagtccctgcactcgggggccacccggaggagccagaagaggcttcagagtccctcaaagcaagcccagccactcgacgaccctgaagctgagcaactcaccgtagtggggaagatttccttcaatcccaaggacgtgctgggccacggggcaggcgggactttcgttttccggggacagtttgagggacgggcagtggctgtcaagcggctcctccgcgagtgctttggcctggttcggcgggaagttcaactgctgcaggagtctgacaggcaccccaacgtgctccgctacttctgcaccgagcggggaccccagttccactacattgccctggagctctgccgggcctccttgcaggagtacgtagaaaacccggacctggatcgcgggggcctggagcccgaggtcgtgctgcagcagctgatgtctggcctggcccacctgcactctttacacatagtgcaccgggacctgaagccaggaaatattctcatcaccgggcctgacagccagggcctgggcagagtggtgctctcagacttcggcctctgcaagaagctgcctgctggccgctgtagcttcagcctccactccggcatccccggcacggaaggctggatggcgcccgagcttctgcagctcctgccaccagacagtcctaccagcgctgtggacatcttctctgcaggctgcgtgttctactacgtgctttctggtggcagccacccctttggagacagtctttatcgccaggcaaacatcctcacaggggttccctgtctggctcacctggaggaagaggtccacgacaaggtggttgcccgggacctggttggagccatgttgagcccactgccgcagccacgcccctctgccccccaggtgctggcccaccccttcttttggagcagagccaagcaactccagttcttccaggacgtcagtgactggctggagaaggagtccgagcaggagcccctggtgagggcactggaggcgggaggctgcgcagtggtccgggacaactggcacgagcacatctccatgccgctgcagacagatctgagaaagttccggtcctataaggggacatcagtgcgagacctgctccgtgctgtgaggaacaagaagcaccactacagggagctcccagttgaggtgcgacaggcactcggccaagtccctgatggcttcgtccagtacttcacaaaccgcttcccacggctgctcctccacacgcaccgagccatgaggagctgcgcctctgagagcctcttcctgccctactacccaccagactcagaggccagggggccgtgccctggggctgcagggaggtgaagtgggccggaggccacacaaatggtctccatgctggctcactgaagagctgagcctgtggctggcctcagaatcaggctgggtgcagtggctcacacctgtaatcccagcattttgggaggctgaggtgggagaatcacttgagcccaggagttcgaggctgcagtgagccaggatcatgccactgcactccagcctggtccacagagagacactgtcaccccctttcccccacaagactggcagaggctgggcagcctggggctgatgaagcagagatgttcgctggatcccaggccctggcacccctcaggaaatacaagaaaaagaatattcacatctgtttaatgtgcataaagccaaggaaaggacagttccgaattcaataga

SEQ ID NO: 288144 - DNA, 2773 bp, Homo sapiens
gagatggctgggcctgtttgagggactctgaagcctcttctggctcctccggctgcccccgagtgcaggactgggcatcctgcctcatcacaaagagaatccacccacccaggaggacagcagtgaggctagctggaacaccacctaccgccgctactcagcgccccccatggatggctcacctgggaaatacatgagccacctggcgtcctgtgggatgggcctgctgctcactgtggacccagaaagtggggcagtgctgtggacacaagacctgggcatgcctgtgatgggcgtttacacctggcaccaggacggcctgcgccagctgccgcatctcaccctggctcgagacactctgcatttcctcgccctccgctggggccacatccgactgcctgcctcaggcccccaggacacagccaccctcttctctgccttggatacccagctgctgatgacactgtatgtagggaaggatgaaactggcttctatgtctctaaagcactggtccacacaggagtggccctggtgcctcgtggactgaccctggcccccgcagatggccccaccacagatgaggtgacactccaagtctcaggagagcgagagggctcacccagcactgctgttagatacccctcaggcagtgtggccctcccaagccagtggctgctcattggacaccacgagctacccccagtcctgcacaccaccatgctgagggtccatcccaccctggggagtggaactgcagagacaagacctccagagaatacccaggccccagccttcttcttggagctattgagcctgagccgagagaaactttgggactccgagctgcatccagaagaaaaaactccagactcttacttggggctgggaccccaagacctgctggcagctagcctcactgctgtcctcctgggagggtggattctctttgtgatgaggcagcaacagccgcaggtggtggagaagcagcaggagacccccctggcacctgcagactttgctcacatctcccaggatgcccagtccctgcactcgggggccacccggaggagccagaagaggcttcagagtccctcaaagcaagcccagccactcgacgaccctgaagctgagcaactcaccgtagtggggaagatttccttcaatcccaaggacgtgctgggccacggggcaggcgggactttcgttttccggggacagtttgagggacgggcagtggctgtcaagcggctcctccgcgagtgctttggcctggttcggcgggaagttcaactgctgcaggagtctgacaggcaccccaacgtgctccgctacttctgcaccgagcggggaccccagttccactacattgccctggagctctgccgggcctccttgcaggagtacgtagaaaacccggacctggatcgcgggggcctggagcccgaggtcgtgctgcagcagctgatgtctggcctggcccacctgcactctttacacatagtgcaccgggacctgaagccaggaaatattctcatcaccgggcctgacagccagggcctgggcagagtggtgctctcagacttcggcctctgcaagaagctgcctgctggccgctgtagcttcagcctccactccggcatccccggcacggaaggctggatggcgcccgagcttctgcagctcctgccaccagacagtcctaccagcgctgtggacatcttctctgcaggctgcgtgttctactacgtgctttctggtggcagccacccctttggagacagtctttatcgccaggcaaacatcctcacaggggttccctgtctggctcacctggaggaagaggtccacgacaaggtggttgcccgggacctggttggagccatgttgagcccactgccgcagccacgcccctctgccccccaggtgctggcccaccccttcttttggagcagagccaagcaactccagttcttccaggacgtcagtgactggctggagaaggagtccgagcaggagcccctggtgagggcactggaggcgggaggctgcgcagtggtccgggacaactggcacgagcacatctccatgccgctgcagacagatctgagaaagttccggtcctataaggggacatcagtgcgagacctgctccgtgctgtgaggaacaagaagcaccactacagggagctcccagttgaggtgcgacaggcactcggccaagtccctgatggcttcgtccagtacttcacaaaccgcttcccacggctgctcctccacacgcaccgagccatgaggagctgcgcctctgagagcctcttcctgccctactacccaccagactcagaggccagggggccgtgccctggggctgcagggaggtgaagtgggccggaggccacacaaatggtctccatgctggctcactgaagagctgagcctgtggctggcctcagaatcaggctgggtgcagtggctcacacctgtaatcccagcattttgggaggctgaggtgggagaatcacttgagcccaggagttcgaggctgcagtgagccaggatcatgccactgcactccagcctggtccacagagagacactgtcaccccctttcccccacaagactggcagaggctgggcagcctggggctgatgaagcagagatgttcgctggatcccaggccctggcacccctcaggaaatacaagaaaaagaatattcacatctgtttaatgtgcataaagccaaggaaaggacagttccgaattcaataga

SEQ ID NO: 288145 - DNA, 3056 bp, Homo sapiens
tgacactgggtgtgggaatttctgcatttcctcaagaggctgtgtagcaaaatgattcagtgtgctggctctggagcctgactgcctgggttcaaggccaggctctgccatttagtagctgtgtgacattagccaagttacatggcctctccaagccccagtttccttacctgaaaagtggaaatgatagtaatacctgttaattggttgctatggaaatgggctcacctggcacagtgagcactgtgtgttgctgctcttactccttcctgtaaattttccgtctcctagaaactgccattcaccatccctgagctggttcatgcttctccctgccgcagctctgatggggtcttctacacaggccggaagcaggatgcctggtttgtggtggaccctgagtcaggggagacccagatgacactgaccacagcgggtccctccaccccccgcctctacatcggccgaacacagtatacggtcaccatgcatgacccaagagccccagccctgcgctggaacaccacctaccgccgctactcagcgccccccatggatggctcacctgggaaatacatgagccacctggcgtcctgtgggatgggcctgctgctcactgtggacccagaaagtggggcagtgctgtggacacaagacctgggcatgcctgtgatgggcgtttacacctggcaccaggacggcctgcgccagctgccgcatctcaccctggctcgagacactctgcatttcctcgccctccgctggggccacatccgactgcctgcctcaggcccccaggacacagccaccctcttctctgccttggatacccagctgctgatgacactgtatgtagggaaggatgaaactggcttctatgtctctaaagcactggtccacacaggagtggccctggtgcctcgtggactgaccctggcccccgcagatggccccaccacagatgaggtgacactccaagtctcaggagagcgagagggctcacccagcactgctgttagatacccctcaggcagtgtggccctcccaagccagtggctgctcattggacaccacgagctacccccagtcctgcacaccaccatgctgagggtccatcccaccctggggagtggaactgcagagacaagacctccagagaatacccaggccccagccttcttcttggagctattgagcctgagccgagagaaactttgggactccgagctgcatccagaagaaaaaactccagactcttacttggggctgggaccccaagacctgctggcagctagcctcactgctgtcctcctgggagggtggattctctttgtgatgaggcagcaacagccgcaggtggtggagaagcagcaggagacccccctggcacctgcagactttgctcacatctcccaggatgcccagtccctgcactcgggggccacccggaggagccagaagaggcttcagagtccctcaaagcaagcccagccactcgacgaccctgaagctgagcaactcaccgtagtggggaagatttccttcaatcccaaggacgtgctgggccacggggcaggcgggactttcgttttccggggacagtttgagggacgggcagtggctgtcaagcggctcctccgcgagtgctttggcctggttcggcgggaagttcaactgctgcaggagtctgacaggcaccccaacgtgctccgctacttctgcaccgagcggggaccccagttccactacattgccctggagctctgccgggcctccttgcaggagtgcaccgggacctgaagccaggaaatattctcatcaccgggcctgacagccagggcctgggcagagtggtgctctcagacttcggcctctgcaagaagctgcctgctggccgctgtagcttcagcctccactccggcatccccggcacggaaggctggatggcgcccgagcttctgcagctcctgccaccagacagtcctaccagcgctgtggacatcttctctgcaggctgcgtgttctactacgtgctttctggtggcagccacccctttggagacagtctttatcgccaggcaaacatcctcacaggggttccctgtctggctcacctggaggaagaggtccacgacaaggtggttgcccgggacctggttggagccatgttgagcccactgccgcagccacgcccctctgccccccaggtgctggcccaccccttcttttggagcagagccaagcaactccagttcttccaggacgtcagtgactggctggagaaggagtccgagcaggagcccctggtgagggcactggaggcgggaggctgcgcagtggtccgggacaactggcacgagcacatctccatgccgctgcagacagatctgagaaagttccggtcctataaggggacatcagtgcgagacctgctccgtgctgtgaggaacaagaagcaccactacagggagctcccagttgaggtgcgacaggcactcggccaagtccctgatggcttcgtccagtacttcacaaaccgcttcccacggctgctcctccacacgcaccgagccatgaggagctgcgcctctgagagcctcttcctgccctactacccaccagactcagaggccagggggccgtgccctggggctgcagggaggtgaagtgggccggaggccacacaaatggtctccatgctggctcactgaagagctgagcctgtggctggcctcagaatcaggctgggtgcagtggctcacacctgtaatcccagcattttgggaggctgaggtgggagaatcacttgagcccaggagttcgaggctgcagtgagccaggatcatgccactgcactccagcctggtccacagagagacactgtcaccccctttcccccacaagactggcagaggctgggcagcctggggctgatgaagcagagatgttcgctggatcccaggccctggcacccctcaggaaatacaagaaaaagaatattcacatctgtttaatgtgcataaagccaaggaaaggacagttccgaattcaataga

SEQ ID NO: 288146 - DNA, 1526 bp, Homo sapiens
tgacactgggtgtgggaatttctgcatttcctcaagaggctgtgtagcaaaatgattcagtgtgctggctctggagcctgactgcctgggttcaaggccaggctctgccatttagtagctgtgtgacattagccaagttacatggcctctccaagccccagtttccttacctgaaaagtggaaatgatagtaatacctgttaattggttgctatggaaatgggctcacctggcacagtgagcactgtgtgttgctgctcttactccttcctgtaaattttccgtctcctagaaactgccattcaccatccctgagctggttcatgcttctccctgccgcagctctgatggggtcttctacacaggccggaagcaggatgcctggtttgtggtggaccctgagtcaggggagacccagatgacactgaccacagcgggtccctccaccccccgcctctacatcggccgaacacagtatacggtcaccatgcatgacccaagagccccagccctgcgctggaacaccacctaccgccgctactcagcgccccccatggatggctcacctgggaaatacatgagccacctggcgtcctgtgggatgggcctgctgctcactgtggacccagaaagtggggcagtgctgtggacacaagacctgggcatgcctgtgatgggcgtttacacctggcaccaggacggcctgcgccagctgccgcatctcaccctggctcgagacactctgcatttcctcgccctccgctggggccacatccgactgcctgcctcaggcccccaggacacagccaccctcttctctgccttggatacccagctgctgatgacactgtatgtagggaaggatgaaactggcttctatgtctctaaagcactggtccacacaggagtggccctggtgcctcgtggactgaccctggcccccgcagatggccccaccacagatgaggtgacactccaagtctcaggagagcgagagggctcacccagcactgctgttagatacccctcaggcagtgtggccctcccaagccagtggctgctcattggacaccacgagctacccccagtcctgcacaccaccatgctgagggtccatcccaccctggggagtggaactgcagagacaagacctccagagaatacccaggccccagccttcttcttggagctattgagcctgagccgagagaaactttgggactccgagctgcatccagaagaaaaaactccagactcttacttggggctgggaccccaagacctgctggcagctagcctcactgctgtcctcctgggagggtggattctctttgtgatgaggcagcaacagccgcaggtggtggagaagcagcaggagacccccctggcacctgcctggggctgatgaagcagagatgttcgctggatcccaggccctggcacccctcaggaaatacaagaaaaagaatattcacatctgtttaatgtgcataaagccaaggaaaggacagttccgaattcaataga

SEQ ID NO: 288147 - DNA, 1477 bp, Homo sapiens
tgacactgggtgtgggaatttctgcatttcctcaagaggctgtgtagcaaaatgattcagtgtgctggctctggagcctgactgcctgggttcaaggccaggctctgccatttagtagctgtgtgacattagccaagttacatggcctctccaagccccagtttccttacctgaaaagtggaaatgatagtaatacctgttaattggttgctatggaaatgggctcacctggcacagtgagcactgtgtgttgctgctcttactccttcctgtaaattttccgtctcctagaaactgccattcaccatccctgagctggttcatgcttctccctgccgcagctctgatggggtcttctacacaggccggaagcaggatgcctggtttgtggtggaccctgagtcaggggagacccagatgacactgaccacagcgggtccctccaccccccgcctctacatcggccgaacacagtatacggtcaccatgcatgacccaagagccccagccctgcgctggaacaccacctaccgccgctactcagcgccccccatggatggctcacctgggaaatacatgagccacctggcgtcctgtgggatgggcctgctgctcactgtggacccagaaagtggggcagtgctgtggacacaagacctgggcatgcctgtgatgggcgtttacacctggcaccaggacggcctgcgccagctgccgcatctcaccctggctcgagacactctgcatttcctcgccctccgctggggccacatccgactgcctgcctcaggcccccaggacacagccaccctcttctctgccttggatacccagctgctgatgacactgtatgtagggaaggatgaaactggcttctatgtctctaaagcactggtccacacaggagtggccctggtgcctcgtggactgaccctggcccccgcagatggccccaccacagatgaggtgacactccaagtctcaggagagcgagagggctcacccagcactgctgttagatacccctcaggcagtgtggccctcccaagccagtggctgctcattggacaccacgagctacccccagtcctgcacaccaccatgctgagggtccatcccaccctggggagtggaactgcagagacaagacctccagagaatacccaggccccagccttcttcttggagctattgagcctgagccgagagaaactttgggactccgagctgcatccagaagaaaaaactccagactcttacttggggctgggaccccaagacctgctggcagctagcctcactgctgtcctcctgggagggtggattctctttgtgatgaggcagcaacagccgcaggtggtggagaagcagcaggagacccccctggcacctgccctcaggaaatacaagaaaaagaatattcacatctgtttaatgtgcataaagccaaggaaaggacagttccgaattcaataga

SEQ ID NO: 288148 - DNA, 689 bp, Homo sapiens
tgacactgggtgtgggaatttctgcatttcctcaagaggctgtgtagcaaaatgattcagtgtgctggctctggagcctgactgcctgggttcaaggccaggctctgccatttagtagctgtgtgacattagccaagttacatggcctctccaagccccagtttccttacctgaaaagtggaaatgatagtaatacctgttaattggttgctatggaaatgggctcacctggcacagtgagcactgtgtgttgctgctcttactccttcctgtaaattttccgtctcctagaaactgccattcaccatccctgagctggttcatgcttctccctgccgcagctctgatggggtcttctacacaggccggaagcaggatgcctggtttgtggtggaccctgagtcaggggagacccagatgacactgaccacagcgggtccctccaccccccgcctctacatcggccgaacacagtatacggtcaccatgcatgacccaagagccccagccctgcgctggaacaccacctaccgccgctactcagcgccccccatggatggctcacctgggaaatgtgagttccacctttctctggtcccatcttggagcaaggtccccaacccagggaaccctgaacagcatccatgaccaattcccagccacatttcgacccacttgacctccccagg

SEQ ID NO: 288149 - DNA, 492 bp, Homo sapiens
ctgcgatcttgctctgtaagttcatgcagtctggtgaggccatctcagtcacagatactgggcccatcacggggcagggcgtggccaggacaaagctctcttaggctctcatgttacagcaacagccgcaggtggtggagaagcagcaggagacccccctggcacctgcagactttgctcacatctcccaggatgcccagtccctgcactcgggggccacccggaggagccagaagaggcttcagagtccctcaaagcaagcccagccactcgacgaccctgaaggtgagcctgtgtgaacaagacagggcagtcaggaacagagaaaagccaggggcagatttagctgcaaagctggtttattaaaagccactatagtggggtggttaggtctacatgaattaagaagagtgtattgagtagagcctgctacgtaattgagcactctaggagtgtctgctgtcattttttcatcattatatttttggagac

SEQ ID NO: 288150 - DNA, 395 bp, Homo sapiens
cgacacccatatgagccccacccggcttcaatccctgccttggcccagtgcctggagggtcctccttccctagctaagcgctgccctcacacaccacctcctccagaatggcaacagccctgtttgtgtgctgttactgcctaccaggcactgtgtaagagcatcagcctctttcatccccatggcaaccctctgagagagccacctttcaatgggagctttgctggtggaagagaaagacagagaagagcacctagcacagtgagaacgtggagaaggggcatggagggcggggcgggggcagggaaacactgattctcaccagaagcctctgagggaggcgttagtgccccacggagcaggtgaagaaatggaaactcaagggttaaatgaat

SEQ ID NO: 288151 - DNA, 751 bp, Homo sapiens
accatgttaagaagagccttttgcctcccaccatgattctgaggcctccccagccatgcagaactaatctgggagcactcagttgtggaacccagccaccatgttgtgaagaagccctgtgcagtggtccaagtgaccaggagtcaaagctcccagccaatagccagcactaacttgtcagcagtgtcatggagcccacttgaaagaggattctaattatgctgcccaagctgtggccacatggaggagagatatacagtccctgctgaaccctgctctaattacagggagacttgaaaaccagtggtggcgagactccaagactattatttttatttccggacaaaaacatctgcttcacacagtgcacggcatcaaatgaagaggaaagaacttgtatcccaaagcctggctttctgtatcatccacaaattaagacagcatctgctgagcccatgctgagcctgtcacagtcaacaactgggaaaccggggcctctactgaaccaggggacaagtagccgaagcacttaaacagcttgatacttgttttttggtacatttgtttatttaaagcacaggaaatgaataaaatgccacctaaaaagtatctgcaatgaataaattatttccagtgaagcactgcagatccacacacaccagtctgctaacctttaccaaggccatgtccggtgggcttgtgcttgttccagttgactcttccttgagacctttcccttctgtgcaatgac

SEQ ID NO: 288152 - DNA, 1147 bp, Homo sapiens
gtgccgcggctccgtttggttccgcttcgctggcgcccgccgggctcttcccccgccgaggcctgtggtttgtggagtcgaatttccctgccaccagtgcccggttagcaggggcgccagcctgggcgcctgcgcggacggcgggcgtcgtcaccatggcagcatccgctggaggcccaggatcttggagtgaaaatatactggaatattttctgagaaatagccagattacagcagaagacggtgctgagatcacctggtatcatgcagctaaccacaaggcacaaacaaatgaggcactgaaaaagacgagatttcaccgtgttggccagactggtctcgaactcctgacctcatgatccgcctgccttggcctcgcgaagtgctgggattacaggtgtgagccaccacgcccggccaagaactttacttttattaaggtactgctcacatgatagaggctgatgtccttcttccaagtgatggatcagaacacagccagccaattatggcccatccccctgaaacaaacagtgataatactctacaggagtggctgactgaagttatgaaaagcaataaaggcatcaagctggatttcaaaagtctggcagttgtagaaccatccatgatgctcttggaaaatgtgaagaggcatctgaagcgtcctgtatggattaatgccgatattcttcctggtccaaatggaaatagcaaagtaatagatgcaaaaccatttttagacaccgtgacatccttctttccagacgtgacgttttccctgggttggacaacaggatggcatcctgagaaagtcaatgaagggtacagttggacaatggtgaaagagatggaatatatatgtaatgaactaagtcagcctgtaacgttccctgtcagagcagcattagtcaggcagtcttgttctcagttactttggctgttaaagaaatcaaacaggtacagcctgactatttggactggaaaaaatgataactattccgttgaagatttactttacattagagaccattttgacaaaaaacaagttttctatgacatcttggaaccacaaaaccatgaatttaaacaagccattggaatcaaagttaatctctaagaagaagattctcaattatttcctgtg

SEQ ID NO: 288153 - DNA, 1094 bp, Homo sapiens
aaggaaatactataattttatattttacagtcatttttagaattgtttatgtatccaaactcacccaagaatacataagggaaagaagctacttttattctccagggtcatgagcctgaattagagatacagggcttggatccacttgggtatttcataaatgtgaatttacaggttattaagtgtatttcatttatcttatttatacattctggaacgagtgaatatttgtgtcttttaaaaaactgttttcacaccaagtgatcctaatatggagttttgaaacctctattttgtccacaagtagtaccactattcatatatttatagactctttaaggtatattcatgaataataagcacagttcaacatttagagatatggcatatgttagcttttccctctggtgctatgcgatctttgattttatttaacccagacattattgtattttgattatgaatttgagaacattgagaccactagtctaaaagaacttctttttactttacctaaagaatctatctcattgacaacaaattatgtttttagtctggcagttgtagaaccatccatgatgctcttggaaaatgtgaagaggcatctgaagcgtcctgtatggattaatgccgatattcttcctggtccaaatggaaatagcaaagtaatagatgcaaaaccatttttagacaccgtgacatccttctttccagacgtgacgttttccctgggttggacaacaggatggcatcctgagaaagtcaatgaagggtacagttggacaatggtgaaagagatggaatatatatgtaatgaactaagtcagcctgtaacgttccctgtcagagcagcattagtcaggcagtcttgttctcagttactttggctgttaaagaaatcaaacaggtacagcctgactatttggactggaaaaaatgataactattccgttgaagatttactttacattagagaccattttgacaaaaaacaagttttctatgacatcttggaaccacaaaaccatgaatttaaacaagccattggaatcaaagttaatctctaagaagaagattctcaattatttcctgtg

SEQ ID NO: 288154 - DNA, 556 bp, Homo sapiens
ccatgccactcatctggtttcttagtccatttaacagtcctgcaattcagatagagcagttatgtcgtttagacaacagcagtatgaatgtttttttgtctctagtccctcttgatgaaagaatgaaatatgaaagtacagttacaccattgctgattaattttttcatctgagtgcatttgagttagagataaatgaaagcatttttaggcttattggaatgactcatcgctttcttccacttttaactgtataattctgttttatttcaatgcaggtacagcctgactatttggactggaaaaaatgataactattccgttgaagatttactttacattagagaccattttgacaaaaaacaagttttctatgacatcttggaaccacaaaaccatgaatttaaacaagccattggaatcaaagttaatctctaagaagaagattctcaattatttcctgtgttttggtttcataatccttctctccattggtctgaattaattaccatataaattatggttattgattgacgttccaagtcatctaatcaaga

SEQ ID NO: 288155 - DNA, 1013 bp, Homo sapiens
gtgccgcggctccgtttggttccgcttcgctggcgcccgccgggctcttcccccgccgaggcctgtggtttgtggagtcgaatttccctgccaccagtgcccggttagcaggggcgccagcctgggcgcctgcgcggacggcgggcgtcgtcaccatggcagcatccgctggaggcccaggatcttggagtgaaaatatactggaatattttctgagaaatagccagattacagcagaagacggtgctgagatcacctggtatcatgcagctaaccacaaggcacaaacaaatgaggcactgaaaagtactgctcacatgatagaggctgatgtccttcttccaagtgatggatcagaacacagccagccaattatggcccatccccctgaaacaaacagtgataatactctacaggagtggctgactgaagttatgaaaagcaataaaggcatcaagctggatttcaaaagtctggcagttgtagaaccatccatgatgctcttggaaaatgtgaagaggcatctgaagcgtcctgtatggattaatgccgatattcttcctggtccaaatggaaatagcaaagtaatagatgcaaaaccatttttagacaccgtgacatccttctttccagacgtgacgttttccctgggttggacaacaggatggcatcctgagaaagtcaatgaagggtacagttggacaatggtgaaagagatggaatatatatgtaatgaactaagtcagcctgtaacgttccctgtcagagcagcattagtcaggcagtcttgttctcagttactttggctgttaaagaaatcaaacaggtacagcctgactatttggactggaaaaaatgataactattccgttgaagatttactttacattagagaccattttgacaaaaaacaagttttctatgacatcttggaaccacaaaaccatgaatttaaacaagccattggaatcaaagttaatctctaagaagaagattctcaattatttcctgtg

SEQ ID NO: 288156 - DNA, 309 bp, Homo sapiens
ccggacggatgtatgccaacacccttctcctcctgtctggtctcatcgtagagtctagaagagcaaacattcacttgcagcctccctgtaccaaggagtggccatgaggcaattctgcccaatgaatcagaagaggaatgtgttggggataacatcacgtgatgttatcgcccaacaccatggtaaggaaacagacccttacttacctccatgtcttatttttagagttaagtaatgaggattctaatcatgtcaaactagcaaattctacctgtactgcaaatcttaagagttgagggtatttaatga

SEQ ID NO: 288157 - DNA, 409 bp, Homo sapiens
gcccgttggtgtgcggcacgctgcggtccgtacccggcccggggcccgcgcccgcgcccgggtggaagcgggccttggcgtagttgctcacgaactggtcctgcaggaaagagccggccatggcgtagcgggccccgggcacgatctgcgagcgcggcgagtcgttgggcgagggggtcaggcggtccatgtcacagccggtgtagatcctgcgggattgtttcagaaacccctaggaaaaagccgcgcacgcagtaatcatgaaagactggccttcacccgtgttctggaacccgaggtttgctgctggaagcctccaaagtacttagtgtctattgtttcccctgtgtgaaactttcactcccacctctactaatacaaacaagaattactactctgaaaaagtagt

SEQ ID NO: 288158 - DNA, 410 bp, Homo sapiens
gcaagatacagaccatcaagggaacgacttccctcttctcttgctctctctcgtcaagtgtactggggtactgagagaggggcacaagcaaggactttcatcccacttctccaacatatgtgtgcacattaaggcagatttacctagggagtaagatgctctttgcccagtgggcctttcctctgcggtcagtttatgagtgaaatttctaagcaagattgtttcagaaacccctaggaaaaagccgcgcacgcagtaatcatgaaagactggccttcacccgtgttctggaacccgaggtttgctgctggaagcctccaaagtacttagtgtctattgtttcccctgtgtgaaactttcactcccacctctactaatacaaacaagaattactactctgaaaaagtagt

SEQ ID NO: 288159 - DNA, 304 bp, Homo sapiens
aagtgggctctggacacttggatatctcaagaaaggaggaggtgggggatcctcagagggaataaaaaaggtttgtcctgttttaactctgttcccttaagaatttaacatttggacccaggtcgtcttacttcaaagctcatcactttagctagtaggctgtgggcaaattgaacctatctaatcatgaatatggtgataatttaggtcccacatctccagtgatgctgccttacaagagtgttgtgagggtatgaactataaggtactctaccaatgcaagttattgtcaccccaggttcac

SEQ ID NO: 288160 - DNA, 1045 bp, Homo sapiens
catacttagttcaataaatcagagaaacttttttcttatgaatgagaggtacactaatggctttttcataaggacagtgtataaggatgtcctgggtcaggatgagaacatacctaaaaggcacacaggggtttgtaaagtaggagagtataagaccgtctttagatttgccaagactctcagggtgatagcttagttgtagcctaagttcataaatagtcatcatgtactagcaactgtccaaggctctggcatgtaaagattattgctattaatttcctcttactcaagacacttactttgtagtgagcaaaattagagttgttaacatgtgggtagggcttgctagaaatgaaagaccctcacaaggattacctcattaaataactgtgaaatctgaaatctaaactctgtgatattggaaggatattttaaaataaagggactgacctgccagttcaagcttagctctggcttctttgtctttggcaataaatctgtattcaccctggtcacggggcttaatatcacaaatctgtagtcgatgtatctttccttcactcatcatctggtgtttatcaccctggacaacaaccatgttatttcttagccattggacttccaccttatctttattgagttctgctaaaaagacaacatcagcaccaggggcttcaagaatatcttgtggaggcctgatgatctcaacaggaatttctggaaagaaaatgtgaaataaatacaaatatgtttacattttgattaacaattttaaaaaattggtaacattagaattgttttttcacttaatatgtaccttccacaaaaagtctagcacgagacttcctgtcttctaccccgcaagcatattcacactcatcatccagcctgcaatcttttataatgagtctgtgtatacttccatctttttcaaatttgtatctaaaggagacattggattatcagttagcttgcaatgatggccactaaattgtcaaaagtgtatatatagctacagaaatagagaataaaaagatcttgctta

SEQ ID NO: 288161 - DNA, 896 bp, Homo sapiens
ccttcctcaagacctgtcacttccattctgtcagaaaacagaataggatgttttactgtgatgtcgataatcgtttcattgtgtagtactcataatctttcaaaaattcaaacccctggtataatactagtctttaaattaaacctggattacttcaacactataactgaatacattttcatttcaatactgtcatgaaaaccctgagcaggcagtacattcagcagcacctttaaaaatcagacagatacaccggcagcataggattctcaatgaaaaaagacaaacatttaaattttccccaacaaagcccattttagtgactaggagtacacatttactctcatgccaaattaaaaacctactttgtttctgcaacaggttctccacaggcaacccatttatcagaaccacgtggacatctttcaactatcctggacaacaaccatgttatttcttagccattggacttccaccttatctttattgagttctgctaaaaagacaacatcagcaccaggggcttcaagaatatcttgtggaggcctgatgatctcaacaggaatttctggaaagaaaatgtgaaataaatacaaatatgtttacattttgattaacaattttaaaaaattggtaacattagaattgttttttcacttaatatgtaccttccacaaaaagtctagcacgagacttcctgtcttctaccccgcaagcatattcacactcatcatccagcctgcaatcttttataatgagtctgtgtatacttccatctttttcaaatttgtatctaaaggagacattggattatcagttagcttgcaatgatggccactaaattgtcaaaagtgtatatatagctacagaaatagagaataaaaagatcttgctta

SEQ ID NO: 288162 - DNA, 795 bp, Homo sapiens
atatatgtgccagtgtcacttctcttactatcaacaatagtcactgtggatttcttagggacattttcaatggtaattcttttgtcctgcttcagaatcatatcagcctttgtccaagttattttaggttcaggttttccggttacggtggcaggaagttcaatcttggtcccagcttttacagtgagaccagcaaggagcttcacatcgaggaagatttctggggcctctgaattggaaaagattatttatgatgttatcaagttcaagcagatttaaggttctccacaggcaacccatttatcagaaccacgtggacatctttcaactatcctggacaacaaccatgttatttcttagccattggacttccaccttatctttattgagttctgctaaaaagacaacatcagcaccaggggcttcaagaatatcttgtggaggcctgatgatctcaacaggaatttctggaaagaaaatgtgaaataaatacaaatatgtttacattttgattaacaattttaaaaaattggtaacattagaattgttttttcacttaatatgtaccttccacaaaaagtctagcacgagacttcctgtcttctaccccgcaagcatattcacactcatcatccagcctgcaatcttttataatgagtctgtgtatacttccatctttttcaaatttgtatctaaaggagacattggattatcagttagcttgcaatgatggccactaaattgtcaaaagtgtatatatagctacagaaatagagaataaaaagatcttgctta

SEQ ID NO: 288163 - DNA, 553 bp, Homo sapiens
aaacttcccacccacttcttgcaggaggctgtgtggttactccctagtagtatggtatactctgaggctaaaataaaacaaaccctgtcaacagactaggcctttttgatcagtcagaaatgctcagtactacagaagcggacctcatctctatactaactgagttgtttccgtaaaactgatcctgtctcctggagatggctagcatccagtcccccagtgcagaagaaagaagctcagtttcccaaatgggcaaggaccgctactggtagacagatagggaatagatgggttggaagaaaggagaagagcagaacagagtcaagtgtcagcgtttgagctattccagggtgaacccagcaatctcaggtttggtcttttgaagcaaaccaagatccccaggaaactgtggcatgttcacgtacttgccattgaacacagagttgttgatccaacgccaccttttctcttcacgatggtaaattaagccaataaaatacttctcagcatcagttatgtcctgaagaaacttctggaataaaaaaaaaatttt

SEQ ID NO: 288164 - DNA, 1150 bp, Homo sapiens
tattctttcttccgttctgtttagtttttttgtttgttgctcgtgttgtgtgtggcgtcgcttctagctgtcgtttctgttttgtgtgtgttttgttgcttcgtgccgtctgtctgtttgttcttgtctttctcttgctttttgttttagtgtgcctgttttcttttgcctatgctcttgctttgttctgttgggtcatctgtctggtgtttgtttgtttgtgtgtctgtcgctggcgttgcgtgctgcttttgtttgttctttgttcccattctgttgttcgtctctacttctcgttcttgttcttgtcgtgtgttgtcattgcttgtgcttgtcctttcgttgtgttttgtctgcctctcttctttggttgtttttgtctggtttgtgcgtcttgcgtcttgtggttagggtatgccgtggccgtgtcgctgcgcggtcgggtgtacctttctggtgcgccgccgcccccctccttttctttttttttttttctttttttcttttctctttctttttttttttttttttttttttttttttttttttttttttttttttttttttttttttttttttttttttttttttttgtgagaacctgaattaaatttttaatattttaaaaaaggaaagttgctgggaagctggtaaacagaaacagaagattagaggcctaactagaaagagacactggtgttagcagagagatattgaggggctgtaagcctaaggtttgaaatctaaagatagagtggaaaagggagtaggcacccccaccagcccctgcttgacatctgctttagttcattccagcaggaaggaggagaagggcagggaggtagggagcttctcagcaaagccagcttcagctttgataatctcacccacctaccccatttaaggagttccaggtttaagagtttaaaaacaggtggcacccagaccatcattcaggagacaggaactcattccaggttcctagagaactcctatctcagacctgagggtttccagggcttcagctgagctcctctggctaaccagtagtcacttgatcagtcctgctgccttgaccccatctccaggaggggctatggccagagggagtagagggagtccagcccccaagccttgtgaggcactgtta

SEQ ID NO: 288165 - DNA, 4945 bp, Homo sapiens
ctggataaaaggccttagaaccagttagtgatctgcctacacctgaatccctgaaacatctgaactgttttgtaaatcatcttatccccaacctcagtaccaccggatcttcacttctcagtgggattttgtcctttgcatgaccctactttcagcagggctttgaggctgggaaactgatctgctgggtgactttcattccagttgctgggacggaaggctgaatgtagggtcattttgtatgggatatgcagagctctgggtttttttgttttttgttttttgagacggagtctcgctctgtcgccaggctggagtgcagtggtgcgatctcggctcactgcaacctccgcctcccggttcaagccattcttctgcctcagcctcagcgagtagctgagactaccggcgcacgccaccacgcccagctaattgttttgtatttttagtagagacggggtttcaccatgttggccaggatggtctcgatctcttgacctcgtgatctgcccgcctcggcctcccaaagtgccgagattacaggtgtgagccaccgcgctcggccagagctctgggttttaatcctactttagctgtagaaccttgggcaaataacttcatctttttgggtcctaattttcctcctgtctaactggagggactgtgatccttccaccttggatggaagaggcttacctgacagccagcctgcctgctgggagccaggagagtcagctcattaaatcttgaagaaccgctgtatgccctttttccttctaagtcatgtctgctgcctgtgagcctgggaaggagtgctttcaaaacctgtatttttgccctctttagtaaatttagaactgtagaggctaataaactgcgatgagacatttaaaagctctgctccaaagaagtgaacgactctttcaccaccccttgcatcccaaaccttcggttctggcagagttcttgccgcagaggttccttaggagcaccccgcgcggcccgcgcgagcgcgcatgcgcgtcgaaccccacccccttgccggcgggcctcggttcaaacgacccggtgggtctacagcggaagggagggagcgaaggtaggaggcagggcttgcctcactggccaccctcccaaccccaagagcccagccccatggtccccgccgccggcgcgctgctgtgggtcctgctgctgaatctgggtccccgggcggcgggggcccaaggcctgacccagactccgaccgaaatgcagcgggtcagtttacgctttgggggccccatgacccgcagctaccggagcaccgcccggactggtcttccccggaagacaaggataatcctagaggacgagaatgatgccatggccgacgccgaccgcctggctggaccagcggctgccgagctcttggccgccacggtgtccaccggctttagccggtcgtccgccattaacgaggaggatgggtcttcagaagagggggttgtgattaatgccggaaaggatagcaccagcagagagcttcccagtgcgactcccaatacagcggggagttccagcacgaggtttatagccaatagtcaggagcctgaaatcaggctgacttcaagcctgccgcgctcccccgggaggtctactgaggacctgccaggctcgcaggccaccctgagccagtggtccacacctgggtctaccccgagccggtggccgtcaccctcacccacagccatgccatctcctgaggatctgcggctggtgctgatgccctggggcccgtggcactgccactgcaagtcgggcaccatgagccggagccggtctgggaagctgcacggcctttccgggcgccttcgagttggggcgctgagccagctccgcacggagcacaagccttgcacctatcaacaatgtccctgcaaccgacttcgggaagagtgccccctggacacaagtctctgtactgacaccaactgtgcctctcagagcaccaccagtaccaggaccaccactacccccttccccaccatccacctcagaagcagtcccagcctgccacccgccagcccctgcccagccctggctttttggaaacgggtcaggattggcctggaggatatttggaatagcctctcttcagtgttcacagagatgcaaccaatagacagaaaccagaggtaatggccacttcatccacatgaggagatgtcagtatctcaacctctcttgccctttcaatcctagcacccactagatatttttagtacagaaaaacaaaactggaaaacacattgtttggtcttgtgtttctttacagaggtacctgagggaggagagacataaatcccttcatccctaagactgaactatgtaactagcagcctctggcttgttttctactccctgtccctcaggataaaatgttgatattgctcattttcctcatttccaacattgttttaaaacaagtacttcttttacaggcttgaaaaatctcaaataaacgctaagaaaagggagtaggaagaacaaggagttgagcccttgaaagatgacagtggtcttcttgccttcatgcttggccctctctcctcaaaagggcaatgttggtacaaaattccatctcagccactttcgaggagttatcttcattagctatatccatcctttaatccaacacacacctgcaatgattactgtgcaactattttgcttaattttttatttgaaaaaatgtatttaaaagtccaacaactttttaatataaattacgactctcaaacccattcccatcactttattagtgatggtagcatacatattagagaaggtagctaaaggcaagagagcaccaaaggaaaaagactgtccaaagaacaggtattagaatgaggccgaagatcacggtgaccagagatttctaggagtctctaacctttccaccctatcctgttaaccctttagatctctagtataacactcaggctactgaggtattttagagcaacaagctgggttactttcagagcaaccagcttgactggaactgagagtaaattgggaatgtatgaccaatcttagaccctgaaaaatggcagaaaatacatggaaatttgaaaaaaaaaaaaaaaaaaaaaaaaaaaaaaaagaacctcagtcactgttctgtagggataagcaaactgaatgggtggtggaattggcagaatggataccagttcctacattcctgaccccactaccataaaacaggatgtttcctgttgcaaagctaatgagaccccacccttcttgtctcagagcaggcaggagctcatctgtcttgttctgccttcctaattaccctggaagggccagaacgaagaacacctgagaatactgaaagtgcctaaaaacccctgctcctacgttgttttcccatttaaagcagactcttcagccagggggcagtgggacctggtcttcagacaaaactccctgagtctaatgtgtgtctaggactagggcacagaaatagagcttaaaatttggggaggataaggagtgtatctactgcttctctctcccctttccccaatcctaccataccctgttcatatctctacactgcaggaaccacttctccagagggcaagaatggaggagggggacctgtccatcatagcaacatgcaaacacaagcaaaacactgaataaagaattgtttggagattatgtgcagccctactgagcctcatttatatgggctcctagttgatccatggctcgggcttaagatgagtaagatgatgagggtagcgtgccaagcagaaatcacttcagagaaaaatatcttgactttagagttgtggttctcaaatggaggcgattttgccccctaggagaaatctggcaatgtatagagacatttttggttgtcataactagagtgggccaggggtgctgctaaatatcctgtaatgcacaaaataggaaacaggttttccttacaaagaacacttcagcccaaaatgtcaaaggcatctcggttgtgaaaccttgttctagagcctctccctgctcccgtgctgtgaggatcttaagactcctaaactcacagatgattgttttcaacctatttatctcaccatcctcaatgatcagaagtccaccttgagatggacttactcctagttctgccgcattctgggtttctttccagacccctcttcctcctctcacctgggccagcagggaggttggcagagggcaggaaagatgccccaaaacttaaatggaatgtcatcaggtgaagagctacctcttaccttaactcttattcggtgggaaacaaggttcctaatagggatagagttaagggcggaggcaacagcaggatgaggataattaagagaacctgaattaaatttttaatattttaaaaaaggaaagttgctgggaagctggtaaacagaaacagaagattagaggcctaactagaaagagacactggtgttagcagagagatattgaggggctgtaagcctaaggtttgaaatctaaagatagagtggaaaagggagtaggcacccccaccagcccctgcttgacatctgctttagttcattccagcaggaaggaggagaagggcagggaggtagggagcttctcagcaaagccagcttcagctttgataatctcacccacctaccccatttaaggagttccaggtttaagagtttaaaaacaggtggcacccagaccatcattcaggagacaggaactcattccaggttcctagagaactcctatctcagacctgagggtttccagggcttcagctgagctcctctggctaaccagtagtcacttgatcagtcctgctgccttgaccccatctccaggaggggctatggccagagggagtagagggagtccagcccccaagccttgtgaggcactgtta

SEQ ID NO: 288166 - DNA, 3166 bp, Homo sapiens
ctggataaaaggccttagaaccagttagtgatctgcctacacctgaatccctgaaacatctgaactgttttgtaaatcatcttatccccaacctcagtaccaccggatcttcacttctcagtgggattttgtcctttgcatgaccctactttcagcagggctttgaggctgggaaactgatctgctgggtgactttcattccagttgctgggacggaaggctgaatgtagggtcattttgtatgggatatgcagagctctgggtttttttgttttttgttttttgagacggagtctcgctctgtcgccaggctggagtgcagtggtgcgatctcggctcactgcaacctccgcctcccggttcaagccattcttctgcctcagcctcagcgagtagctgagactaccggcgcacgccaccacgcccagctaattgttttgtatttttagtagagacggggtttcaccatgttggccaggatggtctcgatctcttgacctcgtgatctgcccgcctcggcctcccaaagtgccgagattacaggtgtgagccaccgcgctcggccagagctctgggttttaatcctactttagctgtagaaccttgggcaaataacttcatctttttgggtcctaattttcctcctgtctaactggagggactgtgatccttccaccttggatggaagaggcttacctgacagccagcctgcctgctgggagccaggagagtcagctcattaaatcttgaagaaccgctgtatgccctttttccttctaagtcatgtctgctgcctgtgagcctgggaaggagtgctttcaaaacctgtatttttgccctctttagtaaatttagaactgtagaggctaataaactgcgatgagacatttaaaagctctgctccaaagaagtgaacgactctttcaccaccccttgcatcccaaaccttcggttctggcagagttcttgccgcagaggttccttaggagcaccccgcgcggcccgcgcgagcgcgcatgcgcgtcgaaccccacccccttgccggcgggcctcggttcaaacgacccggtgggtctacagcggaagggagggagcgaaggtaggaggcagggcttgcctcactggccaccctcccaaccccaagagcccagccccatggtccccgccgccggcgcgctgctgtgggtcctgctgctgaatctgggtccccgggcggcgggggcccaaggcctgacccagactccgaccgaaatgcagcgggtcagtttacgctttgggggccccatgacccgcagctaccggagcaccgcccggactggtcttccccggaagacaaggataatcctagaggacgagaatgatgccatggccgacgccgaccgcctggctggaccagcggctgccgagctcttggccgccacggtgtccaccggctttagccggtcgtccgccattaacgaggaggatgggtcttcagaagagggggttgtgattaatgccggaaaggatagcaccagcagagagcttcccagtgcgactcccaatacagcggggagttccagcacgaggtttatagccaatagtcaggagcctgaaatcaggctgacttcaagcctgccgcgctcccccgggaggtctactgaggacctgccaggctcgcaggccaccctgagccagtggtccacacctgggtctaccccgagccggtggccgtcaccctcacccacagccatgccatctcctgaggatctgcggctggtgctgatgccctggggcccgtggcactgccactgcaagtcgggcaccatgagccggagccggtctgggaagctgcacggcctttccgggcgccttcgagttggggcgctgagccagctccgcacggagcacaagccttgcacctatcaacaatgtccctgcaaccgacttcgggaagagtgccccctggacacaagtctctgtactgacaccaactgtgcctctcagagcaccaccagtaccaggaccaccactacccccttccccaccatccacctcagaagcagtcccagcctgccacccgccagcccctgcccagccctggctttttggaaacgggtcaggattggcctggaggatatttggaatagcctctcttcagtgttcacagagatgcaaccaatagacagaaaccagaggtaatggccacttcatccacatgaggagatgtcagtatctcaacctctcttgccctttcaatcctagcacccactagatatttttagtacagaaaaacaaaactggaaaacacattgtttggtcttgtgtttctttacagaggtacctgagggaggagagacataaatcccttcatccctaagactgaactatgtaactagcagcctctggcttgttttctactccctgtccctcaggataaaatgttgatattgctcattttcctcatttccaacattgttttaaaacaagtacttcttttacaggcttgaaaaatctcaaataaacgctaagaaaagggagtaggaagaacaaggagttgagcccttgaaagatgacagtggtcttcttgccttcatgcttggccctctctcctcaaaagggcaatgttggtacaaaattccatctcagccactttcgaggagttatcttcattagctatatccatcctttaatccaacacacacctgcaatgattactgtgcaactattttgcttaattttttatttgaaaaaatgtatttaaaagtccaacaactttttaatataaattacgactctcaaacccattcccatcactttattagtgatggtagcatacatattagagaaggtagctaaaggcaagagagcaccaaaggaaaaagactgtccaaagaacaggtattagaatgaggccgaagatcacggtgaccagagatttctaggagtctctaacctttccaccctatcctgttaaccctttagatctctagtataacactcaggctactgaggtattttagagcaacaagctgggttactttcagagcaaccagcttgactggaactgagagtaaattgggaatgtatgaccaatcttagaccctgaaaaatggcagaaaatacatgtccccgtacatcgttagaagcttgaattcgagcagtagtagtagtagtaggcggccgc

SEQ ID NO: 288167 - DNA, 3927 bp, Homo sapiens
agaagagacagcattttaccatgttggccaggctggtctagaactcctgacctcaagtgatccacccgcctcggcctcccaaagtgctgggattataggcatgagccaccatgcctggtcttggaaattctctgtttttttcacagacaagatctcgctatgttgcccaggctggtcttaaactcctgggctcaagcaattctcctgcctcagccttccaaagtgctgggattacaggcatgagctactgtgcccctgaccataagacttttttttcgagacagggtctctcatcactcaggctggagtgtggtggcgcagtcacaactcactgcaccctccatcttctgggctcaagcaatcctcccaccttagcctgctgaatagctgggactacagacgtgcaccaccatgcctggctaacaagatctcgctatgttgcccaggctggtctccaactcctgagctcaaggatctgcccaccttggccttccagaattctgggattacagacatgagccactgtgcccggcccataaagtctttttgatgcacagataattaacagatatgaaggatcttaatcaattaatagttttgacctaatacagcttaacagcaacaagtgccaaaatttgaggtcttactatgtgcactttacctgaatcgatcctcacatcctatgaggtattattatccctgcttttcagatgaagaaactgaggtttacaaagctagtaagtggcagagccacgagatttaaaccaggtttgacaccagtgcccactctcttcaccactaccatttgggagtactgtccttccaggacaaggaaggatagtcctctgcttttcccagaattagcaaaggttctgattgacttgataaggtagtctcaattgatacggatgataggactttgaggagggaaaggtaataaagcttacacttggtcattttgcttgtttctgtttttctccttgtgtgtccaataccattattgcatacaaaaataagtaaggggtgggcagtagggttgagggaatatgggtttgtgggagggggagatgaagcaaggaagggaaaagaatatagatgtggttgtaatttccctttttctctattttttttttcttacgcagatagacagaaaccagaggtaatggccacttcatccacatgaggagatgtcagtatctcaacctctcttgccctttcaatcctagcacccactagatatttttagtacagaaaaacaaaactggaaaacacattgtttggtcttgtgtttctttacagaggtacctgagggaggagagacataaatcccttcatccctaagactgaactatgtaactagcagcctctggcttgttttctactccctgtccctcaggataaaatgttgatattgctcattttcctcatttccaacattgttttaaaacaagtacttcttttacaggcttgaaaaatctcaaataaacgctaagaaaagggagtaggaagaacaaggagttgagcccttgaaagatgacagtggtcttcttgccttcatgcttggccctctctcctcaaaagggcaatgttggtacaaaattccatctcagccactttcgaggagttatcttcattagctatatccatcctttaatccaacacacacctgcaatgattactgtgcaactattttgcttaattttttatttgaaaaaatgtatttaaaagtccaacaactttttaatataaattacgactctcaaacccattcccatcactttattagtgatggtagcatacatattagagaaggtagctaaaggcaagagagcaccaaaggaaaaagactgtccaaagaacaggtattagaatgaggccgaagatcacggtgaccagagatttctaggagtctctaacctttccaccctatcctgttaaccctttagatctctagtataacactcaggctactgaggtattttagagcaacaagctgggttactttcagagcaaccagcttgactggaactgagagtaaattgggaatgtatgaccaatcttagaccctgaaaaatggcagaaaatacatggaaatttgaaaaaaaaaaaaaaaaaaaaaaaaaaaaaaaagaacctcagtcactgttctgtagggataagcaaactgaatgggtggtggaattggcagaatggataccagttcctacattcctgaccccactaccataaaacaggatgtttcctgttgcaaagctaatgagaccccacccttcttgtctcagagcaggcaggagctcatctgtcttgttctgccttcctaattaccctggaagggccagaacgaagaacacctgagaatactgaaagtgcctaaaaacccctgctcctacgttgttttcccatttaaagcagactcttcagccagggggcagtgggacctggtcttcagacaaaactccctgagtctaatgtgtgtctaggactagggcacagaaatagagcttaaaatttggggaggataaggagtgtatctactgcttctctctcccctttccccaatcctaccataccctgttcatatctctacactgcaggaaccacttctccagagggcaagaatggaggagggggacctgtccatcatagcaacatgcaaacacaagcaaaacactgaataaagaattgtttggagattatgtgcagccctactgagcctcatttatatgggctcctagttgatccatggctcgggcttaagatgagtaagatgatgagggtagcgtgccaagcagaaatcacttcagagaaaaatatcttgactttagagttgtggttctcaaatggaggcgattttgccccctaggagaaatctggcaatgtatagagacatttttggttgtcataactagagtgggccaggggtgctgctaaatatcctgtaatgcacaaaataggaaacaggttttccttacaaagaacacttcagcccaaaatgtcaaaggcatctcggttgtgaaaccttgttctagagcctctccctgctcccgtgctgtgaggatcttaagactcctaaactcacagatgattgttttcaacctatttatctcaccatcctcaatgatcagaagtccaccttgagatggacttactcctagttctgccgcattctgggtttctttccagacccctcttcctcctctcacctgggccagcagggaggttggcagagggcaggaaagatgccccaaaacttaaatggaatgtcatcaggtgaagagctacctcttaccttaactcttattcggtgggaaacaaggttcctaatagggatagagttaagggcggaggcaacagcaggatgaggataattaagagaacctgaattaaatttttaatattttaaaaaaggaaagttgctgggaagctggtaaacagaaacagaagattagaggcctaactagaaagagacactggtgttagcagagagatattgaggggctgtaagcctaaggtttgaaatctaaagatagagtggaaaagggagtaggcacccccaccagcccctgcttgacatctgctttagttcattccagcaggaaggaggagaagggcagggaggtagggagcttctcagcaaagccagcttcagctttgataatctcacccacctaccccatttaaggagttccaggtttaagagtttaaaaacaggtggcacccagaccatcattcaggagacaggaactcattccaggttcctagagaactcctatctcagacctgagggtttccagggcttcagctgagctcctctggctaaccagtagtcacttgatcagtcctgctgccttgaccccatctccaggaggggctatggccagagggagtagagggagtccagcccccaagccttgtgaggcactgtta

SEQ ID NO: 288168 - DNA, 2958 bp, Homo sapiens
aattcggcacgaggagtgggagggggccctagttaataacttcagtgtttcaaagcagtcccagcctgccacccgccagcccctgcccagccctggctttttggaaacgggtcaggattggcctggaggatatttggaatagcctctcttcagtgttcacagagatgcaaccaatagacagaaaccagaggtaatggccacttcatccacatgaggagatgtcagtatctcaacctctcttgccctttcaatcctagcacccactagatatttttagtacagaaaaacaaaactggaaaacacattgtttggtcttgtgtttctttacagaggtacctgagggaggagagacataaatcccttcatccctaagactgaactatgtaactagcagcctctggcttgttttctactccctgtccctcaggataaaatgttgatattgctcattttcctcatttccaacattgttttaaaacaagtacttcttttacaggcttgaaaaatctcaaataaacgctaagaaaagggagtaggaagaacaaggagttgagcccttgaaagatgacagtggtcttcttgccttcatgcttggccctctctcctcaaaagggcaatgttggtacaaaattccatctcagccactttcgaggagttatcttcattagctatatccatcctttaatccaacacacacctgcaatgattactgtgcaactattttgcttaattttttatttgaaaaaatgtatttaaaagtccaacaactttttaatataaattacgactctcaaacccattcccatcactttattagtgatggtagcatacatattagagaaggtagctaaaggcaagagagcaccaaaggaaaaagactgtccaaagaacaggtattagaatgaggccgaagatcacggtgaccagagatttctaggagtctctaacctttccaccctatcctgttaaccctttagatctctagtataacactcaggctactgaggtattttagagcaacaagctgggttactttcagagcaaccagcttgactggaactgagagtaaattgggaatgtatgaccaatcttagaccctgaaaaatggcagaaaatacatggaaatttgaaaaaaaaaaaaaaaaaaaaaaaaaaaaaaaagaacctcagtcactgttctgtagggataagcaaactgaatgggtggtggaattggcagaatggataccagttcctacattcctgaccccactaccataaaacaggatgtttcctgttgcaaagctaatgagaccccacccttcttgtctcagagcaggcaggagctcatctgtcttgttctgccttcctaattaccctggaagggccagaacgaagaacacctgagaatactgaaagtgcctaaaaacccctgctcctacgttgttttcccatttaaagcagactcttcagccagggggcagtgggacctggtcttcagacaaaactccctgagtctaatgtgtgtctaggactagggcacagaaatagagcttaaaatttggggaggataaggagtgtatctactgcttctctctcccctttccccaatcctaccataccctgttcatatctctacactgcaggaaccacttctccagagggcaagaatggaggagggggacctgtccatcatagcaacatgcaaacacaagcaaaacactgaataaagaattgtttggagattatgtgcagccctactgagcctcatttatatgggctcctagttgatccatggctcgggcttaagatgagtaagatgatgagggtagcgtgccaagcagaaatcacttcagagaaaaatatcttgactttagagttgtggttctcaaatggaggcgattttgccccctaggagaaatctggcaatgtatagagacatttttggttgtcataactagagtgggccaggggtgctgctaaatatcctgtaatgcacaaaataggaaacaggttttccttacaaagaacacttcagcccaaaatgtcaaaggcatctcggttgtgaaaccttgttctagagcctctccctgctcccgtgctgtgaggatcttaagactcctaaactcacagatgattgttttcaacctatttatctcaccatcctcaatgatcagaagtccaccttgagatggacttactcctagttctgccgcattctgggtttctttccagacccctcttcctcctctcacctgggccagcagggaggttggcagagggcaggaaagatgccccaaaacttaaatggaatgtcatcaggtgaagagctacctcttaccttaactcttattcggtgggaaacaaggttcctaatagggatagagttaagggcggaggcaacagcaggatgaggataattaagagaacctgaattaaatttttaatattttaaaaaaggaaagttgctgggaagctggtaaacagaaacagaagattagaggcctaactagaaagagacactggtgttagcagagagatattgaggggctgtaagcctaaggtttgaaatctaaagatagagtggaaaagggagtaggcacccccaccagcccctgcttgacatctgctttagttcattccagcaggaaggaggagaagggcagggaggtagggagcttctcagcaaagccagcttcagctttgataatctcacccacctaccccatttaaggagttccaggtttaagagtttaaaaacaggtggcacccagaccatcattcaggagacaggaactcattccaggttcctagagaactcctatctcagacctgagggtttccagggcttcagctgagctcctctggctaaccagtagtcacttgatcagtcctgctgccttgaccccatctccaggaggggctatggccagagggagtagagggagtccagcccccaagccttgtgaggcactgtta

SEQ ID NO: 288169 - DNA, 2352 bp, Homo sapiens
ccggagagtggtgagatggaatttgtaccaacatagcccttgtgaggagttatcttcattagctatatccatcctttaatccaacacacacctgcaatgattactgtgcaactattttgcttaattttttatttgaaaaaatgtatttaaaagtccaacaactttttaatataaattacgactctcaaacccattcccatcactttattagtgatggtagcatacatattagagaaggtagctaaaggcaagagagcaccaaaggaaaaagactgtccaaagaacaggtattagaatgaggccgaagatcacggtgaccagagatttctaggagtctctaacctttccaccctatcctgttaaccctttagatctctagtataacactcaggctactgaggtattttagagcaacaagctgggttactttcagagcaaccagcttgactggaactgagagtaaattgggaatgtatgaccaatcttagaccctgaaaaatggcagaaaatacatggaaatttgaaaaaaaaaaaaaaaaaaaaaaaaaaaaaaaagaacctcagtcactgttctgtagggataagcaaactgaatgggtggtggaattggcagaatggataccagttcctacattcctgaccccactaccataaaacaggatgtttcctgttgcaaagctaatgagaccccacccttcttgtctcagagcaggcaggagctcatctgtcttgttctgccttcctaattaccctggaagggccagaacgaagaacacctgagaatactgaaagtgcctaaaaacccctgctcctacgttgttttcccatttaaagcagactcttcagccagggggcagtgggacctggtcttcagacaaaactccctgagtctaatgtgtgtctaggactagggcacagaaatagagcttaaaatttggggaggataaggagtgtatctactgcttctctctcccctttccccaatcctaccataccctgttcatatctctacactgcaggaaccacttctccagagggcaagaatggaggagggggacctgtccatcatagcaacatgcaaacacaagcaaaacactgaataaagaattgtttggagattatgtgcagccctactgagcctcatttatatgggctcctagttgatccatggctcgggcttaagatgagtaagatgatgagggtagcgtgccaagcagaaatcacttcagagaaaaatatcttgactttagagttgtggttctcaaatggaggcgattttgccccctaggagaaatctggcaatgtatagagacatttttggttgtcataactagagtgggccaggggtgctgctaaatatcctgtaatgcacaaaataggaaacaggttttccttacaaagaacacttcagcccaaaatgtcaaaggcatctcggttgtgaaaccttgttctagagcctctccctgctcccgtgctgtgaggatcttaagactcctaaactcacagatgattgttttcaacctatttatctcaccatcctcaatgatcagaagtccaccttgagatggacttactcctagttctgccgcattctgggtttctttccagacccctcttcctcctctcacctgggccagcagggaggttggcagagggcaggaaagatgccccaaaacttaaatggaatgtcatcaggtgaagagctacctcttaccttaactcttattcggtgggaaacaaggttcctaatagggatagagttaagggcggaggcaacagcaggatgaggataattaagagaacctgaattaaatttttaatattttaaaaaaggaaagttgctgggaagctggtaaacagaaacagaagattagaggcctaactagaaagagacactggtgttagcagagagatattgaggggctgtaagcctaaggtttgaaatctaaagatagagtggaaaagggagtaggcacccccaccagcccctgcttgacatctgctttagttcattccagcaggaaggaggagaagggcagggaggtagggagcttctcagcaaagccagcttcagctttgataatctcacccacctaccccatttaaggagttccaggtttaagagtttaaaaacaggtggcacccagaccatcattcaggagacaggaactcattccaggttcctagagaactcctatctcagacctgagggtttccagggcttcagctgagctcctctggctaaccagtagtcacttgatcagtcctgctgccttgaccccatctccaggaggggctatggccagagggagtagagggagtccagcccccaagccttgtgaggcactgtta

SEQ ID NO: 288170 - DNA, 2284 bp, Homo sapiens
gcggccgcgtcgacttctaatacctgttctttggacagtctttttattttgcttaattttttatttgaaaaaatgtatttaaaagtccaacaactttttaatataaattacgactctcaaacccattcccatcactttattagtgatggtagcatacatattagagaaggtagctaaaggcaagagagcaccaaaggaaaaagactgtccaaagaacaggtattagaatgaggccgaagatcacggtgaccagagatttctaggagtctctaacctttccaccctatcctgttaaccctttagatctctagtataacactcaggctactgaggtattttagagcaacaagctgggttactttcagagcaaccagcttgactggaactgagagtaaattgggaatgtatgaccaatcttagaccctgaaaaatggcagaaaatacatggaaatttgaaaaaaaaaaaaaaaaaaaaaaaaaaaaaaaagaacctcagtcactgttctgtagggataagcaaactgaatgggtggtggaattggcagaatggataccagttcctacattcctgaccccactaccataaaacaggatgtttcctgttgcaaagctaatgagaccccacccttcttgtctcagagcaggcaggagctcatctgtcttgttctgccttcctaattaccctggaagggccagaacgaagaacacctgagaatactgaaagtgcctaaaaacccctgctcctacgttgttttcccatttaaagcagactcttcagccagggggcagtgggacctggtcttcagacaaaactccctgagtctaatgtgtgtctaggactagggcacagaaatagagcttaaaatttggggaggataaggagtgtatctactgcttctctctcccctttccccaatcctaccataccctgttcatatctctacactgcaggaaccacttctccagagggcaagaatggaggagggggacctgtccatcatagcaacatgcaaacacaagcaaaacactgaataaagaattgtttggagattatgtgcagccctactgagcctcatttatatgggctcctagttgatccatggctcgggcttaagatgagtaagatgatgagggtagcgtgccaagcagaaatcacttcagagaaaaatatcttgactttagagttgtggttctcaaatggaggcgattttgccccctaggagaaatctggcaatgtatagagacatttttggttgtcataactagagtgggccaggggtgctgctaaatatcctgtaatgcacaaaataggaaacaggttttccttacaaagaacacttcagcccaaaatgtcaaaggcatctcggttgtgaaaccttgttctagagcctctccctgctcccgtgctgtgaggatcttaagactcctaaactcacagatgattgttttcaacctatttatctcaccatcctcaatgatcagaagtccaccttgagatggacttactcctagttctgccgcattctgggtttctttccagacccctcttcctcctctcacctgggccagcagggaggttggcagagggcaggaaagatgccccaaaacttaaatggaatgtcatcaggtgaagagctacctcttaccttaactcttattcggtgggaaacaaggttcctaatagggatagagttaagggcggaggcaacagcaggatgaggataattaagagaacctgaattaaatttttaatattttaaaaaaggaaagttgctgggaagctggtaaacagaaacagaagattagaggcctaactagaaagagacactggtgttagcagagagatattgaggggctgtaagcctaaggtttgaaatctaaagatagagtggaaaagggagtaggcacccccaccagcccctgcttgacatctgctttagttcattccagcaggaaggaggagaagggcagggaggtagggagcttctcagcaaagccagcttcagctttgataatctcacccacctaccccatttaaggagttccaggtttaagagtttaaaaacaggtggcacccagaccatcattcaggagacaggaactcattccaggttcctagagaactcctatctcagacctgagggtttccagggcttcagctgagctcctctggctaaccagtagtcacttgatcagtcctgctgccttgaccccatctccaggaggggctatggccagagggagtagagggagtccagcccccaagccttgtgaggcactgtta

SEQ ID NO: 288171 - DNA, 3540 bp, Homo sapiens
ctggataaaaggccttagaaccagttagtgatctgcctacacctgaatccctgaaacatctgaactgttttgtaaatcatcttatccccaacctcagtaccaccggatcttcacttctcagtgggattttgtcctttgcatgaccctactttcagcagggctttgaggctgggaaactgatctgctgggtgactttcattccagttgctgggacggaaggctgaatgtagggtcattttgtatgggatatgcagagctctgggtttttttgttttttgttttttgagacggagtctcgctctgtcgccaggctggagtgcagtggtgcgatctcggctcactgcaacctccgcctcccggttcaagccattcttctgcctcagcctcagcgagtagctgagactaccggcgcacgccaccacgcccagctaattgttttgtatttttagtagagacggggtttcaccatgttggccaggatggtctcgatctcttgacctcgtgatctgcccgcctcggcctcccaaagtgccgagattacaggtgtgagccaccgcgctcggccagagctctgggttttaatcctactttagctgtagaaccttgggcaaataacttcatctttttgggtcctaattttcctcctgtctaactggagggactgtgatccttccaccttggatggaagaggcttacctgacagccagcctgcctgctgggagccaggagagtcagctcattaaatcttgaagaaccgctgtatgccctttttccttctaagtcatgtctgctgcctgtgagcctgggaaggagtgctttcaaaacctgtatttttgccctctttagtaaatttagaactgtagaggctaataaactgcgatgagacatttaaaagctctgctccaaagaagtgaacgactctttcaccaccccttgcatcccaaaccttcggttctggcagagttcttgccgcagaggttccttaggagcaccccgcgcggcccgcgcgagcgcgcatgcgcgtcgaaccccacccccttgccggcgggcctcggttcaaacgacccggtgggtctacagcggaagggagggagcgaaggtaggaggcagggcttgcctcactggccaccctcccaaccccaagagcccagccccatggtccccgccgccggcgcgctgctgtgggtcctgctgctgaatctgggtccccgggcggcgggggcccaaggcctgacccagactccgaccgaaatgcagcgggtcagtttacgctttgggggccccatgacccgcagctaccggagcaccgcccggactggtcttccccggaagacaaggataatcctagaggacgagaatgatgccatggccgacgccgaccgcctggctggaccagcggctgccgagctcttggccgccacggtgtccaccggctttagccggtcgtccgccattaacgaggaggatgggtcttcagaagagggggttgtgattaatgccggaaaggatagcaccagcagagagcttcccagtgcgactcccaatacagcggggagttccagcacgaggtttatagccaatagtcaggagcctgaaatcaggctgacttcaagcctgccgcgctcccccgggaggtctactgaggacctgccaggctcgcaggccaccctgagccagtggtccacacctgggtctaccccgagccggtggccgtcaccctcacccacagccatgccatctcctgaggatctgcggctggtgctgatgccctggggcccgtggcactgccactgcaagtcgggcaccatgagccggagccggtctgggaagctgcacggcctttccgggcgccttcgagttggggcgctgagccagctccgcacggagcacaagccttgcacctatcaacaatgtccctgcaaccgacttcgggaagagtgccccctggacacaagtctctgtactgacaccaactgtgcctctcagagcaccaccagtaccaggaccaccactacccccttccccaccatccacctcagaagcagtcccagcctgccacccgccagcccctgcccagccctggctttttggaaacgggtcaggattggcctggaggatatttggaatagcctctcttcagtgttcacagagatgcaaccaatagacagaaaccagaggtaatggccacttcatccacatgaggagatgaaccacttctccagagggcaagaatggaggagggggacctgtccatcatagcaacatgcaaacacaagcaaaacactgaataaagaattgtttggagattatgtgcagccctactgagcctcatttatatgggctcctagttgatccatggctcgggcttaagatgagtaagatgatgagggtagcgtgccaagcagaaatcacttcagagaaaaatatcttgactttagagttgtggttctcaaatggaggcgattttgccccctaggagaaatctggcaatgtatagagacatttttggttgtcataactagagtgggccaggggtgctgctaaatatcctgtaatgcacaaaataggaaacaggttttccttacaaagaacacttcagcccaaaatgtcaaaggcatctcggttgtgaaaccttgttctagagcctctccctgctcccgtgctgtgaggatcttaagactcctaaactcacagatgattgttttcaacctatttatctcaccatcctcaatgatcagaagtccaccttgagatggacttactcctagttctgccgcattctgggtttctttccagacccctcttcctcctctcacctgggccagcagggaggttggcagagggcaggaaagatgccccaaaacttaaatggaatgtcatcaggtgaagagctacctcttaccttaactcttattcggtgggaaacaaggttcctaatagggatagagttaagggcggaggcaacagcaggatgaggataattaagagaacctgaattaaatttttaatattttaaaaaaggaaagttgctgggaagctggtaaacagaaacagaagattagaggcctaactagaaagagacactggtgttagcagagagatattgaggggctgtaagcctaaggtttgaaatctaaagatagagtggaaaagggagtaggcacccccaccagcccctgcttgacatctgctttagttcattccagcaggaaggaggagaagggcagggaggtagggagcttctcagcaaagccagcttcagctttgataatctcacccacctaccccatttaaggagttccaggtttaagagtttaaaaacaggtggcacccagaccatcattcaggagacaggaactcattccaggttcctagagaactcctatctcagacctgagggtttccagggcttcagctgagctcctctggctaaccagtagtcacttgatcagtcctgctgccttgaccccatctccaggaggggctatggccagagggagtagagggagtccagcccccaagccttgtgaggcactgtta

SEQ ID NO: 288172 - DNA, 4798 bp, Homo sapiens
ctggataaaaggccttagaaccagttagtgatctgcctacacctgaatccctgaaacatctgaactgttttgtaaatcatcttatccccaacctcagtaccaccggatcttcacttctcagtgggattttgtcctttgcatgaccctactttcagcagggctttgaggctgggaaactgatctgctgggtgactttcattccagttgctgggacggaaggctgaatgtagggtcattttgtatgggatatgcagagctctgggtttttttgttttttgttttttgagacggagtctcgctctgtcgccaggctggagtgcagtggtgcgatctcggctcactgcaacctccgcctcccggttcaagccattcttctgcctcagcctcagcgagtagctgagactaccggcgcacgccaccacgcccagctaattgttttgtatttttagtagagacggggtttcaccatgttggccaggatggtctcgatctcttgacctcgtgatctgcccgcctcggcctcccaaagtgccgagattacaggtgtgagccaccgcgctcggccagagctctgggttttaatcctactttagctgtagaaccttgggcaaataacttcatctttttgggtcctaattttcctcctgtctaactggagggactgtgatccttccaccttggatggaagaggcttacctgacagccagcctgcctgctgggagccaggagagtcagctcattaaatcttgaagaaccgctgtatgccctttttccttctaagtcatgtctgctgcctgtgagcctgggaaggagtgctttcaaaacctgtatttttgccctctttagtaaatttagaactgtagaggctaataaactgcgatgagacatttaaaagctctgctccaaagaagtgaacgactctttcaccaccccttgcatcccaaaccttcggttctggcagagttcttgccgcagaggttccttaggagcaccccgcgcggcccgcgcgagcgcgcatgcgcgtcgaaccccacccccttgccggcgggcctcggttcaaacgacccggtgggtctacagcggaagggagggagcgaaggtaggaggcagggcttgcctcactggccaccctcccaaccccaagagcccagccccatggtccccgccgccggcgcgctgctgtgggtcctgctgctgaatctgggtccccgggcggcgggggcccaaggcctgacccagactccgaccgaaatgcagcgggtcagtttacgctttgggggccccatgacccgcagctaccggagcaccgcccggactggtcttccccggaagacaaggataatcctagaggacgagaatgatgccatggccgacgccgaccgcctggctggaccagcggctgccgagctcttggccgccacggtgtccaccggctttagccggtcgtccgccattaacgaggaggatgggtcttcagaagagggggttgtgattaatgccggaaaggatagcaccagcagagagcttcccagtgcgactcccaatacagcggggagttccagcacgaggtttatagccaatagtcaggagcctgaaatcaggctgacttcaagcctgccgcgctcccccgggaggtctactgaggacctgagccatgccatctcctgaggatctgcggctggtgctgatgccctttccgggcgccttcgagttggggcgctgagccagctccgcacggagcacaagccttgcacctatcaacaatgtccctgcaaccgacttcgggaagagtgccccctggacacaagtctctgtactgacaccaactgtgcctctcagagcaccaccagtaccaggaccaccactacccccttccccaccatccacctcagaagcagtcccagcctgccacccgccagcccctgcccagccctggctttttggaaacgggtcaggattggcctggaggatatttggaatagcctctcttcagtgttcacagagatgcaaccaatagacagaaaccagaggtaatggccacttcatccacatgaggagatgtcagtatctcaacctctcttgccctttcaatcctagcacccactagatatttttagtacagaaaaacaaaactggaaaacacattgtttggtcttgtgtttctttacagaggtacctgagggaggagagacataaatcccttcatccctaagactgaactatgtaactagcagcctctggcttgttttctactccctgtccctcaggataaaatgttgatattgctcattttcctcatttccaacattgttttaaaacaagtacttcttttacaggcttgaaaaatctcaaataaacgctaagaaaagggagtaggaagaacaaggagttgagcccttgaaagatgacagtggtcttcttgccttcatgcttggccctctctcctcaaaagggcaatgttggtacaaaattccatctcagccactttcgaggagttatcttcattagctatatccatcctttaatccaacacacacctgcaatgattactgtgcaactattttgcttaattttttatttgaaaaaatgtatttaaaagtccaacaactttttaatataaattacgactctcaaacccattcccatcactttattagtgatggtagcatacatattagagaaggtagctaaaggcaagagagcaccaaaggaaaaagactgtccaaagaacaggtattagaatgaggccgaagatcacggtgaccagagatttctaggagtctctaacctttccaccctatcctgttaaccctttagatctctagtataacactcaggctactgaggtattttagagcaacaagctgggttactttcagagcaaccagcttgactggaactgagagtaaattgggaatgtatgaccaatcttagaccctgaaaaatggcagaaaatacatggaaatttgaaaaaaaaaaaaaaaaaaaaaaaaaaaaaaaagaacctcagtcactgttctgtagggataagcaaactgaatgggtggtggaattggcagaatggataccagttcctacattcctgaccccactaccataaaacaggatgtttcctgttgcaaagctaatgagaccccacccttcttgtctcagagcaggcaggagctcatctgtcttgttctgccttcctaattaccctggaagggccagaacgaagaacacctgagaatactgaaagtgcctaaaaacccctgctcctacgttgttttcccatttaaagcagactcttcagccagggggcagtgggacctggtcttcagacaaaactccctgagtctaatgtgtgtctaggactagggcacagaaatagagcttaaaatttggggaggataaggagtgtatctactgcttctctctcccctttccccaatcctaccataccctgttcatatctctacactgcaggaaccacttctccagagggcaagaatggaggagggggacctgtccatcatagcaacatgcaaacacaagcaaaacactgaataaagaattgtttggagattatgtgcagccctactgagcctcatttatatgggctcctagttgatccatggctcgggcttaagatgagtaagatgatgagggtagcgtgccaagcagaaatcacttcagagaaaaatatcttgactttagagttgtggttctcaaatggaggcgattttgccccctaggagaaatctggcaatgtatagagacatttttggttgtcataactagagtgggccaggggtgctgctaaatatcctgtaatgcacaaaataggaaacaggttttccttacaaagaacacttcagcccaaaatgtcaaaggcatctcggttgtgaaaccttgttctagagcctctccctgctcccgtgctgtgaggatcttaagactcctaaactcacagatgattgttttcaacctatttatctcaccatcctcaatgatcagaagtccaccttgagatggacttactcctagttctgccgcattctgggtttctttccagacccctcttcctcctctcacctgggccagcagggaggttggcagagggcaggaaagatgccccaaaacttaaatggaatgtcatcaggtgaagagctacctcttaccttaactcttattcggtgggaaacaaggttcctaatagggatagagttaagggcggaggcaacagcaggatgaggataattaagagaacctgaattaaatttttaatattttaaaaaaggaaagttgctgggaagctggtaaacagaaacagaagattagaggcctaactagaaagagacactggtgttagcagagagatattgaggggctgtaagcctaaggtttgaaatctaaagatagagtggaaaagggagtaggcacccccaccagcccctgcttgacatctgctttagttcattccagcaggaaggaggagaagggcagggaggtagggagcttctcagcaaagccagcttcagctttgataatctcacccacctaccccatttaaggagttccaggtttaagagtttaaaaacaggtggcacccagaccatcattcaggagacaggaactcattccaggttcctagagaactcctatctcagacctgagggtttccagggcttcagctgagctcctctggctaaccagtagtcacttgatcagtcctgctgccttgaccccatctccaggaggggctatggccagagggagtagagggagtccagcccccaagccttgtgaggcactgtta

SEQ ID NO: 288173 - DNA, 4869 bp, Homo sapiens
ctggataaaaggccttagaaccagttagtgatctgcctacacctgaatccctgaaacatctgaactgttttgtaaatcatcttatccccaacctcagtaccaccggatcttcacttctcagtgggattttgtcctttgcatgaccctactttcagcagggctttgaggctgggaaactgatctgctgggtgactttcattccagttgctgggacggaaggctgaatgtagggtcattttgtatgggatatgcagagctctgggtttttttgttttttgttttttgagacggagtctcgctctgtcgccaggctggagtgcagtggtgcgatctcggctcactgcaacctccgcctcccggttcaagccattcttctgcctcagcctcagcgagtagctgagactaccggcgcacgccaccacgcccagctaattgttttgtatttttagtagagacggggtttcaccatgttggccaggatggtctcgatctcttgacctcgtgatctgcccgcctcggcctcccaaagtgccgagattacaggtgtgagccaccgcgctcggccagagctctgggttttaatcctactttagctgtagaaccttgggcaaataacttcatctttttgggtcctaattttcctcctgtctaactggagggactgtgatccttccaccttggatggaagaggcttacctgacagccagcctgcctgctgggagccaggagagtcagctcattaaatcttgaagaaccgctgtatgccctttttccttctaagtcatgtctgctgcctgtgagcctgggaaggagtgctttcaaaacctgtatttttgccctctttagtaaatttagaactgtagaggctaataaactgcgatgagacatttaaaagctctgctccaaagaagtgaacgactctttcaccaccccttgcatcccaaaccttcggttctggcagagttcttgccgcagaggttccttaggagcaccccgcgcggcccgcgcgagcgcgcatgcgcgtcgaaccccacccccttgccggcgggcctcggttcaaacgacccggtgggtctacagcggaagggagggagcgaaggtaggaggcagggcttgcctcactggccaccctcccaaccccaagggcccaaggcctgacccagactccgaccgaaatgcagcgggtcagtttacgctttgggggccccatgacccgcagctaccggagcaccgcccggactggtcttccccggaagacaaggataatcctagaggacgagaatgatgccatggccgacgccgaccgcctggctggaccagcggctgccgagctcttggccgccacggtgtccaccggctttagccggtcgtccgccattaacgaggaggatgggtcttcagaagagggggttgtgattaatgccggaaaggatagcaccagcagagagcttcccagtgcgactcccaatacagcggggagttccagcacgaggtttatagccaatagtcaggagcctgaaatcaggctgacttcaagcctgccgcgctcccccgggaggtctactgaggacctgccaggctcgcaggccaccctgagccagtggtccacacctgggtctaccccgagccggtggccgtcaccctcacccacagccatgccatctcctgaggatctgcggctggtgctgatgccctggggcccgtggcactgccactgcaagtcgggcaccatgagccggagccggtctgggaagctgcacggcctttccgggcgccttcgagttggggcgctgagccagctccgcacggagcacaagccttgcacctatcaacaatgtccctgcaaccgacttcgggaagagtgccccctggacacaagtctctgtactgacaccaactgtgcctctcagagcaccaccagtaccaggaccaccactacccccttccccaccatccacctcagaagcagtcccagcctgccacccgccagcccctgcccagccctggctttttggaaacgggtcaggattggcctggaggatatttggaatagcctctcttcagtgttcacagagatgcaaccaatagacagaaaccagaggtaatggccacttcatccacatgaggagatgtcagtatctcaacctctcttgccctttcaatcctagcacccactagatatttttagtacagaaaaacaaaactggaaaacacattgtttggtcttgtgtttctttacagaggtacctgagggaggagagacataaatcccttcatccctaagactgaactatgtaactagcagcctctggcttgttttctactccctgtccctcaggataaaatgttgatattgctcattttcctcatttccaacattgttttaaaacaagtacttcttttacaggcttgaaaaatctcaaataaacgctaagaaaagggagtaggaagaacaaggagttgagcccttgaaagatgacagtggtcttcttgccttcatgcttggccctctctcctcaaaagggcaatgttggtacaaaattccatctcagccactttcgaggagttatcttcattagctatatccatcctttaatccaacacacacctgcaatgattactgtgcaactattttgcttaattttttatttgaaaaaatgtatttaaaagtccaacaactttttaatataaattacgactctcaaacccattcccatcactttattagtgatggtagcatacatattagagaaggtagctaaaggcaagagagcaccaaaggaaaaagactgtccaaagaacaggtattagaatgaggccgaagatcacggtgaccagagatttctaggagtctctaacctttccaccctatcctgttaaccctttagatctctagtataacactcaggctactgaggtattttagagcaacaagctgggttactttcagagcaaccagcttgactggaactgagagtaaattgggaatgtatgaccaatcttagaccctgaaaaatggcagaaaatacatggaaatttgaaaaaaaaaaaaaaaaaaaaaaaaaaaaaaaagaacctcagtcactgttctgtagggataagcaaactgaatgggtggtggaattggcagaatggataccagttcctacattcctgaccccactaccataaaacaggatgtttcctgttgcaaagctaatgagaccccacccttcttgtctcagagcaggcaggagctcatctgtcttgttctgccttcctaattaccctggaagggccagaacgaagaacacctgagaatactgaaagtgcctaaaaacccctgctcctacgttgttttcccatttaaagcagactcttcagccagggggcagtgggacctggtcttcagacaaaactccctgagtctaatgtgtgtctaggactagggcacagaaatagagcttaaaatttggggaggataaggagtgtatctactgcttctctctcccctttccccaatcctaccataccctgttcatatctctacactgcaggaaccacttctccagagggcaagaatggaggagggggacctgtccatcatagcaacatgcaaacacaagcaaaacactgaataaagaattgtttggagattatgtgcagccctactgagcctcatttatatgggctcctagttgatccatggctcgggcttaagatgagtaagatgatgagggtagcgtgccaagcagaaatcacttcagagaaaaatatcttgactttagagttgtggttctcaaatggaggcgattttgccccctaggagaaatctggcaatgtatagagacatttttggttgtcataactagagtgggccaggggtgctgctaaatatcctgtaatgcacaaaataggaaacaggttttccttacaaagaacacttcagcccaaaatgtcaaaggcatctcggttgtgaaaccttgttctagagcctctccctgctcccgtgctgtgaggatcttaagactcctaaactcacagatgattgttttcaacctatttatctcaccatcctcaatgatcagaagtccaccttgagatggacttactcctagttctgccgcattctgggtttctttccagacccctcttcctcctctcacctgggccagcagggaggttggcagagggcaggaaagatgccccaaaacttaaatggaatgtcatcaggtgaagagctacctcttaccttaactcttattcggtgggaaacaaggttcctaatagggatagagttaagggcggaggcaacagcaggatgaggataattaagagaacctgaattaaatttttaatattttaaaaaaggaaagttgctgggaagctggtaaacagaaacagaagattagaggcctaactagaaagagacactggtgttagcagagagatattgaggggctgtaagcctaaggtttgaaatctaaagatagagtggaaaagggagtaggcacccccaccagcccctgcttgacatctgctttagttcattccagcaggaaggaggagaagggcagggaggtagggagcttctcagcaaagccagcttcagctttgataatctcacccacctaccccatttaaggagttccaggtttaagagtttaaaaacaggtggcacccagaccatcattcaggagacaggaactcattccaggttcctagagaactcctatctcagacctgagggtttccagggcttcagctgagctcctctggctaaccagtagtcacttgatcagtcctgctgccttgaccccatctccaggaggggctatggccagagggagtagagggagtccagcccccaagccttgtgaggcactgtta

SEQ ID NO: 288174 - DNA, 4599 bp, Homo sapiens
ctggataaaaggccttagaaccagttagtgatctgcctacacctgaatccctgaaacatctgaactgttttgtaaatcatcttatccccaacctcagtaccaccggatcttcacttctcagtgggattttgtcctttgcatgaccctactttcagcagggctttgaggctgggaaactgatctgctgggtgactttcattccagttgctgggacggaaggctgaatgtagggtcattttgtatgggatatgcagagctctgggtttttttgttttttgttttttgagacggagtctcgctctgtcgccaggctggagtgcagtggtgcgatctcggctcactgcaacctccgcctcccggttcaagccattcttctgcctcagcctcagcgagtagctgagactaccggcgcacgccaccacgcccagctaattgttttgtatttttagtagagacggggtttcaccatgttggccaggatggtctcgatctcttgacctcgtgatctgcccgcctcggcctcccaaagtgccgagattacaggtgtgagccaccgcgctcggccagagctctgggttttaatcctactttagctgtagaaccttgggcaaataacttcatctttttgggtcctaattttcctcctgtctaactggagggactgtgatccttccaccttggatggaagaggcttacctgacagccagcctgcctgctgggagccaggagagtcagctcattaaatcttgaagaaccgctgtatgccctttttccttctaagtcatgtctgctgcctgtgagcctgggaaggagtgctttcaaaacctgtatttttgccctctttagtaaatttagaactgtagaggctaataaactgcgatgagacatttaaaagctctgctccaaagaagtgaacgactctttcaccaccccttgcatcccaaaccttcggttctggcagagttcttgccgcagaggttccttaggagcaccccgcgcggcccgcgcgagcgcgcatgcgcgtcgaaccccacccccttgccggcgggcctcggttcaaacgacccggtgggtctacagcggaagggagggagcgaaggtaggaggcagggcttgcctcactggccaccctcccaaccccaagagcccagccccatggtccccgccgccggcgcgctgctgtgggtcctgctgctgaatctgggtccccgggcggcgggggcccaaggcctgacccagactccgaccgaaatgcagcgggtcagtttacgctttgggggccccatgacccgcagctaccggagcaccgcccggactggtcttccccggaagacaaggataatcctagaggacgagaatgatgccatggccgacgccgaccgcctggctggaccagcggctgccgagctcttggccgccacggtgtccaccggctttagccggtcgtccgccattaacgaggaggatgggtcttcagaagagggggttgtgattaatgccggaaaggatagcaccagcagagagcttcccagtgcgactcccaatacagcggggagttccagcacgaggtttatagccaatagtcaggagcctgaaatcaggctgacttcaagcctgccgcgctcccccgggaggtctactgaggacctgccaggctcgcaggccaccctgagccagtggtccacacctgggtctaccccgagccggtggccgtcaccctcacccacccagccctggctttttggaaacgggtcaggattggcctggaggatatttggaatagcctctcttcagtgttcacagagatgcaaccaatagacagaaaccagaggtaatggccacttcatccacatgaggagatgtcagtatctcaacctctcttgccctttcaatcctagcacccactagatatttttagtacagaaaaacaaaactggaaaacacattgtttggtcttgtgtttctttacagaggtacctgagggaggagagacataaatcccttcatccctaagactgaactatgtaactagcagcctctggcttgttttctactccctgtccctcaggataaaatgttgatattgctcattttcctcatttccaacattgttttaaaacaagtacttcttttacaggcttgaaaaatctcaaataaacgctaagaaaagggagtaggaagaacaaggagttgagcccttgaaagatgacagtggtcttcttgccttcatgcttggccctctctcctcaaaagggcaatgttggtacaaaattccatctcagccactttcgaggagttatcttcattagctatatccatcctttaatccaacacacacctgcaatgattactgtgcaactattttgcttaattttttatttgaaaaaatgtatttaaaagtccaacaactttttaatataaattacgactctcaaacccattcccatcactttattagtgatggtagcatacatattagagaaggtagctaaaggcaagagagcaccaaaggaaaaagactgtccaaagaacaggtattagaatgaggccgaagatcacggtgaccagagatttctaggagtctctaacctttccaccctatcctgttaaccctttagatctctagtataacactcaggctactgaggtattttagagcaacaagctgggttactttcagagcaaccagcttgactggaactgagagtaaattgggaatgtatgaccaatcttagaccctgaaaaatggcagaaaatacatggaaatttgaaaaaaaaaaaaaaaaaaaaaaaaaaaaaaaagaacctcagtcactgttctgtagggataagcaaactgaatgggtggtggaattggcagaatggataccagttcctacattcctgaccccactaccataaaacaggatgtttcctgttgcaaagctaatgagaccccacccttcttgtctcagagcaggcaggagctcatctgtcttgttctgccttcctaattaccctggaagggccagaacgaagaacacctgagaatactgaaagtgcctaaaaacccctgctcctacgttgttttcccatttaaagcagactcttcagccagggggcagtgggacctggtcttcagacaaaactccctgagtctaatgtgtgtctaggactagggcacagaaatagagcttaaaatttggggaggataaggagtgtatctactgcttctctctcccctttccccaatcctaccataccctgttcatatctctacactgcaggaaccacttctccagagggcaagaatggaggagggggacctgtccatcatagcaacatgcaaacacaagcaaaacactgaataaagaattgtttggagattatgtgcagccctactgagcctcatttatatgggctcctagttgatccatggctcgggcttaagatgagtaagatgatgagggtagcgtgccaagcagaaatcacttcagagaaaaatatcttgactttagagttgtggttctcaaatggaggcgattttgccccctaggagaaatctggcaatgtatagagacatttttggttgtcataactagagtgggccaggggtgctgctaaatatcctgtaatgcacaaaataggaaacaggttttccttacaaagaacacttcagcccaaaatgtcaaaggcatctcggttgtgaaaccttgttctagagcctctccctgctcccgtgctgtgaggatcttaagactcctaaactcacagatgattgttttcaacctatttatctcaccatcctcaatgatcagaagtccaccttgagatggacttactcctagttctgccgcattctgggtttctttccagacccctcttcctcctctcacctgggccagcagggaggttggcagagggcaggaaagatgccccaaaacttaaatggaatgtcatcaggtgaagagctacctcttaccttaactcttattcggtgggaaacaaggttcctaatagggatagagttaagggcggaggcaacagcaggatgaggataattaagagaacctgaattaaatttttaatattttaaaaaaggaaagttgctgggaagctggtaaacagaaacagaagattagaggcctaactagaaagagacactggtgttagcagagagatattgaggggctgtaagcctaaggtttgaaatctaaagatagagtggaaaagggagtaggcacccccaccagcccctgcttgacatctgctttagttcattccagcaggaaggaggagaagggcagggaggtagggagcttctcagcaaagccagcttcagctttgataatctcacccacctaccccatttaaggagttccaggtttaagagtttaaaaacaggtggcacccagaccatcattcaggagacaggaactcattccaggttcctagagaactcctatctcagacctgagggtttccagggcttcagctgagctcctctggctaaccagtagtcacttgatcagtcctgctgccttgaccccatctccaggaggggctatggccagagggagtagagggagtccagcccccaagccttgtgaggcactgtta

SEQ ID NO: 288175 - DNA, 701 bp, Homo sapiens
tcacgtgcctgcgccggcagcgctcccactttcctgtccggtgcggccccgggtccctgtattttgggtccggcctgctcgccgtccgctccgtccgcccttagacctgttgcccagcatccctgcagttcgcggtacagtctctagtagagcgcgtgtatagaggcagagaggagtgaagtccacagttcctctcctccaagagcctgccgaccatgcccgcgggcgtgcccatgtccacctacctgaaaatgttcgcagccagtctcctggccatgtgcgcaggggcagaagtggtgcacaggtactaccgaccggacctgacaatacctgaaattccaccaaagcgtggagaactcaaaacggagcttttgggactgaaagaaagaaaacacaaacctcaagtttctcaacaggaggaacttaaataactatgccaagaattctgtgaataatataagtcttaaatatgtatttcttaatttattgcatcaaactacttgtccttaagcacttagtctaatgctaactgcaagaggaggtgctcagtggatgtttagccgatacgttgaaatttaattacggtttgattgatatttcttgaaaactgccaaagcacatatcatcaaaccatttcatgaatatggtttggaagatgtttagtcttgaatataatgcgaaatagaatatttgtaagtcta

SEQ ID NO: 288176 - DNA, 1530 bp, Homo sapiens
tcacgtgcctgcgccggcagcgctcccactttcctgtccggtgcggccccgggtccctgtattttgggtccggcctgctcgccgtccgctccgtccgcccttagacctgttgcccagcatccctgcagttcgcggtacagtctctagtagagcgcgtgtatagaggcagagaggagtgaagtccacagttcctctcctccaagaggtagaaggggcgcggggaaacgacctggtatcggttttccgcttgctgatcaagagctccctttaatgccgcacgcaggccggcgcccctcactgataaacgattggggctgggcctcggcctggagggcgttcgtcctctcagtgccctcagctcgtaaaggaggaaaccgaggcgtggggttgggcgagaacccaggggtcctcctgcacccccgccgccgtgtgtctcgtgtccagcgctggctggagcgcctcagccctggcgcggtgtagtcgtgagctggaacttctgacactgccccttccttccccgtccagcctgccgaccatgcccgcgggcgtgcccatgtccacctacctgaaaatgttcgcagccagtctcctggccatgtgcgcaggggcagaagtggtgcacaggtactaccgaccggacctgacaatacctgaaattccaccaaagcgtggagaactcaaaacggagcttttgggactgaaagaaagaaaacacaaacctcaagtttctcaacaggaggaacttaaataactatgccaagaattctgtgaataatataagtcttaaatatgtatttcttaatttattgcatcaaactacttgtccttaagcacttagtctaatgctaactgcaagaggaggtgctcagtggatgtttagccgatacgttgaaatttaattacggtttgattgatatttcttgaaaactgccaaagcacatatcatcaaaccatttcatgaatatggtttggaagatgtttagtcttgaatataatgcgaaatagaatatttgtaagtctactatatgggttgtctttatttcatataaattaagaaattatttaaaactatgaactagtttcattaattgaatttgctaagtggagttatttctcattgctaaactgttttttttcaaattctagatctctgctaactttagtaaatgaacactaaagtggtgagctttgataatgcattttgtggatacaaaatcatcgcctcatcactttctagaatgaaaggctgggggcattgctcaccttttgcgtgaagaaaagacctgtcccttagagccagtttttgcttaaggggaggacagaccgtcgtcacccagtggaccacgtgaatgaatggatgcagtgcatgctttagaagcaccgcatacctccttttacaggtacagagtaagtggtctggctactgagggaaagagtcatgatttgaatccgagtcttctgtaagacaatgacttcatgaaggtgaaaaatcagttttatggttattaaagtaaaaatttaccttgggta

SEQ ID NO: 288177 - DNA, 744 bp, Homo sapiens
acgcagaagacggggactaggagcgctctgccgacgtcagcttttgtctccagtattttcgggggctggtggacgcgtgggcgatagggtgctgtccttggggtgctgtgtatatgggatgatgacgcttatcagcattatctagtcctttccaccccgaaattcgccccgattaaagactgtgttgcattatcaggtaatgagatgtgagggagggtctttgaaagtggaaaacctgggcgtcgaggccactgtgccatcttgggcctcagtttccttatctgtgaaatgagggtgaatgtaaagctgctatgtaaaatgtaaagctctacataaaccactctctgcattactttggatatatgagaatattaacgtttgacgtctacgagactagatcccattcgagcatcacctcccataaccttacagactaacccctcttttaaatctcagtggttcgtaatcttacagactaacccctcttttatgtctcagtggttcttgcagctggcttttgtttcattagttctcaatttctgtcactggtgtttgtactttattaaggaactcttaatggaataggcttttgggtttttctagtttgcaggatgatgaaaaacatggctgctgtatttgttggctttcctgagtttattcatatagtaacaggtaactccaaaccttcagtggtttacagccacagaagtttatttctcactcacgtgatctgtgagctgggag

SEQ ID NO: 288178 - DNA, 2066 bp, Homo sapiens
  misc_feature (1691)..(1691): n is a, c, g, or t
  misc_feature (1858)..(1858): n is a, c, g, or t
tcacgtgcctgcgccggcagcgctcccactttcctgtccggtgcggccccgggtccctgtattttgggtccggcctgctcgccgtccgctccgtccgcccttagacctgttgcccagcatccctgcagttcgcggtacagtctctagtagagcgcgtgtatagaggcagagaggagtgaagtccacagttcctctcctccaagaggtagaaggggcgcggggaaacgacctggtatcggttttccgcttgctgatcaagagctccctttaatgccgcacgcaggccggcgcccctcactgataaacgattggggctgggcctcggcctggagggcgttcgtcctctcagtgccctcagctcgtaaaggaggaaaccgaggcgtggggttgggcgagaacccaggggtcctcctgcacccccgccgccgtgtgtctcgtgtccagcgctggctggagcgcctcagccctggcgcggtgtagtcgtgagctggaacttctgacactgccccttccttccccgtccagcctgccgaccatgcccgcgggcgtgcccatgtccacctacctgaaaatgttcgcagccagtctcctggccatgtgcgcaggggcagaagtggtgcacaggtactaccgaccggacctgacaatacctgaaattccaccaaagcgtggagaactcaaaacggagcttttgggactgaaagaaagaaaacacaaacctcaagtttctcaacaggaggaacttaaataactatgccaagaattctgtgaataatataagtcttaaatatgtatttcttaatttattgcatcaaactacttgtccttaagcacttagtctaatgctaactgcaagaggaggtgctcagtggatgtttagccgatacgttgaaatttaattacggtttgattgatatttcttgaaaactgccaaagcacatatcatcaaaccatttcatgaatatggtttggaagatgtttagtcttgaatataatgcgaaatagaatatttgtaagtctactatatgggttgtctttatttcatataaattaagaaattatttaaaactatgaactagtttcattaattgaatttgctaagtggagttatttctcattgctaaactgttttttttcaaattctagatctctgctaactttagtaaatgaacactaaagtggtgagctttgataatgcattttgtggatacaaaatcatcgcctcatcactttctagaatgaaaggctgggggcattgctcaccttttgcgtgaagaaaagacctgtcccttagagccagtttttgcttaaggggaggacagaccgtcgtcacccagtggaccacgtgaatgaatggatgcagtgcatgctttagaagcaccgcatacctccttttacaggtacagagtaagtggtctggctactgagggaaagagtcatgatttgaatccgagtcttctgtaagacaatgacttcatgaaggtgaaaaatcagttttatggttattaaagtaaaaatttaccttgggtaaaaatgccatctttatttcattaagtactggttctaagtgacttccaataagatacattttcttcctgttttgaagttgatccccattgtgaaaaatatacattgtagtggtcatggaaatgcgccatccatactccctaaggcaggcttgttgccctagnatcaagcatgccagcagctttcaatggtcagcttctagaaggattgcctcggctatggtggccttgctcaaagccatgcctcctgaaggggcccaaatccagtgactgttggaggtgagaatagaaaggcctggccacttcagcacgtgagtggtgggcaactctgntgggcccaccacaactccctatggggtttagggacactgtctttggatctgcattgcaactcaacttatacctctgctcagtcctgtttcctttctcaggtgttgatcgaagggtgtgccttcatagaccccctgctaaactgcacctcagtgtttcttggagaaccaaatctgtaacatatatgcattaaaaattaaaggcagtact

SEQ ID NO: 288179 - DNA, 1210 bp, Homo sapiens
tcacgtgcctgcgccggcagcgctcccactttcctgtccggtgcggccccgggtccctgtattttgggtccggcctgctcgccgtccgctccgtccgcccttagacctgttgcccagcatccctgcagttcgcggtacagtctctagtagagcgcgtgtatagaggcagagaggagtgaagtccacagttcctctcctccaagagcctgccgaccatgcccgcgggcgtgcccatgtccacctacctgaaaatgttcgcagccagtctcctggccatgtgcgcaggggcagaagtggtgcacaggtactaccgaccggacctgacaatacctgaaattccaccaaagcgtggagaactcaaaacggagcttttgggactgaaagaaagaaaacacaaacctcaagtttctcaacaggaggaacttaaataactatgccaagaattctgtgaataatataagtcttaaatatgtatttcttaatttattgcatcaaactacttgtccttaagcacttagtctaatgctaactgcaagaggaggtgctcagtggatgtttagccgatacgttgaaatttaattacggtttgattgatatttcttgaaaactgccaaagcacatatcatcaaaccatttcatgaatatggtttggaagatgtttagtcttgaatataatgcgaaatagaatatttgtaagtctactatatgggttgtctttatttcatataaattaagaaattatttaaaactatgaactagtttcattaattgaatttgctaagtggagttatttctcattgctaaactgttttttttcaaattctagatctctgctaactttagtaaatgaacactaaagtggtgagctttgataatgcattttgtggatacaaaatcatcgcctcatcactttctagaatgaaaggctgggggcattgctcaccttttgcgtgaagaaaagacctgtcccttagagccagtttttgcttaaggggaggacagaccgtcgtcacccagtggaccacgtgaatgaatggatgcagtgcatgctttagaagcaccgcatacctccttttacaggtacagagtaagtggtctggctactgagggaaagagtcatgatttgaatccgagtcttctgtaagacaatgacttcatgaaggtgaaaaatcagttttatggttattaaagtaaaaatttaccttgggta

SEQ ID NO: 288180 - DNA, 1139 bp, Homo sapiens
tcacgtgcctgcgccggcagcgctcccactttcctgtccggtgcggccccgggtccctgtattttgggtccggcctgctcgccgtccgctccgtccgcccttagacctgttgcccagcatccctgcagttcgcgcctgccgaccatgcccgcgggcgtgcccatgtccacctacctgaaaatgttcgcagccagtctcctggccatgtgcgcaggggcagaagtggtgcacaggtactaccgaccggacctgacaatacctgaaattccaccaaagcgtggagaactcaaaacggagcttttgggactgaaagaaagaaaacacaaacctcaagtttctcaacaggaggaacttaaataactatgccaagaattctgtgaataatataagtcttaaatatgtatttcttaatttattgcatcaaactacttgtccttaagcacttagtctaatgctaactgcaagaggaggtgctcagtggatgtttagccgatacgttgaaatttaattacggtttgattgatatttcttgaaaactgccaaagcacatatcatcaaaccatttcatgaatatggtttggaagatgtttagtcttgaatataatgcgaaatagaatatttgtaagtctactatatgggttgtctttatttcatataaattaagaaattatttaaaactatgaactagtttcattaattgaatttgctaagtggagttatttctcattgctaaactgttttttttcaaattctagatctctgctaactttagtaaatgaacactaaagtggtgagctttgataatgcattttgtggatacaaaatcatcgcctcatcactttctagaatgaaaggctgggggcattgctcaccttttgcgtgaagaaaagacctgtcccttagagccagtttttgcttaaggggaggacagaccgtcgtcacccagtggaccacgtgaatgaatggatgcagtgcatgctttagaagcaccgcatacctccttttacaggtacagagtaagtggtctggctactgagggaaagagtcatgatttgaatccgagtcttctgtaagacaatgacttcatgaaggtgaaaaatcagttttatggttattaaagtaaaaatttaccttgggta

SEQ ID NO: 288181 - DNA, 1201 bp, Homo sapiens
acgcagaagacggggactaggagcgctctgccgacgtcagcttttgtctccagtattttcgggggctggtggacgcgtgggcgatagggtgctgtccttggggtgctgtgtatatgggatgatgacgcttatcagcattatctagtcctttccaccccgaaattcgccccgattaaagactgtgttgcattatcagcctgccgaccatgcccgcgggcgtgcccatgtccacctacctgaaaatgttcgcagccagtctcctggccatgtgcgcaggggcagaagtggtgcacaggtactaccgaccggacctgacaatacctgaaattccaccaaagcgtggagaactcaaaacggagcttttgggactgaaagaaagaaaacacaaacctcaagtttctcaacaggaggaacttaaataactatgccaagaattctgtgaataatataagtcttaaatatgtatttcttaatttattgcatcaaactacttgtccttaagcacttagtctaatgctaactgcaagaggaggtgctcagtggatgtttagccgatacgttgaaatttaattacggtttgattgatatttcttgaaaactgccaaagcacatatcatcaaaccatttcatgaatatggtttggaagatgtttagtcttgaatataatgcgaaatagaatatttgtaagtctactatatgggttgtctttatttcatataaattaagaaattatttaaaactatgaactagtttcattaattgaatttgctaagtggagttatttctcattgctaaactgttttttttcaaattctagatctctgctaactttagtaaatgaacactaaagtggtgagctttgataatgcattttgtggatacaaaatcatcgcctcatcactttctagaatgaaaggctgggggcattgctcaccttttgcgtgaagaaaagacctgtcccttagagccagtttttgcttaaggggaggacagaccgtcgtcacccagtggaccacgtgaatgaatggatgcagtgcatgctttagaagcaccgcatacctccttttacaggtacagagtaagtggtctggctactgagggaaagagtcatgatttgaatccgagtcttctgtaagacaatgacttcatgaaggtgaaaaatcagttttatggttattaaagtaaaaatttaccttgggta

SEQ ID NO: 288182 - DNA, 1204 bp, Homo sapiens
acgcagaagacggggactaggagcgctctgccgacgtcagcttttgtctccagtattttcgggggctggtggacgcgtgggcgatagggtgctgtccttggggtgctgtgtatatgggatgatgacgcttatcagcattatctagtcctttccaccccgaaattcgccccgattaaagactgtgttgcattatcagcaaaactggatcacaagtctttcggtcggagaactggaaggtctgggcagagtcgagcagaggagaccatgatgactgcctagacttgtgctcagtgctgtgttggggagaactgctacagacaatacctgaaattccaccaaagcgtggagaactcaaaacggagcttttgggactgaaagaaagaaaacacaaacctcaagtttctcaacaggaggaacttaaataactatgccaagaattctgtgaataatataagtcttaaatatgtatttcttaatttattgcatcaaactacttgtccttaagcacttagtctaatgctaactgcaagaggaggtgctcagtggatgtttagccgatacgttgaaatttaattacggtttgattgatatttcttgaaaactgccaaagcacatatcatcaaaccatttcatgaatatggtttggaagatgtttagtcttgaatataatgcgaaatagaatatttgtaagtctactatatgggttgtctttatttcatataaattaagaaattatttaaaactatgaactagtttcattaattgaatttgctaagtggagttatttctcattgctaaactgttttttttcaaattctagatctctgctaactttagtaaatgaacactaaagtggtgagctttgataatgcattttgtggatacaaaatcatcgcctcatcactttctagaatgaaaggctgggggcattgctcaccttttgcgtgaagaaaagacctgtcccttagagccagtttttgcttaaggggaggacagaccgtcgtcacccagtggaccacgtgaatgaatggatgcagtgcatgctttagaagcaccgcatacctccttttacaggtacagagtaagtggtctggctactgagggaaagagtcatgatttgaatccgagtcttctgtaagacaatgacttcatgaaggtgaaaaatcagttttatggttattaaagtaaaaatttaccttgggta

SEQ ID NO: 288183 - DNA, 1021 bp, Homo sapiens
tcacgtgcctgcgccggcagcgctcccactttcctgtccggtgcggccccgggtccctgtattttgggtccggcctgctcgccgtccgctccgtccgcccttagacctgttgcccagcatccctgcagttcgcggtacagtctctagtagagcgcgtgtatagaggcagagaggagtgaagtccacagttcctctcctccaagaggtagaaggggcgcggggaaacgacctggtatcggttttccgcttgctgatcaagagctccctttaatgccgcacgcaggccggcgcccctcactgataaacgattggggctgggcctcggcctggagggcgttcgtcctctcagtgccctcagctcgtaaaggaggaaaccgaggcgtggggttgggcgagaacccaggggtcctcctgcacccccgccgccgtgtgtctcgtgtccagcgctggctggagcgcctcagccctggcgcggtgtagtcgtgagctggaacttctgacactgccccttccttccccgtccagcctgccgaccatgcccgcgggcgtgcccatgtccacctacctgaaaatgttcgcagccagtctcctggccatgtgcgcaggggcagaagtggtgcacaggtactaccgaccggacctgacaatacctgaaattccaccaaagcgtggagaactcaaaacggagcttttgggactgaaagaaagaaaacacaaacctcaagtttctcaacaggaggaacttaaataactatgccaagaattctgtgaataatataagtcttaaatatgtatttcttaatttattgcatcaaactacttgtccttaagcacttagtctaatgctaactgcaagaggaggtgctcagtggatgtttagccgatacgttgaaatttaattacggtttgattgatatttcttgaaaactgccaaagcacatatcatcaaaccatttcatgaatatggtttggaagatgtttagtcttgaatataatgcgaaatagaatatttgtaagtcta

SEQ ID NO: 288184 - DNA, 1476 bp, Homo sapiens
tcacgtgcctgcgccggcagcgctcccactttcctgtccggtgcggccccgggtccctgtattttgggtccggcctgctcgccgtccgctccgtccgcccttagacctgttgcccagcatccctgcagttcgcggtacagtctctagtagagcgcgtgtatagaggcagagaggagtgaagtccacagttcctctcctccaagaggtagaaggggcgcggggaaacgacctggtatcggttttccgcttgctgatcaagagctccctttaatgccgcacgcaggccggcgcccctcactgataaacgattggggctgggcctcggcctggagggcgttcgtcctctcagtgccctcagctcgtaaaggaggaaaccgaggcgtggggttgggcgagaacccaggggtcctcctgcacccccgccgccgtgtgtctcgtgtccagcgctggctggagcgcctcagccctggcgcggtgtagtcgtgagctggaacttctgacactgccccttccttccccgtccagcctgccgaccatgcccgcgggcgtgcccatgtccacctacctgaaaatgttcgcagccagtctcctggccatgtgcgcaggggcagaagtggtgcacaggtactaccgaccggacctgacaatacctgaaattccaccaaagcgtggagaactcaaaacggagcttttgggactgaaagaaagattctgtgaataatataagtcttaaatatgtatttcttaatttattgcatcaaactacttgtccttaagcacttagtctaatgctaactgcaagaggaggtgctcagtggatgtttagccgatacgttgaaatttaattacggtttgattgatatttcttgaaaactgccaaagcacatatcatcaaaccatttcatgaatatggtttggaagatgtttagtcttgaatataatgcgaaatagaatatttgtaagtctactatatgggttgtctttatttcatataaattaagaaattatttaaaactatgaactagtttcattaattgaatttgctaagtggagttatttctcattgctaaactgttttttttcaaattctagatctctgctaactttagtaaatgaacactaaagtggtgagctttgataatgcattttgtggatacaaaatcatcgcctcatcactttctagaatgaaaggctgggggcattgctcaccttttgcgtgaagaaaagacctgtcccttagagccagtttttgcttaaggggaggacagaccgtcgtcacccagtggaccacgtgaatgaatggatgcagtgcatgctttagaagcaccgcatacctccttttacaggtacagagtaagtggtctggctactgagggaaagagtcatgatttgaatccgagtcttctgtaagacaatgacttcatgaaggtgaaaaatcagttttatggttattaaagtaaaaatttaccttgggta

SEQ ID NO: 288185 - DNA, 1133 bp, Homo sapiens
  misc_feature (966)..(966): n is a, c, g, or t
  misc_feature (1007)..(1007): n is a, c, g, or t
tcacgtgcctgcgccggcagcgctcccactttcctgtccggtgcggccccgggtccctgtattttgggtccggcctgctcgccgtccgctccgtccgcccttagacctgttgcccagcatccctgcagttcgcggtacagtctctagtagagcgcgtgtatagaggcagagaggagtgaagtccacagttcctctcctccaagaggtagaaggggcgcggggaaacgacctggtatcggttttccgcttgctgatcaagagctccctttaatgccgcacgcaggccggcgcccctcactgataaacgattggggctgggcctcggcctggagggcgttcgtcctctcagtgccctcagctcgtaaaggaggaaaccgaggcgtggggttgggcgagaacccaggggtcctcctgcacccccgccgccgtgtgtctcgtgtccagcgctggctggagcgcctcagccctggcgcggtgtagtcgtgagctggaacttctgacactgccccttccttccccgtccagcctgccgaccatgcccgcgggcgtgcccatgtccacctacctgaaaatgttcgcagccagtctcctggccatgtgcgcaggggcagaagtggtgcacaggtactaccgaccggacctgacaatacctgaaattccaccaaagcgtggagaactcaaaacggagcttttgggactgaaagaaagaaaacacaaacctcaagtttctcaacaggaggaacttaaataactatgccaagaattctgtgaataatataagtcttaaatatgtatttcttaatttattgcatcaaactacttgtccttaagcacttagtctaatgctaactgcaagaggaggtgctcagtggatgtttagccgatacgttgaaatttaattacggtttgattgatatttcttgaaaactgccaaagcacatatcatcaaacctcgtgccgaattcngcacgagggaaaaggctcgccttgccgcacaggagcagcanaaggaaatggaaagccaaaaccaggcttgagaaggcgcatctggcaaagctgagaaaagacgtctggagaaacctagaatcaagtcaatgaacacgggcaaacaaaagtgacaaccctcgtgggaa

SEQ ID NO: 288186 - DNA, 1302 bp, Homo sapiens
tcacgtgcctgcgccggcagcgctcccactttcctgtccggtgcggccccgggtccctgtattttgggtccggcctgctcgccgtccgctccgtccgcccttagacctgttgcccagcatccctgcagttcgcggtacagtctctagtagagcgcgtgtatagaggcagagaggagtgaagtccacagttcctctcctccaagaggtagaaggggcgcggggaaacgacctggtatcggttttccgcttgctgatcaagagctccctttaatgccgcacgcaggccggcgcccctcactgataaacgattggggctgggcctcggcctggagggcgttcgtcctctcagtgccctcagctcgtaaaggaggaaaccgaggcgtggggttgggcgagaacccaggggtcctcctgcacccccgccgccgtgtgtctcgtgtccagcgctggctggagcgcctcagccctggcgcggtgtagtcgtgagctggaacttctgacactgccccttccttccccgtccagcctgccgaccatgcccgcgggcgtgcccatgtccacctacctgaaaatgttcgcagccagtctcctggccatgtgcgcaggggcagaagtggtgcacaggtactaccgaccggacctggtgtgaatagtggtttggagcacaatgttgggagcagtcatttctgtttggactctgcctggacagatgagaaacaggttgagaagagtgaagttgatttctcaaagtcacatagcttagtgagacgatttgaggatctgaagcccaagctttctgtttgcaaaactggatcacaagtctttcggtcggagaactggaaggtctgggcagagtcgagcagaggagaccatgatgactgcctagacttgtgctcagtgctgtgttggggagaactgctacagacaatacctgaaattccaccaaagcgtggagaactcaaaacggagcttttgggactgaaagaaagaaaacacaaacctcaagtttctcaacaggaggaacttaaataactatgccaagaattctgtgaataatataagtcttaaatatgtatttcttaatttattgcatcaaactacttgtccttaagcacttagtctaatgctaactgcaagaggaggtgctcagtggatgtttagccgatacgttgaaatttaattacggtttgattgatatttcttgaaaactgccaaagcacatatcatcaaaccatttcatgaatatggtttggaagatgtttagtcttgaatataatgcgaaatagaatatttgtaagtcta

SEQ ID NO: 288187 - DNA, 1811 bp, Homo sapiens
tcacgtgcctgcgccggcagcgctcccactttcctgtccggtgcggccccgggtccctgtattttgggtccggcctgctcgccgtccgctccgtccgcccttagacctgttgcccagcatccctgcagttcgcggtacagtctctagtagagcgcgtgtatagaggcagagaggagtgaagtccacagttcctctcctccaagaggtagaaggggcgcggggaaacgacctggtatcggttttccgcttgctgatcaagagctccctttaatgccgcacgcaggccggcgcccctcactgataaacgattggggctgggcctcggcctggagggcgttcgtcctctcagtgccctcagctcgtaaaggaggaaaccgaggcgtggggttgggcgagaacccaggggtcctcctgcacccccgccgccgtgtgtctcgtgtccagcgctggctggagcgcctcagccctggcgcggtgtagtcgtgagctggaacttctgacactgccccttccttccccgtccagcctgccgaccatgcccgcgggcgtgcccatgtccacctacctgaaaatgttcgcagccagtctcctggccatgtgcgcaggggcagaagtggtgcacaggtactaccgaccggacctggtgtgaatagtggtttggagcacaatgttgggagcagtcatttctgtttggactctgcctggacagatgagaaacaggttgagaagagtgaagttgatttctcaaagtcacatagcttagtgagacgatttgaggatctgaagcccaagctttctgtttgcaaaactggatcacaagtctttcggtcggagaactggaaggtctgggcagagtcgagcagaggagaccatgatgactgcctagacttgtgctcagtgctgtgttggggagaactgctacagacaatacctgaaattccaccaaagcgtggagaactcaaaacggagcttttgggactgaaagaaagaaaacacaaacctcaagtttctcaacaggaggaacttaaataactatgccaagaattctgtgaataatataagtcttaaatatgtatttcttaatttattgcatcaaactacttgtccttaagcacttagtctaatgctaactgcaagaggaggtgctcagtggatgtttagccgatacgttgaaatttaattacggtttgattgatatttcttgaaaactgccaaagcacatatcatcaaaccatttcatgaatatggtttggaagatgtttagtcttgaatataatgcgaaatagaatatttgtaagtctactatatgggttgtctttatttcatataaattaagaaattatttaaaactatgaactagtttcattaattgaatttgctaagtggagttatttctcattgctaaactgttttttttcaaattctagatctctgctaactttagtaaatgaacactaaagtggtgagctttgataatgcattttgtggatacaaaatcatcgcctcatcactttctagaatgaaaggctgggggcattgctcaccttttgcgtgaagaaaagacctgtcccttagagccagtttttgcttaaggggaggacagaccgtcgtcacccagtggaccacgtgaatgaatggatgcagtgcatgctttagaagcaccgcatacctccttttacaggtacagagtaagtggtctggctactgagggaaagagtcatgatttgaatccgagtcttctgtaagacaatgacttcatgaaggtgaaaaatcagttttatggttattaaagtaaaaatttaccttgggta

SEQ ID NO: 288188 - DNA, 1844 bp, Homo sapiens
catgttggtcaggctggtctcaaactcctcaccttgtgatctgcccacctcggcctcccaaagtgctgggattacaggcatgagccaccgcgcccagcccacctggggcatttttgttgctgtacaatagaaacaagttctctatatgttccccaggctggtccaaactcctgggctcaagtgatcctcccacctagacctcccaaagtgctgggatttcaggcatgagccgcagtggccggtcagaacctggggcccttttgaactttgattcctcagcaattttgtcagccctggctcgggctgagaagcccctgtgaagccagagagggaaagggacctgtccagggtcacacaggaatcatgcgtcaagcctccccagccacggacttgtctccatccagggcatttcagcccctgcagggcagtggcctgcccctcctccttggagccaggaagggatgcagtgccacagggatctggctctgtcccaggccctgtggggctggcagttgagtaagcagtcaggctgggcgcaccgcatccctcccccactccccactgcccagcacagtgcattcatgcagctgggccccaccccatctccagaggcaccttccactagcaacagtctccccaggcacaacacagctaacacaaggccccgcaggcaggactctgggacagacgcaggccagctgcccagagcccagaccaagcatggacgccgtggatgccaccatggagaaactccgggcacagtgcctgtcccgcggggcctcgggcatccagggcctggccaggtttttccgccaactagaccgggacgggagcagatccctggacgctgatgagttccggcagggtctggccaaactcgggctggtgctggaccaggcggaggcagagggtgtgtgcaggaagtgggaccgcaatggcagcgggacgctggatctggaggagttccttcgggcgctgcggccccccatgtcccaggcccgggaggctgtcatcgcagctgcatttgccaagctggaccgcagtggggacggcgtcgtgacggtggacgacctccgcggggtgtacagtggccgtgcccaccccaaggtgcgcagtggggagtggaccgaggacgaggtgctgcgccgcttcctggacaacttcgactcctctgagaaggacgggcaggtcacactggcggaattccagggactactacagcggcgtgagtgcctccatgaacacggatgaggagttcgtggccatgatgaccagtgcctggcagctgtgagcagctccggctcagccctgctgccctggcctgtcactccccacccctgccggagacctcccttccctgggccccttctctcctgggcagccacaccacagagcggggaggggcaggtgggggaatggaggctgcaggactggctagaccaggtccctgccggtccaccaggcggaggtgggacaaaggtcctaacaggagtcactggctcaggaccccagggagaaacgctctccccacccacgccatgctgaccagaggtcttgcagcccctgtggatgcccccgccgaggtcccccgatccccgcacccggactgctgctccctgcccctcccttgcgggtcccccaggaagccaggtgaccccaggtgggaggctgtgtgtggaggccatcctggaaggaagtttagacctgcccaggtgtggagcgaggggcacaggggcatcctaacctcagaaactgaaataaagcctttgaaaaaaaaatctgtaaaacatcaacccccaatcagaagatggcaaatggggaataaaaatagcaggtaacacgtc

SEQ ID NO: 288189 - DNA, 2184 bp, Homo sapiens
catgttggtcaggctggtctcaaactcctcaccttgtgatctgcccacctcggcctcccaaagtgctgggattacaggcatgagccaccgcgcccagcccacctggggcatttttgttgctgtacaatagaaacaagttctctatatgttccccaggctggtccaaactcctgggctcaagtgatcctcccacctagacctcccaaagtgctgggatttcaggcatgagccgcagtggccggtcagaacctggggcccttttgaactttgattcctcagcaattttgtcagccctggctcgggctgagaagcccctgtgaagccagagagggaaagggacctgtccagggtcacacaggaatcatgcgtcaagcctccccagccacggacttgtctccatccagggcatttcagcccctgcagggcagtggcctgcccctcctccttggagccaggaagggatgcagtgccacagggatctggctctgtcccaggccctgtggggctggcagttgagtaagcagtcaggctgggcgcaccgcatccctcccccactccccactgcccagcacagtgcattcatgcagctgggccccaccccatctccagaggcaccttccactagcaacagtctccccaggcacaacacagctaacacaaggccccgcaggcaggactctgggacagacgcaggccagctgcccagagcccagaccaagcatggacgccgtggatgccaccatggagaaactccgggcacagtgcctgtcccgcggggcctcgggcatccagggcctggccaggtttttccgccaactagaccgggacgggagcagatccctggacgctgatgagttccggcagggtctggccaaactcgggctggtgctggaccaggcggaggcagagggtgtgtgcaggaagtgggaccgcaatggcagcgggacgctggatctggaggagttccttcgggcgctgcggccccccatgtcccaggcccgggaggctgtcatcgcagctgcatttgccaagctggaccgcagtggggacggcgtcgtgacggtggacgacctccgcggggtgtacagtggccgtgcccaccccaaggtgcgcagtggggagtggaccgaggacgaggtgctgcgccgcttcctggacaacttcgactcctctgagaaggacgggcaggtcacactggcggaattccagggactactacagcggcgtgagtgcctccatgaacacggatgaggagttcgtggccatgatgaccagtgcctggcagctgtgagcagctccggctcagccctgctgccctggcctgtcactccccacccctgccggagacctcccttccctgggccccttctctcctgggcagccacaccacagagcggggaggggcaggtgggggaatggaggctgcaggactggctagaccaggtccctgccggtccaccaggcggaggtgggacaaaggtcctaacaggagtcactggctcaggaccccagggagaaacgctctccccacccacgccatgctgaccagaggtcttgcagcccctgtggatgcccccgccgaggtcccccgatccccgcacccggactgctgctccctgcccctcccttgcgggtcccccaggaagccaggtgaccccaggtgggaggctgtgtgtggaggccatcctggaaggaagtttagacctgcccaggtgtggagcgaggggcacaggggcatcctaacctcagaaactgaaataaagcctttgaaaaaaaaatctgtaaaacatcaacccccaatcagaagatggcaaatggggaataaaaatagcaggtaacacgtccagcgggcccagtatctacattctggtgagcggcccgaggctgggagctctgggcgggggcagaccggcggggccttgcagcaggggtgggggtaaagtgcgggtggtggtggagagaacagggctgtggctggaccccagcactggtgacacgctgggtgggagcatgaggccccaggctgctggaggtcctcgcccggggaggtggaggccgttcctggtcaggggcttcctgaggcccctggggcatgcagaggccagggttttagttaaaagtttaatgtagttcccaaatacatttcatatgacaatcttacataaatgttccaaaacacaaaaa

SEQ ID NO: 288190 - DNA, 2116 bp, Homo sapiens
catgttggtcaggctggtctcaaactcctcaccttgtgatctgcccacctcggcctcccaaagtgctgggattacaggcatgagccaccgcgcccagcccacctggggcatttttgttgctgtacaatagaaacaagttctctatatgttccccaggctggtccaaactcctgggctcaagtgatcctcccacctagacctcccaaagtgctgggatttcaggcatgagccgcagtggccggtcagaacctggggcccttttgaactttgattcctcagcaattttgtcagccctggctcgggctgagaagcccctgtgaagccagagagggaaagggacctgtccagggtcacacaggaatcatgcgtcaagcctccccagccacggacttgtctccatccagggcatttcagcccctgcagggcagtggcctgcccctcctccttggagccaggaagggatgcagtgccacagggatctggctctgtcccaggccctgtggggctggcagttgagtaagcagtcaggctgggcgcaccgcatccctcccccactccccactgcccagcacagtgcattcatgcagctgggccccaccccatctccagaggcaccttccactagcaacagtctccccaggcacaacacagctaacacaaggccccgcaggcaggactctgggacagacgcaggccagctgcccagagcccagaccaagcatggacgccgtggatgccaccatggagaaactccgggcacagtgcctgtcccgcggggcctcgggcatccagggcctggccaggtgagctgtcccctctcaccttcctgaccccggcccctgagaccactgttccaaccgtgtcccctgcctccaggtttttccgccaactagaccgggacgggagcagatccctggacgctgatgagttccggcagggtctggccaaactcgggctggtgctggaccaggcggaggcagagggtgtgtgcaggaagtgggaccgcaatggcagcgggacgctggatctggaggagttccttcgggcgctgcgggtgagcccccacctcacagtcaaggcgtgtgccctgggcatggggcgacagaggatgctgagatgcggagacggggactcctccctaagagctgctgttaagaggcgcctgctggggcatacagccccagtgctctgcacagcgtcttgggggtttgggtgtgctacccaccacccccagtcaccacctcctgtcccagccccccatgtcccaggcccgggaggctgtcatcgcagctgcatttgccaagctggaccgcagtggggacggcgtcgtgacggtggacgacctccgcggggtgtacagtggccgtgcccaccccaaggtgcgcagtggggagtggaccgaggacgaggtgctgcgccgcttcctggacaacttcgactcctctgagaaggacgggcaggtcacactggcggaattccagggactactacagcggcgtgagtgcctccatgaacacggatgaggagttcgtggccatgatgaccagtgcctggcagctgtgagcagctccggctcagccctgctgccctggcctgtcactccccacccctgccggagacctcccttccctgggccccttctctcctgggcagccacaccacagagcggggaggggcaggtgggggaatggaggctgcaggactggctagaccaggtccctgccggtccaccaggcggaggtgggacaaaggtcctaacaggagtcactggctcaggaccccagggagaaacgctctccccacccacgccatgctgaccagaggtcttgcagcccctgtggatgcccccgccgaggtcccccgatccccgcacccggactgctgctccctgcccctcccttgcgggtcccccaggaagccaggtgaccccaggtgggaggctgtgtgtggaggccatcctggaaggaagtttagacctgcccaggtgtggagcgaggggcacaggggcatcctaacctcagaaactgaaataaagcctttgaaaaaaaaatctgtaaaacatcaacccccaatcagaagatggcaaatggggaataaaaatagcaggtaacacgtc

SEQ ID NO: 288191 - DNA, 1919 bp, Homo sapiens
catgttggtcaggctggtctcaaactcctcaccttgtgatctgcccacctcggcctcccaaagtgctgggattacaggcatgagccaccgcgcccagcccacctggggcatttttgttgctgtacaatagaaacaagttctctatatgttccccaggctggtccaaactcctgggctcaagtgatcctcccacctagacctcccaaagtgctgggatttcaggcatgagccgcagtggccggtcagaacctggggcccttttgaactttgattcctcagcaattttgtcagccctggctcgggctgagaagcccctgtgaagccagagagggaaagggacctgtccagggtcacacaggaatcatgcgtcaagcctccccagccacggacttgtctccatccagggcatttcagcccctgcagggcagtggcctgcccctcctccttggagccaggaagggatgcagtgccacagggatctggctctgtcccaggccctgtggggctggcagttgagtaagcagtcaggctgggcgcaccgcatccctcccccactccccactgcccagcacagtgcattcatgcagctgggccccaccccatctccagaggcaccttccactagcaacagtctccccaggcacaacacagctaacacaaggccccgcaggcaggactctgggacagacgcaggccaggtgagcatctgaacaaggggcagtcggccagggtgggcttgcgggagtccccaccttgacctctctcccttccagctgcccagagcccagaccaagcatggacgccgtggatgccaccatggagaaactccgggcacagtgcctgtcccgcggggcctcgggcatccagggcctggccaggtttttccgccaactagaccgggacgggagcagatccctggacgctgatgagttccggcagggtctggccaaactcgggctggtgctggaccaggcggaggcagagggtgtgtgcaggaagtgggaccgcaatggcagcgggacgctggatctggaggagttccttcgggcgctgcggccccccatgtcccaggcccgggaggctgtcatcgcagctgcatttgccaagctggaccgcagtggggacggcgtcgtgacggtggacgacctccgcggggtgtacagtggccgtgcccaccccaaggtgcgcagtggggagtggaccgaggacgaggtgctgcgccgcttcctggacaacttcgactcctctgagaaggacgggcaggtcacactggcggaattccagggactactacagcggcgtgagtgcctccatgaacacggatgaggagttcgtggccatgatgaccagtgcctggcagctgtgagcagctccggctcagccctgctgccctggcctgtcactccccacccctgccggagacctcccttccctgggccccttctctcctgggcagccacaccacagagcggggaggggcaggtgggggaatggaggctgcaggactggctagaccaggtccctgccggtccaccaggcggaggtgggacaaaggtcctaacaggagtcactggctcaggaccccagggagaaacgctctccccacccacgccatgctgaccagaggtcttgcagcccctgtggatgcccccgccgaggtcccccgatccccgcacccggactgctgctccctgcccctcccttgcgggtcccccaggaagccaggtgaccccaggtgggaggctgtgtgtggaggccatcctggaaggaagtttagacctgcccaggtgtggagcgaggggcacaggggcatcctaacctcagaaactgaaataaagcctttgaaaaaaaaatctgtaaaacatcaacccccaatcagaagatggcaaatggggaataaaaatagcaggtaacacgtc

SEQ ID NO: 288192 - DNA, 1763 bp, Homo sapiens
catgttggtcaggctggtctcaaactcctcaccttgtgatctgcccacctcggcctcccaaagtgctgggattacaggcatgagccaccgcgcccagcccacctggggcatttttgttgctgtacaatagaaacaagttctctatatgttccccaggctggtccaaactcctgggctcaagtgatcctcccacctagacctcccaaagtgctgggatttcaggcatgagccgcagtggccggtcagaacctggggcccttttgaactttgattcctcagcaattttgtcagccctggctcgggctgagaagcccctgtgaagccagagagggaaagggacctgtccagggtcacacaggaatcatgcgtcaagcctccccagccacggacttgtctccatccagggcatttcagcccctgcagggcagtggcctgcccctcctccttggagccaggaagggatgcagtgccacagggatctggctctgtcccaggccctgtggggctggcagttgagtaagcagtcaggctgggcgcaccgcatccctcccccactccccactgcccagcacagtgcattcatgcagctgggccccaccccatctccagaggcaccttccactagcaacagtctccccaggcacaacacagctaacacaaggccccgcaggcaggactctgggacagacgcaggccagctgcccagagcccagaccaagcatggacgccgtggatgccaccatggagaaactccgggcacagtgcctgtcccgcggggcctcgggcatccagggcctggccaggtttttccgccaactagaccgggacgggagcagatccctggacgctgatgagttccggcagggtctggccaaactcgggctggtgctggaccaggcggaggcagagggtgtgtgcaggaagtgggaccgcaatggcagcgggacgctggatctggaggagttccttcgggcgctgcggccccccatgtcccaggcccgggaggctgtcatcgcagctgcatttgccaagctggaccgcagtggggacggcgtcgtgacggtggacgacctccgcggggtgtacagtggccgtgcccaccccaaggtcacactggcggaattccagggactactacagcggcgtgagtgcctccatgaacacggatgaggagttcgtggccatgatgaccagtgcctggcagctgtgagcagctccggctcagccctgctgccctggcctgtcactccccacccctgccggagacctcccttccctgggccccttctctcctgggcagccacaccacagagcggggaggggcaggtgggggaatggaggctgcaggactggctagaccaggtccctgccggtccaccaggcggaggtgggacaaaggtcctaacaggagtcactggctcaggaccccagggagaaacgctctccccacccacgccatgctgaccagaggtcttgcagcccctgtggatgcccccgccgaggtcccccgatccccgcacccggactgctgctccctgcccctcccttgcgggtcccccaggaagccaggtgaccccaggtgggaggctgtgtgtggaggccatcctggaaggaagtttagacctgcccaggtgtggagcgaggggcacaggggcatcctaacctcagaaactgaaataaagcctttgaaaaaaaaatctgtaaaacatcaacccccaatcagaagatggcaaatggggaataaaaatagcaggtaacacgtc

SEQ ID NO: 288193 - DNA, 1338 bp, Homo sapiens
aggtgatccacccgcctcggccttcgaaagtgctgcagttataggtgtaagccaccgcgcccggccctagcctagcttttgtagcatgcaactgtctcctttttatacgccctaaagaatatatttttgaactccttgtttctgcgctgtccttcttagcccaggacattcagggtgctttgcttgttgtcaaaccagggaaaggagaaaactcctgtgcctttctgggccagcctgtcaccctggcctggtcggcagccattcccctacctcctcactcaggaactgtcacaccaggtttttccgccaactagaccgggacgggagcagatccctggacgctgatgagttccggcagggtctggccaaactcgggctggtgctggaccaggcggaggcagagggtgtgtgcaggaagtgggaccgcaatggcagcgggacgctggatctggaggagttccttcgggcgctgcggccccccatgtcccaggcccgggaggctgtcatcgcagctgcatttgccaagctggaccgcagtggggacggcgtcgtgacggtggacgacctccgcggggtgtacagtggccgtgcccaccccaaggtgcgcagtggggagtggaccgaggacgaggtgctgcgccgcttcctggacaacttcgactcctctgagaaggacgggcaggtcacactggcggaattccagggactactacagcggcgtgagtgcctccatgaacacggatgaggagttcgtggccatgatgaccagtgcctggcagctgtgagcagctccggctcagccctgctgccctggcctgtcactccccacccctgccggagacctcccttccctgggccccttctctcctgggcagccacaccacagagcggggaggggcaggtgggggaatggaggctgcaggactggctagaccaggtccctgccggtccaccaggcggaggtgggacaaaggtcctaacaggagtcactggctcaggaccccagggagaaacgctctccccacccacgccatgctgaccagaggtcttgcagcccctgtggatgcccccgccgaggtcccccgatccccgcacccggactgctgctccctgcccctcccttgcgggtcccccaggaagccaggtgaccccaggtgggaggctgtgtgtggaggccatcctggaaggaagtttagacctgcccaggtgtggagcgaggggcacaggggcatcctaacctcagaaactgaaataaagcctttgaaaaaaaaatctgtaaaacatcaacccccaatcagaagatggcaaatggggaataaaaatagcaggtaacacgtc

SEQ ID NO: 288194 - DNA, 3458 bp, Homo sapiens
cacacgaactgctcaaaggcttggagcgggtctagtaaggcgaacggactgcttccggccagaggtcccgggcggaggaggaagctgtggctgccggcggtgggacgccccggccgctcagcccccgggcactgctgtggggcgttcagctttccacacttggggcaaagcaagccgcgaggaggaaccagacagtcctgttagttgtggccagccctcattccctggaaatggcaaacaaggggaacaagaagcgtcggcagttctctctggaggagaaaatgaaagttgtgggagctgtagactcaggcaagaggaaaggtgatgtggcaaaagaatttggtatcactccctctactttatctacattcttaaaggatcgcaccaaatttgaagaaaaggtgcgggaggcatccgtgggaccccagcggaaaaggatgaggagcgctctttatgatgacattgataaggctgtttttgcttggtttcaagaaatccatgccaaaaacattcttgtgactggttctgtcattcggaaaaaagcactaaacttggccaacatgcttggctatgacaattttcaagcaagtgtgggctggctgaacagatttagagatcgccacggaattgctttgaaagcagtctgtagagaagatagtgacaggttaatgaatggtctaggaatagataagattaatgagtggcatgcaggggaaattataaaactgattgctgactacagcccagatgatatctttaatgctgatgagacaggagtgtttttccagttgcttccccagcacacacttgctgctaaaggagaccactgtagagggggcaagaaagcaaagcagcggttgacagcactcttttgttgcaatgcctcggggactgaaaaaatgagaccattgattgttggtaggtcagccagcccacactgcctcaagaacattcattccctcccttgtgattaccgagccaaccagtgggcttggatgacaagggatctgtttaatgagtggctgatgcaagtggatgccaggatgaagagggcggaacgccggatcctcttgctcatagacaactgctctgctcataacatgcttccacacttggaaaggattcaggttgggtatctgccctccaactgtactgctgtcctgcagccactgaatcttggcataattcacaccatgaaagtactgtaccagagccaccttctaaaacagatcctcctcaagctcaacagcagtgaggatcaagaagaggtggacatcaagcaggccatcgacatgattgctgcagcgtggtggtcagtcaagccatccacagtggtgaaatgttggcagaaggcaggcatcgtccctatggaatttgcagaatgtgacacagaatcagcagccagtgaaccagacattgccattgaaaagttgtggcacacagtggctattgccacctgtgtcccaaatgaagtaaatttccaggactttgttactgcagatgatgatctcattatctctcaggacacagacatcatccaggacatggtggctggcgaaaataccagtgaagcaggaagtgaagatgaaggggaggtatctttaccagagcaaccaaaagtcaccatcacagaagccatatcaagtgtacagaaacttagacagttcctttccacttgtgtagacattcctgatgccatttttggacaattaaatggcatagatgaatatttaatgaaaagagtgacacaaacccttattgattccaaaattacagatttcctccaaacaaaataatgcaggaatttatttcagaaaatgtagtttacaagaataaagatttctttagataggttgttgagccaatttaagtaaagcaatgttattgtgacaacattccagtactctgaaatagccaggaaacttctttgaatggaatttgactaatatgtgtgttttcttttcttttgtttttggctgtctctggtccttgattcaagatgtattttgattcatccaagggtttccaaacttgtctgcaaattaggatcacttgagaatcctttaaaaattccaaagctcaggccatatcccaggcctattaaatcacaatctttggtgacgggtcacaggcattggtagttttgaagctctccaggtgattccaatgtgcagacaaatttgaaaactgaaccaaccacaggaacatcaagtacactgtgggcctgggtccagcttctttccagtaagtgtatctcaggggcttccaaatttagcttacatcagaatcacttggaaggcttgttaaaacccaaggctgctaggcccacccccagagtttgatacagtagacctcaggtgggacccaaaaatttgcatttctaacacattctcagctgatgcagtccaggctccatgctttgaaaaccactggtctagctttagataggatattgagccaatttaaataaagcaatatactggtctagctgagttctagaacttctctctttagctggccatctgaatactcccccatcactaattgttaaaaaaagaatcaactgttcttactctagagctcttttttcctttctgctgatttgctggaagcactacaagacttctgtttgttcgttcgtttgtttgtttgtttgtttttaaagatggggtcttgttatattgcctaggctggaatgcagtggttattcacaggcatgattataacacactactctctctaactcctggcctcaagccatcctcccaaatagatgggactactgatgcacactgccatgctggccttacgaaatgttttaataggcatttcactaatagggatctggagtacaaggaaatacagtgcatttaagacataggctgggcatggtggctcatgcctgtaatcccagcacattgggaagatcacttgaggcaaggagtttgagaccagactggccaacacagcgagacccccatctctaaaaaaaaaaaaaattaataagacatggatacaaccagggagggaggttataataatagagcatcctgttaatcagaatcatgggggagaacatacagcccagcgtgcctctcactttccagaaagggtgagaggatcattagagagttcattagagagtatttattcctaataagtcagataaatgtcagtttcatttttagaagtttcacacaatacctgctaatggtgtgatgtcatttttccccctgcttcaggttaattttttggatatttcagaaacccatagcaattcagtgatttttctttttgtagtagctcagtcaaaacaggtaacagcagattaatcatagaaaatgttgcttccacattaacaaaacaatcactgaaaaacagcagatgtttaaatagattattttatagcttattttggatattttttcttttaataaactaatatgatcatttgaatc

SEQ ID NO: 288195 - DNA, 3820 bp, Homo sapiens
ctaggccccgcctcacctttcagagccacgtcgggcgctgggaagcctacaataccaccctctcctcagcacgacgttcaaggcctgacctcagcctgtctcagtctttccctctcattcaggatcgggttcatacgtagtgccgcatcaagtagcgccttcatcactccagtgatctgccctcaatccgtctctcccactggcccacgaatagtgatggtagtgagttcctggagtgactcaagctgagctgaatgaccgtatggagagcttccgtaaatcaaatagggattggattggattgtcctttctctccagtgtcacaagttgtccacatttgtacaagttcccgcacaaccctcactgtattccagtctgcctacttctctgcatctaccgccatcaccaaccttctagccaccatcatctcctgcctggactgatgtagttctccccacatcccctctacaatccattctccacgaagcagtcagattgatcattttgcactctttccacacttggggcaaagcaagccgcgaggaggaaccagacagtcctgttagttgtggccagccctcattccctggaaatggcaaacaaggggaacaagaagcgtcggcagttctctctggaggagaaaatgaaagttgtgggagctgtagactcaggcaagaggaaaggtgatgtggcaaaagaatttggtatcactccctctactttatctacattcttaaaggatcgcaccaaatttgaagaaaaggtgcgggaggcatccgtgggaccccagcggaaaaggatgaggagcgctctttatgatgacattgataaggctgtttttgcttggtttcaagaaatccatgccaaaaacattcttgtgactggttctgtcattcggaaaaaagcactaaacttggccaacatgcttggctatgacaattttcaagcaagtgtgggctggctgaacagatttagagatcgccacggaattgctttgaaagcagtctgtagagaagatagtgacaggttaatgaatggtctaggaatagataagattaatgagtggcatgcaggggaaattataaaactgattgctgactacagcccagatgatatctttaatgctgatgagacaggagtgtttttccagttgcttccccagcacacacttgctgctaaaggagaccactgtagagggggcaagaaagcaaagcagcggttgacagcactcttttgttgcaatgcctcggggactgaaaaaatgagaccattgattgttggtaggtcagccagcccacactgcctcaagaacattcattccctcccttgtgattaccgagccaaccagtgggcttggatgacaagggatctgtttaatgagtggctgatgcaagtggatgccaggatgaagagggcggaacgccggatcctcttgctcatagacaactgctctgctcataacatgcttccacacttggaaaggattcaggttgggtatctgccctccaactgtactgctgtcctgcagccactgaatcttggcataattcacaccatgaaagtactgtaccagagccaccttctaaaacagatcctcctcaagctcaacagcagtgaggatcaagaagaggtggacatcaagcaggccatcgacatgattgctgcagcgtggtggtcagtcaagccatccacagtggtgaaatgttggcagaaggcaggcatcgtccctatggaatttgcagaatgtgacacagaatcagcagccagtgaaccagacattgccattgaaaagttgtggcacacagtggctattgccacctgtgtcccaaatgaagtaaatttccaggactttgttactgcagatgatgatctcattatctctcaggacacagacatcatccaggacatggtggctggcgaaaataccagtgaagcaggaagtgaagatgaaggggaggtatctttaccagagcaaccaaaagtcaccatcacagaagccatatcaagtgtacagaaacttagacagttcctttccacttgtgtagacattcctgatgccatttttggacaattaaatggcatagatgaatatttaatgaaaagagtgacacaaacccttattgattccaaaattacagatttcctccaaacaaaataatgcaggaatttatttcagaaaatgtagtttacaagaataaagatttctttagataggttgttgagccaatttaagtaaagcaatgttattgtgacaacattccagtactctgaaatagccaggaaacttctttgaatggaatttgactaatatgtgtgttttcttttcttttgtttttggctgtctctggtccttgattcaagatgtattttgattcatccaagggtttccaaacttgtctgcaaattaggatcacttgagaatcctttaaaaattccaaagctcaggccatatcccaggcctattaaatcacaatctttggtgacgggtcacaggcattggtagttttgaagctctccaggtgattccaatgtgcagacaaatttgaaaactgaaccaaccacaggaacatcaagtacactgtgggcctgggtccagcttctttccagtaagtgtatctcaggggcttccaaatttagcttacatcagaatcacttggaaggcttgttaaaacccaaggctgctaggcccacccccagagtttgatacagtagacctcaggtgggacccaaaaatttgcatttctaacacattctcagctgatgcagtccaggctccatgctttgaaaaccactggtctagctttagataggatattgagccaatttaaataaagcaatatactggtctagctgagttctagaacttctctctttagctggccatctgaatactcccccatcactaattgttaaaaaaagaatcaactgttcttactctagagctcttttttcctttctgctgatttgctggaagcactacaagacttctgtttgttcgttcgtttgtttgtttgtttgtttttaaagatggggtcttgttatattgcctaggctggaatgcagtggttattcacaggcatgattataacacactactctctctaactcctggcctcaagccatcctcccaaatagatgggactactgatgcacactgccatgctggccttacgaaatgttttaataggcatttcactaatagggatctggagtacaaggaaatacagtgcatttaagacataggctgggcatggtggctcatgcctgtaatcccagcacattgggaagatcacttgaggcaaggagtttgagaccagactggccaacacagcgagacccccatctctaaaaaaaaaaaaaattaataagacatggatacaaccagggagggaggttataataatagagcatcctgttaatcagaatcatgggggagaacatacagcccagcgtgcctctcactttccagaaagggtgagaggatcattagagagttcattagagagtatttattcctaataagtcagataaatgtcagtttcatttttagaagtttcacacaatacctgctaatggtgtgatgtcatttttccccctgcttcaggttaattttttggatatttcagaaacccatagcaattcagtgatttttctttttgtagtagctcagtcaaaacaggtaacagcagattaatcatagaaaatgttgcttccacattaacaaaacaatcactgaaaaacagcagatgtttaaatagattattttatagcttattttggatattttttcttttaataaactaatatgatcatttgaatc

SEQ ID NO: 288196 - DNA, 184 bp, Homo sapiens
aaccttctagccaccatcatctcctgcctggactgatgtagttctccccacatcccctctacaatccattctccacgaagcagtcagattgatcattttgcactgtaagtctgatcaagtcactccctgcttaaaaccctccagtgtctcattcacttaaaataaaattcagacgtcttagctt

SEQ ID NO: 288197 - DNA, 528 bp, Homo sapiens
tgcggccgcgcctgcctgccccacctcgtaagggcctgtgacctcacgaggccagccgccgggcgctgcattcgagcggtggggctcctgtccgtgcgctttcctcccgcagccccggccgggattccgccctccgtccttgccacccgctcgccactcttccctaatcgctgttcattctccggtgcgctgtcccgccatggtctgaccccacttcaatcttaccttcggtccgtcctttgaacaccccgacccccgacccctttcttccaaaacattccatccttcttggcttctgctactcaataatggacagcagctcgaaggccatgtgtcccacggctttgctgaaatttgtctcgggttgcctttaaggagactgtcgtttccttttgaaagagatactttggttggtttggttttcttctgtgtgtttgtttttcctatgtatttatcgtatgcagttgggcaaaatacttaacgctccctgagtctcgattttctcattcttccagggttgtgggaatt

SEQ ID NO: 288198 - DNA, 713 bp, Homo sapiens
tgcggccgcgcctgcctgccccacctcgtaagggcctgtgacctcacgaggccagccgccgggcgctgcattcgagcggtggggctcctgtccgtgcgctttcctcccgcagccccggccgggattccgccctccgtccttgccacccgctcgccactcttccctaatcgctgttcattctccggtgcgctgtcccgccatggtctgaccccacttcaatcttaccttcgaacttcagattgaaaagcatgtacttgagtagctgtatttaaggaattacacccaagaagtctcatcttccctggacttacgtagaggataagattctgaactttgaattgatgctataatgggataagactttggggccttagaaggggagaacaaaggccatgaaggtgttaaagggaagcaagcgatcgacagcattggttggtgacaaacctgtggctggtctgtgtatgatgggatggattcctcctgctcccagaaggcactgtactttcagtgttcagggcagccttgccttagtgcctcaaacctatccctacatcctgcagtaaacttggaaaggtaacacctctaaccatcaggccttcctctgaagcacagtcaagttgctcttggcaaccatctcaattttaatagtgcagatgccatgtgctgtaaagtcctaaaatttaaattctttatttcttgacatcattgcctca

SEQ ID NO: 288199 - DNA, 547 bp, Homo sapiens
taatgacattttttgcattcttagagaccaggacctgccagccaagacaatattttgggttctttcccaaaatacttagtcatctaaaatcataaccctattgaaagctgccttcctgttcaaccccagtcaacaactaaaacagaggcatgtcacccctctgggggtcaggctgagtatactctgcagagctctgcttcccacaaatgtcaggagaacaaaggccatgaaggtgttaaagggaagcaagcgatcgacagcattggttggtgacaaacctgtggctggtctgtgtatgatgggatggattcctcctgctcccagaaggcactgtactttcagtgttcagggcagccttgccttagtgcctcaaacctatccctacatcctgcagtaaacttggaaaggtaacacctctaaccatcaggccttcctctgaagcacagtcaagttgctcttggcaaccatctcaattttaatagtgcagatgccatgtgctgtaaagtcctaaaatttaaattctttatttcttgacatcattgcctca

SEQ ID NO: 288200 - DNA, 1465 bp, Homo sapiens
ctagtagctttccctctatgttttcttctagtagttccagtcttacaggtaagtctttaatccattttgacttttgtatacggtgtgagataagggtccaatttcatttttctacacatggatatatggtttcccaacagtttttatcaaagagattcctttccccattgagtgttcttggctccttatcaaaattcaattgtctgtaaattctggactctctagtatgttctattggccaatgcatctgtttttatggaataccatgctgttttgattactgtaactttgtcgtttattttaaagtcagggactgtgatgccttcaactttgttttttttttgcttttttttttttgagatggattctggctctgtctctcaggctggagtatggctcacaggtcctctcattcaaacaatagggcttctaagaaacttaaggtcttgtccttcagcagaagcccaaggtagaaaaagacatatctcaaaggtatttgctgccatggcttttgtctcctggactaaaacccagtaagattcacagtagattcaaaaattgttttaagagaattgtattgtcagaaatactgtcagcttgagctgaaaaagagtacaaaaaggaaaggggcctttggaccctttctacaaacgcatttctacaaacaggaagcaggctaagaaaactatttaggtccaaacacatctccctttcacacaaaaaaggatgacttagaggataaaaccaagagcccagaaggtggaaccaaaagccatagggagttattcccaggctttgagtgtagaactgcaaacctgtactcaaatggatttcagaattgctatgaaccagtgacttctgtgcaccttggtttccacctgttggaacaggagtgtctatagcagttatctccctgcccctgctgttttacattggttgctgtggggaaaggagcatatgacctttttctttttgttcgcagaacttcagattgaaaagcatgtacttgagtagctgtatttaaggaattacacccaagaagtctcatcttccctggacttacgtagaggataagattctgaactttgaattgatgctataatgggataagactttggggccttagaaggggagaacaaaggccatgaaggtgttaaagggaagcaagcgatcgacagcattggttggtgacaaacctgtggctggtctgtgtatgatgggatggattcctcctgctcccagaaggcactgtactttcagtgttcagggcagccttgccttagtgcctcaaacctatccctacatcctgcagtaaacttggaaaggtaacacctctaaccatcaggccttcctctgaagcacagtcaagttgctcttggcaaccatctcaattttaatagtgcagatgccatgtgctgtaaagtcctaaaatttaaattctttatttcttgacatcattgcctca

SEQ ID NO: 288201 - DNA, 545 bp, Homo sapiens
ggttaaatatagacaagaattattggaaaggcgtttgatggagaaaaaggaagtggcccttcaagaagctcatgaagacaaagagagagcacggcggctagaagcccttaggaaacaggttgctgttgttgctcaatttgatcctgttagaatgatgtcagatacaatggcatcaaaagctagaatgggcattgaaattgaagaagaatttattcttcaaaagccactcttcacattgaatacatacaatgaacagcagataatttctgaccctagacttcgcttcgagttagcacttcgagaagctggacttcatagaacactttatgctaaagagatattaccaaaaattagtcctcaaaaacctccaagaaaggacatggagtctactgtatttaaaatatagagctcatcctcaaattctatatgtaaagagcatttttctttgaaaacatgtatatggataataataattactactttctaaaatgtttgaaatatcagacatagaaatcatagcatctattaaaacaactttgcctttc

SEQ ID NO: 288202 - DNA, 782 bp, Homo sapiens
  misc_feature (776)..(776): n is a, c, g, or t
ggttaaatatagacaagaattattggaaaggcgtttgatggagaaaaaggaagtggcccttcaagaagctcatgaagacaaagagagagcacggcggctagaagcccttaggaaacaggttgctgttgttgctcaatttgatcctgttagaatgatgtcagatacaatggcatcaaaagctagaatgggcattgaaattgaagaagaatttattcttcaaaagccactcttcacattgaatacatacaatgaacagcagataatttctgaccctagacttcgcttcgagttagcacttcgagaagctggacttcatagaacactttatgctaaagagatattaccaaaaattagtcctcaaaaacctccaagaaaggacatggagtctactgtatttaaaatatagagctcatcctcaaattctatatgtaaagagcatttttctttgaaaacatgtatatggataataataattactactttctaaaatgtttgaaatatcagacatagaaatcatagcatctattaaaacaactttgcctttcttttgtgattcttagaattttatgcactatatttcctgtatctttaagttatatttaatagtactaaattcccccaaattatggaacttaattatggcacatatagtacttatactataatttagtaaactacatgttggaggttatgttatcctataaaaagagctcaaaataactttgtgagaattataaattatgtagctgctcaaaaacaaaaacaagaaggcggtncggcgc

SEQ ID NO: 288203 - DNA, 5959 bp, Homo sapiens
  misc_feature (1)..(1): n is a, c, g, or t
  misc_feature (4)..(4): n is a, c, g, or t
  misc_feature (10)..(10): n is a, c, g, or t
  misc_feature (14)..(14): n is a, c, g, or t
  misc_feature (16)..(16): n is a, c, g, or t
  misc_feature (18)..(18): n is a, c, g, or t
  misc_feature (494)..(494): n is a, c, g, or t
  misc_feature (885)..(885): n is a, c, g, or t
  misc_feature (2884)..(2884): n is a, c, g, or t
  misc_feature (2940)..(2940): n is a, c, g, or t
ntcncttacntctngncnggattggaggagccatacccactgtgttctcgtactttgctgaagtcctggcccgggaaaagcggggcgaacacttgagctggctctgcatgttctggatgatcggtggcatctacgcctctgccatggcctgggccatcatcccgcactacgggtggagcttcagcatgggatcggcctaccagtttcacagttggcgtgtgtttgtcatcgtctgtgcactcccctgtgtctcctccgtggtggccctcacattcatgcctgaaagcccacgattcttgttggaggttggaaaacatgatgaagcttggatgattctgaagttaattcatgacaccaacatgagagcccggggtcagcctgagaaggtcttcacggtaaacaaaataaaaactcctaaacaaatagatgagctgattgaaattgagagtgacacaggaacatggtataggaggtgttttgttcggatccgcacngagctgtacggaatttggttgacttttatgagatgtttcaactacccagtcagggataatacaataaagcttacaattgtttggttcaccctgtcctttgggtactatggattatccgtttggttccctgatgtcattaaacctctgcagtccgatgaatatgcattgctaaccagaaatgtggagagagataaatatgcaaatttcagtattaactttacaatggaaaatcagattcatactggaatggaatacgacaatggcagattcataggggtcaagttcaaatctgtaactttcaaagactctgtttttaagtcctgcacctttgaggatgtaacttcagtgaacacctacttcaagaactgcacatttattgacactgtttttnacaacacagattttgagccatataaattcattgacagtgaatttaaaaactgctcgttttttcacaacaagacgggatgtcagattacctttgatgatgactatagtgcctactggatttattttgtcaactttctggggacattggcagtattgccagggaacattgtgtctgctctgctgatggacagaattgggcgcttaacaatgctaggtggctctatggtgctttcggggatcagctgtttcttcctttggttcggcaccagtgaatccatgatgataggcatgctgtgtctgtacaatggattgaccatctcagcctggaactctcttgacgtggtcactgtggaactgtaccccacagaccggagggcaacaggctttggcttcttaaatgcgctatgcaaggcagcagccgtcctgggaaacttaatatttggctctctggtcagcatcaccaaatcaatccccatcctgctggcttctactgtgctcgtgtgtggaggactcgttgggctgtgcctgcctgacacacgaacccaggttctgatgtaatgggaaaaaaagccatccttcctgcgtttcttcctcctgccctgggtcaattctccttcctgactcaaggcttcagagttttcctatatagaaaggtgatcaagtatcagaacataaacacgtgctgtgacttaaaatttagaagcatatcatcttgcccctttgtgattttgcacaggttgtttgtttgttttgttttgtttgaatgcattgttatctttccaaactgtgatgctactgcctcccgcaaatcagtggaagcatttctaaaatgccctaggcagccaggcttccctggggttctgctcattgaaagtttagaagctaagaagactgggctggtgtaagaaatagatcctgctcctaatttaacattaacaggaaatataagtcggcacattattgcatttgtgctgagaagagggattctttttttttttttttctaacagagtgatatttcctgtttacttagaaaaggacacccagtaattctcactgttatagcagagcctttcaaagaaaaccatgtggcaccaaacagggctgggtggggctctttggggcaagacaattaaggtgaccgctgacaagaaaaataaaagctctgcaattagcagcaaaaatctgagtgtgctgcataagcaagatttctgtcagaaagcccaattaaacctctgaaaagtgtgaggaaaaagaactgtaacagtatctgtgactgtggcatgtggttcagaatgtttgaaaatcagagatccgagagagagcttctgcctccatttaccactcccactccttcagctgcccttggtcttgccagacagcagattcagggaaagaaagctgcttcttaaaaactgtctgcctacctgattctgccacttacccacactgtctctagtctagagattgccagtggatagctaaattgtaaattgcaaattaggaagaaattcacacccagagccatttggaaatacaaaatggtacctctttccagtacctctttgctgtgggactggcccgccaggacccccaccccacctggcccgcagttgacattcagcttcccagctggcatcagcaaagagggtttgtccctctagcttccccagggctggcccactgctcaatgcgctcctggctccctgtaaaatcacagcccgcctgcactcctgagggcccctctcacagacagaccatctccctgtggttgtttgactgctcattttacctctggaatctgcctgggcttggaagaaagaggtcagccaggacattcccacgggcccgctgtcagctacatgaccttctcgcctctcaggctccccttcccccaggctcgtcctttttacacctcttctttgaaatctgaaccttccttgtagacttgcagccaatgaccagaagccaggaataaatcccatatttaaacaatattcnttttttaactgcctcgatagaggtttattcttgttacttattataggcattttcangcaagccatagcttggggcctccaggaagggaaagcttttgtttccactgatcattattttcagagatgtcctaactcccctgaggcccccctgcctccccctccccttcctaatgatccctcgcagagctcagactaagtgaaaagcttctttcattaacataagccattaatcgacttccccttgaagtaattcaggtctgcagaggggggaagactggtgttgggggcagtgggaagagggtggttccctgggggtctgtgatcagggctagaacatcaggaaaacccgaaccaaaaactgcaaaggtggcaggaagaagaaaaatcactgaaggctagacaagatgcatttgaaagataccaaccgcacagggaaagaaacaactttctctcacttctgcctcctatcattttattggagaacaaagacagcagtcaaacaacccaagaaagtaccctgtatgtttttcttcttccacatgtacccattttcccacctatctctccctgatttgtcttctttaaaaagacatttggggacctgagcaggtcttttagttgaatgcagcatgtgcagaaataactgcaaaagccaggagtgcatctccatcaacccatcaaaagaaaaatagaaatgtacatgggcatcgctgtctctagtcctctgtgatagttcactttgctaactagactacctttacttttcaaaatatctctaatgtctgctctggggtctaaatgcataaaacatctcccaagctgcagagcacagttattcagaattttatttgaacactgggttgggtcagcataggataaaccagcaaaaccttacttcatgagacctgccatccgtgtcccctgcagaaggaccgttcttggcctacttgttacctaatccgagcatccttggtggcctaagagggatcttttctcatctcctggacagtctgtggtcacaaaccttcttggtcaccacctctcccaccttttgtgcactcttccctgcctccttgagactgttcatcaccttgattttctaagagagctcaaatcatttccaaagcatgtggtgtggcctgtatagcttgctccagatttagctggagattaagaaacagccaggatattaaacagaaactctcagttgtatcagtgtagcaggccactggcacctaaacacgcaactggcatctcatttcgcctacagtagaaggaaaatgaaaatttgtacaaaaatgaaaacctaggaaatagtccacttgctcctatatttttaccaccttttctaactaaaatttccctgttgctctttggaatcaatccagaatgctcccaagtcccattattatcacagaatcttctcagtagggaaaaacaaacaactgcttcaaactgtgaattctgtatgtaccacattctatcccaggtattgggttttaaggcacccaactcacattcagtcctgctgcctgaatcatctcacaccagagtacagaccttggagacgcgatagatgggtcctagcctgaccttcaccactaagcggtacagggacccagatcttgctgtggagactgtaagtcgttgaacatctctagttctcactttccccgtgcacaaaataaaggattgggactagtctgctctccactctccagcattgtagaagacagtaatgaaaatagcttcatcttatctgccttcttatgctaaactcattttttttttttttaggtggagtttcactctgttgcccaggctggagtgcagtggtgggaactctgctcactgcaacctccgcctcccaggttcaagtgattctcccacctcagcctcccaagtagctgggaccacacgcatgcgccaccacgcccagctaatttttgtatcttttagtagaggtggggtttcaccgtgttggtcaggctggtctcgaactcctgacctcaagtgatcggcccacctcagcctcccaaaatgctgggattacaggcgtgagccactggcggcctcaactcatttttacaagcactaaataggtttagtttataaactgaaaaattaggaaataggcacgcataaaaagagtgtaggaagttgtttgggaagcccgcatggaataggccagaaagcacagtccccatgctgtctgccctgccagcatctcagcatcctgactagtatctctgttcactgcaggtttgacagttaccatcacccagccagaaaagggccccgccttgccagataaacgcgcttaggttagaagactataattgcaatattaccctacagctctcctgactgtttattccattattttcttgaaacatggccttaagtattatacataggcttcagaaacagtttttcagtgattttacctatattggcaaatagacaaatctcaccaaatcagagttcaggttttcaccaaaaactgcttagttgtctttcaagataccttaagagatcaaaggggaggtgggaaaagaaatgtagtgacagaagggagagtccaagataccactgataaggttccagcaaagagattaggacacagcagagactttctaaatgctggggtcatttccaaagcagtccaggggaatactttctgattccctctgccaatcaaaatagatagaatatgatattctccaattttttttctgtttgatgtcaaaatggcctttacctatttcttcagtaatatacctgatctgttcatgcactaaaggctctggagccaggaatgtctgaatttggccttcacctggtatcacagaaagacaactgggatattggtgttaaggggcatatcggctgtatgttaggttttctttaatcctcacatcgtgccaaacttagtctggttactaagcctaaaaacaccagtattgcaacaacttctgaaactctgaagtggactatatgtttctcacagtttttgtttatgctcagcaaagtatgtattttaagtaaagcttctcttgttatctgtaatgtagac

SEQ ID NO: 288204 - DNA, 940 bp, Homo sapiens
  misc_feature (1)..(1): n is a, c, g, or t
  misc_feature (4)..(4): n is a, c, g, or t
  misc_feature (10)..(10): n is a, c, g, or t
  misc_feature (14)..(14): n is a, c, g, or t
  misc_feature (16)..(16): n is a, c, g, or t
  misc_feature (18)..(18): n is a, c, g, or t
  misc_feature (494)..(494): n is a, c, g, or t
ntcncttacntctngncnggattggaggagccatacccactgtgttctcgtactttgctgaagtcctggcccgggaaaagcggggcgaacacttgagctggctctgcatgttctggatgatcggtggcatctacgcctctgccatggcctgggccatcatcccgcactacgggtggagcttcagcatgggatcggcctaccagtttcacagttggcgtgtgtttgtcatcgtctgtgcactcccctgtgtctcctccgtggtggccctcacattcatgcctgaaagcccacgattcttgttggaggttggaaaacatgatgaagcttggatgattctgaagttaattcatgacaccaacatgagagcccggggtcagcctgagaaggtcttcacggtaaacaaaataaaaactcctaaacaaatagatgagctgattgaaattgagagtgacacaggaacatggtataggaggtgttttgttcggatccgcacngagctgtacggaatttggttgacttttatgagatgtttcaactacccagtcagggataatacaataaagcttacaattgtttggttcaccctgtcctttgggtactatggattatccgtttggttccctgatgtcattaaacctctgcagtccgatgaatatgcattgctaaccagaaatgtggagagagataaatatgcaaatttcagtattaactttacaatggaaaatcagattcatactggaatggaatacgacaatggcaggtctagaaacttgaaataatttaatttgctacctattcacaaaaacttatttcttcttagctttccctgcactgaaacaggcatagttttttgtttgtttgttttagtttgtacatttagtcattttcatgatgaatttcaatacttcttaataggctttaaataaaaggtacaaatgta

SEQ ID NO: 288205 - DNA, 1055 bp, Homo sapiens
attcaagcctgggccctggaaggaggggtggacagtcccctcccttccagtccagcatgggtctggggaagaggagcagctttgcctggaaggggcctcctaggagggggagcggtggtttctagctcaggctttaggatcagagagcagcagattcaaatcctgacggttttggtaaagtcaattcaatctctccaagactccgtttatttgatctgcgaagtggggataatggtatcacgtcgcagggttgtcaggcggagctggtaggggagctgccccccagagcagcatggatgccccgcgaagggacatggagttgctcagcaacagcctggctgcctacgcgcacatccgcgccaaccccgagagcttcggcctctacttcgtgctgggcgtctgcttcggcctgctgctcaccctctgcctgctcgtcatcagcatctcgtgggcgccccgcccgcggccccggggcccggctcagcgccgggacccccgcagcagcaccctggagcccgaggacgacgacgaggacgaggaggacacggtgactcggctgggccccgacgacacgctgccgggccccgagctgtccgcagagccggacgggcccctcaacgtcaacgtcttcacgtcggcggaggagctggagcgggcgcagcggctggaggagcgcgaacggatcctgcgggagatctggcgcaccgggcagccggacctgctgggcacaggcacgctggggcccagccccacggccacgggcaccctgggccgcatgcactattactgatgggccccggctcccgctgcaaggcgctcggggtaccggacctgcacatgagctcagagctaccccacaccttcggactgcctcggcccccacagctcccaggtgctactgggcgtggaccgccaccccctgagaggctcccttccccagtcctgccagaagaccccgggggcggggagggggcagcatgcagggtccccactccctctctggggtcgatgaagaggtgaagtgaccaaatgaaagaaagctgcattctcagtga

SEQ ID NO: 288206 - DNA, 808 bp, Homo sapiens
ctattaggctaggtacgaggctgggtttgaatcggccgaggcagcatggatgccccgcgaagggacatggagttgctcagcaacagcctggctgcctacgcgcacatccgcgccaaccccgagagcttcggcctctacttcgtgctgggcgtctgcttcggcctgctgctcaccctctgcctgctcgtcatcagcatctcgtgggcgccccgcccgcggccccggggcccggctcagcgccgggacccccgcagcagcaccctggagcccgaggacgacgacgaggacgaggaggacacggtgactcggctgggccccgacgacacgctgccgggccccgagctgtccgcagagccggacgggcccctcaacgtcaacgtcttcacgtcggcggaggagctggagcgggcgcagcggctggaggagcgcgaacggatcctgcgggagatctggcgcaccgggcagccggacctgctgggcacaggcacgctggggcccagccccacggccacgggcaccctgggccgcatgcactattactgatgggccccggctcccgctgcaaggcgctcggggtaccggacctgcacatgagctcagagctaccccacaccttcggactgcctcggcccccacagctcccaggtgctactgggcgtggaccgccaccccctgagaggctcccttccccagtcctgccagaagaccccgggggcggggagggggcagcatgcagggtccccactccctctctggggtcgatgaagaggtgaagtgaccaaatgaaagaaagctgcattctcagtga

SEQ ID NO: 288207 - DNA, 1749 bp, Homo sapiens
attcaagcctgggccctggaaggaggggtggacagtcccctcccttccagtccagcatgggtctggggaagaggagcagctttgcctggaaggggcctcctaggagggggagcggtggtttctagctcaggctttaggatcagagagcagcagattcaaatcctgacggttttggtaaagtcaattcaatctctccaagactccgtttatttgatctgcgaagtggggataatggtatcacgtcgcagggttgtcaggcggagtaagtgaaagaacctgtccaaggtttagcccttggcccgcacgcaggcagagctccagcctctctgttgttgctgttagtggcctgggggcgggtccctgccgcggcctccccggcggtttcctcggaggaaactttccgccggctggtccctcggtccgtgtcccgcccgtgctgccgcggcctgggagcccagcggggccggaggggcggcgggacccgagcgggcgggggcggccggacccagtgtatgcggccgcgggacgcgctggggccgggcagccgggaagcggggcgctgacggtgagtgggcctggccccgggccggtgggtccccgcggggcggccgggcgaggagagaggcagcttcccttcccggagcccgcctggggcgtggaggctcagcgtccctatcctccatcccgccccgggacggcggaaccgggcctcagctggggacctcaccagggggcggggcctcccgcggtccccggcgctgctcccaggactggaggggcgtccgcgcccgggagaggggttccccccgacagggccccgggccgccacgaagttagggaagcgctctctccagggtggaacctgggcccgcggctcccgggagaggagctgcccgcggaaggggtcggggtgggctccaggctgggagaaggatctgactttgctgacctcgcaggctggtaggggagctgccccccagagcagcatggatgccccgcgaagggacatggagttgctcagcaacagcctggctgcctacgcgcacatccgcgccaaccccgagagcttcggcctctacttcgtgctgggcgtctgcttcggcctgctgctcaccctctgcctgctcgtcatcagcatctcgtgggcgccccgcccgcggccccggggcccggctcagcgccgggacccccgcagcagcaccctggagcccgaggacgacgacgaggacgaggaggacacggtgactcggctgggccccgacgacacgctgccgggccccgagctgtccgcagagccggacgggcccctcaacgtcaacgtcttcacgtcggcggaggagctggagcgggcgcagcggctggaggagcgcgaacggatcctgcgggagatctggcgcaccgggcagccggacctgctgggcacaggcacgctggggcccagccccacggccacgggcaccctgggccgcatgcactattactgatgggccccggctcccgctgcaaggcgctcggggtaccggacctgcacatgagctcagagctaccccacaccttcggactgcctcggcccccacagctcccaggtgctactgggcgtggaccgccaccccctgagaggctcccttccccagtcctgccagaagaccccgggggcggggagggggcagcatgcagggtccccactccctctctggggtcgatgaagaggtgaagtgaccaaatgaaagaaagctgcattctcagtga

SEQ ID NO: 288208 - DNA, 1640 bp, Homo sapiens
attcaagcctgggccctggaaggaggggtggacagtcccctcccttccagtccagcatgggtctggggaagaggagcagctttgcctggaaggggcctcctaggagggggagcggtggtttctagctcaggctttaggatcagagagcagcagattcaaatcctgacggttttggtaaagtcaattcaatctctccaagactccgtttatttgatctgcgaagtggggataatggtatcacgtcgcagggttgtcaggcggagtaagtgaaagaacctgtccaaggtttagcccttggcccgcacgcaggcagagctccagcctctctgttgttgctgttagtggcctgggggcgggtccctgccgcggcctccccggcggtttcctgtgggggacggacggcccgcgggccgggctctccctcctcccggctgcccgctcctctccccttcctctcccagcccttttcctccccgcctccccgcccgccccgccccgccccgtccctcctctttcctcggaggaaactttccgccggctggtccctcggtccgtgtcccgcccgtgctgccgcggcctgggagcccagcggggccggaggggcggcgggacccgagcgggcgggggcggccggacccagtgtatgcggccgcgggacgcgctggggccgggcagccgggaagcggggcgctgacggtgagtgggcctggccccgggccggtgggtccccgcggggcggccgggcgaggagagaggcagcttcccttcccggagcccgcctggggcgtggaggctcagcgtccctatcctccatcccgccccgggacggcggaaccgggcctcagctggggacctcaccagggggcggggcctcccgcggtccccggcgctgctcccaggactggaggggcgtccgcgcccgggagaggggttccccccgacagggccccgggccgccacgaagttagggaagcgctctctccagggtggaacctgggcccgcggctcccgggagaggagctgcccgcggaaggggtcggggtgggctccaggctgggagaaggatctgactttgctgacctcgcaggctggtaggggagctgccccccagagcagcatggatgccccgcgaagggacatggagttgctcagcaacagcctggctgcctacgcgcacatccgcgccaaccccgagagcttcggcctctacttcgtgctgggcgtctgcttcggcctgctgctcaccctctgcctgctcgtcatcagcatctcgtgggcgccccgcccgcggccccggggcccggctcagcgccgggacccccgcagcagcaccctggagcccgaggacgacgacgaggacgaggaggacacggtgactcggctgggccccgacgacacgctgccggggtaccggacctgcacatgagctcagagctaccccacaccttcggactgcctcggcccccacagctcccaggtgctactgggcgtggaccgccaccccctgagaggctcccttccccagtcctgccagaagaccccgggggcggggagggggcagcatgcagggtccccactccctctctggggtcgatgaagaggtgaagtgaccaaatgaaagaaagctgcattctcagtga

SEQ ID NO: 288209 - DNA, 1880 bp, Homo sapiens
attcaagcctgggccctggaaggaggggtggacagtcccctcccttccagtccagcatgggtctggggaagaggagcagctttgcctggaaggggcctcctaggagggggagcggtggtttctagctcaggctttaggatcagagagcagcagattcaaatcctgacggttttggtaaagtcaattcaatctctccaagactccgtttatttgatctgcgaagtggggataatggtatcacgtcgcagggttgtcaggcggagtaagtgaaagaacctgtccaaggtttagcccttggcccgcacgcaggcagagctccagcctctctgttgttgctgttagtggcctgggggcgggtccctgccgcggcctccccggcggtttcctgtgggggacggacggcccgcgggccgggctctccctcctcccggctgcccgctcctctccccttcctctcccagcccttttcctccccgcctccccgcccgccccgccccgccccgtccctcctctttcctcggaggaaactttccgccggctggtccctcggtccgtgtcccgcccgtgctgccgcggcctgggagcccagcggggccggaggggcggcgggacccgagcgggcgggggcggccggacccagtgtatgcggccgcgggacgcgctggggccgggcagccgggaagcggggcgctgacggtgagtgggcctggccccgggccggtgggtccccgcggggcggccgggcgaggagagaggcagcttcccttcccggagcccgcctggggcgtggaggctcagcgtccctatcctccatcccgccccgggacggcggaaccgggcctcagctggggacctcaccagggggcggggcctcccgcggtccccggcgctgctcccaggactggaggggcgtccgcgcccgggagaggggttccccccgacagggccccgggccgccacgaagttagggaagcgctctctccagggtggaacctgggcccgcggctcccgggagaggagctgcccgcggaaggggtcggggtgggctccaggctgggagaaggatctgactttgctgacctcgcaggctggtaggggagctgccccccagagcagcatggatgccccgcgaagggacatggagttgctcagcaacagcctggctgcctacgcgcacatccgcgccaaccccgagagcttcggcctctacttcgtgctgggcgtctgcttcggcctgctgctcaccctctgcctgctcgtcatcagcatctcgtgggcgccccgcccgcggccccggggcccggctcagcgccgggacccccgcagcagcaccctggagcccgaggacgacgacgaggacgaggaggacacggtgactcggctgggccccgacgacacgctgccgggccccgagctgtccgcagagccggacgggcccctcaacgtcaacgtcttcacgtcggcggaggagctggagcgggcgcagcggctggaggagcgcgaacggatcctgcgggagatctggcgcaccgggcagccggacctgctgggcacaggcacgctggggcccagccccacggccacgggcaccctgggccgcatgcactattactgatgggccccggctcccgctgcaaggcgctcggggtaccggacctgcacatgagctcagagctaccccacaccttcggactgcctcggcccccacagctcccaggtgctactgggcgtggaccgccaccccctgagaggctcccttccccagtcctgccagaagaccccgggggcggggagggggcagcatgcagggtccccactccctctctggggtcgatgaagaggtgaagtgaccaaatgaaagaaagctgcattctcagtga

SEQ ID NO: 288210 - DNA, 1489 bp, Homo sapiens
attcaagcctgggccctggaaggaggggtggacagtcccctcccttccagtccagcatgggtctggggaagaggagcagctttgcctggaaggggcctcctaggagggggagcggtggtttctagctcaggctttaggatcagagagcagcagattcaaatcctgacggttttggtaaagtcaattcaatctctccaagactccgtttatttgatctgcgaagtggggataatggtatcacgtcgcagggttgtcaggcggagtaagtgaaagaacctgtccaaggtttagcccttggcccgcacgcaggcagagctccagcctctctgttgttgctgttagtggcctgggggcgggtccctgccgcggcctccccggcggtttcctgtgggggacggacggcccgcgggccgggctctccctcctcccggctgcccgctcctctccccttcctctcccagcccttttcctccccgcctccccgcccgccccgccccgccccgtccctcctctttcctcggaggaaactttccgccggctggtccctcggtccgtgtcccgcccgtgctgccgcggcctgggagcccagcggggccggaggggcggcgggacccgagcgggcgggggcggccggacccagtgtatgcggccgcgggacgcgctggggccgggcagccgggaagcggggcgctgacggctggtaggggagctgccccccagagcagcatggatgccccgcgaagggacatggagttgctcagcaacagcctggctgcctacgcgcacatccgcgccaaccccgagagcttcggcctctacttcgtgctgggcgtctgcttcggcctgctgctcaccctctgcctgctcgtcatcagcatctcgtgggcgccccgcccgcggccccggggcccggctcagcgccgggacccccgcagcagcaccctggagcccgaggacgacgacgaggacgaggaggacacggtgactcggctgggccccgacgacacgctgccgggccccgagctgtccgcagagccggacgggcccctcaacgtcaacgtcttcacgtcggcggaggagctggagcgggcgcagcggctggaggagcgcgaacggatcctgcgggagatctggcgcaccgggcagccggacctgctgggcacaggcacgctggggcccagccccacggccacgggcaccctgggccgcatgcactattactgatgggccccggctcccgctgcaaggcgctcggggtaccggacctgcacatgagctcagagctaccccacaccttcggactgcctcggcccccacagctcccaggtgctactgggcgtggaccgccaccccctgagaggctcccttccccagtcctgccagaagaccccgggggcggggagggggcagcatgcagggtccccactccctctctggggtcgatgaagaggtgaagtgaccaaatgaaagaaagctgcattctcagtga

SEQ ID NO: 288211 - DNA, 653 bp, Homo sapiens
gccctccgggaagcggggcgctgacggctggtaggggagctgccccccagagcagcatggatgccccgcgaagggacatggagttgctcagcaacagcctggctgcctacgcgcacatccgcgccaaccccgagagcttcggcctctacttcgtgtgggccccgacgacacgctgccgggccccgagctgtccgcagagccggacgggcccctcaacgtcaacgtcttcacgtcggcggaggagctggagcgggcgcagcggctggaggagcgcgaacggatcctgcgggagatctggcgcaccgggcagccggacctgctgggcacaggcacgctggggcccagccccacggccacgggcaccctgggccgcatgcactattactgatgggccccggctcccgctgcaaggcgctcggggtaccggacctgcacatgagctcagagctaccccacaccttcggactgcctcggcccccacagctcccaggtgctactgggcgtggaccgccaccccctgagaggctcccttccccagtcctgccagaagaccccgggggcggggagggggcagcatgcagggtccccactccctctctggggtcgatgaagaggtgaagtgaccaaatgaaagaaagctgcattctcagtga

SEQ ID NO: 288212 - DNA, 345 bp, Homo sapiens
tagaagcggcccccgcagacgctcggcaggtgtcttgatattatcatctgctgagggtggagctgagggtggaaggggagtgagctgacgctcggaaggtgtcttgagattatcatccgctgagggtggaagcggcccccgcagacgctcggcaggtgtattgatattatcatctgctgagggtggaagggcagtgagctgacgctcggaaggtgtcttgagattatcatccgctgagggtggaagcggcccccgcagacgctcggcaggtgtcttgatattatcatctgctgagggtggagctgagggtggaaggggagtgagctgacgctcaggggtcttgag

SEQ ID NO: 288213 - DNA, 486 bp, Homo sapiens
cggaatccgcagacgctcagcaggtatcttgatattatcatctgctgagggtggagctgagggtggaaggggagtgagctgacgctcggaaggtgtcttgagatcatccgctgagggtggaaggcaggtgtcttgatattatcatctgctgagggtggagctgagggtggaaggggagtgagctgacgctcggaaggtgtcttgagattatcatccgctgagggtggaaggggatggagcagacactcggcacgtgtcttgagattatcatccgctgagggtggagctgagggtagagctgagggtggaaggggagtgagtagacactcgggaggtgtcttgagattatcatccgctgagggtggaaggggagtgagcagacactcaggaggtgtcttgagattatcatccgctgagggtggaaggggagtgagcacacactcgggaggtgtcttgagattatcatccgctgagggtggaagggga

SEQ ID NO: 288214 - DNA, 650 bp, Homo sapiens
acccgcgaggcgggcccgcctccgcgtactcaccgggcctcccgggccgccggctcggccctcctctccctcctccccccgccgccgcctctcccgcggctccccaggcggccgcactgggcgttgggactggtctgggtcaagtgtcggcagagctgggggcaggctcgcgccgggcgggggtcgcggtcggcccacaggctgggcactaacgggtcccggggcgccggggcggactgcggcgcggcgctggcgctggttagaggttcgccggtgacgtgagcgcccgagttgggggagaggaccagaaccacctgctggagaaagggagctacgggggccgggcagggtccaaacgcctcacgtgggcggcggcgccacggtcttcggggtcacaggtcgtagtggactaattttacaggcgaagttaagtgacttacccaaaacctcacagctaataaacggcagagccggcacccagctgtactggcttccagcgcatcccattatctccataaatccccctgattcaactaatattagacgccccacagctggaccctggacacggtgactctgattcaattatgcagatgaccacaagcctctggggttggcagagccacaagaaagaaggtgcctggatgaag

SEQ ID NO: 288215 - DNA, 936 bp, Homo sapiens
agtcgctcccggctccgcggccgcggaggtgtggggacccgggcttgcgtcggagggggcggtgggctcacccatgggcctttccaaaagcaaagagaaacccaggaaaggtgaggagcaaaagaagggatccacctattcagttccaaaatctaaggagaagttgatggagaagcattcccaggaagccaggcaggcagacagggagtcggagaagcctgtggacagcctccacccgggggccgggacagccaagcacccgccgccggcagcttcgctggaagagaaacctgatgtaaagcaaaagtccagcaggaagaaagtggtcgttccacagatcatcatcacgcgagcgtcgaatgagacgctagtcagttgcagttccagcgggagtgaccagcagagaaccattcgggagccggaggactggggcccctaccggcggcacaggaaccccagtacagcagacgcctataattcacatctcaaagaataaacaagcacctttgcatggcactcgctactccctgcgataggcgtctcgggaacagccgcctcaccctgtgagaagccgaggccccttctccagtgctctcggggaggttgcaccaggcccaccccaccctgtgagaaactgcagcccccttctccagtgctttcggggagggtgcaccaggcccgccccaccttgtgagaagccgtggcccccttctccagtgctctcagggagggtgcaccaggcctgcccccgccgtgagaaactgcagtccccttctccagtgctctcggggagggtgcaccaggcccaccccaccctgtgagaacctgcagcccccttctccaatgctcttcggggagggtacaccagggttgccccaccctgtgagaagccaccgcccccttctccagtgctctcggggagggtgcaccagggct

SEQ ID NO: 288216 - DNA, 583 bp, Homo sapiens
tgtaatctgagtcagcttatgaaaaggccccaaagaagaaagtggaatgtgtgctgggcacatgggacagccatggcactgagactttggaagtggccttgccagcgctgtcctgtctttctggcccacagatgagggctcctgattgtggaaggccacggaagggacctgaacacgatggcacgagacaagttatctcctgtgactgctcctctccagcaaccctcagctcaggctagactttccccctgtgttgagaatgccctgccctgtgtggaagcctgatgcatttagtgacagtgtgttagctttgttagtttctagtctggccagcaggctttccatgtgatctgccattggcttgcttcagtggccagtggagccaggggtgtccaccagagtcttggacacagacttctgaggtggcagcgggagggagcctgctccctgccacacacgtacaatttctaatccatacaggcctatgtagtatatacacacatacgcagagccttaggaattgtgaaaggccaatcaaaacttggggccctaatttcactctgccaaaagaaaaaaaaaaaaa

SEQ ID NO: 288217 - DNA, 827 bp, Homo sapiens
agcgcaggcgccaggctcggcccggtgcgaaccgttcctgccgccgagtccgccacggacggcgcgtttcccgcctgaggcggttacggaaacgcggagactcgagacttgaagccagcttattctggacccacgcaggcgactgaagacgatgggacccactgccctgcattcgagaaacctgatgtaaagcaaaagtccagcaggaagaaagtggtcgttccacagatcatcatcacgcgagcgtcgaatgagacgctagtcagttgcagttccagcgggagtgaccagcagagaaccattcgggagccggaggactggggcccctaccggcggcacaggaaccccagtacagcagacgcctataattcacatctcaaagaataaacaagcacctttgcatggcactcgctactccctgcgataggcgtctcgggaacagccgcctcaccctgtgagaagccgaggccccttctccagtgctctcggggaggttgcaccaggcccaccccaccctgtgagaaactgcagcccccttctccagtgctttcggggagggtgcaccaggcccgccccaccttgtgagaagccgtggcccccttctccagtgctctcagggagggtgcaccaggcctgcccccgccgtgagaaactgcagtccccttctccagtgctctcggggagggtgcaccaggcccaccccaccctgtgagaacctgcagcccccttctccaatgctcttcggggagggtacaccagggttgccccaccctgtgagaagccaccgcccccttctccagtgctctcggggagggtgcaccagggct

SEQ ID NO: 288218 - DNA, 1039 bp, Homo sapiens
agcgcaggcgccaggctcggcccggtgcgaaccgttcctgccgccgagtccgccacggacggcgcgtttcccgcctgaggcggttacggaaacgcggagactcgagacttgaagccagcttattctggacccacgcaggcgactgaagacgatgggacccactgccctgcattcggtaagtcccgggtctaacggatgatccatatatttcaggtgaggagcaaaagaagggatccacctattcagttccaaaatctaaggagaagttgatggagaagcattcccaggaagccaggcaggcagacagggagtcggagaagcctgtggacagcctccacccgggggccgggacagccaagcacccgccgccggcagcttcgctggaagagaaacctgatgtaaagcaaaagtccagcaggaagaaagtggtcgttccacagatcatcatcacgcgagcgtcgaatgagacgctagtcagttgcagttccagcgggagtgaccagcagagaaccattcgggagccggaggactggggcccctaccggcggcacaggaaccccagtacagcagacgcctataattcacatctcaaagaataaacaagcacctttgcatggcactcgctactccctgcgataggcgtctcgggaacagccgcctcaccctgtgagaagccgaggccccttctccagtgctctcggggaggttgcaccaggcccaccccaccctgtgagaaactgcagcccccttctccagtgctttcggggagggtgcaccaggcccgccccaccttgtgagaagccgtggcccccttctccagtgctctcagggagggtgcaccaggcctgcccccgccgtgagaaactgcagtccccttctccagtgctctcggggagggtgcaccaggcccaccccaccctgtgagaacctgcagcccccttctccaatgctcttcggggagggtacaccagggttgccccaccctgtgagaagccaccgcccccttctccagtgctctcggggagggtgcaccagggct

SEQ ID NO: 288219 - DNA, 1116 bp, Homo sapiens
agcgcaggcgccaggctcggcccggtgcgaaccgttcctgccgccgagtccgccacggacggcgcgtttcccgcctgaggcggttacggaaacgcggagactcgagacttgaagccagcttattctggacccacgcaggcgactgaagacgatgggacccactgccctgcattcggtaagtcccgggtctaacggatgatccatatatttcaggtgaggagcaaaagaagggatccacctattcagttccaaaatctaaggagaagttgatggagaagcattcccaggaagccaggcaggcagacagggagtcggagaagcctgtggacagcctccacccgggggccgggacagccaagcacccgccgccggcagcttcgctggaaggtaggagacggcgggagggagcgaagcgaggtcagtggcttggaggatctggggctggggtgaggagcctactgtaagaccctaccggatggacactagtagcaggcacgcgccgtaaagatgaaactggtttgttttgggaactttatgtaggaggtaaatatccagaaatcttagttgaaaacataagtttaatgaaaatgtaggtcagttcccgagtgataagtgcgtaccaggtggtcgaggggctggggcagtgtgcgtgtgtctcacctgaggttctcctcgagggctgggtatcttggtgccactgagaatccctgagcctccgcacactggaacagagcattgggaggccgtcccaggctggactgtagctctccgagggctgtggggataagtacattgcggagggtgaccgaggagtagaacctgggtgcgacaaaggtgtcttttataacagcctagtgtggccagacctttgggtgtgtgtggggaagatgaggccccaaaagtaggaagaagctagaatacaaagttttccatcagttttaccacgtggagctggaagcgttaaatattttaaacaacggaggtgctgcctggggcggtagttcacacctgtcctcccagttatttggccgaggcaggaggatcttttgagcccaggagttcaagaccagcttgggcaacatagtgagaccctgtctctacaaaaaataaatattt

SEQ ID NO: 288220 - DNA, 1013 bp, Homo sapiens
agtcgctcccggctccgcggccgcggaggtgtggggacccgggcttgcgtcggagggggcggtgggctcacccatgggcctttccaaaagcaaagagaaacccaggaaaggtgaggagcaaaagaagggatccacctattcagttccaaaatctaaggagaagttgatggagaagcattcccaggaagccaggcaggcagacagggagtcggagaagcctgtggacagcctccacccgggggccgggacagccaagcacccgccgccggcagcttcgctggaaggtaggagacggcgggagggagcgaagcgaggtcagtggcttggaggatctggggctggggtgaggagcctactgtaagaccctaccggatggacactagtagcaggcacgcgccgtaaagatgaaactggtttgttttgggaactttatgtaggaggtaaatatccagaaatcttagttgaaaacataagtttaatgaaaatgtaggtcagttcccgagtgataagtgcgtaccaggtggtcgaggggctggggcagtgtgcgtgtgtctcacctgaggttctcctcgagggctgggtatcttggtgccactgagaatccctgagcctccgcacactggaacagagcattgggaggccgtcccaggctggactgtagctctccgagggctgtggggataagtacattgcggagggtgaccgaggagtagaacctgggtgcgacaaaggtgtcttttataacagcctagtgtggccagacctttgggtgtgtgtggggaagatgaggccccaaaagtaggaagaagctagaatacaaagttttccatcagttttaccacgtggagctggaagcgttaaatattttaaacaacggaggtgctgcctggggcggtagttcacacctgtcctcccagttatttggccgaggcaggaggatcttttgagcccaggagttcaagaccagcttgggcaacatagtgagaccctgtctctacaaaaaataaatattt

SEQ ID NO: 288221 - DNA, 492 bp, Homo sapiens
agtcgctcccggctccgcggccgcggaggtgtggggacccgggcttgcgtcggagggggcggtgggctcacccatgggcctttccaaaagcaaagagaaacccaggaaaggtgaggagcaaaagaagggatccacctattcagttccaaaatctaaggagaagttgatggagaagcattcccaggaagccaggcaggcagacagggagtcggagaagcctgtggacagcctccacccgggggccgggacagccaagcacccgccgccggcagcttcgctggaaggtaggagacggcgggagggagcgaagcgaggtcagtggcttggaggatctggggctggggtgaggagcctactgtaagaccctaccggatggacactagtagcaggcacgcgccgtaaagatgaaactggtttgttttgggaactttatgtaggagggctcagaacaggcacgcgataaaagccagcaccgttggccgggcgcattgg

SEQ ID NO: 288222 - DNA, 1078 bp, Homo sapiens
agtcgctcccggctccgcggccgcggaggtgtggggacccgggcttgcgtcggagggggcggtgggctcacccatgggcctttccaaaagcaaagagaaacccaggaaaggtgaggagcaaaagaagggatccacctattcagttccaaaatctaaggagaagttgatggagaagcattcccaggaagccaggcaggcagacagggagtcggagaagcctgtggacagcctccacccgggggccgggacagccaagcacccgccgccggcagcttcgctggaagagaaacctgatgtaaagcaaaagtccagcaggaagaaagtggtcgttccacagatcatcatcacgcgagcgtcgaatgagacgctagtcagttgcagttccagcgggagtgaccagcagagaaccattcgggagccggaggactggggcccctaccggcggcacaggaaccccagtacagcagacgcctataattcacatctcaaagaataaacaagcacctttgcatggcactcgctactccctgcgataggcgtctcgggaacagccgcctcaccctgtgagaagccgaggccccttctccagtgctctcggggaggttgcaccaggcccaccccaccctatgagggctcctgattgtggaaggccacggaagggacctgaacacgatggcacgagacaagttatctcctgtgactgctcctctccagcaaccctcagctcaggctagactttccccctgtgttgagaatgccctgccctgtgtggaagcctgatgcatttagtgacagtgtgttagctttgttagtttctagtctggccagcaggctttccatgtgatctgccattggcttgcttcagtggccagtggagccaggggtgtccaccagagtcttggacacagacttctgaggtggcagcgggagggagcctgctccctgccacacacgtacaatttctaatccatacaggcctatgtagtatatacacacatacgcagagccttaggaattgtgaaaggccaatcaaaacttggggccctaatttcactctgccaaaagaaaaaaaaaaaaa

SEQ ID NO: 288223 - DNA, 1423 bp, Homo sapiens
agtcgctcccggctccgcggccgcggaggtgtggggacccgggcttgcgtcggagggggcggtgggctcacccatgggcctttccaaaagcaaagagaaacccaggaaaggtgaggagcaaaagaagggatccacctattcagttccaaaatctaaggagaagttgatggagaagcattcccaggaagccaggcaggcagacagggagtcggagaagcctgtggacagcctccacccgggggccgggacagccaagcacccgccgccggcagcttcgctggaagagaaacctgatgtaaagcaaaagtccagcaggaagaaagtggtcgttccacagatcatcatcacgcgagcgtcgaatgagacgctagtcagttgcagttccagcgggagtgaccagcagagaaccattcgggagccggaggactggggcccctaccggcggcacaggaaccccagtacagcagacgcctataattcacatctcaaagaataaacaagcacctttgcatggcaaaaaaaaaaaaaaaaaaaaaaaaaaaaatggtgctgggacgcgccgcggaccactaggaaaaaggtcttccaaaacacatccgttggggccgccggccccaagtgggcttaggtcgaacaggggcccaagactgggtgccaaggaagaaccgggccaggacctaggggcgcggcttcctccaccaaattaaaaaagcgcgcggggccaacaccggagggtctggacacacactcccagaagggagtccggaggcacaagcgggccccactccacggggggctcaaggagaagcccgagaatactaaaaatttaacgcgccccgccccggtggaaaaagaaacagagacaggagagaaaaaacagaaagcagacaagcacgaaaggacgaacaaagacacagacaaggaccagcgaacagacagaaaaacacaaaagcaacaaaaaacagacaaacagcaacggccatgaagcagaggaacaacagaaaacaaagagagacacagaacaacaaagcggcaagaaaagcaaaacgacgacagaacagagacacgaagacaacaagaaaagcgagagacaaacacaacagatagacaacggagacacaccaaaagcaccaacgaaacaaaagagacggagcaccaaacacaggagaacaaaacagaagaggagaaagacgccaaaaacagagagagaacggcaaaagacacagggagcaggagcagaaggggacgaggaagcacagccaaacacacaagaaaagaaaagaaaaagaaaagcacagagagcaagcagggaagagagaaaacacgagacaggaaaaaagagcacaaacgaaacaaacggagaagaagagaaggagaagaaagggaatagagaaaaaagaaggcagaggaacacaccgaagag

SEQ ID NO: 288224 - DNA, 2013 bp, Homo sapiens
agtcgctcccggctccgcggccgcggaggtgtggggacccgggcttgcgtcggagggggcggtgggctcacccatgggcctttccaaaagcaaagagaaacccaggaaaggtgaggagcaaaagaagggatccacctattcagttccaaaatctaaggagaagttgatggagaagcattcccaggaagccaggcaggcagacagggagtcggagaagcctgtggacagcctccacccgggggccgggacagccaagcacccgccgccggcagcttcgctggaagtgacgggctgagcgacagtgaggagcaggctgctgactcccttgccacaccgtgaaggagtcccaaaggtgggacactgagtgagacaagccagaggaaagaccactcatgttgcagttccctttccatggaatgtccagaaaaggcacatttacagagagaagcagatgagtggttgctgggcagaaatgggagccggccacagctgagcacaagaggactttggagggtgatggaaatggttttcgacctgaatctgaacatgggaagcactgcagtttagtagtcctggtccctaagcccttccagcccaggagccagacctgtgagcaaacaagcctttagtgattccaggctctggctggaaccttgagtcttctcagcttggggcatgcacctcagggggagccagcatcagtgtccagccccaagagcttccctgtacgtctcagtgagtcttcacatgcctccaactgcctggacaaccacacgtgatacctgtcctgccaaacgtgtcctgaacccataaaatccagagaaaagaaaatcgttttaaactgctgaggtttggggtaagttactatgaagcagtagtgagaagaacagaagggccatgatggggagaaagtttggccataagttaatcactgtggcagctgttaggatattgatgtggcttggctgtgtcctcacccaaatctcattttgaattcccacatgtgggaggaactgggtgggaggtgattgaattatgggggcaggtctttcctgtgctgttttcgtgatagtgaatgagtgtcacgagatccgatggttttaaaaacgggagtttcctgcataagctctctctctgcctgctgccatccatgtaagatgtgactcgctcctccctaccttccgccgtgattgtgaggcgtccccagccatgtggaactagaaacctgatgtaaagcaaaagtccagcaggaagaaagtggtcgttccacagatcatcatcacgcgagcgtcgaatgagacgctagtcagttgcagttccagcgggagtgaccagcagagaaccattcgggagccggaggactggggcccctaccggcggcacaggaaccccagtacagcagacgcctataattcacatctcaaagaataaacaagcacctttgcatggcactcgctactccctgcgataggcgtctcgggaacagccgcctcaccctgtgagaagccgaggccccttctccagtgctctcggggaggttgcaccaggcccaccccaccctatgagggctcctgattgtggaaggccacggaagggacctgaacacgatggcacgagacaagttatctcctgtgactgctcctctccagcaaccctcagctcaggctagactttccccctgtgttgagaatgccctgccctgtgtggaagcctgatgcatttagtgacagtgtgttagctttgttagtttctagtctggccagcaggctttccatgtgatctgccattggcttgcttcagtggccagtggagccaggggtgtccaccagagtcttggacacagacttctgaggtggcagcgggagggagcctgctccctgccacacacgtacaatttctaatccatacaggcctatgtagtatatacacacatacgcagagccttaggaattgtgaaaggccaatcaaaacttggggccctaatttcactctgccaaaagaaaaaaaaaaaaa

SEQ ID NO: 288225 - DNA, 969 bp, Homo sapiens
agcgcaggcgccaggctcggcccggtgcgaaccgttcctgccgccgagtccgccacggacggcgcgtttcccgcctgaggcggttacggaaacgcggagactcgagacttgaagccagcttattctggacccacgcaggcgactgaagacgatgggacccactgccctgcattcgagaaacctgatgtaaagcaaaagtccagcaggaagaaagtggtcgttccacagatcatcatcacgcgagcgtcgaatgagacgctagtcagttgcagttccagcgggagtgaccagcagagaaccattcgggagccggaggactggggcccctaccggcggcacaggaaccccagtacagcagacgcctataattcacatctcaaagaataaacaagcacctttgcatggcactcgctactccctgcgataggcgtctcgggaacagccgcctcaccctgtgagaagccgaggccccttctccagtgctctcggggaggttgcaccaggcccaccccaccctatgagggctcctgattgtggaaggccacggaagggacctgaacacgatggcacgagacaagttatctcctgtgactgctcctctccagcaaccctcagctcaggctagactttccccctgtgttgagaatgccctgccctgtgtggaagcctgatgcatttagtgacagtgtgttagctttgttagtttctagtctggccagcaggctttccatgtgatctgccattggcttgcttcagtggccagtggagccaggggtgtccaccagagtcttggacacagacttctgaggtggcagcgggagggagcctgctccctgccacacacgtacaatttctaatccatacaggcctatgtagtatatacacacatacgcagagccttaggaattgtgaaaggccaatcaaaacttggggccctaatttcactctgccaaaagaaaaaaaaaaaaa

SEQ ID NO: 288226 - DNA, 1824 bp, Homo sapiens
agtcgctcccggctccgcggccgcggaggtgtggggacccgggcttgcgtcggagggggcggtgggctcacccatgggcctttccaaaagcaaagagaaacccaggaaaggtgaggagcaaaagaagggatccacctattcagttccaaaatctaaggagaagttgatggagaagcattcccaggaagccaggcaggcagacagggagtcggagaagcctgtggacagcctccacccgggggccgggacagccaagcacccgccgccggcagcttcgctggaagtgacgggctgagcgacagtgaggagcaggctgctgactcccttgccacaccgtgaaggagtcccaaaggtgggacactgagtgagacaagccagaggaaagaccactcatgttgcagttccctttccatggaatgtccagaaaaggcacatttacagagagaagcagatgagtggttgctgggcagaaatgggagccggccacagctgagcacaagaggactttggagggtgatggaaatggttttcgacctgaatctgaacatgggaagcactgcagtttagtagtcctggtccctaagcccttccagcccaggagccagacctgtgagcaaacaagcctttagtgattccaggctctggctggaaccttgagtcttctcagcttggggcatgcacctcagggggagccagcatcagtgtccagccccaagagcttccctgtacgtctcagtgagtcttcacatgcctccaactgcctggacaaccacacgtgatacctgtcctgccaaacgtgtcctgaacccataaaatccagagaaaagaaaatcgttttaaactgctgaggtttggggtctttcctgtgctgttttcgtgatagtgaatgagtgtcacgagatccgatggttttaaaaacgggagtttcctgcataagctctctctctgcctgctgccatccatgtaagatgtgactcgctcctccctaccttccgccgtgattgtgaggcgtccccagccatgtggaactagaaacctgatgtaaagcaaaagtccagcaggaagaaagtggtcgttccacagatcatcatcacgcgagcgtcgaatgagacgctagtcagttgcagttccagcgggagtgaccagcagagaaccattcgggagccggaggactggggcccctaccggcggcacaggaaccccagtacagcagacgcctataattcacatctcaaagaataaacaagcacctttgcatggcactcgctactccctgcgataggcgtctcgggaacagccgcctcaccctgtgagaagccgaggccccttctccagtgctctcggggaggttgcaccaggcccaccccaccctatgagggctcctgattgtggaaggccacggaagggacctgaacacgatggcacgagacaagttatctcctgtgactgctcctctccagcaaccctcagctcaggctagactttccccctgtgttgagaatgccctgccctgtgtggaagcctgatgcatttagtgacagtgtgttagctttgttagtttctagtctggccagcaggctttccatgtgatctgccattggcttgcttcagtggccagtggagccaggggtgtccaccagagtcttggacacagacttctgaggtggcagcgggagggagcctgctccctgccacacacgtacaatttctaatccatacaggcctatgtagtatatacacacatacgcagagccttaggaattgtgaaaggccaatcaaaacttggggccctaatttcactctgccaaaagaaaaaaaaaaaaa

SEQ ID NO: 288227 - DNA, 1225 bp, Homo sapiens
agtcgctcccggctccgcggccgcggaggtgtggggacccgggcttgcgtcggagggggcggtgggctcacccatgggcctttccaaaagcaaagagaaacccaggaaaggtgaggagcaaaagaagggatccacctattcagttccaaaatctaaggagaagttgatggagaagcattcccaggaagccaggcaggcagacagggagtcggagaagcctgtggacagcctccacccgggggccgggacagccaagcacccgccgccggcagcttcgctggaagtgaatgagtgtcacgagatccgatggttttaaaaacgggagtttcctgcataagctctctctctgcctgctgccatccatgtaagatgtgactcgctcctccctaccttccgccgtgattgtgaggcgtccccagccatgtggaactagaaacctgatgtaaagcaaaagtccagcaggaagaaagtggtcgttccacagatcatcatcacgcgagcgtcgaatgagacgctagtcagttgcagttccagcgggagtgaccagcagagaaccattcgggagccggaggactggggcccctaccggcggcacaggaaccccagtacagcagacgcctataattcacatctcaaagaataaacaagcacctttgcatggcactcgctactccctgcgataggcgtctcgggaacagccgcctcaccctgtgagaagccgaggccccttctccagtgctctcggggaggttgcaccaggcccaccccaccctatgagggctcctgattgtggaaggccacggaagggacctgaacacgatggcacgagacaagttatctcctgtgactgctcctctccagcaaccctcagctcaggctagactttccccctgtgttgagaatgccctgccctgtgtggaagcctgatgcatttagtgacagtgtgttagctttgttagtttctagtctggccagcaggctttccatgtgatctgccattggcttgcttcagtggccagtggagccaggggtgtccaccagagtcttggacacagacttctgaggtggcagcgggagggagcctgctccctgccacacacgtacaatttctaatccatacaggcctatgtagtatatacacacatacgcagagccttaggaattgtgaaaggccaatcaaaacttggggccctaatttcactctgccaaaagaaaaaaaaaaaaa

SEQ ID NO: 288228 - DNA, 1253 bp, Homo sapiens
agtcgctcccggctccgcggccgcggaggtgtggggacccgggcttgcgtcggagggggcggtgggctcacccatgggcctttccaaaagcaaagagaaacccaggaaaggtgaggagcaaaagaagggatccacctattcagttccaaaatctaaggagaagttgatggagaagcattcccaggaagccaggcaggcagacagggagtcggagaagcctgtggacagcctccacccgggggccgggacagccaagcacccgccgccggcagcttcgctggaagtgacgggctgagcgacagtgaggagcaggctgctgactcccttgccacaccgtgaaggagtcccaaaggtgggacactgagtgagacaagccagaggaaagaccactcatgttgcagttccctttccatggaatgtccagaaaaggcacatttacagagagaagcagatgagtggttgctgggcagaaatgggagccggccacagctgagcacaagaggactttggagggtgatggaaatggttttcgacctgaatctgaacatgggaagcactgcagtttagtagtcctggtccctaagcccttccagcccaggagccagacctgtgagcaaacaagcctttagtgattccaggctctggctggaaccttgagtcttctcagcttggggcatgcacctcagggggagccagcatcagtgtccagccccaagagcttccctgtacgtctcagtgagtcttcacatgcctccaactgcctggacaaccacacgtgatacctgtcctgccaaacgtgtcctgaacccataaaatccagagaaaagaaaatcgttttaaactgctgaggtttggggtaagttactatgaagcagtagtgagaagaacagaagggccatgatggggagaaagtttggccataagttaatcactgtggcagctgttaggatattgatgtggcttggctgtgtcctcacccaaatctcattttgaattcccacatgtgggaggaactgggtgggaggtgattgaattatgggggcaggtctttcctgtgctgttttcgtgatagtgaatgagtgtcacgagatccgatggttttaaaaacgggagtttcctgcataagctctctctctgcctgctgccatccatgtaagatgtgactcgctcctccctaccttccgccgtgattgtgaggcgtccccagccatgtggaactgtaagtccattaaacctttttcctgtgtaaatta

SEQ ID NO: 288229 - DNA, 904 bp, Homo sapiens
agtcgctcccggctccgcggccgcggaggtgtggggacccgggcttgcgtcggagggggcggtgggctcacccatgggcctttccaaaagcaaagagaaacccaggaaagagaaacctgatgtaaagcaaaagtccagcaggaagaaagtggtcgttccacagatcatcatcacgcgagcgtcgaatgagacgctagtcagttgcagttccagcgggagtgaccagcagagaaccattcgggagccggaggactggggcccctaccggcggcacaggaaccccagtacagcagacgcctataattcacatctcaaagaataaacaagcacctttgcatggcactcgctactccctgcgataggcgtctcgggaacagccgcctcaccctgtgagaagccgaggccccttctccagtgctctcggggaggttgcaccaggcccaccccaccctatgagggctcctgattgtggaaggccacggaagggacctgaacacgatggcacgagacaagttatctcctgtgactgctcctctccagcaaccctcagctcaggctagactttccccctgtgttgagaatgccctgccctgtgtggaagcctgatgcatttagtgacagtgtgttagctttgttagtttctagtctggccagcaggctttccatgtgatctgccattggcttgcttcagtggccagtggagccaggggtgtccaccagagtcttggacacagacttctgaggtggcagcgggagggagcctgctccctgccacacacgtacaatttctaatccatacaggcctatgtagtatatacacacatacgcagagccttaggaattgtgaaaggccaatcaaaacttggggccctaatttcactctgccaaaagaaaaaaaaaaaaa

SEQ ID NO: 288230 - DNA, 1064 bp, Homo sapiens
agtcgctcccggctccgcggccgcggaggtgtggggacccgggcttgcgtcggagggggcggtgggctcacccatgggcctttccaaaagcaaagagaaacccaggaaaggtgaggagcaaaagaagggatccacctattcagttccaaaatctaaggagaagttgatggagaagcattcccaggaagccaggcaggcagacagggagtcggagaagcctgtggacagcctccacccgggggccgggacagccaagcacccgccgccggcagcttcgctggaagtgacgggctgagcgacagtgaggagcaggctgctgactcccttgccacaccgtgaaggagtcccaaaggtgggacactgagtgagacaagccagaggaaagaccactcatgttgcagttccctttccatggaatgtccagaaaaggcacatttacagagagaagcagatgagtggttgctgggcagaaatgggagccggccacagctgagcacaagaggactttggagggtgatggaaatggttttcgacctgaatctgaacatgggaagcactgcagtttagtagtcctggtccctaagcccttccagcccaggagccagacctgtgagcaaacaagcctttagtgattccaggctctggctggaaccttgagtcttctcagcttggggcatgcacctcagggggagccagcatcagtgtccagccccaagagcttccctgtacgtctcagtgagtcttcacatgcctccaactgcctggacaaccacacgtgatacctgtcctgccaaacgtgtcctgaacccataaaatccagagaaaagaaaatcgttttaaactgctgaggtttggggtctttcctgtgctgttttcgtgatagtgaatgagtgtcacgagatccgatggttttaaaaacgggagtttcctgcataagctctctctctgcctgctgccatccatgtaagatgtgactcgctcctccctaccttccgccgtgattgtgaggcgtccccagccatgtggaactgtaagtccattaaacctttttcctgtgtaaatta

SEQ ID NO: 288231 - DNA, 1212 bp, Homo sapiens
caggtgccagagttcgtatatgactccagtcctggcgctggatgctgctgctgttccagcttcctaggtgtggaaactgaaggaccaagagattaaacagtggtgcaaaagtggtaagaattcagcattctcctcgacaagtggacgagcatctactgtgctttcacagcggctatcactattgccagcagcaagactgtcagctcggcgccctcgtctggttggatgggaaactgcagttgctaagggagctgggtttgaatctctgaggacaaatgggaattctcactgatttctaggactaccctggggcaggcaccctgcacagcaatacacactgaacaatgtcgagtttctgctgaatagacttcctacgttgctctggaattcgaagttggcctaactgaggtctccagttacagaaaacactggctctgtatcctgggctttgagaaaacttatcaggctgtcacacttaccatcccttcagtctgcttgtcaggttccttaaggacgcatatctcaaatgtatggcatctacctctacctgggtcacaaccaagtgggtttctactagatcggtgttccttgacagccaacaagggagctgacactgccctcctaagttctgatcttgctcctgttcaactggaacttgatggatcccatgtggtttcccccatcctgacgctgtggctcagacactctccctaagctggtccttccctccaaatcctgccttaaacacactcagaaggtagaaaacacttcagcagcaaagtcctcttcccaagccaacagttgtgttcttccaatcacatgatcttaccttttcaataaaaggcaaaacaaaccaatttccaacatagcattacagcctttaaaaccattcacttctcatagtgattcacagagaacaagagattaaagtgctggattttaaatgtctaaagttgccttcagggctacaaaaagccctgccgtgtgtgtttttccttcatggtgttgaggggaaggaaagatagggaagggcagtggggagaaaccctaaaattttcaatcagaaactggaaattgtaaaagtgggaggtggggagttctgtgcaaatcaatctcccaaggttctgcgtcctctagtgagcctcaaagaaaaaaaaaaaaacaaaaaggtggggactcgcaaaaaggatgagggaaaggctccagacctac

SEQ ID NO: 288232 - DNA, 1158 bp, Homo sapiens
caggtgccagagttcgtatatgactccagtcctggcgctggatgctgctgctgttccagcttcctaggtgtggaaactgaaggaccaagagattaaacagtggtgcaaaagtggtaagaattcagcattctcctcgacaagtggacgagcatctactgtgctttcacagcggctatcactattgccagcagcaagactgtcagctcggcgccctcgtctggttggatgggaaactgcagttgctaagggagctgggtttgaatctctgaggacaaatgggaattctcactgatttctaggactaccctggggcaggcaccctgcacagcaatacacactgaacaatgtcgagtttctgctgaatagacttcctacgttgctctggaattcgaagttggcctaactgaggtctccagttacagaaaacactggctctgtatcctgggctttgagttaaggacgcatatctcaaatgtatggcatctacctctacctgggtcacaaccaagtgggtttctactagatcggtgttccttgacagccaacaagggagctgacactgccctcctaagttctgatcttgctcctgttcaactggaacttgatggatcccatgtggtttcccccatcctgacgctgtggctcagacactctccctaagctggtccttccctccaaatcctgccttaaacacactcagaaggtagaaaacacttcagcagcaaagtcctcttcccaagccaacagttgtgttcttccaatcacatgatcttaccttttcaataaaaggcaaaacaaaccaatttccaacatagcattacagcctttaaaaccattcacttctcatagtgattcacagagaacaagagattaaagtgctggattttaaatgtctaaagttgccttcagggctacaaaaagccctgccgtgtgtgtttttccttcatggtgttgaggggaaggaaagatagggaagggcagtggggagaaaccctaaaattttcaatcagaaactggaaattgtaaaagtgggaggtggggagttctgtgcaaatcaatctcccaaggttctgcgtcctctagtgagcctcaaagaaaaaaaaaaaaacaaaaaggtggggactcgcaaaaaggatgagggaaaggctccagacctac

SEQ ID NO: 288233 - DNA, 725 bp, Homo sapiens
  misc_feature (5)..(5): n is a, c, g, or t
  misc_feature (79)..(79): n is a, c, g, or t
ccgcnccccaacgcatgtgccgctccccaacgcatgtgccgctccccaacgcatgtgccgctcccaacgcatgtgccgntcccaacgcatgtgccgctcccaacgcatgtgccgctcccaacgcatgtgccgctcccaacgcatgtgccgctcctgttcaactggaacttgatggatcccatgtggtttcccccatcctgacgctgtggctcagacactctccctaagctggtccttccctccaaatcctgccttaaacacactcagaaggtagaaaacacttcagcagcaaagtcctcttcccaagccaacagttgtgttcttccaatcacatgatcttaccttttcaataaaaggcaaaacaaaccaatttccaacatagcattacagcctttaaaaccattcacttctcatagtgattcacagagaacaagagattaaagtgctggattttaaatgtctaaagttgccttcagggctacaaaaagccctgccgtgtgtgtttttccttcatggtgttgaggggaaggaaagatagggaagggcagtggggagaaaccctaaaattttcaatcagaaactggaaattgtaaaagtgggaggtggggagttctgtgcaaatcaatctcccaaggttctgcgtcctctagtgagcctcaaagaaaaaaaaaaaaacaaaaaggtggggactcgcaaaaaggatgagggaaaggctccagacctac

SEQ ID NO: 288234 - DNA, 670 bp, Homo sapiens
acttatgactttgtgactttacagtggtgcaaaagtggtaagaattcagcattctcctcgacaagtggacgagcatctactgtgctttcacagcggctatcactattgccagcagcaagactgtcagctcggcgcccccatcctgacgctgtggctcagacactctccctaagctggtccttccctccaaatcctgccttaaacacactcagaaggtagaaaacacttcagcagcaaagtcctcttcccaagccaacagttgtgttcttccaatcacatgatcttaccttttcaataaaaggcaaaacaaaccaatttccaacatagcattacagcctttaaaaccattcacttctcatagtgattcacagagaacaagagattaaagtgctggattttaaatgtctaaagttgccttcagggctacaaaaagccctgccgtgtgtgtttttccttcatggtgttgaggggaaggaaagatagggaagggcagtggggagaaaccctaaaattttcaatcagaaactggaaattgtaaaagtgggaggtggggagttctgtgcaaatcaatctcccaaggttctgcgtcctctagtgagcctcaaagaaaaaaaaaaaaacaaaaaggtggggactcgcaaaaaggatgagggaaaggctccagacctac

SEQ ID NO: 288235 - DNA, 2127 bp, Homo sapiens
taatcagtggggaagcacggtccaagaacgtttgtttccatggccatttaagcttagtagtaaagactggttaatataccaatgcttgtaaaaccttcagaagggaaggagaatgttttgtggccactttggttttctttttcgcgtgggcagtttaaaggtaatagtttttaaaaacagtacttttaatggggaacaacttgcccaaaaatttggcccagaattttggggccccttaaaaaagttaaatgagaaaaaaaaaaaaaaagggcggccgcccttttttttttttttttttttttttttatttagtttttttttttggagtttgttttttatttagacatggaattttccttttcatataacttatctaattaaaatattcatctcggtagttaccacaaaaaagtaacatagaaaattgtatttacattttgggaccaaaatacaaatgaagagcaggatgacaccttgctcctttccctcccgcttcccagaaagaaaaagccccaaagaaactgctcagtacaccaaggatcacaaaagggtaatttgtaatttggtgatttgtatgtagtgtagcacagaaaaaaaattgcacaagtttttccataaatgagaccaaaggttcaaattcatcctgtgtcaggttcaaattcatcctgtgtctgctctgcagccattttagtaagctgggcaaggaggtcatttagaaattgggtttttcctctttcccctgactcttcgcaccaagtcacatccctgatgtagatactcttgggggaggggaaaacatctggctctatgcaaacagggctcatcaaaaatctttatgtgccaaaatggatactgacattgctatgaacaaatctgttttttcttccctccctgcctaaagactcctaataagggacattaaatcatacacaactgaatctaagatatgaaaaactagtttcaatgacaaagacttgaacacacagttaagagataaattcaaggtggtagacacctagaaaaagctattctaggcagcagacatctggcacctgacccaaatgttcatttggtttcagttaagaggcttcctaatattagatttgtggggcaggctagggataggggtggaatggtggtacaagtaaccaagagaagtaaagtaatgctttacccattcaaaaatatagcaaattaaaacatagtaacatttgtgtcctgtcacaataggcaccctgcacagcaatacacactgaacaatgtcgagtttctgctgaatagacttcctacgttgctctggaattcgaagttggcctaactgaggtctccagttacagaaaacactggctctgtatcctgggctttgagaaaacttatcaggctgtcacacttaccatcccttcagtctgcttgtcaggttccttaaggacgcatatctcaaatgtatggcatctacctctacctgggtcacaaccaagtgggtttctactagatcggtgttccttgacagccaacaagggagctgacactgccctcctaagttctgatcttgctcctgttcaactggaacttgatggatcccatgtggtttcccccatcctgacgctgtggctcagacactctccctaagctggtccttccctccaaatcctgccttaaacacactcagaaggtagaaaacacttcagcagcaaagtcctcttcccaagccaacagttgtgttcttccaatcacatgatcttaccttttcaataaaaggcaaaacaaaccaatttccaacatagcattacagcctttaaaaccattcacttctcatagtgattcacagagaacaagagattaaagtgctggattttaaatgtctaaagttgccttcagggctacaaaaagccctgccgtgtgtgtttttccttcatggtgttgaggggaaggaaagatagggaagggcagtggggagaaaccctaaaattttcaatcagaaactggaaattgtaaaagtgggaggtggggagttctgtgcaaatcaatctcccaaggttctgcgtcctctagtgagcctcaaagaaaaaaaaaaaaacaaaaaggtggggactcgcaaaaaggatgagggaaaggctccagacctac

SEQ ID NO: 288236 - DNA, 1053 bp, Homo sapiens
caggtgccagagttcgtatatgactccagtcctggcgctggatgctgctgctgttccagcttcctaggtgtggaaactgaaggaccaagagattaaacaggaatctctgaggacaaatgggaattctcactgatttctaggactaccctggggcaggcaccctgcacagcaatacacactgaacaatgtcgagtttctgctgaatagacttcctacgttgctctggaattcgaagttggcctaactgaggtctccagttacagaaaacactggctctgtatcctgggctttgagaaaacttatcaggctgtcacacttaccatcccttcagtctgcttgtcaggttccttaaggacgcatatctcaaatgtatggcatctacctctacctgggtcacaaccaagtgggtttctactagatcggtgttccttgacagccaacaagggagctgacactgccctcctaagttctgatcttgctcctgttcaactggaacttgatggatcccatgtggtttcccccatcctgacgctgtggctcagacactctccctaagctggtccttccctccaaatcctgccttaaacacactcagaaggtagaaaacacttcagcagcaaagtcctcttcccaagccaacagttgtgttcttccaatcacatgatcttaccttttcaataaaaggcaaaacaaaccaatttccaacatagcattacagcctttaaaaccattcacttctcatagtgattcacagagaacaagagattaaagtgctggattttaaatgtctaaagttgccttcagggctacaaaaagccctgccgtgtgtgtttttccttcatggtgttgaggggaaggaaagatagggaagggcagtggggagaaaccctaaaattttcaatcagaaactggaaattgtaaaagtgggaggtggggagttctgtgcaaatcaatctcccaaggttctgcgtcctctagtgagcctcaaagaaaaaaaaaaaaacaaaaaggtggggactcgcaaaaaggatgagggaaaggctccagacctac

SEQ ID NO: 288237 - DNA, 778 bp, Homo sapiens
taatcagtggggaagcacggtccaagaacgtttgtttccatggccatttaagcttagtagtaaagactggttaatataccaatgcttgtaaaaccttcagaagggaaggagaatgttttgtggccactttggttttctttttcgcgtgggcagtttaaaggtaatagtttttaaaaacagtacttttaatggggaacaacttgcccaaaaatttggcccagaattttggggccccttaaaaaagttaaatgagaaaaaaaaaaaaaaagggcggccgcccttttttttttttttttttttttttttatttagtttttttttttggagtttgttttttatttagacatggaattttccttttcatataacttatctaattaaaatattcatctcggtagttaccacaaaaaagtaacatagaaaattgtatttacattttgggaccaaaatacaaatgaagagcaggatgacaccttgctcctttccctcccgcttcccagaaagaaaaagccccaaagaaactgctcagtacaccaaggatcacaaaagggtaatttgtaatttggtgatttgtatgtagtgtagcacagaaaaaaaattgcacaagtttttccataaatgagaccaaaggttcaaattcatcctgtgtcaggttcaaattcatcctgtgtctgctctgcagccattttagtaagctggggggcgaagaggggggaaagggggggctcccaattttttttaaggaaaaaaaaaatatttgggggggtgtttttttttt

SEQ ID NO: 288238 - DNA, 588 bp, Homo sapiens
caggtgccagagttcgtatatgactccagtcctggcgctggatgctgctgctgttccagcttcctaggtgtggaaactgaaggaccaagagattaaacagtggtgcaaaagtggtaagaattcagcattctcctcgacaagtggacgagcatctactgtgctttcacagcggctatcactattgccagcagcaagactgtcagctcggcgccctcgtctggttggatgggaaactgcagttgctaagggagctgggtttgaatctctgaggacaaatgggaattctcactgatttctaggactaccctggggcagagatggagtttcatcacattgcctaggctggtctcgaaatcctggactcaagtgatctgctggcctcagcctccctaactgctgggactagaggcctgagcgaccacccctggctgtaaacattttcttagctcaaggattgctgaatttgtatccattttcttctctcctatctcaattgggtgggtgaaatgatactgttaattattttctgttacttttgaatgcttctttgtggcgaactgagggcatagtaatactgtagcagctaac

SEQ ID NO: 288239 - DNA, 598 bp, Homo sapiens
caggtgccagagttcgtatatgactccagtcctggcgctggatgctgctgctgttccagcttcctaggtgtggaaactgaaggaccaagagattaaacagtggtgcaaaagtggtaagaattcagcattctcctcgacaagtggacgagcatctactgtgctttcacagcggctatcactattgccagcagcaagactgtcagctcggcgccctcgtctggttggatgggaaactgcagttgctaagggagctgggtttgaatctctgaggacaaatgggaattctcactgatttctaggactaccctggggcagagatggagtttcatcacattgcctaggctggtctcgaaatcctggactcaagtgatctgctggcctcagcctccctaactgctgggactagaggcctgagcgaccacccctggctgtaaacattttcttagctcaaggattgctgaatttgtgcagccaatgcaatatgatggcaatgatagatgtcacttctagacaaaacttaacagttatatcaatattgtaattaatattattttttattattataattaatgttaataatatattaatattctctact

SEQ ID NO: 288240 - DNA, 782 bp, Homo sapiens
ttttttttttttgagacggagtcttaaaaaaaaaaaaaaaaaaaaaagaattttagtattgctagtcataattctttgacttttcctcctatttcccacctcttttaggtggaggttccagtttactaaatggaaacatttcttctgagaggatctgttccctggatctacttaaaaagctcagggttaaatgagaaggacctaacccttctcatatagcccaccaaggcttgtatcaagaacattagattacttccatgattgcttttaattctgacagtccatgaaatggtcataaggtatgggttgataaggacatggttctctagtattacagttcaccctaatatgttttaaattctcatttctaaggttaagtactaaccaatctgctaatttcctcttgtctatctggtgcagatcttgctgttgccttgatcatagtggaagtctgattgtctgttagcttcttgatacatcgttgccctgccacaatattacagacctacaaatggaaaaaagttttgtactacatgtatatatcttttttttttagctcttacttagtgccaattacatgtaaataaaaatttaaaatcaacttcattaaaccacttattttcaatatgttaagtaaaaaagtagtaaacaagacagctctacagtaattaagtataattaagtaaaatgtacaccagatgaagactgaaagaagtatagtataccaaaatgttaacagtggttacattagagtggtaggattatggatgaacttgtttcgt

SEQ ID NO: 288241 - DNA, 568 bp, Homo sapiens
cctaaaaatagaaaaagtttgtagttactctcaaaattcccccaaatcccctactttaatgcattagaaccctcttttttttcttcactgtgtccataatatattttccaacaggtctaatcaatggtgctctaactacagaacagcgaatcttaacctggggaccatgggtcatgaatggactgcagaaattctgtgacctcctgatcttgctgttgccttgatcatagtggaagtctgattgtctgttagcttcttgatacatcgttgccctgccacaatattacagacctacaaatggaaaaaagttttgtactacatgtatatatcttttttttttagctcttacttagtgccaattacatgtaaataaaaatttaaaatcaacttcattaaaccacttattttcaatatgttaagtaaaaaagtagtaaacaagacagctctacagtaattaagtataattaagtaaaatgtacaccagatgaagactgaaagaagtatagtataccaaaatgttaacagtggttacattagagtggtaggattatggatgaacttgtttcgt

SEQ ID NO: 288242 - DNA, 480 bp, Homo sapiens
cctaaaaatagaaaaagtttgtagttactctcaaaattcccccaaatcccctactttaatgcattagaaccctcttttttttcttcactgtgtccataatatattttccaacaggtctaatcaatggtgctctaactacagaacagcgaatcttaacctggggaccatgggtcatgaatggactgcagaaattctgtgacctcctgagaagtgttctgggtgagacaaggcttgaaagagacaaagaaggctggagccccgtggcagatgagatggttagatctgcaggcatactaactggaagagatacaacagaggctccctggaagaaggatgccagacacagttgagagcacaagactgtaccaaaaacaagagattaaatgactttaacatattaaatgctgaatacagaagttcccccagctagaactcccaactaggcttccagaatgcaggcaaccacactgctatccttta

SEQ ID NO: 288243 - DNA, 5642 bp, Homo sapiens
  misc_feature (4830)..(4830): n is a, c, g, or t
ccgtggagttgacagtcgtgtggaatgggcacttcaacattgacaacccagctcagaataaagttcacctctacaagtgtggagccatgcgtgagagctgcgggctgtgcctcaaggctgacccagacttcgcatgtggctggtgccagggcccaggccagtgcaccctgcgccagcactgccctgcccaggagagccagtggctggagctgtctggtgccaaaagcaagtgcacaaacccccgcatcacagagataatcccggtgacaggcccccgggaagggggcaccaaggtcactatccgaggggagaacctgggcctggaatttcgcgacatcgcctcccatgtcaaggttgctggcgtggagtgcagccctttagtggatggttacatccctgcagaacagatcgtgtgtgagatgggggaggccaagcccagccagcatgcaggcttcgtggagatctgcgtggctgtgtgtcggcctgaattcatggcccggtcctcacagctctattacttcatgacactgactctctcagatctgaagcccagccgggggcccatgtccggagggacccaagtgaccatcacaggcaccaacctgaatgccggaagcaacgtggtggtgatgtttggaaagcagccctgtctcttccacaggcgatctccatcctacattgtctgcaacaccacatcctcagatgaggtgctagagatgaaggtgtcggtgcaggtggacagggccaagatccaccaggacctggtctttcagtatgtggaagaccccaccatcgtgcggattgagccagaatggagcattgtcagtggaaacacacccatcgccgtatgggggacccacctggacctcatacagaacccccagatccgtgccaagcatggagggaaggagcacatcaatatctgtgaggttctgaacgctactgagatgacctgtcaggcgcccgccctcgctctgggtcctgaccaccagtcagacctgaccgagaggcccgaggagtttggcttcatcctggacaacgtccagtccctgctcatcctcaacaagaccaacttcacctactatcccaacccggtgtttgaggcctttggtccctcaggaatcctggagctcaagcctggcacgcccatcatcctaaagggcaagaacctgatcccgcctgtggctgggggcaacgtgaagctgaactacactgtgctggttggggagaagccgtgcaccgtgaccgtgtcagatgtccagctgctctgcgagtcccccaacctcatcggcaggcacaaagtgatggcccgtgtcggtggcatggagtactccccggggatggtgtacattgccccggacagcccgctcagcctgcccgccatcgtcagcatcgcagtggctggcggcctcctcatcattttcatcgtggccgtgctcattgcctataaacgcaagtcccgcgaaagtgacctcacgctgaagcggctgcagatgcagatggacaacctggagtcccgtgtggccctggagtgcaaggaaggtactgagtggccccatgctggaggccatgtgtgtgtgcgtgtgtgcatatgtgtgtgcatgcacatctgtgtatgtgtatgcatatgtttcatatacaaacaagcaggctgggcagcagtgggcagtgctggaggctggcggtgtgtgtgtctgtgcgaatgtgtgtgtgtgcatgtgtgtgtgtgcacatctgtatgtatatatgtttcatatacaagcaagcaggccgggcagcagtgagcagtgctggaggctgtatatgtgtctgtgtgcgtgcgcatctgtgtatgtgtatatgtttcatgtacaagcaagcaggccgggcagcagtgggcagtgctggaggctctgtgtgtgcgtgtgcatgtgtgtgtatgtatgtgtatgtgttccatttacaagcaagcaggccaggcaactgtgagcagtgctggaggctgtgtgcgcgtgtgtgtgtgtatgtgtatgtgtttcatttacaagcaagcaggccaggcagctgtgagcagtgctggaggctgtgtgtgtgtgtgtgtgagcacgcacgtgtgtgagcacgcacgtgtatgtgtatgtgtgtcatttacaagcaagcaggccaggcagctgtgagcagtgctggaggccgtgtgtgtgtgtgtgtgtgtgtgtgcgcgcgcgcctgtatatgtgtatgtgtttcatttacaagcaagcaggccaggcagctgtgggcagtgctggaggctgtgtgtgtgtgcacgtgtgtgtatgcgtatgtgtttcatttacaagcaagcaggccaggcagctgtgggcagtgctggaggctgtgtgtgtgtgtgtgtgtgtgtgtgtgtatatatgtgtatgtgtatgtgtttcatttacaagcaagcagcccaggcagctgtgggcagtgctggaggctgtgtgtgtgtgtgtgtgtgtgtgtgtatgtgtttcatttacaagtgtgtgtgtgtgtgtgtatgtgtatgtgtatgtgtttcatttacaagcaagcaggccaggcagctgtgggcaatgctggaggctgtgcatcctacctgcatacctgcaaagcctctcactctatagtccctatgcctgtgtcccagaccacacccatacccaagcaggccccaccctggcaacaccagagaggccaaggtctccttgccctctccttgaaggtgtagtgattagaatctcttttatgtgtggcaggcacacagctttgaatgttggaggcgcttggtgacttaaaggaaagctgcagactgataaaaagccaactccctccttctgctccctgtgggccgagcaccccaactgggagggggcagccgaggggagctcccacccaggattgtcaccttcaccccactagagcaccttcaccccactagagcagcctccatacctggaatcctggttgagtgggttttgcactctactcgaggggaggtctgggggtgtcttaacatgacgcatttcagcaatctccagctttcttcctctagcaggaaggtaaggctgtagggctgatctgtgatttagaaggaagggtgtttcaaagcttgtattaaaaaattacaaacaccaccataaagtgaaatcagctgcactaaatccaagaaggaaatttaggagtcagactcttgtaacccccaggatatcattttgtgactcatcctgggaggatctgagctggttctttgctgtagatttgtacatggagtaaatccggccccatacctggggctctcacttcacaccgattcccaccagggcagccacggctctttttgatggggaagtggatccattccatcccctctctacatccttcagctgtcaacacagcatccgccttgtgggactgttaattactgccttttattatatttacgctgcttaatttttttctccgcaatgtactctttcctctaattaggtgtagtgattagaatctcttttatgtgtggcaggcacgcagctttgaatgttggaggcgcttggtgacttaaaggaaagctgcagactgataaaaagccaacaccctccttctgctccctgtgggccgagcaccccaactgggagggagcagccgatgggagctcccacccaggattgtcagctgaggccccaggaggaaaccttggcttcagactttaggggcgagctatgctgtgcacgtaggaagaaggggtcttacagcaaaggacttgtcagactagccacagaggcactttgcagcttgcccagagccagccactgaacgtttacagggctgcactggcccaagccaaggggtctccttgaagacttcacagcaagccaggacgtcctctacacaaactcagaagacacccagctgggcccttcatgggcctaagcttctgatatataaacatacccgtgtatttacaaacactcccacacaggcccacacaccctcactgacatacactcatggactcacacatacactcacatgcacacatgcatgcacactcacatacactcactcgtgcactcacacatacatgcccacacatagtgacatgctcacacactcatgctttcacatacatacactcactgacatacactcatgtgctcacacgctcatgtactcacattcgtacacacacactgacatatacttacacactcacacttgcacatgcatacacatgcactcacatgcacacatgcatgcacactcatacactcacgcactcaacttgcaggcgtgcacacacatgcccacatactcatgcactcacattcacacatgcgtgcacacatagacgcatgcactcacacatgcatacacacagacatacacatgcactcacattcgtacttgcatacacaccaacacacatatgcacactcacactgacaagcatacacacacactcatgcactcacacccacgcaggcactcacattcacacacatacacactcattgacatacattcattcacatccatgcactcacattcacacatgcatacacactgacattcacacttgcacatgcctacacactcactgacatacacacacacatgcagtcatacacactccctgacatgctcacacactgtcatactcacacactccctgacatgctcacacactgtcacactcacacactcacatacactccctgacatacacactcagacaagtgcccatgcacccacacctatgctcatgcacatgttcccacactctcttataagcatacacacccatgttcctcactcaggacacacatgaatgttccncagggcatcatgtgacatcgcagaggacagatggtggaaaagacatgagcaacctaatgggaagaggaaaatgggaaacaatgcattggaagaggaagaaaaaaaataaataaccaaaggttttggcaagtgcagtaccaggtggagaagcttgacttttctatccttgatcattttattccctcccaagaagtcagtcacaggacctggaaggccagaaagggtgcatgtgggagacggtctgaggaagtacctcggtcactacaatatttttgcacatataaagggttggggaggaaagagacacaaacgtatttaacacagatttgctggatggaagctgcgtgtgtgaacgtgtgtatgagtgagtgcattttgatttttttttttttttttttgcacagttaagagaaaaaatcaaacaagcagaaaaaaaaaagaaaaaagacttatcacggttctgctgaagcttttattttttactggatgattattgttattgttactttggcggtacaggactttattttattcatgtttttgttataagaaaaatttcaaacacctcagagaaatagaaaggttaggaagaaagaggagacaaggacagacaaattttctggctgtccccatttctcctgggggaggggtttggggctggtttgactttaattggtgggtgggttgtttctgccgctctgtttgctgcagtccccgtggcctgcttggggactgagaaatttgagccaggtatccagagccacagcccatcttgcttataaaaattatcttctgctgtttgttttccattt

SEQ ID NO: 288244 - DNA, 1157 bp, Homo sapiens
gggaagaaaccacaccatttccagcaaagtccatggagcatccggtacttttaagaacacttgcccctttggatatgaatatgtgcacatgtgtgtgagcacatgtatgtgtgtgtgtgtgtctgccccaggtgtaggcggaaagctcaaaaggatttcttgtcctttgtaggaggatttttgaagtgttccccttctctttccccttgctcatccattcatcctgcagcttcaggacatttcaacacttacttgctttctatgctgagagctggtgggtggaaggagagggcgcttgtccataggaaatcagggtggtcgcctgccgaggcctggaccttggaacagggcatcatgtgacatcgcagaggacagatggtggaaaagacatgagcaacctaatgggaagaggaaaatgggaaacaatgcattggaagaggaagaaaaaaaataaataaccaaaggttttggcaagtgcagtaccaggtggagaagcttgacttttctatccttgatcattttattccctcccaagaagtcagtcacaggacctggaaggccagaaagggtgcatgtgggagacggtctgaggaagtacctcggtcactacaatatttttgcacatataaagggttggggaggaaagagacacaaacgtatttaacacagatttgctggatggaagctgcgtgtgtgaacgtgtgtatgagtgagtgcattttgatttttttttttttttttttgcacagttaagagaaaaaatcaaacaagcagaaaaaaaaaagaaaaaagacttatcacggttctgctgaagcttttattttttactggatgattattgttattgttactttggcggtacaggactttattttattcatgtttttgttataagaaaaatttcaaacacctcagagaaatagaaaggttaggaagaaagaggagacaaggacagacaaattttctggctgtccccatttctcctgggggaggggtttggggctggtttgactttaattggtgggtgggttgtttctgccgctctgtttgctgcagtccccgtggcctgcttggggactgagaaatttgagccaggtatccagagccacagcccatcttgcttataaaaattatcttctgctgtttgttttccattt

SEQ ID NO: 288245 - DNA, 5124 bp, Homo sapiens
  misc_feature (4312)..(4312): n is a, c, g, or t
ccgtggagttgacagtcgtgtggaatgggcacttcaacattgacaacccagctcagaataaagttcacctctacaagtgtggagccatgcgtgagagctgcgggctgtgcctcaaggctgacccagacttcgcatgtggctggtgccagggcccaggccagtgcaccctgcgccagcactgccctgcccaggagagccagtggctggagctgtctggtgccaaaagcaagtgcacaaacccccgcatcacagagataatcccggtgacaggcccccgggaagggggcaccaaggtcactatccgaggggagaacctgggcctggaatttcgcgacatcgcctcccatgtcaaggttgctggcgtggagtgcagccctttagtggatggttacatccctgcagaacagatcgtgtgtgagatgggggaggccaagcccagccagcatgcaggcttcgtggagatctgcgtggctgtgtgtcggcctgaattcatggcccggtcctcacagctctattacttcatgacactgactctctcagatctgaagcccagccgggggcccatgtccggagggacccaagtgaccatcacaggcaccaacctgaatgccggaagcaacgtggtggtgatgtttggaaagcagccctgtctcttccacaggcgatctccatcctacattgtctgcaacaccacatcctcagatgaggtgctagagatgaaggtgtcggtgcaggtggacagggccaagatccaccaggacctggtctttcagtatgtggaagaccccaccatcgtgcggattgagccagaatggagcattgtcagtggaaacacacccatcgccgtatgggggacccacctggacctcatacagaacccccagatccgtgccaagcatggagggaaggagcacatcaatatctgtgaggttctgaacgctactgagatgacctgtcaggcgcccgccctcgctctgggtcctgaccaccagtcagacctgaccgagaggcccgaggagtttggcttcatcctggacaacgtccagtccctgctcatcctcaacaagaccaacttcacctactatcccaacccggtgtttgaggcctttggtccctcaggaatcctggagctcaagcctggcacgcccatcatcctaaagggcaagaacctgatcccgcctgtggctgggggcaacgtgaagctgaactacactgtgctggttggggagaagccgtgcaccgtgaccgtgtcagatgtccagctgctctgcgagtcccccaacctcatcggcaggcacaaagtgatggcccgtgtcggtggcatggagtactccccggggatggtgtacattgccccggacagcccgctcagcctgcccgccatcgtcagcatcgcagtggctggcggcctcctcatcattttcatcgtggccgtgctcattgcctataaacgcaagtcccgcgaaagtgacctcacgctgaagcggctgcagatgcagatggacaacctggagtcccgtgtggccctggagtgcaaggaaggtactgagtggccccatgctggaggccatgtgtgtgtgcgtgtgtgcatatgtgtgtgcatgcacatctgtgtatgtgtatgcatatgtttcatatacaaacaagcaggctgggcagcagtgggcagtgctggaggctggcggtgtgtgtgtctgtgcgaatgtgtgtgtgtgcatgtgtgtgtgtgcacatctgtatgtatatatgtttcatatacaagcaagcaggccgggcagcagtgagcagtgctggaggctgtatatgtgtctgtgtgcgtgcgcatctgtgtatgtgtatatgtttcatgtacaagcaagcaggccgggcagcagtgggcagtgctggaggctctgtgtgtgcgtgtgcatgtgtgtgtatgtatgtgtatgtgttccatttacaagcaagcaggccaggcaactgtgagcagtgctggaggctgtgtgcgcgtgtgtgtgtgtatgtgtatgtgtttcatttacaagcaagcaggccaggcagctgtgggcaatgctggaggctgtgcatcctacctgcatacctgcaaagcctctcactctatagtccctatgcctgtgtcccagaccacacccatacccaagcaggccccaccctggcaacaccagagaggccaaggtctccttgccctctccttgaaggtgtagtgattagaatctcttttatgtgtggcaggcacacagctttgaatgttggaggcgcttggtgacttaaaggaaagctgcagactgataaaaagccaactccctccttctgctccctgtgggccgagcaccccaactgggagggggcagccgaggggagctcccacccaggattgtcaccttcaccccactagagcaccttcaccccactagagcagcctccatacctggaatcctggttgagtgggttttgcactctactcgaggggaggtctgggggtgtcttaacatgacgcatttcagcaatctccagctttcttcctctagcaggaaggtaaggctgtagggctgatctgtgatttagaaggaagggtgtttcaaagcttgtattaaaaaattacaaacaccaccataaagtgaaatcagctgcactaaatccaagaaggaaatttaggagtcagactcttgtaacccccaggatatcattttgtgactcatcctgggaggatctgagctggttctttgctgtagatttgtacatggagtaaatccggccccatacctggggctctcacttcacaccgattcccaccagggcagccacggctctttttgatggggaagtggatccattccatcccctctctacatccttcagctgtcaacacagcatccgccttgtgggactgttaattactgccttttattatatttacgctgcttaatttttttctccgcaatgtactctttcctctaattaggtgtagtgattagaatctcttttatgtgtggcaggcacgcagctttgaatgttggaggcgcttggtgacttaaaggaaagctgcagactgataaaaagccaacaccctccttctgctccctgtgggccgagcaccccaactgggagggagcagccgatgggagctcccacccaggattgtcagctgaggccccaggaggaaaccttggcttcagactttaggggcgagctatgctgtgcacgtaggaagaaggggtcttacagcaaaggacttgtcagactagccacagaggcactttgcagcttgcccagagccagccactgaacgtttacagggctgcactggcccaagccaaggggtctccttgaagacttcacagcaagccaggacgtcctctacacaaactcagaagacacccagctgggcccttcatgggcctaagcttctgatatataaacatacccgtgtatttacaaacactcccacacaggcccacacaccctcactgacatacactcatggactcacacatacactcacatgcacacatgcatgcacactcacatacactcactcgtgcactcacacatacatgcccacacatagtgacatgctcacacactcatgctttcacatacatacactcactgacatacactcatgtgctcacacgctcatgtactcacattcgtacacacacactgacatatacttacacactcacacttgcacatgcatacacatgcactcacatgcacacatgcatgcacactcatacactcacgcactcaacttgcaggcgtgcacacacatgcccacatactcatgcactcacattcacacatgcgtgcacacatagacgcatgcactcacacatgcatacacacagacatacacatgcactcacattcgtacttgcatacacaccaacacacatatgcacactcacactgacaagcatacacacacactcatgcactcacacccacgcaggcactcacattcacacacatacacactcattgacatacattcattcacatccatgcactcacattcacacatgcatacacactgacattcacacttgcacatgcctacacactcactgacatacacacacacatgcagtcatacacactccctgacatgctcacacactgtcatactcacacactccctgacatgctcacacactgtcacactcacacactcacatacactccctgacatacacactcagacaagtgcccatgcacccacacctatgctcatgcacatgttcccacactctcttataagcatacacacccatgttcctcactcaggacacacatgaatgttccncagggcatcatgtgacatcgcagaggacagatggtggaaaagacatgagcaacctaatgggaagaggaaaatgggaaacaatgcattggaagaggaagaaaaaaaataaataaccaaaggttttggcaagtgcagtaccaggtggagaagcttgacttttctatccttgatcattttattccctcccaagaagtcagtcacaggacctggaaggccagaaagggtgcatgtgggagacggtctgaggaagtacctcggtcactacaatatttttgcacatataaagggttggggaggaaagagacacaaacgtatttaacacagatttgctggatggaagctgcgtgtgtgaacgtgtgtatgagtgagtgcattttgatttttttttttttttttttgcacagttaagagaaaaaatcaaacaagcagaaaaaaaaaagaaaaaagacttatcacggttctgctgaagcttttattttttactggatgattattgttattgttactttggcggtacaggactttattttattcatgtttttgttataagaaaaatttcaaacacctcagagaaatagaaaggttaggaagaaagaggagacaaggacagacaaattttctggctgtccccatttctcctgggggaggggtttggggctggtttgactttaattggtgggtgggttgtttctgccgctctgtttgctgcagtccccgtggcctgcttggggactgagaaatttgagccaggtatccagagccacagcccatcttgcttataaaaattatcttctgctgtttgttttccattt

SEQ ID NO: 288246 - DNA, 5350 bp, Homo sapiens
  misc_feature (4538)..(4538): n is a, c, g, or t
ccgtggagttgacagtcgtgtggaatgggcacttcaacattgacaacccagctcagaataaagttcacctctacaagtgtggagccatgcgtgagagctgcgggctgtgcctcaaggctgacccagacttcgcatgtggctggtgccagggcccaggccagtgcaccctgcgccagcactgccctgcccaggagagccagtggctggagctgtctggtgccaaaagcaagtgcacaaacccccgcatcacagagataatcccggtgacaggcccccgggaagggggcaccaaggtcactatccgaggggagaacctgggcctggaatttcgcgacatcgcctcccatgtcaaggttgctggcgtggagtgcagccctttagtggatggttacatccctgcagaacagatcgtgtgtgagatgggggaggccaagcccagccagcatgcaggcttcgtggagatctgcgtggctgtgtgtcggcctgaattcatggcccggtcctcacagctctattacttcatggtgagtcttggccagcagtgatctggctgggtgcaggccacagagctcattaccatgattgctgggcccctctagagctctgtgagcaaacccagggcaagggcctgccctgcaacctccctcagttcatgagactcctgtcttatagtgagtgagagcacagcctttgaagtctggaagacctggattcaaatccagacttttctgtgcctggctgtgtggtttcagacactgactctctcagatctgaagcccagccgggggcccatgtccggagggacccaagtgaccatcacaggcaccaacctgaatgccggaagcaacgtggtggtgatgtttggaaagcagccctgtctcttccacaggcgatctccatcctacattgtctgcaacaccacatcctcagatgaggtgctagagatgaaggtgtcggtgcaggtggacagggcaaaaaaccccacaacgtcttgttttgttatgtggagaaccacccctccctcggtgcgatcaagcacgaacggatcactgtggaaacacacccatcgccgtatgggggacccacctggacctcatacagaacccccagatccgtgccaagcatggagggaaggagcacatcaatatctgtgaggttctgaacgctactgagatgacctgtcaggcgcccgccctcgctctgggtcctgaccaccagtcagacctgaccgagaggcccgaggagtttggcttcatcctggacaacgtccagtccctgctcatcctcaacaagaccaacttcacctactatcccaacccggtgtttgaggcctttggtccctcaggaatcctggagctcaagcctggcacgcccatcatcctaaagggcaagaacctgatcccgcctgtggctgggggcaacgtgaagctgaactacactgtgctggttggggagaagccgtgcaccgtgaccgtgtcagatgtccagctgctctgcgagtcccccaacctcatcggcaggcacaaagtgatggcccgtgtcggtggcatggagtactccccggggatggtgtacattgccccggacagcccgctcagcctgcccgccatcgtcagcatcgcagtggctggcggcctcctcatcattttcatcgtggccgtgctcattgcctataaacgcaagtcccgcgaaagtgacctcacgctgaagcggctgcagatgcagatggacaacctggagtcccgtgtggccctggagtgcaaggaaggtactgagtggccccatgctggaggccatgtgtgtgtgcgtgtgtgcatatgtgtgtgcatgcacatctgtgtatgtgtatgcatatgtttcatatacaaacaagcaggctgggcagcagtgggcagtgctggaggctggcggtgtgtgtgtctgtgcgaatgtgtgtgtgtgcatgtgtgtgtgtgcacatctgtatgtatatatgtttcatatacaagcaagcaggccgggcagcagtgagcagtgctggaggctgtatatgtgtctgtgtgcgtgcgcatctgtgtatgtgtatatgtttcatgtacaagcaagcaggccgggcagcagtgggcagtgctggaggctctgtgtgtgcgtgtgcatgtgtgtgtatgtatgtgtatgtgttccatttacaagcaagcaggccaggcaactgtgagcagtgctggaggctgtgtgcgcgtgtgtgtgtgtatgtgtatgtgtttcatttacaagcaagcaggccaggcagctgtgggcaatgctggaggctgtgcatcctacctgcatacctgcaaagcctctcactctatagtccctatgcctgtgtcccagaccacacccatacccaagcaggccccaccctggcaacaccagagaggccaaggtctccttgccctctccttgaaggtgtagtgattagaatctcttttatgtgtggcaggcacacagctttgaatgttggaggcgcttggtgacttaaaggaaagctgcagactgataaaaagccaactccctccttctgctccctgtgggccgagcaccccaactgggagggggcagccgaggggagctcccacccaggattgtcaccttcaccccactagagcaccttcaccccactagagcagcctccatacctggaatcctggttgagtgggttttgcactctactcgaggggaggtctgggggtgtcttaacatgacgcatttcagcaatctccagctttcttcctctagcaggaaggtaaggctgtagggctgatctgtgatttagaaggaagggtgtttcaaagcttgtattaaaaaattacaaacaccaccataaagtgaaatcagctgcactaaatccaagaaggaaatttaggagtcagactcttgtaacccccaggatatcattttgtgactcatcctgggaggatctgagctggttctttgctgtagatttgtacatggagtaaatccggccccatacctggggctctcacttcacaccgattcccaccagggcagccacggctctttttgatggggaagtggatccattccatcccctctctacatccttcagctgtcaacacagcatccgccttgtgggactgttaattactgccttttattatatttacgctgcttaatttttttctccgcaatgtactctttcctctaattaggtgtagtgattagaatctcttttatgtgtggcaggcacgcagctttgaatgttggaggcgcttggtgacttaaaggaaagctgcagactgataaaaagccaacaccctccttctgctccctgtgggccgagcaccccaactgggagggagcagccgatgggagctcccacccaggattgtcagctgaggccccaggaggaaaccttggcttcagactttaggggcgagctatgctgtgcacgtaggaagaaggggtcttacagcaaaggacttgtcagactagccacagaggcactttgcagcttgcccagagccagccactgaacgtttacagggctgcactggcccaagccaaggggtctccttgaagacttcacagcaagccaggacgtcctctacacaaactcagaagacacccagctgggcccttcatgggcctaagcttctgatatataaacatacccgtgtatttacaaacactcccacacaggcccacacaccctcactgacatacactcatggactcacacatacactcacatgcacacatgcatgcacactcacatacactcactcgtgcactcacacatacatgcccacacatagtgacatgctcacacactcatgctttcacatacatacactcactgacatacactcatgtgctcacacgctcatgtactcacattcgtacacacacactgacatatacttacacactcacacttgcacatgcatacacatgcactcacatgcacacatgcatgcacactcatacactcacgcactcaacttgcaggcgtgcacacacatgcccacatactcatgcactcacattcacacatgcgtgcacacatagacgcatgcactcacacatgcatacacacagacatacacatgcactcacattcgtacttgcatacacaccaacacacatatgcacactcacactgacaagcatacacacacactcatgcactcacacccacgcaggcactcacattcacacacatacacactcattgacatacattcattcacatccatgcactcacattcacacatgcatacacactgacattcacacttgcacatgcctacacactcactgacatacacacacacatgcagtcatacacactccctgacatgctcacacactgtcatactcacacactccctgacatgctcacacactgtcacactcacacactcacatacactccctgacatacacactcagacaagtgcccatgcacccacacctatgctcatgcacatgttcccacactctcttataagcatacacacccatgttcctcactcaggacacacatgaatgttccncagggcatcatgtgacatcgcagaggacagatggtggaaaagacatgagcaacctaatgggaagaggaaaatgggaaacaatgcattggaagaggaagaaaaaaaataaataaccaaaggttttggcaagtgcagtaccaggtggagaagcttgacttttctatccttgatcattttattccctcccaagaagtcagtcacaggacctggaaggccagaaagggtgcatgtgggagacggtctgaggaagtacctcggtcactacaatatttttgcacatataaagggttggggaggaaagagacacaaacgtatttaacacagatttgctggatggaagctgcgtgtgtgaacgtgtgtatgagtgagtgcattttgatttttttttttttttttttgcacagttaagagaaaaaatcaaacaagcagaaaaaaaaaagaaaaaagacttatcacggttctgctgaagcttttattttttactggatgattattgttattgttactttggcggtacaggactttattttattcatgtttttgttataagaaaaatttcaaacacctcagagaaatagaaaggttaggaagaaagaggagacaaggacagacaaattttctggctgtccccatttctcctgggggaggggtttggggctggtttgactttaattggtgggtgggttgtttctgccgctctgtttgctgcagtccccgtggcctgcttggggactgagaaatttgagccaggtatccagagccacagcccatcttgcttataaaaattatcttctgctgtttgttttccattt

SEQ ID NO: 288247 - DNA, 287 bp, Homo sapiens
ggggacccacctggacctcatacagaacccccagatccgtgccaagcatggagggaaggagcacatcaatgtgagtgtagggctgatggggttcatggaggctgcccatgcaacacgttgcttccccaaagggtgtgggtcttcccaagtactgaggtaactccctgcccatacactgataacccacagcctgacacccttgaatactaggatagtggaataggggggaagacataagggcatttttacttcttggggtatagacatggaggagtaattacttttgg

SEQ ID NO: 288248 - DNA, 533 bp, Homo sapiens
aagaagttacagagtatgaagacgcaaaccgtcactaagccagctagggaagaacacacctttgatcttcagaggagcttatggcaaacactgggacagcccgctggctccccacaacacacacaggcacgcagaacgcgcctaatattatgcgcctgctgcgtcgggcagacttccacgtgggtgcccacgtgaacacgttctggaggaccccgtgccggggggccactgaagggctcagcaaaaagtcggtcgtgtgggagaataagcacatcacgtggtttggtgagtgtgggggagcaggtgtgtctgggtggggggccctagggttggcctggctcacaccaaaaccctcaccctacccctgccagccaccctggacggcggcatcgggctgctgctgcccatgcaggagaagacctaccggcggctgctgatgctgcagaacgcgctgaccaccatgctgccacaccacgccggcctcaacccccgcgccttccggatgctgcacgcagacgcgcttaaaggtaccg

SEQ ID NO: 288249 - DNA, 424 bp, Homo sapiens
tgtcttcatgcaggtcacatgctcccactcctgcagctcgatcctggcattgggaatagcctcccagctgaccggggagatgagctggatggagaaggcctcctgctgggggcggatgtaccgctcatctctctcgatggtctcaaaggctacgtggccgccgggacctgcctcatgcagggggaggaggtcacgtgccgagggcggatcttgatcatggatgtgattgaggtggtgcccgagcctggccagcccttgaccaagaacaagttcaaagtcctttacgagaaggagcagaaggggcccgtgaccgccctgtgccactgcaatggccacctcggtctccccatacgagcccgaaatctttctcatctagccccccccgccaacagatccgacgccataccatcatccatacgctact

SEQ ID NO: 288250 - DNA, 3332 bp, Homo sapiens
aggcggccgccagcgtcctcaccaccagcatggtcaccatggagcccgggtacctgttcctgggttctcgcctgggcaattccctcctcctcaagtacacggagaagctgcaggagcccccggccagtgctgtccgtgaggctgccgacaaggaagagcctccctcaaagaagaagcgagtggatgcgacggccggctggtcagctgcgggtaagtcggtgccgcaggatgaggtggacgagattgaagtgtacggcagcgaggcccagtcgggaacacagctggccacctactcctttgaggtgtgtgacagcatcctgaacattggaccctgtgccaatgccgccgtgggcgagcctgccttcctctctgaagagtttcagaacagccccgagccggacctggagattgtggtttgctccggccacgggaagaacggggctttgtcggtgctgcagaagagcatccggccccaggtggtgacaacctttgagcttcccggctgctatgacatgtggacagtcatcgccccggtgcgtaaggaggaggaggacaatcccaagggggagggcacagagcaggaacccagcaccacccctgaagcagacgacgacggccgcagacacggattcctgattctgagccgggaagactccaccatgatcctgcagacggggcaggagatcatggagctggacaccagtggcttcgccactcagggccccacggtctttgctgggaacatcggggacaaccgctacattgtccaagtgtcaccactgggcatccgcctgctggaaggagtgaatcagctgcacttcatccccgtggacctgggcgcccccatcgtgcagtgcgccgtggccgacccctatgtggtcatcatgagtgccgagggccacgtcaccatgttcctgctgaagagtgactcctacggtggccgccaccaccgcctggcgctgcacaagcccccgctgcaccatcagtccaaggtgattacgctgtgcctgtaccgagacctcagcggcatgttcaccactgagagccgcctgggtggggcccgtgacgagctcgggggccgcagtggcccggaggccgagggcctgggctcagagactagccccacagtggatgacgaggaggagatgctgtatggggattcgggctccctcttcagccccagcaaggaggaggcccgaagaagcagccagccccctgctgaccgggaccctgcacccttccgggcagagcctacccactggtgcctgctggtgcgggagaatggcaccatggagatctaccagcttcccgactggcggctggtgttcctggtgaagaacttccctgtggggcagcgggtccttgtggacagctcctttggacagcccactacacagggcgaggcccgcagggaggaggccacgcgccagggggagctgcccctcgtcaaggaggtgctgctggtggcgctgggcagccgccagagcaggccctacctgctggtgcatgtggaccaagagctgcttatctacgaggccttcccccacgactctcagctcggccagggcaatctcaaagtccgctttaagaaggtccctcacaacatcaacttccgtgagaagaagccaaagccatccaagaagaaagcagaaggtggcggcgcagaggagggggctggggcccggggccgcgtggcgcgtttccgctacttcgaggatatttatggctactcaggggtcttcatctgcggcccctcccctcactggctcttggtgaccggccgaggggctctgcggctacaccccatggccatcgacggcccggtcgactctttcgctccattccacaatgtcaactgtccccgcggcttcctgtacttcaacagacagggcgagctgaggatcagtgtcctgcctgcctacctgtcctatgatgccccatggcctgtcaggaagatcccgctgcgctgcacggcccactatgtggcttaccacgtggagtctaaggtgtatgctgtggccaccagcaccaacacgccgtgtgcccgcatcccacgcatgactggcgaggagaaggagtttgagaccatcgagagagatgagcggtacatccacccccagcaggaggccttctccatccagctcatctccccggtcagctgggaggctattcccaatgccaggatcgagctgcaggagtgggagcatgtgacctgcatgaagacagtgtctctgcgcagtgaggagaccgtgtcgggcctcaaaggctacgtggccgccgggacctgcctcatgcagggggaggaggtcacgtgccgagggcggatcttgatcatggatgtgattgaggtggtgcccgagcctggccagcccttgaccaagaacaagttcaaagtcctttacgagaaggagcagaaggggcccgtgaccgccctgtgccactgcaatggccacctggtgtcggccatcggccagaagattttcctgtggagcctgcgggccagcgagctgacgggcatggccttcatcgacacgcagctctacatacaccagatgatcagcgtcaagaacttcatcctggcagccgacgtcatgaagagcatttcgctgctgcgctaccaggaggaaagcaagacgctgagcctggtgtcgcgggatgccaagcccctggaggtgtacagcgtggacttcatggtggacaatgcccagctgggttttctggtgtctgaccgcgaccgcaacctcatggtgtacatgtacctgcccgaagagccaaggagagtttcgggggcatgcgcctgctgcgtcgggcagacttccacgtgggtgcccacgtgaacacgttctggaggaccccgtgccggggggccactgaagggctcagcaaaaagtcggtcgtgtgggagaataagcacatcacgtggtttgccaccctggacggcggcatcgggctgctgctgcccatgcaggagaagacctaccggcggctgctgatgctgcagaacgcgctgaccaccatgctgccacaccacgccggcctcaacccccgcgccttccggatgctgcacgtggaccgccgcaccctccagaatgccgtgcgcaacgtgctggatggggagctgctcaaccgctacctgtacctgagcaccatggagcgcagcgagctagccaagaagatcggcaccacaccagacataatcctggacgacttgctggagacggaccgcgtcaccgcccacttctagccccgtggatgccgtcaccaccagcacacggaactacctcccaccccctttttgtacaaaacacaaggaaaaacattttttgcttgaa

SEQ ID NO: 288251 - DNA, 3402 bp, Homo sapiens
aggcggccgccagcgtcctcaccaccagcgtgacttgggactaggggttgggtctgggtccagacccggcccagccatcacacacctgccctccctcagatggtcaccatggagcccgggtacctgttcctgggttctcgcctgggcaattccctcctcctcaagtacacggagaagctgcaggagcccccggccagtgctgtccgtgaggctgccgacaaggaagagcctccctcaaagaagaagcgagtggatgcgacggccggctggtcagctgcgggtaagtcggtgccgcaggatgaggtggacgagattgaagtgtacggcagcgaggcccagtcgggaacacagctggccacctactcctttgaggtgtgtgacagcatcctgaacattggaccctgtgccaatgccgccgtgggcgagcctgccttcctctctgaagagtttcagaacagccccgagccggacctggagattgtggtttgctccggccacgggaagaacggggctttgtcggtgctgcagaagagcatccggccccaggtggtgacaacctttgagcttcccggctgctatgacatgtggacagtcatcgccccggtgcgtaaggaggaggaggacaatcccaagggggagggcacagagcaggaacccagcaccacccctgaagcagacgacgacggccgcagacacggattcctgattctgagccgggaagactccaccatgatcctgcagacggggcaggagatcatggagctggacaccagtggcttcgccactcagggccccacggtctttgctgggaacatcggggacaaccgctacattgtccaagtgtcaccactgggcatccgcctgctggaaggagtgaatcagctgcacttcatccccgtggacctgggcgcccccatcgtgcagtgcgccgtggccgacccctatgtggtcatcatgagtgccgagggccacgtcaccatgttcctgctgaagagtgactcctacggtggccgccaccaccgcctggcgctgcacaagcccccgctgcaccatcagtccaaggtgattacgctgtgcctgtaccgagacctcagcggcatgttcaccactgagagccgcctgggtggggcccgtgacgagctcgggggccgcagtggcccggaggccgagggcctgggctcagagactagccccacagtggatgacgaggaggagatgctgtatggggattcgggctccctcttcagccccagcaaggaggaggcccgaagaagcagccagccccctgctgaccgggaccctgcacccttccgggcagagcctacccactggtgcctgctggtgcgggagaatggcaccatggagatctaccagcttcccgactggcggctggtgttcctggtgaagaacttccctgtggggcagcgggtccttgtggacagctcctttggacagcccactacacagggcgaggcccgcagggaggaggccacgcgccagggggagctgcccctcgtcaaggaggtgctgctggtggcgctgggcagccgccagagcaggccctacctgctggtgcatgtggaccaagagctgcttatctacgaggccttcccccacgactctcagctcggccagggcaatctcaaagtccgctttaagaaggtccctcacaacatcaacttccgtgagaagaagccaaagccatccaagaagaaagcagaaggtggcggcgcagaggagggggctggggcccggggccgcgtggcgcgtttccgctacttcgaggatatttatggctactcaggggtcttcatctgcggcccctcccctcactggctcttggtgaccggccgaggggctctgcggctacaccccatggccatcgacggcccggtcgactctttcgctccattccacaatgtcaactgtccccgcggcttcctgtacttcaacagacagggcgagctgaggatcagtgtcctgcctgcctacctgtcctatgatgccccatggcctgtcaggaagatcccgctgcgctgcacggcccactatgtggcttaccacgtggagtctaaggtgtatgctgtggccaccagcaccaacacgccgtgtgcccgcatcccacgcatgactggcgaggagaaggagtttgagaccatcgagagagatgagcggtacatccacccccagcaggaggccttctccatccagctcatctccccggtcagctgggaggctattcccaatgccaggatcgagctgcaggagtgggagcatgtgacctgcatgaagacagtgtctctgcgcagtgaggagaccgtgtcgggcctcaaaggctacgtggccgccgggacctgcctcatgcagggggaggaggtcacgtgccgagggcggatcttgatcatggatgtgattgaggtggtgcccgagcctggccagcccttgaccaagaacaagttcaaagtcctttacgagaaggagcagaaggggcccgtgaccgccctgtgccactgcaatggccacctggtgtcggccatcggccagaagattttcctgtggagcctgcgggccagcgagctgacgggcatggccttcatcgacacgcagctctacatacaccagatgatcagcgtcaagaacttcatcctggcagccgacgtcatgaagagcatttcgctgctgcgctaccaggaggaaagcaagacgctgagcctggtgtcgcgggatgccaagcccctggaggtgtacagcgtggacttcatggtggacaatgcccagctgggttttctggtgtctgaccgcgaccgcaacctcatggtgtacatgtacctgcccgaagagccaaggagagtttcgggggcatgcgcctgctgcgtcgggcagacttccacgtgggtgcccacgtgaacacgttctggaggaccccgtgccggggggccactgaagggctcagcaaaaagtcggtcgtgtgggagaataagcacatcacgtggtttgccaccctggacggcggcatcgggctgctgctgcccatgcaggagaagacctaccggcggctgctgatgctgcagaacgcgctgaccaccatgctgccacaccacgccggcctcaacccccgcgccttccggatgctgcacgtggaccgccgcaccctccagaatgccgtgcgcaacgtgctggatggggagctgctcaaccgctacctgtacctgagcaccatggagcgcagcgagctagccaagaagatcggcaccacaccagacataatcctggacgacttgctggagacggaccgcgtcaccgcccacttctagccccgtggatgccgtcaccaccagcacacggaactacctcccaccccctttttgtacaaaacacaaggaaaaacattttttgcttgaa

SEQ ID NO: 288252 - DNA, 3559 bp, Homo sapiens
aggcggccgccagcgtcctcaccaccagcgtgacttgggactaggggttgggtctgggtccagacccggcccagccatcacacacctgccctccctcagatggtcaccatggagcccgggtacctgttcctgggttctcgcctgggcaattccctcctcctcaagtacacggagaagctgcaggagcccccggccagtgctgtccgtgaggctgccgacaaggtgggtttcctgggcccattgggccaccacccttcatgtgggcactgctgtggcatgccactcagtgcccctcctgcctcacaggaagagcctccctcaaagaagaagcgagtggatgcgacggccggctggtcagctgcgggtaagtcggtgccgcaggatgaggtggacgagattgaagtgtacggcagcgaggcccagtcgggaacacagctggccacctactcctttgaggtgagattgaggcagcagggcccccgtcccagccagcgcccccagcgggcccctgactcttgctgtgccgcaggtgtgtgacagcatcctgaacattggaccctgtgccaatgccgccgtgggcgagcctgccttcctctctgaagagtttcagaacagccccgagccggacctggagattgtggtttgctccggccacgggaagaacggggctttgtcggtgctgcagaagagcatccggccccaggtggtgacaacctttgagcttcccggctgctatgacatgtggacagtcatcgccccggtgcgtaaggaggaggaggacaatcccaagggggagggcacagagcaggaacccagcaccacccctgaagcagacgacgacggccgcagacacggattcctgattctgagccgggaagactccaccatgatcctgcagacggggcaggagatcatggagctggacaccagtggcttcgccactcagggccccacggtctttgctgggaacatcggggacaaccgctacattgtccaagtgtcaccactgggcatccgcctgctggaaggagtgaatcagctgcacttcatccccgtggacctgggcgcccccatcgtgcagtgcgccgtggccgacccctatgtggtcatcatgagtgccgagggccacgtcaccatgttcctgctgaagagtgactcctacggtggccgccaccaccgcctggcgctgcacaagcccccgctgcaccatcagtccaaggtgattacgctgtgcctgtaccgagacctcagcggcatgttcaccactgagagccgcctgggtggggcccgtgacgagctcgggggccgcagtggcccggaggccgagggcctgggctcagagactagccccacagtggatgacgaggaggagatgctgtatggggattcgggctccctcttcagccccagcaaggaggaggcccgaagaagcagccagccccctgctgaccgggaccctgcacccttccgggcagagcctacccactggtgcctgctggtgcgggagaatggcaccatggagatctaccagcttcccgactggcggctggtgttcctggtgaagaacttccctgtggggcagcgggtccttgtggacagctcctttggacagcccactacacagggcgaggcccgcagggaggaggccacgcgccagggggagctgcccctcgtcaaggaggtgctgctggtggcgctgggcagccgccagagcaggccctacctgctggtgcatgtggaccaagagctgcttatctacgaggccttcccccacgactctcagctcggccagggcaatctcaaagtccgctttaagaaggtccctcacaacatcaacttccgtgagaagaagccaaagccatccaagaagaaagcagaaggtggcggcgcagaggagggggctggggcccggggccgcgtggcgcgtttccgctacttcgaggatatttatggctactcaggggtcttcatctgcggcccctcccctcactggctcttggtgaccggccgaggggctctgcggctacaccccatggccatcgacggcccggtcgactctttcgctccattccacaatgtcaactgtccccgcggcttcctgtacttcaacagacagggcgagctgaggatcagtgtcctgcctgcctacctgtcctatgatgccccatggcctgtcaggaagatcccgctgcgctgcacggcccactatgtggcttaccacgtggagtctaaggtgtatgctgtggccaccagcaccaacacgccgtgtgcccgcatcccacgcatgactggcgaggagaaggagtttgagaccatcgagagagatgagcggtacatccacccccagcaggaggccttctccatccagctcatctccccggtcagctgggaggctattcccaatgccaggatcgagctgcaggagtgggagcatgtgacctgcatgaagacagtgtctctgcgcagtgaggagaccgtgtcgggcctcaaaggctacgtggccgccgggacctgcctcatgcagggggaggaggtcacgtgccgagggcggatcttgatcatggatgtgattgaggtggtgcccgagcctggccagcccttgaccaagaacaagttcaaagtcctttacgagaaggagcagaaggggcccgtgaccgccctgtgccactgcaatggccacctggtgtcggccatcggccagaagattttcctgtggagcctgcgggccagcgagctgacgggcatggccttcatcgacacgcagctctacatacaccagatgatcagcgtcaagaacttcatcctggcagccgacgtcatgaagagcatttcgctgctgcgctaccaggaggaaagcaagacgctgagcctggtgtcgcgggatgccaagcccctggaggtgtacagcgtggacttcatggtggacaatgcccagctgggttttctggtgtctgaccgcgaccgcaacctcatggtgtacatgtacctgcccgaagagccaaggagagtttcgggggcatgcgcctgctgcgtcgggcagacttccacgtgggtgcccacgtgaacacgttctggaggaccccgtgccggggggccactgaagggctcagcaaaaagtcggtcgtgtgggagaataagcacatcacgtggtttgccaccctggacggcggcatcgggctgctgctgcccatgcaggagaagacctaccggcggctgctgatgctgcagaacgcgctgaccaccatgctgccacaccacgccggcctcaacccccgcgccttccggatgctgcacgtggaccgccgcaccctccagaatgccgtgcgcaacgtgctggatggggagctgctcaaccgctacctgtacctgagcaccatggagcgcagcgagctagccaagaagatcggcaccacaccagacataatcctggacgacttgctggagacggaccgcgtcaccgcccacttctagccccgtggatgccgtcaccaccagcacacggaactacctcccaccccctttttgtacaaaacacaaggaaaaacattttttgcttgaa

SEQ ID NO: 288253 - DNA, 3086 bp, Homo sapiens
ctctagaggatctgagcaggtctcgtcgggaacacagctggccactatcctttgaggtgtgtgacagcatcctgaacattggaccctgtgccaatgccgccgtgggcgagcctgccttcctctctgaagagtttcagaacagccccgagccggacctggagattgtggtttgctccggccacgggaagaacggggctttgtcggtgctgcagaagagcatccggccccaggtggtgacaacctttgagcttcccggctgctatgacatgtggacagtcatcgccccggtgcgtaaggaggaggaggacaatcccaagggggagggcacagagcaggaacccagcaccacccctgaagcagacgacgacggccgcagacacggattcctgattctgagccgggaagactccaccatgatcctgcagacggggcaggagatcatggagctggacaccagtggcttcgccactcagggccccacggtctttgctgggaacatcggggacaaccgctacattgtccaagtgtcaccactgggcatccgcctgctggaaggagtgaatcagctgcacttcatccccgtggacctgggcgcccccatcgtgcagtgcgccgtggccgacccctatgtggtcatcatgagtgccgagggccacgtcaccatgttcctgctgaagagtgactcctacggtggccgccaccaccgcctggcgctgcacaagcccccgctgcaccatcagtccaaggtgattacgctgtgcctgtaccgagacctcagcggcatgttcaccactgagagccgcctgggtggggcccgtgacgagctcgggggccgcagtggcccggaggccgagggcctgggctcagagactagccccacagtggatgacgaggaggagatgctgtatggggattcgggctccctcttcagccccagcaaggaggaggcccgaagaagcagccagccccctgctgaccgggaccctgcacccttccgggcagagcctacccactggtgcctgctggtgcgggagaatggcaccatggagatctaccagcttcccgactggcggctggtgttcctggtgaagaacttccctgtggggcagcgggtccttgtggacagctcctttggacagcccactacacagggcgaggcccgcagggaggaggccacgcgccagggggagctgcccctcgtcaaggaggtgctgctggtggcgctgggcagccgccagagcaggccctacctgctggtgcatgtggaccaagagctgcttatctacgaggccttcccccacgactctcagctcggccagggcaatctcaaagtccgctttaagaaggtccctcacaacatcaacttccgtgagaagaagccaaagccatccaagaagaaagcagaaggtggcggcgcagaggagggggctggggcccggggccgcgtggcgcgtttccgctacttcgaggatatttatggctactcaggggtcttcatctgcggcccctcccctcactggctcttggtgaccggccgaggggctctgcggctacaccccatggccatcgacggcccggtcgactctttcgctccattccacaatgtcaactgtccccgcggcttcctgtacttcaacagacagggcgagctgaggatcagtgtcctgcctgcctacctgtcctatgatgccccatggcctgtcaggaagatcccgctgcgctgcacggcccactatgtggcttaccacgtggagtctaaggtgtatgctgtggccaccagcaccaacacgccgtgtgcccgcatcccacgcatgactggcgaggagaaggagtttgagaccatcgagagagatgagcggtacatccacccccagcaggaggccttctccatccagctcatctccccggtcagctgggaggctattcccaatgccaggatcgagctgcaggagtgggagcatgtgacctgcatgaagacagtgtctctgcgcagtgaggagaccgtgtcgggcctcaaaggctacgtggccgccgggacctgcctcatgcagggggaggaggtcacgtgccgagggcggatcttgatcatggatgtgattgaggtggtgcccgagcctggccagcccttgaccaagaacaagttcaaagtcctttacgagaaggagcagaaggggcccgtgaccgccctgtgccactgcaatggccacctggtgtcggccatcggccagaagattttcctgtggagcctgcgggccagcgagctgacgggcatggccttcatcgacacgcagctctacatacaccagatgatcagcgtcaagaacttcatcctggcagccgacgtcatgaagagcatttcgctgctgcgctaccaggaggaaagcaagacgctgagcctggtgtcgcgggatgccaagcccctggaggtgtacagcgtggacttcatggtggacaatgcccagctgggttttctggtgtctgaccgcgaccgcaacctcatggtgtacatgtacctgcccgaagagccaaggagagtttcgggggcatgcgcctgctgcgtcgggcagacttccacgtgggtgcccacgtgaacacgttctggaggaccccgtgccggggggccactgaagggctcagcaaaaagtcggtcgtgtgggagaataagcacatcacgtggtttgccaccctggacggcggcatcgggctgctgctgcccatgcaggagaagacctaccggcggctgctgatgctgcagaacgcgctgaccaccatgctgccacaccacgccggcctcaacccccgcgccttccggatgctgcacgtggaccgccgcaccctccagaatgccgtgcgcaacgtgctggatggggagctgctcaaccgctacctgtacctgagcaccatggagcgcagcgagctagccaagaagatcggcaccacaccagacataatcctggacgacttgctggagacggaccgcgtcaccgcccacttctagccccgtggatgccgtcaccaccagcacacggaactacctcccaccccctttttgtacaaaacacaaggaaaaacattttttgcttgaa

SEQ ID NO: 288254 - DNA, 4128 bp, Homo sapiens
aggcggccgccagcgtcctcaccaccagcatggtcaccatggagcccgggtacctgttcctgggttctcgcctgggcaattccctcctcctcaagtacacggagaagctgcaggagcccccggccagtgctgtccgtgaggctgccgacaaggaagagcctccctcaaagaagaagcgagtggatgcgacggccggctggtcagctgcgggtaagtcggtgccgcaggatgaggtggacgagattgaagtgtacggcagcgaggcccagtcgggaacacagctggccacctactcctttgaggtgtgtgacagcatcctgaacattggaccctgtgccaatgccgccgtgggcgagcctgccttcctctctgaagagtttcagaacagccccgagccggacctggagattgtggtttgctccggccacgggaagaacggggctttgtcggtgctgcagaagagcatccggccccaggtggtgacaacctttgagcttcccggctgctatgacatgtggacagtcatcgccccggtgcgtaaggaggaggaggacaatcccaagggggagggcacagagcaggaacccagcaccacccctgaagcagacgacgacggccgcagacacggattcctgattctgagccgggaagactccaccatgatcctgcagacggggcaggagatcatggagctggacaccagtggcttcgccactcagggccccacggtctttgctgggaacatcggggacaaccgctacattgtccaagtgtcaccactgggcatccgcctgctggaaggagtgaatcagctgcacttcatccccgtggacctgggcgcccccatcgtgcagtgcgccgtggccgacccctatgtggtcatcatgagtgccgagggccacgtcaccatgttcctgctgaagagtgactcctacggtggccgccaccaccgcctggcgctgcacaagcccccgctgcaccatcagtccaaggtgattacgctgtgcctgtaccgagacctcagcggcatgttcaccactgagagccgcctgggtggggcccgtgacgagctcgggggccgcagtggcccggaggccgagggcctgggctcagagactagccccacagtggatgacgaggaggagatgctgtatggggattcgggctccctcttcagccccagcaaggaggaggcccgaagaagcagccagccccctgctgaccgggaccctgcacccttccgggcagagcctacccactggtgcctgctggtgcgggagaatggcaccatggagatctaccagcttcccgactggcggctggtgttcctggtgaagaacttccctgtggggcagcgggtccttgtggacagctcctttggacagcccactacacagggcgaggcccgcagggaggaggccacgcgccagggggagctgcccctcgtcaaggaggtgctgctggtggcgctgggcagccgccagagcaggccctacctgctggtgcatgtggaccaagagctgcttatctacgaggccttcccccacgactctcagctcggccagggcaatctcaaagtccgctttaagaaggtccctcacaacatcaacttccgtgagaagaagccaaagccatccaagaagaaagcagaaggtggcggcgcagaggagggggctggggcccggggccgcgtggcgcgtttccgctacttcgaggatatttatggctactcaggggtcttcatctgcggcccctcccctcactggctcttggtgaccggccgaggggctctgcggctacaccccatggccatcgacggcccggtcgactctttcgctccattccacaatgtcaactgtccccgcggcttcctgtacttcaacagacaggtggggtccggccggttcccaacaacactggctgatgctgccccagctgggggctgagggggaggggacaggataagggaccattggctccaccctgaggaccatgaaggagtgtccagagggcgatggggttgaggtcaacgaggtggaacctgtgacttggttgctccaaaggtctggaaaggggtggttgggaactggggctgcatcccctggggtccccaccactgctctgccggctcgccgggcaagccctcgcagggcctggcctccacacttctcaggagagctgacgtgagtgctagctctgccccttggctgctctgtgactttgggagggcacacaggctttctcatcctggttccctatttaagccaccacaccaccaggtcacttgagaccctgcctgggatgcggtgagtgcttcctgggtgcctgaggactcaggactgtccatgaaagagggcagccctggctccctctgcctggttttcagtccccagcatggcagtctgtgggctgccctttgcagcctccagtgccctcctggcctagctttcccatcccctgtggccagcacccctagccccagctgagcgtgggaaaatggacaggaggagccccagaggctgagtggcagccccttccaggacctcgccaggacacagctgcccctcacccacccctgctcccacagagctgagggcaacatcccagggctcttggcggcctgggcctgcctgcccctgcccttggctagccctggatcccctgacccctgtgcccccaccccagggcgagctgaggatcagtgtcctgcctgcctacctgtcctatgatgccccatggcctgtcaggaagatcccgctgcgctgcacggcccactatgtggcttaccacgtggagtctaaggtgtatgctgtggccaccagcaccaacacgccgtgtgcccgcatcccacgcatgactggcgaggagaaggagtttgagaccatcgagagagatgagcggtacatccacccccagcaggaggccttctccatccagctcatctccccggtcagctgggaggctattcccaatgccaggatcgagctgcaggagtgggagcatgtgacctgcatgaagacagtgtctctgcgcagtgaggagaccgtgtcgggcctcaaaggctacgtggccgccgggacctgcctcatgcagggggaggaggtcacgtgccgagggcggatcttgatcatggatgtgattgaggtggtgcccgagcctggccagcccttgaccaagaacaagttcaaagtcctttacgagaaggagcagaaggggcccgtgaccgccctgtgccactgcaatggccacctggtgtcggccatcggccagaagattttcctgtggagcctgcgggccagcgagctgacgggcatggccttcatcgacacgcagctctacatacaccagatgatcagcgtcaagaacttcatcctggcagccgacgtcatgaagagcatttcgctgctgcgctaccaggaggaaagcaagacgctgagcctggtgtcgcgggatgccaagcccctggaggtgtacagcgtggacttcatggtggacaatgcccagctgggttttctggtgtctgaccgcgaccgcaacctcatggtgtacatgtacctgcccgaagagccaaggagagtttcgggggcatgcgcctgctgcgtcgggcagacttccacgtgggtgcccacgtgaacacgttctggaggaccccgtgccggggggccactgaagggctcagcaaaaagtcggtcgtgtgggagaataagcacatcacgtggtttgccaccctggacggcggcatcgggctgctgctgcccatgcaggagaagacctaccggcggctgctgatgctgcagaacgcgctgaccaccatgctgccacaccacgccggcctcaacccccgcgccttccggatgctgcacgtggaccgccgcaccctccagaatgccgtgcgcaacgtgctggatggggagctgctcaaccgctacctgtacctgagcaccatggagcgcagcgagctagccaagaagatcggcaccacaccagacataatcctggacgacttgctggagacggaccgcgtcaccgcccacttctagccccgtggatgccgtcaccaccagcacacggaactacctcccaccccctttttgtacaaaacacaaggaaaaacattttttgcttgaa

SEQ ID NO: 288255 - DNA, 3356 bp, Homo sapiens
aggcggccgccagcgtcctcaccaccagcatggtcaccatggagcccgggtacctgttcctgggttctcgcctgggcaattccctcctcctcaagtacacggagaagctgcaggagcccccggccagtgctgtccgtgaggctgccgacaaggaagagcctccctcaaagaagaagcgagtggatgcgacggccggctggtcagctgcgggtaagtcggtgccgcaggatgaggtggacgagattgaagtgtacggcagcgaggcccagtcgggaacacagctggccacctactcctttgaggtgtgtgacagcatcctgaacattggaccctgtgccaatgccgccgtgggcgagcctgccttcctctctgaagagtttcagaacagccccgagccggacctggagattgtggtttgctccggccacgggaagaacggggctttgtcggtgctgcagaagagcatccggccccaggtggtgacaacctttgagcttcccggctgctatgacatgtggacagtcatcgccccggtgcgtaaggaggagcctgcccccctttggccctgacaggaggacaatcccaagggggagggcacagagcaggaacccagcaccacccctgaagcagacgacgacggccgcagacacggattcctgattctgagccgggaagactccaccatgatcctgcagacggggcaggagatcatggagctggacaccagtggcttcgccactcagggccccacggtctttgctgggaacatcggggacaaccgctacattgtccaagtgtcaccactgggcatccgcctgctggaaggagtgaatcagctgcacttcatccccgtggacctgggcgcccccatcgtgcagtgcgccgtggccgacccctatgtggtcatcatgagtgccgagggccacgtcaccatgttcctgctgaagagtgactcctacggtggccgccaccaccgcctggcgctgcacaagcccccgctgcaccatcagtccaaggtgattacgctgtgcctgtaccgagacctcagcggcatgttcaccactgagagccgcctgggtggggcccgtgacgagctcgggggccgcagtggcccggaggccgagggcctgggctcagagactagccccacagtggatgacgaggaggagatgctgtatggggattcgggctccctcttcagccccagcaaggaggaggcccgaagaagcagccagccccctgctgaccgggaccctgcacccttccgggcagagcctacccactggtgcctgctggtgcgggagaatggcaccatggagatctaccagcttcccgactggcggctggtgttcctggtgaagaacttccctgtggggcagcgggtccttgtggacagctcctttggacagcccactacacagggcgaggcccgcagggaggaggccacgcgccagggggagctgcccctcgtcaaggaggtgctgctggtggcgctgggcagccgccagagcaggccctacctgctggtgcatgtggaccaagagctgcttatctacgaggccttcccccacgactctcagctcggccagggcaatctcaaagtccgctttaagaaggtccctcacaacatcaacttccgtgagaagaagccaaagccatccaagaagaaagcagaaggtggcggcgcagaggagggggctggggcccggggccgcgtggcgcgtttccgctacttcgaggatatttatggctactcaggggtcttcatctgcggcccctcccctcactggctcttggtgaccggccgaggggctctgcggctacaccccatggccatcgacggcccggtcgactctttcgctccattccacaatgtcaactgtccccgcggcttcctgtacttcaacagacagggcgagctgaggatcagtgtcctgcctgcctacctgtcctatgatgccccatggcctgtcaggaagatcccgctgcgctgcacggcccactatgtggcttaccacgtggagtctaaggtgtatgctgtggccaccagcaccaacacgccgtgtgcccgcatcccacgcatgactggcgaggagaaggagtttgagaccatcgagagagatgagcggtacatccacccccagcaggaggccttctccatccagctcatctccccggtcagctgggaggctattcccaatgccaggatcgagctgcaggagtgggagcatgtgacctgcatgaagacagtgtctctgcgcagtgaggagaccgtgtcgggcctcaaaggctacgtggccgccgggacctgcctcatgcagggggaggaggtcacgtgccgagggcggatcttgatcatggatgtgattgaggtggtgcccgagcctggccagcccttgaccaagaacaagttcaaagtcctttacgagaaggagcagaaggggcccgtgaccgccctgtgccactgcaatggccacctggtgtcggccatcggccagaagattttcctgtggagcctgcgggccagcgagctgacgggcatggccttcatcgacacgcagctctacatacaccagatgatcagcgtcaagaacttcatcctggcagccgacgtcatgaagagcatttcgctgctgcgctaccaggaggaaagcaagacgctgagcctggtgtcgcgggatgccaagcccctggaggtgtacagcgtggacttcatggtggacaatgcccagctgggttttctggtgtctgaccgcgaccgcaacctcatggtgtacatgtacctgcccgaagagccaaggagagtttcgggggcatgcgcctgctgcgtcgggcagacttccacgtgggtgcccacgtgaacacgttctggaggaccccgtgccggggggccactgaagggctcagcaaaaagtcggtcgtgtgggagaataagcacatcacgtggtttgccaccctggacggcggcatcgggctgctgctgcccatgcaggagaagacctaccggcggctgctgatgctgcagaacgcgctgaccaccatgctgccacaccacgccggcctcaacccccgcgccttccggatgctgcacgtggaccgccgcaccctccagaatgccgtgcgcaacgtgctggatggggagctgctcaaccgctacctgtacctgagcaccatggagcgcagcgagctagccaagaagatcggcaccacaccagacataatcctggacgacttgctggagacggaccgcgtcaccgcccacttctagccccgtggatgccgtcaccaccagcacacggaactacctcccaccccctttttgtacaaaacacaaggaaaaacattttttgcttgaa

SEQ ID NO: 288256 - DNA, 3195 bp, Homo sapiens
aggcggccgccagcgtcctcaccaccagcatggtcaccatggagcccgggtacctgttcctgggttctcgcctgggcaattccctcctcctcaagtacacggagaagctgcaggagcccccggccagtgctgtccgtgaggctgccgacaaggaagagcctccctcaaagaagaagcgagtggatgcgacggccggctggtcagctgcgggtaagtcggtgccgcaggatgaggtggacgagattgaagtgtacggcagcgaggcccagtcgggaacacagctggccacctactcctttgaggtgtgtgacagcatcctgaacattggaccctgtgccaatgccgccgtgggcgagcctgccttcctctctgaagagtttcagaacagccccgagccggacctggagattgtggtttgctccggccacgggaagaacggggctttgtcggtgctgcagaagagcatccggccccaggtggtgacaacctttgagcttcccggctgctatgacatgtggacagtcatcgccccggtgcgtaaggaggaggaggacaatcccaagggggagggcacagagcaggaacccagcaccacccctgaagcagacgacgacggccgcagacacggattcctgattctgagccgggaagactccaccatgatcctgcagacggggcaggagatcatggagctggacaccagtggcttcgccactcagggccccacggtctttgctgggaacatcggggacaaccgctacattgtccaagtgtcaccactgggcatccgcctgctggaaggagtgaatcagctgcacttcatccccgtggacctgggcgcccccatcgtgcagtgcgccgtggccgacccctatgtggtcatcatgagtgccgagggccacgtcaccatgttcctgctgaagagtgactcctacggtggccgccaccaccgcctggcgctgcacaagcccccgctgcaccatccccacagtggatgacgaggaggagatgctgtatggggattcgggctccctcttcagccccagcaaggaggaggcccgaagaagcagccagccccctgctgaccgggaccctgcacccttccgggcagagcctacccactggtgcctgctggtgcgggagaatggcaccatggagatctaccagcttcccgactggcggctggtgttcctggtgaagaacttccctgtggggcagcgggtccttgtggacagctcctttggacagcccactacacagggcgaggcccgcagggaggaggccacgcgccagggggagctgcccctcgtcaaggaggtgctgctggtggcgctgggcagccgccagagcaggccctacctgctggtgcatgtggaccaagagctgcttatctacgaggccttcccccacgactctcagctcggccagggcaatctcaaagtccgctttaagaaggtccctcacaacatcaacttccgtgagaagaagccaaagccatccaagaagaaagcagaaggtggcggcgcagaggagggggctggggcccggggccgcgtggcgcgtttccgctacttcgaggatatttatggctactcaggggtcttcatctgcggcccctcccctcactggctcttggtgaccggccgaggggctctgcggctacaccccatggccatcgacggcccggtcgactctttcgctccattccacaatgtcaactgtccccgcggcttcctgtacttcaacagacagggcgagctgaggatcagtgtcctgcctgcctacctgtcctatgatgccccatggcctgtcaggaagatcccgctgcgctgcacggcccactatgtggcttaccacgtggagtctaaggtgtatgctgtggccaccagcaccaacacgccgtgtgcccgcatcccacgcatgactggcgaggagaaggagtttgagaccatcgagagagatgagcggtacatccacccccagcaggaggccttctccatccagctcatctccccggtcagctgggaggctattcccaatgccaggatcgagctgcaggagtgggagcatgtgacctgcatgaagacagtgtctctgcgcagtgaggagaccgtgtcgggcctcaaaggctacgtggccgccgggacctgcctcatgcagggggaggaggtcacgtgccgagggcggatcttgatcatggatgtgattgaggtggtgcccgagcctggccagcccttgaccaagaacaagttcaaagtcctttacgagaaggagcagaaggggcccgtgaccgccctgtgccactgcaatggccacctggtgtcggccatcggccagaagattttcctgtggagcctgcgggccagcgagctgacgggcatggccttcatcgacacgcagctctacatacaccagatgatcagcgtcaagaacttcatcctggcagccgacgtcatgaagagcatttcgctgctgcgctaccaggaggaaagcaagacgctgagcctggtgtcgcgggatgccaagcccctggaggtgtacagcgtggacttcatggtggacaatgcccagctgggttttctggtgtctgaccgcgaccgcaacctcatggtgtacatgtacctgcccgaagagccaaggagagtttcgggggcatgcgcctgctgcgtcgggcagacttccacgtgggtgcccacgtgaacacgttctggaggaccccgtgccggggggccactgaagggctcagcaaaaagtcggtcgtgtgggagaataagcacatcacgtggtttgccaccctggacggcggcatcgggctgctgctgcccatgcaggagaagacctaccggcggctgctgatgctgcagaacgcgctgaccaccatgctgccacaccacgccggcctcaacccccgcgccttccggatgctgcacgtggaccgccgcaccctccagaatgccgtgcgcaacgtgctggatggggagctgctcaaccgctacctgtacctgagcaccatggagcgcagcgagctagccaagaagatcggcaccacaccagacataatcctggacgacttgctggagacggaccgcgtcaccgcccacttctagccccgtggatgccgtcaccaccagcacacggaactacctcccaccccctttttgtacaaaacacaaggaaaaacattttttgcttgaa

SEQ ID NO: 288257 - DNA, 2740 bp, Homo sapiens
ccatctagaggatcctcaacttcgacggcgcatcacggattctgatctgagccgggaagactccaccatgatcctgcagacggggcaggagatcatggagctggacaccagtggcttcgccactcagggccccacggtctttgctgggaacatcggggacaaccgctacattgtccaagtgtcaccactgggcatccgcctgctggaaggagtgaatcagctgcacttcatccccgtggacctgggcgcccccatcgtgcagtgcgccgtggccgacccctatgtggtcatcatgagtgccgagggccacgtcaccatgttcctgctgaagagtgactcctacggtggccgccaccaccgcctggcgctgcacaagcccccgctgcaccatcagtccaaggtgattacgctgtgcctgtaccgagacctcagcggcatgttcaccactgagagccgcctgggtggggcccgtgacgagctcgggggccgcagtggcccggaggccgagggcctgggctcagagactagccccacagtggatgacgaggaggagatgctgtatggggattcgggctccctcttcagccccagcaaggaggaggcccgaagaagcagccagccccctgctgaccgggaccctgcacccttccgggcagagcctacccactggtgcctgctggtgcgggagaatggcaccatggagatctaccagcttcccgactggcggctggtgttcctggtgaagaacttccctgtggggcagcgggtccttgtggacagctcctttggacagcccactacacagggcgaggcccgcagggaggaggccacgcgccagggggagctgcccctcgtcaaggaggtgctgctggtggcgctgggcagccgccagagcaggccctacctgctggtgcatgtggaccaagagctgcttatctacgaggccttcccccacgactctcagctcggccagggcaatctcaaagtccgctttaagaaggtccctcacaacatcaacttccgtgagaagaagccaaagccatccaagaagaaagcagaaggtggcggcgcagaggagggggctggggcccggggccgcgtggcgcgtttccgctacttcgaggatatttatggctactcaggggtcttcatctgcggcccctcccctcactggctcttggtgaccggccgaggggctctgcggctacaccccatggccatcgacggcccggtcgactctttcgctccattccacaatgtcaactgtccccgcggcttcctgtacttcaacagacagggcgagctgaggatcagtgtcctgcctgcctacctgtcctatgatgccccatggcctgtcaggaagatcccgctgcgctgcacggcccactatgtggcttaccacgtggagtctaaggtgtatgctgtggccaccagcaccaacacgccgtgtgcccgcatcccacgcatgactggcgaggagaaggagtttgagaccatcgagagagatgagcggtacatccacccccagcaggaggccttctccatccagctcatctccccggtcagctgggaggctattcccaatgccaggatcgagctgcaggagtgggagcatgtgacctgcatgaagacagtgtctctgcgcagtgaggagaccgtgtcgggcctcaaaggctacgtggccgccgggacctgcctcatgcagggggaggaggtcacgtgccgagggcggatcttgatcatggatgtgattgaggtggtgcccgagcctggccagcccttgaccaagaacaagttcaaagtcctttacgagaaggagcagaaggggcccgtgaccgccctgtgccactgcaatggccacctggtgtcggccatcggccagaagattttcctgtggagcctgcgggccagcgagctgacgggcatggccttcatcgacacgcagctctacatacaccagatgatcagcgtcaagaacttcatcctggcagccgacgtcatgaagagcatttcgctgctgcgctaccaggaggaaagcaagacgctgagcctggtgtcgcgggatgccaagcccctggaggtgtacagcgtggacttcatggtggacaatgcccagctgggttttctggtgtctgaccgcgaccgcaacctcatggtgtacatgtacctgcccgaagagccaaggagagtttcgggggcatgcgcctgctgcgtcgggcagacttccacgtgggtgcccacgtgaacacgttctggaggaccccgtgccggggggccactgaagggctcagcaaaaagtcggtcgtgtgggagaataagcacatcacgtggtttgccaccctggacggcggcatcgggctgctgctgcccatgcaggagaagacctaccggcggctgctgatgctgcagaacgcgctgaccaccatgctgccacaccacgccggcctcaacccccgcgccttccggatgctgcacgtggaccgccgcaccctccagaatgccgtgcgcaacgtgctggatggggagctgctcaaccgctacctgtacctgagcaccatggagcgcagcgagctagccaagaagatcggcaccacaccagacataatcctggacgacttgctggagacggaccgcgtcaccgcccacttctagccccgtggatgccgtcaccaccagcacacggaactacctcccaccccctttttgtacaaaacacaaggaaaaacattttttgcttgaa

SEQ ID NO: 288258 - DNA, 3410 bp, Homo sapiens
aggcggccgccagcgtcctcaccaccagcatggtcaccatggagcccgggtacctgttcctgggttctcgcctgggcaattccctcctcctcaagtacacggagaagctgcaggagcccccggccagtgctgtccgtgaggctgccgacaaggaagagcctccctcaaagaagaagcgagtggatgcgacggccggctggtcagctgcgggtaagtcggtgccgcaggatgaggtggacgagattgaagtgtacggcagcgaggcccagtcgggaacacagctggccacctactcctttgaggtgtgtgacagcatcctgaacattggaccctgtgccaatgccgccgtgggcgagcctgccttcctctctgaagagtttcagaacagccccgagccggacctggagattgtggtttgctccggccacgggaagaacggggctttgtcggtgctgcagaagagcatccggccccaggtggtgacaacctttgagcttcccggctgctatgacatgtggacagtcatcgccccggtgcgtaaggaggaggaggacaatcccaagggggagggcacagagcaggaacccagcaccacccctgaagcagacgacgacggccgcagacacggattcctgattctgagccgggaagactccaccatgatcctgcagacggggcaggagatcatggagctggacaccagtggcttcgccactcagggccccacggtctttgctgggaacatcggggacaaccgctacattgtccaagtgtcaccactgggcatccgcctgctggaaggagtgaatcagctgcacttcatccccgtggacctgggcgcccccatcgtgcagtgcgccgtggccgacccctatgtggtcatcatgagtgccgagggccacgtcaccatgttcctgctgaagagtgactcctacggtggccgccaccaccgcctggcgctgcacaagcccccgctgcaccatcagtccaaggtgattacgctgtgcctgtaccgagacctcagcggcatgttcaccactgagagccgcctgggtggggcccgtgacgagctcgggggccgcagtggcccggaggccgagggcctgggctcagagactagccccacagtggatgacgaggaggagatgctgtatggggattcgggctccctcttcagccccagcaaggaggaggcccgaagaagcagccagccccctgctgaccgggaccctgcacccttccgggcagagcctacccactggtgcctgctggtgcgggagaatggcaccatggagatctaccagcttcccgactggcggctggtgttcctggtgaagaacttccctgtggggcagcgggtccttgtggacagctcctttggacagcccactacacagggcgaggcccgcagggaggaggccacgcgccagggggagctgcccctcgtcaaggaggtgctgctggtggcgctgggcagccgccagagcaggccctacctgctggtgcatgtggaccaagagctgcttatctacgaggccttcccccacgactctcagctcggccagggcaatctcaaagtccgctttaagaaggtccctcacaacatcaacttccgtgagaagaagccaaagccatccaagaagaaagcagaaggtggcggcgcagaggagggggctggggcccggggccgcgtggcgcgtttccgctacttcgaggatatttatggctactcaggggtcttcatctgcggcccctcccctcactggctcttggtgaccggccgaggggctctgcggctacaccccatggccatcgacggcccggtcgactctttcgctccattccacaatgtcaactgtccccgcggcttcctgtacttcaacagacagggcgagctgaggatcagtgtcctgcctgcctacctgtcctatgatgccccatggcctgtcaggaagatcccgctgcgctgcacggcccactatgtggcttaccacgtggagtctaaggtgtatgctgtggccaccagcaccaacacgccgtgtgcccgcatcccacgcatgactggcgaggagaaggagtttgagaccatcgagagagatgagcggtacatccacccccagcaggaggccttctccatccagctcatctccccggtcagctgggaggctattcccaatgccaggatcgagctgcaggagtgggagcatgtgacctgcatgaagacagtgtctctgcgcagtgaggagaccgtgtcgggcctcaaaggctacgtggccgccgggacctgcctcatgcagggggaggaggtcacgtgccgagggcggatcttgatcatggatgtgattgaggtggtgcccgagcctggccagcccttgaccaagaacaagttcaaagtcctttacgagaaggagcagaaggggcccgtgaccgccctgtgccactgcaatggccacctggtgtcggccatcggccagaagattttcctgtggagcctgcgggccagcgagctgacgggcatggccttcatcgacacgcagctctacatacaccagatgatcagcgtcaagaacttcatcctggcagccgacgtcatgaagagcatttcgctgctgcgctaccaggaggaaagcaagacgctgagcctggtgtcgcgggtacacctgtggcggcggtgctcgtgtctgggtgggtacccgcccaaggcacctctgacgcccccttcccgcccccaggatgccaagcccctggaggtgtacagcgtggacttcatggtggacaatgcccagctgggttttctggtgtctgaccgcgaccgcaacctcatggtgtacatgtacctgcccgaagagccaaggagagtttcgggggcatgcgcctgctgcgtcgggcagacttccacgtgggtgcccacgtgaacacgttctggaggaccccgtgccggggggccactgaagggctcagcaaaaagtcggtcgtgtgggagaataagcacatcacgtggtttgccaccctggacggcggcatcgggctgctgctgcccatgcaggagaagacctaccggcggctgctgatgctgcagaacgcgctgaccaccatgctgccacaccacgccggcctcaacccccgcgccttccggatgctgcacgtggaccgccgcaccctccagaatgccgtgcgcaacgtgctggatggggagctgctcaaccgctacctgtacctgagcaccatggagcgcagcgagctagccaagaagatcggcaccacaccagacataatcctggacgacttgctggagacggaccgcgtcaccgcccacttctagccccgtggatgccgtcaccaccagcacacggaactacctcccaccccctttttgtacaaaacacaaggaaaaacattttttgcttgaa

SEQ ID NO: 288259 - DNA, 3316 bp, Homo sapiens
aggcggccgccagcgtcctcaccaccagcatggtcaccatggagcccgggtacctgttcctgggttctcgcctgggcaattccctcctcctcaagtacacggagaagctgcaggagcccccggccagtgctgtccgtgaggctgccgacaaggaagagcctccctcaaagaagaagcgagtggatgcgacggccggctggtcagctgcgggtaagtcggtgccgcaggatgaggtggacgagattgaagtgtacggcagcgaggcccagtcgggaacacagctggccacctactcctttgaggtgtgtgacagcatcctgaacattggaccctgtgccaatgccgccgtgggcgagcctgccttcctctctgaagagtttcagaacagccccgagccggacctggagattgtggtttgctccggccacgggaagaacggggctttgtcggtgctgcagaagagcatccggccccaggtggtgacaacctttgagcttcccggctgctatgacatgtggacagtcatcgccccggtgcgtaaggaggaggaggacaatcccaagggggagggcacagagcaggaacccagcaccacccctgaagcagacgacgacggccgcagacacggattcctgattctgagccgggaagactccaccatgatcctgcagacggggcaggagatcatggagctggacaccagtggcttcgccactcagggccccacggtctttgctgggaacatcggggacaaccgctacattgtccaagtgtcaccactgggcatccgcctgctggaaggagtgaatcagctgcacttcatccccgtggacctgggcgcccccatcgtgcagtgcgccgtggccgacccctatgtggtcatcatgagtgccgagggccacgtcaccatgttcctgctgaagagtgactcctacggtggccgccaccaccgcctggcgctgcacaagcccccgctgcaccatcagtccaaggtgattacgctgtgcctgtaccgagacctcagcggcatgttcaccactgagagccgcctgggtggggcccgtgacgagctcgggggccgcagtggcccggaggccgagggcctgggctcagagactagccccacagtggatgacgaggaggagatgctgtatggggattcgggctccctcttcagccccagcaaggaggaggcccgaagaagcagccagccccctgctgaccgggaccctgcacccttccgggcagagcctacccactggtgcctgctggtgcgggagaatggcaccatggagatctaccagcttcccgactggcggctggtgttcctggtgaagaacttccctgtggggcagcgggtccttgtggacagctcctttggacagcccactacacagggcgaggcccgcagggaggaggccacgcgccagggggagctgcccctcgtcaaggaggtgctgctggtggcgctgggcagccgccagagcaggccctacctgctggtgcatgtggaccaagagctgcttatctacgaggccttcccccacgactctcagctcggccagggcaatctcaaagtccgctttaagaaggtccctcacaacatcaacttccgtgagaagaagccaaagccatccaagaagaaagcagaaggtggcggcgcagaggagggggctggggcccggggccgcgtggcgcgtttccgctacttcgaggatatttatggctactcaggggtcttcatctgcggcccctcccctcactggctcttggtgaccggccgaggggctctgcggctacaccccatggccatcgacggcccggtcgactctttcgctccattccacaatgtcaactgtccccgcggcttcctgtacttcaacagacagggcgagctgaggatcagtgtcctgcctgcctacctgtcctatgatgccccatggcctgtcaggaagatcccgctgcgctgcacggcccactatgtggcttaccacgtggagtctaaggtgtatgctgtggccaccagcaccaacacgccgtgtgcccgcatcccacgcatgactggcgaggagaaggagtttgagaccatcgagagagatgagcggtacatccacccccagcaggaggccttctccatccagctcatctccccggtcagctgggaggctattcccaatgccaggatcgagctgcaggagtgggagcatgtgacctgcatgaagacagtgtctctgcgcagtgaggagaccgtgtcgggcctcaaaggctacgtggccgccgggacctgcctcatgcagggggaggaggtcacgtgccgagggcggatcttgatcatggatgtgattgaggtggtgcccgagcctggccagcccttgaccaagaacaagttcaaagtcctttacgagaaggagcagaaggggcccgtgaccgccctgtgccactgcaatggccacctggtgtcggccatcggccagaagattttcctgtggagcctgcgggccagcgagctgacgggcatggccttcatcgacacgcagctctacatacaccagatgatcagcgtcaagaacttcatcctggcagccgacgtcatgaagagcatttcgctgctgcgctaccaggaggaaagcaagacgctgagcctggtgtcgcgggatgccaagcccctggaggtgtacagcgtggacttcatggtggacaatgcccagctgggttttctggtgtctgaccgcgaccgcaacctcatggtgtacatgtacctgcccgaagagccaaggagagtttcgggggcatgcgcctgctgcgtcgggcagacttccacgtgggtgcccacgtgaacacgttctggaggaccccgtgccggggggccactgaagggctcagcaaaaagtcggtcgtgtgggagaataagcacatcacgtggtttgccaccctggacggcggcatcgggctgctgctgcccatgcaggagaagacctaccggcggctgctgatgctgcagaacgcgctgaccaccatgctgccacaccacgccggcctcaacccccgcgccttccggatgctgcacgtggaccgccgcaccctccagaatgccgtgcgcaacgtgctggatggggagctgctcaaccgctacctgtacctgagcaccatggagcgcagcgagctagccaagaagatcggcaccacaccagacataatcctggacgacttgctggagacggaccgcgtcaccgcccacttctagccccgtggatgccgtcaccaccagcacacggaactacctcccacccctacgggtgagcgtacgagctgatga

SEQ ID NO: 288260 - DNA, 2950 bp, Homo sapiens
aggcggccgccagcgtcctcaccaccagcatggtcaccatggagcccgggtacctgttcctgggttctcgcctgggcaattccctcctcctcaagtacacggagaagctgcaggagcccccggccagtgctgtccgtgaggctgccgacaaggaagagcctccctcaaagaagaagcgagtggatgcgacggccggctggtcagctgcgggtaagtcggtgccgcaggatgaggtggacgagattgaagtgtacggcagcgaggcccagtcgggaacacagctggccacctactcctttgaggtgtgtgacagcatcctgaacattggaccctgtgccaatgccgccgtgggcgagcctgccttcctctctgaagagtttcagaacagccccgagccggacctggagattgtggtttgctccggccacgggaagaacggggctttgtcggtgctgcagaagagcatccggccccaggtggtgacaacctttgagcttcccggctgctatgacatgtggacagtcatcgccccggtgcgtaaggaggaggaggacaatcccaagggggagggcacagagcaggaacccagcaccacccctgaagcagacgacgacggccgcagacacggattcctgattctgagccgggaagactccaccatgatcctgcagacggggcaggagatcatggagctggacaccagtggcttcgccactcagggccccacggtctttgctgggaacatcggggacaaccgctacattgtccaagtgtcaccactgggcatccgcctgctggaaggagtgaatcagctgcacttcatccccgtggacctgggcgcccccatcgtgcagtgcgccgtggccgacccctatgtggtcatcatgagtgccgagggccacgtcaccatgttcctgctgaagagtgactcctacggtggccgccaccaccgcctggcgctgcacaagcccccgctgcaccatcagtccaaggtgattacgctgtgcctgtaccgagacctcagcggcatgttcaccactgagagccgcctgggtggggcccgtgacgagctcgggggccgcagtggcccggaggccgagggcctgggctcagagactagccccacagtggatgacgaggaggagatgctgtatggggattcgggctccctcttcagccccagcaaggaggaggcccgaagaagcagccagccccctgctgaccgggaccctgcacccttccgggcagagcctacccactggtgcctgctggtgcgggagaatggcaccatggagatctaccagcttcccgactggcggctggtgttcctggtgaagaacttccctgtggggcagcgggtccttgtggacagctcctttggacagcccactacacagggcgaggcccgcagggaggaggccacgcgccagggggagctgcccctcgtcaaggaggtgctgctggtggcgctgggcagccgccagagcaggccctacctgctggtgcatgtggaccaagagctgcttatctacgaggccttcccccacgactctcagctcggccagggcaatctcaaagtccgctttaagaaggtccctcacaacatcaacttccgtgagaagaagccaaagccatccaagaagaaagcagaaggtggcggcgcagaggagggggctggggcccggggccgcgtggcgcgtttccgctacttcgaggatatttatggctactcaggggtcttcatctgcggcccctcccctcactggctcttggtgaccggccgaggggctctgcggctacaccccatggccatcgacggcccggtcgactctttcgctccattccacaatgtcaactgtccccgcggcttcctgtacttcaacagacagggcgagctgaggatcagtgtcctgcctgcctacctgtcctatgatgccccatggcctgtcaggaagatcccgctgcgctgcacggcccactatgtggcttaccacgtggagtctaaggtgtatgctgtggccaccagcaccaacacgccgtgtgcccgcatcccacgcatgactggcgaggagaaggagtttgagaccatcgagagagatgagcggtacatccacccccagcaggaggccttctccatccagctcatctccccggtcagctgggaggctattcccaatgccaggatcgagctgcaggagtgggagcatgtgacctgcatgaagacagtgtctctgcgcagtgaggagaccgtgtcgggcctcaaaggctacgtggccgccgggacctgcctcatgcagggggaggaggtcacgtgccgagggcggatcttgatcatggatgtgattgaggtggtgcccgagcctggccagcccttgaccaagaacaagttcaaagtcctttacgagaaggagcagaaggggcccgtgaccgccctgtgccactgcaatggccacctggtgtcggccatcggccagaagattttcctgtggagcctgcgggccagcgagctgacgggcatggccttcatcgacacgcagctctacatacaccagatgatcagcgtcaagaacttcatcctggcagccgacgtcatgaagagcatttcgctgctgcgctaccaggaggaaagcaagacgctgagcctggtgtcgcgggatgccaagcccctggaggtgtacagcgtggacttcatggtggacaatgcccagctgggttttctggtgtctgaccgcgaccgcaacctcatgaagtacatgccgggtgaagccggatcgccgaaggagagtgagaacgtcgtcgtcttggaagacacggcgtatcaggagcagaccgaccgggaactcgtctatgtcggtctgggtgcgggcgccctgggcctggtcggtgcagccctgttcttcctaccccggcgccgccggcatgaggcggtcgcggcctgagattgatccgg

SEQ ID NO: 288261 - DNA, 2118 bp, Homo sapiens
aggcggccgccagcgtcctcaccaccagcatggtcaccatggagcccgggtacctgttcctgggttctcgcctgggcaattccctcctcctcaagtacacggagaagctgcaggagcccccggccagtgctgtccgtgaggctgccgacaaggaagagcctccctcaaagaagaagcgagtggatgcgacggccggctggtcagctgcgggtaagtcggtgccgcaggatgaggtggacgagattgaagtgtacggcagcgaggcccagtcgggaacacagctggccacctactcctttgaggtgtgtgacagcatcctgaacattggaccctgtgccaatgccgccgtgggcgagcctgccttcctctctgaagagtttcagaacagccccgagccggacctggagattgtggtttgctccggccacgggaagaacggggctttgtcggtgctgcagaagagcatccggccccaggtggtgacaacctttgagcttcccggctgctatgacatgtggacagtcatcgccccggtgcgtaaggaggaggaggacaatcccaagggggagggcacagagcaggaacccagcaccacccctgaagcagacgacgacggccgcagacacggattcctgattctgagccgggaagactccaccatgatcctgcagacggggcaggagatcatggagctggacaccagtggcttcgccactcagggccccacggtctttgctgggaacatcggggacaaccgctacattgtccaagtgtcaccactgggcatccgcctgctggaaggagtgaatcagctgcacttcatccccgtggacctgggcgcccccatcgtgcagtgcgccgtggccgacccctatgtggtcatcatgagtgccgagggccacgtcaccatgttcctgctgaagagtgactcctacggtggccgccaccaccgcctggcgctgcacaagcccccgctgcaccatcagtccaaggtgattacgctgtgcctgtaccgagacctcagcggcatgttcaccactgagagccgcctgggtggggcccgtgacgagctcgggggccgcagtggcccggaggccgagggcctgggctcagagactagccccacagtggatgacgaggaggagatgctgtatggggattcgggctccctcttcagccccagcaaggaggaggcccgaagaagcagccagccccctgctgaccgggaccctgcacccttccgggcagagcctacccactggtgcctgctggtgcgggagaatggcaccatggagatctaccagcttcccgactggcggctggtgttcctggtgaagaacttccctgtggggcagcgggtccttgtggacagctcctttggacagcccactacacagggcgaggcccgcagggaggaggccacgcgccagggggagctgcccctcgtcaaggaggtgctgctggtggcgctgggcagccgccagagcaggccctacctgctggtgcatgtggaccaagagctgcttatctacgaggccttcccccacgactctcagctcggccagggcaatctcaaagtccgctttaagaaggtccctcacaacatcaacttccgtgagaagaagccaaagccatccaagaagaaagcagaaggtggcggcgcagaggagggggctggggcccggggccgcgtggcgcgtttccgctacttcgaggatatttatggctactcaggggtcttcatctgcggcccctcccctcactggctcttggtgaccggccgaggggctctgcggctacaccccatggccatcgacggcccggtcgactctttcgctccattccacaatgtcaactgtccccgcggcttcctgtacttcaacagacaggcgagctgaggatcagtgtctgctgctaactgtctatgatgccaatggctgtcgggagatccggtgggtgaggcactattgctccagggaggtcaaggtttgtgtgggcacacacaacgcgtggccggccacacatatgggggagcgttgactcaaaatagggtatgccgggcgcttcaccaccgagggggcccagggaggtggttggcaacacttaagggcgacaggg

SEQ ID NO: 288262 - DNA, 545 bp, Homo sapiens
  misc_feature (88)..(88): n is a, c, g, or t
gctccttcgtgggcacgcgctcctacatggctccggagcggttgcagggcacacattactcggtgcggtcggacatctggagcatggncctgtccctggtggagctggccgtcggaaggtaccccttccccccgccgtctccaccctggacggcggcatcgggctgctgctgcccatgcaggagaagacctaccggcggctgctgatgctgcagaacgcgctgaccaccatgctgccacaccacgccggcctcaacccccgcgccttccggatgctgcacgtggaccgccgcaccctccagaatgccgtgcgcaacgtgctggatggggagctgctcaaccgctacctgtacctgagcaccatggagcgcagcgagctagccaagaagatcggcaccacaccagacataatcctggacgacttgctggagacggaccgcgtcaccgcccacttctagccccgtggatgccgtcaccaccagcacacggaactacctcccaccccctttttgtacaaaacacaaggaaaaacattttttgcttgaa

SEQ ID NO: 288263 - DNA, 865 bp, Homo sapiens
cctttcccagcgccggctgtttctcactggcaacgccacgcctttgtcagcgttatcggacgctctctggcggcaaccttctcacggccaaaaattatcttttgcaactgcacagacatttgctacgggcagctgatcgctgggtcccagcgccgctggtttcacaatttcgcgggtgccccccaccatccccagcccgcagcataatcggtgaagggagcctgcggtttctccgccgcgccttcgcccgttgcgtcctgcgaagccagtggaatcggtggtcacaaggttggtttcaccaagtcgggcgtttcttggcactggcaccgctctgcgcttttgctggcccaggccggtctcagcaccgttaggtgctctctaaaggcgactgtctgtcgtggttaggaaagctgctatgggacgacagttttttagaagtttctagtctagcccagctggcggtttctggatcgcagaaccactgattgcgcggagctggatgtacttctgtggccgcgcatgtttctctgtggtatccctacggctgtcgtcgaaatcgcggtgtttctctggccccaccgccacgtgggcaacttcttcagtggctgcggggttctctccactgagttgctggttttgatccacgctttctcccagagagcagacgagacacttttctgtttgtgtcaactgctagtcgtgctgtgcacagtttcctcgtctcggtgcggggctttctccatccgaggccctctagtgccggcttcgcggtcgcagcacccggcgtttccgttggctctttcgccagcggcgcgaagccggcggttttgctgtcacagcacttgctgcacggagtttctcggta

SEQ ID NO: 288264 - DNA, 530 bp, Homo sapiens
cctttcccagcgccggctgtttctcactggcaacgccacgcctttgtcagcgttatcggacgctctctggcggcaaccttctcacggccaaaaattatcttttgcaactgcacagacatttgctacgggcagctgatcgctgggtcccagcgccgctggtttcacaatttcgcgggtgccccccaccatccccagcccgcagcataatcggtgaagggagcctgcggtttctccgccgcgccttcgcccgttgcgtcctgcgaagccagtggaatcggtggtcacaaggaaattatgacaggagcaacctgcaggggtttagatctgacagaaatattctaatggtaggcattgcatcgcttagccatatttgtaatttcttctttgtagggttggttctctgtaacttttgcttaccttaaaattatttttgtgtcttgctctgaggacaatgttaccgatgtgtttttcatttttacttgcatttcagactttcattattttaaattatgtattttttttttcttcta

SEQ ID NO: 288265 - DNA, 1349 bp, Homo sapiens
acaggagctgctgccgggcagaagaaaagcagggcaggctggctcccaggcctcagggtggggatggcagtgggaatgaagcacctgtaactgggcccttcctgccctaatgttcagggggccctacccctcgtgagcttgtcttattaagaaccctcaaaaggcctaagttaaccagcaggtccaaaggtcccaaggaacaaggtcagagacgccagggaaaagaggtgagctgtgcaggactagcactgggaaaactggcaatttgtgttgtcaagtgtgtgcctgtgcaagtgctccaactgctgctttgggtgaacttcaggccttgcctcttccctatcaccatcgtctccatcaacaccctctttcttttccagcctctcctggtgccttaggaatcagacgccaataaaccacagagcccagcatgtccaccttcgcttttattgagtagttagtgttctcaagctggctcacacccatgcggtcagctggggcctagggtggctctttgcaaagctgaggggcaagctaaggaagccaggcaggtcaggggccctttcggccttctcaagcctccacctgagttctcgtcaatgccagtctccctggtatgattggggacattatcagagaaacatctaatagcgcacatctgggcacccacactctgcttcagttgcatccatcctcccaccccaaattcaactcctgacccaatacaaaagacttttttaaccaggatttcttcttgcaggaaagctgacttggaaacacggggaggtggcagggaggggcaaaaaggactctggcaagcagatccacttgtctgggtccctgcagtgaagaacccaagatccaggtacctcagcctggaagaaaccgtgcactgcaggtcttcccttctatcaaaactaaaagcaaggaacagaagtcaattgaaaccccaggtcatcctacccaccttctggcagtctctggataatgatctaaggaaataagcttacatttataattagaggataatttggagaatttatactatttacacggaccaccctgcaaagatcagggaaggctggatttcttcctccttgatagtctgaactggaagcaaaggagaaaacccttctccaaacaggagtttctcctctttccctggtcctgcagaagaaagaggagctatcccctcctcagctagcagcacctgaaagggaaacagagataaggtgaaccaacggtcaccagacaggacgcacaaaaatatcacatacgggttctgatcctctttgtgtcgttttgaagtcttaaaatctattaaatatgagaatacgatgtatgttgaa

SEQ ID NO: 288266 - DNA, 393 bp, Homo sapiens
tgggacgaatcctcccaggagtgagatgattcctctttgaaagatggggccggggagggccactcttccaagggagggctctccactttgatgggtctcgctaagtgtggcatttcctccccaggctggatttcttcctccttgatagtctgaactggaagcaaaggagaaaacccttctccaaacaggagtttctcctctttccctggtcctgcagaagaaagaggagctatcccctcctcagctagcagcacctgaaagggaaacagagataaggtgaaccaacggtcaccagacaggacgcacaaaaatatcacatacgggttctgatcctctttgtgtcgttttgaagtcttaaaatctattaaatatgagaatacgatgtatgttgaa

SEQ ID NO: 288267 - DNA, 1196 bp, Homo sapiens
acaggagctgctgccgggcagaagaaaagcagggcaggctggctcccaggcctcagggtggggatggcagtgggaatgaagcacctgtaactgggcccttcctgccctaatgttcagggggccctacccctcgtgagcttgtcttattaagaaccctcaaaaggcctaagttaaccagcaggtccaaaggtcccaaggaacaaggtcagagacgccagggaaaagagcctctcctggtgccttaggaatcagacgccaataaaccacagagcccagcatgtccaccttcgcttttattgagtagttagtgttctcaagctggctcacacccatgcggtcagctggggcctagggtggctctttgcaaagctgaggggcaagctaaggaagccaggcaggtcaggggccctttcggccttctcaagcctccacctgagttctcgtcaatgccagtctccctggtatgattggggacattatcagagaaacatctaatagcgcacatctgggcacccacactctgcttcagttgcatccatcctcccaccccaaattcaactcctgacccaatacaaaagacttttttaaccaggatttcttcttgcaggaaagctgacttggaaacacggggaggtggcagggaggggcaaaaaggactctggcaagcagatccacttgtctgggtccctgcagtgaagaacccaagatccaggtacctcagcctggaagaaaccgtgcactgcaggtcttcccttctatcaaaactaaaagcaaggaacagaagtcaattgaaaccccaggtcatcctacccaccttctggcagtctctggataatgatctaaggaaataagcttacatttataattagaggataatttggagaatttatactatttacacggaccaccctgcaaagatcagggaaggctggatttcttcctccttgatagtctgaactggaagcaaaggagaaaacccttctccaaacaggagtttctcctctttccctggtcctgcagaagaaagaggagctatcccctcctcagctagcagcacctgaaagggaaacagagataaggtgaaccaacggtcaccagacaggacgcacaaaaatatcacatacgggttctgatcctctttgtgtcgttttgaagtcttaaaatctattaaatatgagaatacgatgtatgttgaa

SEQ ID NO: 288268 - DNA, 814 bp, Homo sapiens
cacaacctttgaagaaggcagggcaacaggggtgaggaagctggctgggtttgggaggtaaccacagctgctgggacgaggactcctctggccaaccggaacaagctggaatcttcggtgtcagaggaaccctggccacggtgcaaggacaggctggcctgaaggaggcacccaggcatcgggagcagctggacggtcaacagggtgaagggagttgagaagggcaccggggacgggagaggcagtggccccagggtctctgctaggttgcaagtgaatcaaaagcaaccacacaggaaaagtgtcaggcacagggcagaggctcaagcaccctccagtgaggcccatggtgtagagaaacaaacagacaccaggatggacacgggcacccatccctccaggcgctgtggacctgggacagccacggaattgcttgcagtcagatggcgcaggacggtggatggcatctgaggactctctctgctccagacatcattccaggaaagtgacgggactggcctgtgcctctccccagggtttctggctccctgtctccagagtcctacttgaagtgcttttttaaggccagctgcctccaatccgttgctgtccaccaaggtctgggcccagatgacgctgccagccccttgccctctctttctaccacaaactcctgctgctacccaatctccccccttaatcctcccaacagcatcctgcctatgtcactctggcccctctgtctgctgaccacccaccttctctccatcagttggccaccacctcagaagccacctgctcttgcaggcttctt

SEQ ID NO: 288269 - DNA, 777 bp, Homo sapiens
agcggagtgaagcccatgagccactagaagccacatgttctgccatgtggagaagaatgagagagtacatcctcaaattgaggtgtggcatgatgatttggctgcccagaggagaacctgtctttcccatctaaagtgggaggtcaagccaagtagagggaaacagcaactggagagcagatttgcaaaccagaaaagcaactcatgaatacaaattgcctggaaagcatttattacaacagaagctctgcaagatataccggaaattgacagtggcatcgaattcccagcaaggaagttttctaaggacaccaacagacaccagcagaagacagccttgcatttacaacaaaccattgatccacaacaaaccattgatccacactttcaaaatcattgaggtgaagcatagagaactggagtggagacggctctggcaaatccaaacaatatcaaaagcactctcatactgaaaacccacagtgctgaaccacagctgagatgtaaaatatttcacaaaatcttcttcaccctctatagtatttcacctgagagtgcatgatttaagttgcaagcactgtcatagatgatgggattcagagatgaacacatggaaatggactttatgttctctaatgtcacaaagaaagagtgattatgaagaagacccagattcccacctattaatctgagctttgaattctttactttgctgggtccaccggattttttctccactcagcccatcgatgagagtggaggcggcctgcatctttt

SEQ ID NO: 288270 - DNA, 454 bp, Homo sapiens
agcggagtgaagcccatgagccactagaagccacatgttctgccatgtggagaagaatggggacttgggaatctgtggctctgagtgcaacaacacctttagaacaatgtgtaaaccttcttcttactgtcggcccctctgcaacctggagacagagcaggtctcactggagcaacagtattgctaatgtaggagtcactggtgcgagaagcagccactagagagagccacctgcaggcctggcacagagacaaactcaccccttttcttcttggttgtttccaaagaaatgttttcatgtaatcctgagctttagagacaccaggagaagaaatctaagctacctttgtgtttcctaaactaacccagaacaatgacagcccttcctattcccccaaaatatcctggctctgccgcttgttagctgcataaacttgaacaaaaaaacatgaat

SEQ ID NO: 288271 - DNA, 383 bp, Homo sapiens
ctttcaagggcctgtgcctgtggtaactgtctatgagccaggtatatctgaagcatatttgacaacagaaaaagttaatgtaattttcaaaggaaaaacgccaacttttttcaaaaaggctggatccagctcttcatgaatgtcctcaatgagaaggggtcggcccaaggaaaggctgtcctccaagtgtgtgcgaaaatatttatggttcagagatgtcacctaaacagaaagaactcattggtctatctgtgttacaaagaatgtgcccattgctaagggaaaccgagagatttgttggacaggtaatcaagaattttaagggcaatagaagaagacttacttaaaaaaattaaagtaacatacaaaaattaatttctaaa

SEQ ID NO: 288272 - DNA, 736 bp, Homo sapiens
ctttcaagggcctgtgcctgtggtaactgtctatgagccaggtatatctgaagcatatttgacaacagaaaaagttaatgtaattttcaaaggaaaaacgccaacttttttcaaaaaggaaacagcaactggagagcagatttgcaaaccagaaaagcaactcatgaatacaaattgcctggaaagcatttattacaacagaagctctgcaagatataccggaaattgacagtggcatcgaattcccagcaaggaagttttctaaggacaccaacagacaccagcagaagacagccttgcatttacaacaaaccattgatccacaacaaaccattgatccacactttcaaaatcattgaggtgaagcatagagaactggagtggagacggctctggcaaatccaaacaatatcaaaagcactctcatactgaaaacccacagtgctgaaccacagctgagatgtaaaatatttcacaaaatcttcttcaccctctatagtatttcacctgagagtgcatgatttaagttgcaagcactgtcatagatgatgggattcagagatgaacacatggaaatggactttatgttctctaatgtcacaaagaaagagtgattatgaagaagacccagattcccacctattaatctgagctttgaattctttactttgctgggtccaccggattttttctccactcagcccatcgatgagagtggaggcggcctgcatctttt

SEQ ID NO: 288273 - DNA, 393 bp, Homo sapiens
tcatggttcctgcaggcagattaaccctgtcccttttcttgctactgacatcagctcccctcgttttggtggtaggcgaagcagcagagttgggcgcacttgacgttttagaaccccagacctccctcgtaagaatgccacatggttaccatcggagacctgagtcctggcagctgtatttccccctgggtcacctggaaaagcattttgttgactaccttcatgatttggtgttttgaaaacgtgttttgtggtttgcactgcatctccagggcagagagctaattgcattatgttgtgcttctctctcttctgcctcatctgttcccctccttcctccttcctcttaccactgctcccctttctttaccttccgtgcccacccctcacccc

SEQ ID NO: 288274 - DNA, 830 bp, Homo sapiens
gaggagtgcatggtttccggcatttggctgggcctttgtctctcgctcccaccagagcttggaatccgtctctgctcttctgcattctccacctcgggagcccctggggactctgtgacggcctctgttgccctgtgatctgcaggtccggagagacgcacagctaagatgtcaggacatcctggaagctgggaaaggatctcttcccagggtgaaaggggactgagggcttggaagaaagaagttctgaaaacagactccctgccctcaacctgctaccaccaatgatttccgcctactaatgaacatacccactaggaatgggtgtggccagaatcttcacaaaacaagaagacttgatctgaggaattactctatagtggctttacctctaaaatttctcaccaaagaattacacaagtgcctagaggactcctggattatccctaccacaaaccctgaacctgaagcagcaacctggtctctctatcaccctgggcttgtggactaccaatcataatctcatccacctgcatggacacaggaatatgtcagaacataaccctgcctgaatcagtatctgtagcataaaccagtctttccagctaccatgcactgtcccccactcacgggtccttgatagcacctttccctcttctgtcttttgcttttctacaaaccctttctgatgtgcacagtgtgcctcaggtgcctgaatccagcacctactgggagtcagatgtcatgagttcaagattatagccctagacctggctgtcataagaacagacaaaaattagaaatacagtcttcatccttgaaaataaaag

SEQ ID NO: 288275 - DNA, 1090 bp, Homo sapiens
gaaccaggtgttttgtctatcttttctgggctttgcctacagtgagccttgtgacacccaggtgatcatactcttcttcctatgccctgctttcaggagaggattataacatctctggttgagaactctgtgatgtgactctccttgctggtgcatgctgtcagggaagattgtgacataaccctggctcagcacacagttgatgtgactcttgtgcttgttctctacccacaggtggaattgtgacatataacttggccaagcacacagatgtaatggtgtggtgactctcatacctagaactgggacctgtgcaggattgttaattcattactggacattcctgtgggtgtgattgttacatatgcctatgttcagcacccgagtgatttgattttgctgcctggtctcagtccaaatgtaagattgtgatttatcgctgaatccagcacctcggtgatttgactctccctttttttgtgggagggatcctgcaaattttgggtattgtcaattattgctgaatcctgtacccatgttatgactctcccaaatgtgccttacctgttgtggcacaatatatcacattagacattgttaaatattgttgggttcaacacctgggtgatggatgtaactttttttctgggcctgcctacaggggaccttgtgacataactcaatgcccatcatcatggtaatgttactctcttctcctgcctgatctctgctcacagagaaattgtgacacatcactggcctagcatctaggtgatgtgactctcctctttttttcaggctctgcatatttgggtattgtgacatattgctgaactcaacacctaagggatgggagtctcctacctaggcccttcctacaggggacattgtgacatgtctctgcattcctcatccaggagatgtgactctccttttctgcctacaccctgcctacacagaaagttgtggcatattgctgtggtcagcaaccagatgatatatttctcctgcctgggtctttattacaggaaagatgattgacatattactgggcccagcatccagatgatgtgactctcttcttctgttg

SEQ ID NO: 288276 - DNA, 684 bp, Homo sapiens
ttaagttggtgactttcagaccaagattgaacacactgttagtctgtgattccactaaggtgaaacagccagtaagagggattgtgtctctcattcaatgattcaattcattctaaaaatgtgacttgtgtacttggatttaacatacaggaggtgttgactctcataccaagaattggggtatatacaggattgttagtctcatccttggtctttccttcaggtgcagttttgacacacttctgtctagcagctgagtattgtgatcttcagaactggcccagcctacaaataggattgtgccacactgctggacccagcacctagatgatgtaactattctcctgccttggtgctactcaaaaaagacattaacatatctcagagccttgcacccaggtaatgtgagtctcctctcctgccttgctgctgcacacagaagcgggttatgtacaggattgttaatctcatttggaccttcctgcacctatgattgtgacacatgcctctgtgtagaacccaagtgagttttctctcctgtttggatttaacccacagatggaatcgtgacatatcgctgcaccagaaactaggtgatgtgactccatttccttgcctctgtgctttccacattaggcattgggacatatcactgggccttgcatccaggtgatgggagttttc

SEQ ID NO: 288277 - DNA, 807 bp, Homo sapiens
gaggagtgcatggtttccggcatttggctgggcctttgtctctcgctcccaccagagcttggaatccgtctctgctcttctgcattctccacctcgggagcccctggggactctgtgacggcctctgttgccctgtgatctgcaggtccggagagacgcacagctaagatgtcaggacatcctggaagctgggaaaggtagagacgcggtttcaccgtggtcttgatctcctgatcttgtgatccacccgcctcggcctcccaaagtgctgggattacaagtgtgagccaccgcgcctggctgcaactataatgttttgctaagttctatctcttcccagggtgaaaggggactgagggcttggaagaaagaagttctgaaaacagactccctgccctcaacctgctaccaccaatgatttccgcctactaatgaacatacccactaggaatgggtgtggccagaatcttcacaaaacaagaagacttgatctgaggaattactctatagtggctttacctctaaaatttctcaccaaagaattacacaagtgcctagaggactcctggattatccctaccacaaaccctgaacctgaagcagcaacctggtctctctatcaccctgggcttgtggactaccaatcataatctcatccacctgcatggacacaggaatatgtcagaacataaccctgcctgaatcagtatctgtagcataaaccagtctttccagctaccatgcactgtcccccactcacgggtctgatgaccttccttttgcttggttttaaacctttgttgcggg

SEQ ID NO: 288278 - DNA, 789 bp, Homo sapiens
taggtgatgtgattctcctgttttccctgggcctcaaatattttggatattgtaaaatattgctaggcccactacctatgggattgcatgctcctgcctgggctctgcccacagggaccttgtgacatatatctgcgtccatgacctaaaaggtgacacttcttgcctgcactgtgccctgaacaggaaatattgtgacatatccctggaaccagacaccaggtgatatggctcttctgcccctgtcttgcccccagggagcattgtgacatagtgcttagctcagcacccaggtgatgtgactctgttgcctgtgctgtgctttcaggagagaattgtaacatatccctggctgagcacccaggtgatatgacactcctgcttgtttccttccctcggggaagattgtgagataccttggctgaaatcccagcacctgagtgatctgactgtcttgcctaagaccagcccacagatggaatagtgacacacagctgaacccagaactgaggggatgtgattctatttttctgcattggtgctgctcacaggggacattgtgacatatcgctggaccttacacttaaatgatttgagtctcctcccctgccttggcactgcctacggaaggcattgggacatgtctgtgagccctatgcccaggttatgtgactctcctgcctgttccccgaccacataagcaattgtgacatattgctgggtttgacaccctggtaatgtaactctactgccaaaaaggagcattatgacatatatttccattcatta

SEQ ID NO: 288279 - DNA, 730 bp, Homo sapiens
gaggagtgcatggtttccggcatttggctgggcctttgtctctcgctcccaccagagcttggaatccgtctctgctcttctgcattctccacctcgggagcccctggggactctgtgacggcctctgttgccctgtgatctgcaggtccggagagacgcacagctaagatgtcaggacatcctggaagctgggaaagggtcttgccatctctaagctggacctggtgacctttttggagggaaagaaagagccctggactgtgaagagtgaggagaccatagctgcacagccagtccagatgtataatctcatccctgaacatttctgatggtgtgattatgacatgtgactttatctggcaacagagtgagttgttgctcccgcctgagcccagcccccagaaaggattgtgacatatcgttggacccagaattgaggctctgcatatttgggtattgtgacatattgctgaactcaacacctaagggatgggagtctcctacctaggcccttcctacaggggacattgtgacatgtctctgcattcctcatccaggagatgtgactctccttttctgcctacaccctgcctacacagaaagttgtggcatattgctgtggtcagcaaccagatgatatatttctcctgcctgggtctttattacaggaaagatgattgacatattactgggcccagcatccagatgatgtgactctcttcttctgttg

SEQ ID NO: 288280 - DNA, 899 bp, Homo sapiens
gaggagtgcatggtttccggcatttggctgggcctttgtctctcgctcccaccagagcttggaatccgtctctgctcttctgcattctccacctcgggagcccctggggactctgtgacggcctctgttgccctgtgatctgcaggtccggagagacgcacagctaagatgtcaggacatcctggaagctgggaaagggtcttgccatctctaagctggacctggtgacctttttggagggaaagaaagagccctggactgtgaagagtgaggagaccatagctgcacagccagtccagatgtataatctcatccctgaacatttctgatggtgtgattatgacatgtgactttatctggcaacagagtgagttgttgctcccgcctgagcccagcccccagaaaggattgtgacatatcgttggacccagaattgaggtgcagttttgacacacttctgtctagcagctgagtattgtgatcttcagaactggcccagcctacaaataggattgtgccacactgctggacccagcacctagatgatgtaactattctcctgccttggtgctactcaaaaaagacattaacatatctcagagccttgcacccaggtaatgtgagtctcctctcctgccttgctgctgcacacagaagcgggttatgtacaggattgttaatctcatttggaccttcctgcacctatgattgtgacacatgcctctgtgtagaacccaagtgagttttctctcctgtttggatttaacccacagatggaatcgtgacatatcgctgcaccagaaactaggtgatgtgactccatttccttgcctctgtgctttccacattaggcattgggacatatcactgggccttgcatccaggtgatgggagttttc

SEQ ID NO: 288281 - DNA, 546 bp, Homo sapiens
gaggagtgcatggtttccggcatttggctgggcctttgtctctcgctcccaccagagcttggaatccgtctctgctcttctgcattctccacctcgggagcccctggggactctgtgacggcctctgttgccctgtgatctgcaggtccggagagacgcacagctaagatgtcaggacatcctggaagctgggaaagggtcttgccatctctaagctggacctggtgacctttttggagggaaagaaagagccctggactgtgaagagtgaggagaccatagctgcacagccagagatggggttccatcatgttttccaggctgatctcaaactcccacggtcaagcgatctgctggcctcggcctctcaagtccagatgtataatctcatccctgaacatttctgatggtgtgattatgacatgtgactttatctggcaacagagtgagttgttgctcccgcctgagcccagcccccagaaaggattgtgacatatcgttggacccagaattgagcgccggctcatggagatgggattttccaga

SEQ ID NO: 288282 - DNA, 387 bp, Homo sapiens
actttttattaaaaaacaggtcttgccatctctaagctggacctggtgacctttttggagggaaagaaagagccctggactgtgaagagtgaggagaccatagctgcacagccagagatggggttccatcatgttttccaggctgatctcaaactcccacggtcaagcgatctgctggcctcggcctctcaagtccagatgtataatctcatccctgaacatttctgatggtgtgattatgacatgtgactttatctggcaacagagtgagttgttgctcccgcctgagcccagcccccagaaaggattgtgacatatcgttggacccagaattgagggggcattgtgtcatatcgctgggccccacacataggttatgtgactctt

SEQ ID NO: 288283 - DNA, 306 bp, Homo sapiens
  misc_feature (50)..(50): n is a, c, g, or t
  misc_feature (64)..(64): n is a, c, g, or t
ggattttctgacagcttaaaaaaatattggacagttccttatgctgaatnattcacaaggcccnattaaccactacccccagatctatttttagccagcctcgacctccctgggctcaggtgattcttctgtttcagacaccctgcttccttagtaactgggactaaaggtatacggcaccacactggcacattattttgcatatcttgctttttatttttgtagagatggttggccaggctggtcttgaactcctgacctcaggtgatctgcccaccttggcctcccaaaatgctgggattatag

SEQ ID NO: 288284 - DNA, 1046 bp, Homo sapiens
atggttctcgccagtgcagtaccgcttaggtccaccagaaaagctcaatgatggctcactgtgccctccaccttcctgggctcatccaggtgatcctcccattttggcctcccaaatagctggggatctggggatagttctgtgttttgtttgtttgtttttttctatccccactttgagtttgtttccacagtacattgagttttgttggtttttgttttttgggttttttttccctctctctctcatgctccttcctgtacactgcagttgctgttgttttagatttctttcacctaggcttaagtgcagttacttgatcacagctaactacagcctcgacctccctgggctcaggtgattcttctgtttcagacaccctgcttccttagtaactgggactaaaggtatacggcaccacactggcacattattttgcatatcttgctttttatttttgtagagatgagatggggttccatcatgttttccaggctgatctcaaactcccacggtcaagcgatctgctggcctcggcctctcaagtccagatgtataatctcatccctgaacatttctgatggtgtgattatgacatgtgactttatctggcaacagagtgagttgttgctcccgcctgagcccagcccccagaaaggattgtgacatatcgttggacccagaattgagcacctgagtgatctgactgtcttgcctaagaccagcccacagatggaatagtgacacacagctgaacccagaactgaggggatgtgattctatttttctgcattggtgctgctcacaggggacattgtgacatatcgctggaccttacacttaaatgatttgagtctcctcccctgccttggcactgcctacggaaggcattgggacatgtctgtgagccctatgcccaggttatgtgactctcctgcctgttccccgaccacataagcaattgtgacatattgctgggtttgacaccctggtaatgtaactctactgccaaaaaggagcattatgacatatatttccattcatta

SEQ ID NO: 288285 - DNA, 1206 bp, Homo sapiens
gggaaatgttaaacaggaacgattttctaaaaacaaggtgatactctacactttgcacatggcactttgaatgtaaaatgtttttctagaagtgaagaacgggtatttgctggggagagaaatccagatgatgttttcccagtttgtgggaatctcatgagaaggtgtgtgtgctgccgtttaggtgttctcttttttttttttttcctgttcggcttcttcaccaagccactgggtagcatttttgcttcgatgccttgttcctcttttatgccttctaggccagtgcttctcatcttgaaaggggatgtgatggcttccaggcacatgggaccaactccttgctccggtctgaaaagacacacgtcgccttcccttcccggaagctcgcaggcctctgtgcctcctgggctggttctcaagcccaggacagtgccaagaggatgagccccaggccttctgcacagcaagacccctggactcccccaccatggagccctggggcgggctggtctgcagagcagcggcctgggacctgcactttaagaagcgctgtctgatttgagtggtgcttaacaaagcagtatgaggaaggagcaatgacaggggaggactcatggtcaagccacacagcaggggcaggaagcccgcggcccttgctgtgagaagagctcagatcattttcacgtgctgctgtgacaggcagaggaggcttaagaataataggagttttggaagacagatttgatggcatacccaatataagaaatggattatgagtaggtgtaaaattgtcatctttactctctgtgtgctttcagtttactcaaggtcttaggcaatgtcttaactacaattccagtttttctctctctgagaatggattgctttggctggggattactcacggtgaacttgctttgcggggagagttgccgactgtcttaattacattttgaaaaacacaacaacttggggttaaactggagaagttaatgatgaatgcagtctggggttcttccccggctgccttcccctgcagccgccctggaggaggctggctggctcgctcgctcaggagtcctcagcgattcttctttattcagacaaagggacctaaactctgcagccaatgttgcaggacccaagtggtctgtctctgccaccacctcctgctcccgatggcaaataaacaggacaaaagga

SEQ ID NO: 288286 - DNA, 3124 bp, Homo sapiens
  misc_feature (1045)..(1045): n is a, c, g, or t
  misc_feature (2409)..(2409): n is a, c, g, or t
  misc_feature (2422)..(2423): n is a, c, g, or t
gggaaataaagtccaagaggtcagcaggcaccagaagccatagccttagttggggcatcaggagagcagcaagctgcatctaccttggaaagatggagagaagactgcagtgagcggagtggggaggaagggggaagtggcagggcagaggaagcagggtacagacaggagaaaagagatggtgccctgggccaggtggctgccaccgctaccatcgccagaagtggaaaactctttgccttctccttaccactgtcactatgacaccccaattctttctgctcccccttctttagtaataggtgctggcaagtaaggagcagtctgatttgagtttgcgaaggaaacccttggaggtagctgtgaacccatgaggcttgccaagtagggagctcaggatccccaagattggatgaggaaataagcttagtgagtgacagttccaccagccttccccagagtcacagtaggcgtccactgcccctgcgggtccccaggcctgctctactgggtggcctctcggacccagggctgcacttccaatgctctgcagacacatctcgggcttgaatcccatctcactgattccacaaatattgactgagggcctactggatgcgagacctgtgtggctgtgggggaggcaaggtccctgcttcagtgggagtgacaggtgtaaagcaggatgatttcagaacctgagaagggggacaaagcagagaactgggaagtggctgggcgggtgcggtgcagcctgggatggggtaaacagcaaatctttgccatctgttcctgtccggatatcatggaaaatgctacccgatctctcttgcacctcagtgtcctcagctggttggtagagtttgagcttccccactgcctgaccctgctctctgggctgtctctagggagtctgcccttctcaggcctgctccccaccctctatggctctcaattcctcccaagaagaatgttcctctaaaaggaggccgctggccacaaagggagatgaacaagccaaggtagcctggcctgcacttggggncacatggctccttaggcccggcctgggtggacactggaaggagctttgtctgtgggttttgccctgttgcctggagccccttccctatggtgtcttgactcagcccagctcgctgagcctggagcccaggcttctagagaagagatgtcaaggtctaccacagggcacaggccagaaacaacttgtccgatgccagtgaaagccaggcctggggaaggctcctcttctcacagggctggcactcccagaggggacacggcacggcagcaagttggaggcacagactctgaggggcccttggtggggagctcaaacaggacccacagggaccctctctctggggttgcaaactggcactgggtggagggagattcagtattgacacctgggggaccctcaaccccaaagtggatttaaaggacagtggcacactggggagacaagaggctccacaacactcccatgcttgccccagcctgcttcttgcttcccgttcctgctctttgttggggaaggagaatcttatatgactggttgaactccaggatagtccctgaccaccatcagtagtgggcagggtcaccatatgttcaaggctgtgcacaccgagccactggccatgcacatgggcggggccttctggaccttcatcaggccccttaggaacccatgaagaagctccctgataggtgctgatgggcatctgcacccatagattcactgcctgaaatggaaacactgggttcctgggaaactggaacctgccttatgaaagcccccattcccatcaccccctccatccctcggggctgctgctgtgtcttgccatcaaccctccccagacccccaggacacctgcctcacccagaagcaccccttcaacctgggcctcgatgaaggctcactcctccgtcaggcctctgaggggggatggctccgtgccacttttagcaaaaggggaaaccatcgcagcagaaaggccaatgccacactagacagccaggagcccagcagaacaagtggccccctaaggcactttggggaccacacccccgtcactctgaccccagcacaactggttcccaggccttcgggatcctcctgggaacctctcagcatgattaacacaggcagacgggacctgaaggggccgctggtccttctgaaaatgttcaccaggcagtgtgagtgtggagaggccatgcgcaatgtgtgggactctgccctgcacccactcagagcctcagcccttcagagccactaataatgatttgctgtgggtggggtcatcctgatacttccctgaggtctcttttcctttcaatttttctgagtaactgagaggatcatatgactgcatgccncctaaactagggnntgcacagccccctttctgtgcagggagggcgcaaagcagcagagtgtctgtgacccacctgccacttttccaatgctactacaagatttgcaggaaacggtcatttatcaggagccatctttattaaaaaagataaaatagagcagggcaggggaaaagcgctgcaggctccaacgttgctgggcacgtggcagcatgggcgtctcaccaggctcctccccacagctgttggcatccactgtcaggtttcaatgttcttggacctcagggccttcgtcctctccaatctaaatgcagggagacatttgatatggactctctcaggtgttttgcaaaacgcaacacattctcattgatctggtcaccctgctgtgcactagatgtcaaaagctcttcctccagtccagactttggtcctttaaccgacaaccccccattccctccctctgtcactctccagccccagttcaacatcgatctacttgctacttctatggggtcaactttttcagatcaacacttccaggacatcatgtggaattggtctctctgagatggtggagatgctgagtagcgggatttcctcattccacggtgcacacatctatcgaatcctcacattgtaccccataagtgtacaagcatgatttgccaattaaaataatactaataaagacataataaataccataaaatgcagg

SEQ ID NO: 288287 - DNA, 812 bp, Homo sapiens
ggtgagttcccaggttcatcgtgccctgtttccgttcgcaaaattaaggaaagatgttcagacaccgtcgcctggccgttcatacacaaaacaactcgcgctgtgtgctgccccacttcctgccacttcactaatggccgcccattacccatttgttgactgtcagctccaaacctccccgtccttccctcgctgtgtgaggacaaggctgaactccgtgtcatttgccagctggccagtacccttcagcccagatctctatgccaagcagtctgaaatccttctgagcaaccactacaccacctccgaggtcagggtctttggtgtcccagaggttctggagaacttggaggcattgtgaagaccctgtttctctagctgtgcagctgcaaggtcactagacagataaactcaagttgcaaaacacgttttcctagaaaaccccaggcctccattctgcttgctgcagccgctggaaccacagatgctccctggcagggccaccataccctccagcaccagctcctcacctcatgcctctcaggcagatttggatcatctgcctggccagccccagttcaacatcgatctacttgctacttctatggggtcaactttttcagatcaacacttccaggacatcatgtggaattggtctctctgagatggtggagatgctgagtagcgggatttcctcattccacggtgcacacatctatcgaatcctcacattgtaccccataagtgtacaagcatgatttgccaattaaaataatactaataaagacataataaataccataaaatgcagg

SEQ ID NO: 288288 - DNA, 633 bp, Homo sapiens
ggtgagttcccaggttcatcgtgccctgtttccgttcgcaaaattaaggaaagatgttcagacaccgtcgcctggccgttcatacacaaaacaactcgcgctgtgtgctgccccacttcctgccacttcactaatggccgcccattacccatttgttgactgtcagctccaaacctccccgtccttccctcgctgtgtgaggacaaggctgaactccgtgtcatttgccagctggccagtacccttcagcccagatctctatgccaagcagtctgaaatccttctgagcaaccactacaccacctccgaggtcagggtctttggtgtcccagaggttctggagaacttggaggcattgtgaagaccctgtttctctagctgtgcagctgcaaggtcactagacagataaactcaagttgcaaaacacgttttcctagaaaaccccaggcctccattctgcttgctgcagccgctggaaccacagatgctccctggcagggccaccataccctccagcaccagctcctcacctcatgcctctcaggcagatttggatcatctgcctggccaggtaggcctgcaagcctatggcccctgggaaagatataataaatgccgttggctttgatttgc

SEQ ID NO: 288289 - DNA, 399 bp, Homo sapiens
gccaccaacggtatttctatgatctacctactatggagctgaaaagtaaagatggaaataagcctatctacaaacaggatgctctctatcaagagtcatgagaattgtcttcagagggtgctgaagagacatcaacctgtcttctttgagactcctagtgttggtgtggaagatgctactggagacaacaggttcctccaggcctgattgcttggtcaattgtgttctcccaggaattcattcctttttgcttcatatgtctcctgaagactattgaaaatccacaaacgaaggacagcatcatgaaattgtatactaagaaatttcagttcacataatttctacctatctactttcaaaacatagataaagctgctgcttgccagatcaaagcataag

SEQ ID NO: 288290 - DNA, 542 bp, Homo sapiens
gccaccaacggtatttctatgatctacctactatggagctgaaaagtaaagatggaaataagcctatctacaaacaggatgctctctatcaagagtcatgagaattgtcttcagagggtgctgaagagacatcaacctgtcttctttgagactcctagtgttggtgtggaagatgctactggagacaacaggttcctccaggcctgattgcttggtcaattgtgaatcacctttgatgaaacatactccggcataagataagccagcgtgtggcacctggcatttcattaaacaattgcactgacttagaggatgcccaggaacccagaccactacatacaccaaatctcttttctgaaaatccatggagaaatttttccaggtaaagctgtgtttcatctggagcaatcattttgtttttactttatagatactataaatctgtcgtatgttaaactttttgcttgtgtttagcatataacacatgctcactaaatatctgctaatgaatgagtgaattaataaattttctccatgctctg

SEQ ID NO: 288291 - DNA, 1382 bp, Homo sapiens
gtttgccctctagggtagaatccgccaagctttgagagaaggctgtgactgctgtgctctgggcgccactcgctccagggagtgatgggaatcctgtcattcttacctgtccttgccactgagagtgactgggctgactgcaagtccccccagccttggggtcatatgcttctgtggacagctgtgctattcctggctcctgttgctgggacacctgcagctcccccaaaggctgtgctgaaactcgagccccagtggatcaacgtgctccaggaggactctgtgactctgacatgccgggggactcacagccctgagagcgactccattcagtggttccacaatgggaatctcattcccacccacacgcagcccagctacaggttcaaggccaacaacaatgacagcggggagtacacgtgccagactggccagaccagcctcagcgaccctgtgcatctgactgtgctttctgagtggctggtgctccagacccctcacctggagttccaggagggagaaaccatcgtgctgaggtgccacagctggaaggacaagcctctggtcaaggtcacattcttccagaatggaaaatccaagaaattttcccgttcggatcccaacttctccatcccacaagcaaaccacagtcacagtggtgattaccactgcacaggaaacataggctacacgctgtactcatccaagcctgtgaccatcactgtccaagctcccagctcttcaccgatggggatcattgtggctgtggtcactgggattgctgtagcggccattgttgctgctgtagtggccttgatctactgcaggaaaaagcggatttcagccaatcccactaatcctgatgaggctgacaaagttggggctgagaacacaatcacctattcacttctcatgcacccggatgctctggaagagcctgatgaccagaaccgtatttagtctccattgtcttgcattgggatttgagaagaaaatcagagagggaagatctggtatttcctggcctaaattccccttggggaggacagggagatgctgcagttccaaaagagaaggtttcttccagagtcatctacctgagtcctgaagctccctgtcctgaaagccacagacaatatggtcccaaatgaccgactgcaccttctgtgcttcagctcttcttgacatcaaggctcttccgttccacatccacacagccaatccaattaatcaaaccactgttattaacagataatagcaacttgggaaatgcttatgttacaggttacgtgagaacaatcatgtaaatctatatgatttcagaaatgttaaaatagactaacctctaccagcacattaaaagtgattgtttctgggtgata

SEQ ID NO: 288292 - DNA, 2673 bp, Homo sapiens
gtttgccctctagggtagaatccgccaagctttgagagaaggctgtgactgctgtgctctgggcgccactcgctccagggagtgatgggaatcctgtcattcttacctgtccttgccactgagagtgactgggctgactgcaagtccccccagccttggggtcatatgcttctgtggacagctgtgctattcctggctcctgttgctgggacacctgcagctcccccaaaggctgtgctgaaactcgagccccagtggatcaacgtgctccaggaggactctgtgactctgacatgccgggggactcacagccctgagagcgactccattcagtggttccacaatgggaatctcattcccacccacacgcagcccagctacaggttcaaggccaacaacaatgacagcggggagtacacgtgccagactggccagaccagcctcagcgaccctgtgcatctgactgtgctttctggtcagtggaggaaggccccagggtggacctgggagggccaggacggatgaaatctgctttcaggcagaggtttgcaggaaaggggggtggcctgcttactgggaagtatcgctgtgagttgcctcagcacatatcagtggttgtttttgcctcagttctgattgaacagaagaaggtttcaaggccaaaaacaggcagccaagtgtgagagaagcagaaggaaatccctactgcataaaacccatttccattttaatggcagaattgaaaagcacagaccacaactgaatcctagccctggaaatgactcactatacaacatgatgaattcatttaacccttgagtttccatttcttcacctgctccgtggggcactaacgcctccctcagaggcttctggtgagaatcagtgtttccctgcccccgccccgccctccatgccccttctccacgttctcactgtgctaggtgctcttctctgtctttctcttccaccagcctgtgggaaacctgagatgaaagtcgtgtcttacccatctttgtatttccagcatctgaaactgggcagagcttaataaatattttgctggagaggttgatgatcttacaaagctcccattgaaaggtggctctctgtaaagcaaagttacaatgagattgtgatgaacattgtccttgtggcttttcacttagtcccctcccttcacctgaagagcaaattttcctcaaaagtacacagcaaacgaatgacccactggtgacactgttgcctttagaccctgctggaaagaagctccacatttattaacattcccgaagtaaatttatcaggtagcattcatcaggtaacatttgttgcacattcatgacttttctactgtccacaaaggcatatgtccttatcatatgcggactcctcggtcacactggattcttccttccctcctcgacatggaagagatggcatcttagggtctcttgtgttcttcctgcagaggcctgtcgggcaggaaaaggctgcagctgccttcctgggagaaggaggagatgagtgtatcctgaacacctattatgtgctaggggctattgtagatacatgacactatcatgctcattttcacgaatgaggaaactgaggctcagaagacttaaattatttgcccaagagttataaatgacagagccagcattagagtccaggactgtctgatttcagacctaagctgttccctctgcacatcgtgtcccaccagtaaggaagatctgggtctcagagctgagccaagacctcccgggtcctctgcggttttttgtgtctttcagagtggctggtgctccagacccctcacctggagttccaggagggagaaaccatcgtgctgaggtgccacagctggaaggacaagcctctggtcaaggtcacattcttccagaatggaaaatccaagaaattttcccgttcggatcccaacttctccatcccacaagcaaaccacagtcacagtggtgattaccactgcacaggaaacataggctacacgctgtactcatccaagcctgtgaccatcactgtccaagctcccagctcttcaccgatggggatcattgtggctgtggtcactgggattgctgtagcggccattgttgctgctgtagtggccttgatctactgcaggaaaaagcggatttcaggtttgtagctcctcccggtcccttttgttatcagtttccacttggcccaggccctaaccccagacattgccagaatccctctctttgggctagatacacattcagatctaggcccgtattgtattatagtcattcattcgtttattagatcattcatttgacaagacttgaacaaactagcttatgtgtcagccaatgcgtgagacatggtgggtgatgccaagagaagtccagtccctgcccttggggagttctcagcattgtgaggaagacagggtcattataataagatgggataagagcaatgatagggacatgaaaagcctaggatagaagtacagaggaggctccatagcccaacaagggctgaggcagttggagaaggtcttggggagagcagtgtagtgtagtgatggagtgcacatagtggggccagactgccttggttcaaatctagttctacagcataccaactatatgacccaagtgagtcactccacctctc

SEQ ID NO: 288293 - DNA, 2327 bp, Homo sapiens
gtttgccctctagggtagaatccgccaagctttgagagaaggctgtgactgctgtgctctgggcgccactcgctccagggagtgatgggaatcctgtcattcttacctgtccttgccactgagagtgactgggctgactgcaagtccccccagccttggggtcatatgcttctgtggacagctgtgctattcctggctcctgttgctgggacacctgcagctcccccaaaggctgtgctgaaactcgagccccagtggatcaacgtgctccaggaggactctgtgactctgacatgccgggggactcacagccctgagagcgactccattcagtggttccacaatgggaatctcattcccacccacacgcagcccagctacaggttcaaggccaacaacaatgacagcggggagtacacgtgccagactggccagaccagcctcagcgaccctgtgcatctgactgtgctttctgagtggctggtgctccagacccctcacctggagttccaggagggagaaaccatcgtgctgaggtgccacagctggaaggacaagcctctggtcaaggtcacattcttccagaatggaaaatccaagaaattttcccgttcggatcccaacttctccatcccacaagcaaaccacagtcacagtggtgattaccactgcacaggaaacataggctacacgctgtactcatccaagcctgtgaccatcactgtccaagctcccagctcttcaccgatggggatcattgtggctgtggtcactgggattgctgtagcggccattgttgctgctgtagtggccttgatctactgcaggaaaaagcggatttcagccaatcccactaatcctgatgaggctgacaaagttggggctgagaacacaatcacctattcacttctcatgcacccggatgctctggaagagcctgatgaccagaaccgtatttagtctccattgtcttgcattgggatttgagaagaaaatcagagagggaagatctggtatttcctggcctaaattccccttggggaggacagggagatgctgcagttccaaaagagaaggtttcttccagagtcatctacctgagtcctgaagctccctgtcctgaaagccacagacaatatggtcccaaatgaccgactgcaccttctgtgcttcagctcttcttgacatcaaggctcttccgttccacatccacacagccaatccaattaatcaaaccactgttattaacagataatagcaacttgggaaatgcttatgttacaggttacgtgagaacaatcatgtaaatctatatgatttcagaaatgttaaaatagactaacctctaccagcacattaaaagtgattgtttctgggtgataaaattattgatgatttttattttctttatttttctataaagatcatatattacttttataataaaacattataaaaacaacattctgtttaccttttcaaggctgtattggttggagtgtagactgaactgcctggggtctgtttctcttcagtgatgagactcttaggaaggcaggaatggataggatagggggaggagaggagagatggggatttagaatgtagagtgagtgccccttttcttaaaactgaatacagtcacgcaccacataatgatgtttagttcaacaacagactgcatatatgatggtgatcccataaaattataataccatatttctattgtaccttttctattcctatgtttagatatatgagtacttaccattgtgttacaattgcctaaagtattcagtacagtagcatgctgtacaggtttgtagcctaggggcaataggctatacgctacagcctaggtgtgtagtaggccacaccatttaggtttgtataagtacctgctatgatgttcacacaacaaaattgcctgcatttctcaaaatgtatccccatatttcaacaatgcatgactgtactcttctgccaatgaccttgtattcttgtttccatgtcttcttctctttcctcctatggcaaataaaacactgttttgcaacacaaaaagagaaaaaaaaaaaaacaaaaaaaaaatttgttgggaggctttgggccttcgaaaaagttttttataaaccattctggtttggggcggggggcccgtatgggttaagtgtgaaccggtgcccacgaggtgtgttacccctgagaaaactcggggccaggaaccaatgcgcgggagactccgtccccactcaaaaacccccgcgggtcacacccggacggtttgcgacaaatcccgatggccttcccgaggcccaacggggatc

SEQ ID NO: 288294 - DNA, 2384 bp, Homo sapiens
gtttgccctctagggtagaatccgccaagctttgagagaaggctgtgactgctgtgctctgggcgccactcgctccagggagtgatgggaatcctgtcattcttacctgtccttgccactgagagtgactgggctgactgcaagtccccccagccttggggtcatatgcttctgtggacagctgtgctattcctggctcctgttgctgggacacctgcagctcccccaaaggctgtgctgaaactcgagccccagtggatcaacgtgctccaggaggactctgtgactctgacatgccgggggactcacagccctgagagcgactccattcagtggttccacaatgggaatctcattcccacccacacgcagcccagctacaggttcaaggccaacaacaatgacagcggggagtacacgtgccagactggccagaccagcctcagcgaccctgtgcatctgactgtgctttctgagtggctggtgctccagacccctcacctggagttccaggagggagaaaccatcgtgctgaggtgccacagctggaaggacaagcctctggtcaaggtcacattcttccagaatggaaaatccaagaaattttcccgttcggatcccaacttctccatcccacaagcaaaccacagtcacagtggtgattaccactgcacaggaaacataggctacacgctgtactcatccaagcctgtgaccatcactgtccaagctcccagctcttcaccgatggggatcattgtggctgtggtcactgggattgctgtagcggccattgttgctgctgtagtggccttgatctactgcaggaaaaagcggatttcagctctcccaggataccctgagtgcagggaaatgggagagaccctccctgagaaaccagccaatcccactaatcctgatgaggctgacaaagttggggctgagaacacaatcacctattcacttctcatgcacccggatgctctggaagagcctgatgaccagaaccgtatttagtctccattgtcttgcattgggatttgagaagaaaatcagagagggaagatctggtatttcctggcctaaattccccttggggaggacagggagatgctgcagttccaaaagagaaggtttcttccagagtcatctacctgagtcctgaagctccctgtcctgaaagccacagacaatatggtcccaaatgaccgactgcaccttctgtgcttcagctcttcttgacatcaaggctcttccgttccacatccacacagccaatccaattaatcaaaccactgttattaacagataatagcaacttgggaaatgcttatgttacaggttacgtgagaacaatcatgtaaatctatatgatttcagaaatgttaaaatagactaacctctaccagcacattaaaagtgattgtttctgggtgataaaattattgatgatttttattttctttatttttctataaagatcatatattacttttataataaaacattataaaaacaacattctgtttaccttttcaaggctgtattggttggagtgtagactgaactgcctggggtctgtttctcttcagtgatgagactcttaggaaggcaggaatggataggatagggggaggagaggagagatggggatttagaatgtagagtgagtgccccttttcttaaaactgaatacagtcacgcaccacataatgatgtttagttcaacaacagactgcatatatgatggtgatcccataaaattataataccatatttctattgtaccttttctattcctatgtttagatatatgagtacttaccattgtgttacaattgcctaaagtattcagtacagtagcatgctgtacaggtttgtagcctaggggcaataggctatacgctacagcctaggtgtgtagtaggccacaccatttaggtttgtataagtacctgctatgatgttcacacaacaaaattgcctgcatttctcaaaatgtatccccatatttcaacaatgcatgactgtactcttctgccaatgaccttgtattcttgtttccatgtcttcttctctttcctcctatggcaaataaaacactgttttgcaacacaaaaagagaaaaaaaaaaaaacaaaaaaaaaatttgttgggaggctttgggccttcgaaaaagttttttataaaccattctggtttggggcggggggcccgtatgggttaagtgtgaaccggtgcccacgaggtgtgttacccctgagaaaactcggggccaggaaccaatgcgcgggagactccgtccccactcaaaaacccccgcgggtcacacccggacggtttgcgacaaatcccgatggccttcccgaggcccaacggggatc

SEQ ID NO: 288295 - DNA, 2283 bp, Homo sapiens
gtttgccctctagggtagaatccgccaagctttgagagaaggctgtgactgctgtgctctgggcgccactcgctccagggagtgatgggaatcctgtcattcttacctgtccttgccactgagagtgactgggctgactgcaagtccccccagccttggggtcatatgcttctgtggacagctgtgctattcctggctcctgttgctgggacacctgcagctcccccaaaggctgtgctgaaactcgagccccagtggatcaacgtgctccaggaggactctgtgactctgacatgccgggggactcacagccctgagagcgactccattcagtggttccacaatgggaatctcattcccacccacacgcagcccagctacaggttcaaggccaacaacaatgacagcggggagtacacgtgccagactggccagaccagcctcagcgaccctgtgcatctgactgtgctttctgagtggctggtgctccagacccctcacctggagttccaggagggagaaaccatcgtgctgaggtgccacagctggaaggacaagcctctggtcaaggtcacattcttccagaatggaaaatccaagaaattttcccgttcggatcccaacttctccatcccacaagcaaaccacagtcacagtggtgattaccactgcacaggaaacataggctacacgctgtactcatccaagcctgtgaccatcactgtccaagctcccagctcttcaccgatggggatcattgtggctgtggtcactgggattgctgtagcggccattgttgctgctgtagtggccttgatctactgcaggaaaaagcggatttcagccaatcccactaatcctgatgaggctgacaaagttggggctgagaacacaatcacctattcacttctcatgcacccggatgctctggaagagcctgatgaccagaaccgtatttagtctccattgtcttgcattgggatttgagaagaaaatcagagagggaagatctggtatttcctggcctaaattccccttggggaggacagggagatgctgcagttccaaaagagaaggtttcttccagagtcatctacctgagtcctgaagctccctgtcctgaaagccacagacaatatggtcccaaatgaccgactgcaccttctgtgcttcagctcttcttgacatcaaggctcttccgttccacatccacacagccaatccaattaatcaaaccactgttattaacagataatagcaacttgggaaatgcttatgttacaggttaaatagactaacctctaccagcacattaaaagtgattgtttctgggtgataaaattattgatgatttttattttctttatttttctataaagatcatatattacttttataataaaacattataaaaacaacattctgtttaccttttcaaggctgtattggttggagtgtagactgaactgcctggggtctgtttctcttcagtgatgagactcttaggaaggcaggaatggataggatagggggaggagaggagagatggggatttagaatgtagagtgagtgccccttttcttaaaactgaatacagtcacgcaccacataatgatgtttagttcaacaacagactgcatatatgatggtgatcccataaaattataataccatatttctattgtaccttttctattcctatgtttagatatatgagtacttaccattgtgttacaattgcctaaagtattcagtacagtagcatgctgtacaggtttgtagcctaggggcaataggctatacgctacagcctaggtgtgtagtaggccacaccatttaggtttgtataagtacctgctatgatgttcacacaacaaaattgcctgcatttctcaaaatgtatccccatatttcaacaatgcatgactgtactcttctgccaatgaccttgtattcttgtttccatgtcttcttctctttcctcctatggcaaataaaacactgttttgcaacacaaaaagagaaaaaaaaaaaaacaaaaaaaaaatttgttgggaggctttgggccttcgaaaaagttttttataaaccattctggtttggggcggggggcccgtatgggttaagtgtgaaccggtgcccacgaggtgtgttacccctgagaaaactcggggccaggaaccaatgcgcgggagactccgtccccactcaaaaacccccgcgggtcacacccggacggtttgcgacaaatcccgatggccttcccgaggcccaacggggatc

SEQ ID NO: 288296 - DNA, 1439 bp, Homo sapiens
gtttgccctctagggtagaatccgccaagctttgagagaaggctgtgactgctgtgctctgggcgccactcgctccagggagtgatgggaatcctgtcattcttacctgtccttgccactgagagtgactgggctgactgcaagtccccccagccttggggtcatatgcttctgtggacagctgtgctattcctggctcctgttgctgggacacctgcagctcccccaaaggctgtgctgaaactcgagccccagtggatcaacgtgctccaggaggactctgtgactctgacatgccgggggactcacagccctgagagcgactccattcagtggttccacaatgggaatctcattcccacccacacgcagcccagctacaggttcaaggccaacaacaatgacagcggggagtacacgtgccagactggccagaccagcctcagcgaccctgtgcatctgactgtgctttctgagtggctggtgctccagacccctcacctggagttccaggagggagaaaccatcgtgctgaggtgccacagctggaaggacaagcctctggtcaaggtcacattcttccagaatggaaaatccaagaaattttcccgttcggatcccaacttctccatcccacaagcaaaccacagtcacagtggtgattaccactgcacaggaaacataggctacacgctgtactcatccaagcctgtgaccatcactgtccaagctcccagctcttcaccgatggggatcattgtggctgtggtcactgggattgctgtagcggccattgttgctgctgtagtggccttgatctactgcaggaaaaagcggatttcagctctcccaggataccctgagtgcagggaaatgggagagaccctccctgagaaaccagccaatcccactaatcctgatgaggctgacaaagttggggctgagaacacaatcacctattcacttctcatgcacccggatgctctggaagagcctgatgaccagaaccgtatttagtctccattgtcttgcattgggatttgagaagaaaatcagagagggaagatctggtatttcctggcctaaattccccttggggaggacagggagatgctgcagttccaaaagagaaggtttcttccagagtcatctacctgagtcctgaagctccctgtcctgaaagccacagacaatatggtcccaaatgaccgactgcaccttctgtgcttcagctcttcttgacatcaaggctcttccgttccacatccacacagccaatccaattaatcaaaccactgttattaacagataatagcaacttgggaaatgcttatgttacaggttacgtgagaacaatcatgtaaatctatatgatttcagaaatgttaaaatagactaacctctaccagcacattaaaagtgattgtttctgggtgata

SEQ ID NO: 288297 - DNA, 3651 bp, Homo sapiens
gtttgccctctagggtagaatccgccaagctttgagagaaggctgtgactgctgtgctctgggcgccactcgctccagggagtgatgggaatcctgtcattcttacctgtccttgccactgagagtgactgggctgactgcaagtccccccagccttggggtcatatgcttctgtggacagctgtgctattcctggctcctgttgctgggacacctgcagctcccccaaaggctgtgctgaaactcgagccccagtggatcaacgtgctccaggaggactctgtgactctgacatgccgggggactcacagccctgagagcgactccattcagtggttccacaatgggaatctcattcccacccacacgcagcccagctacaggttcaaggccaacaacaatgacagcggggagtacacgtgccagactggccagaccagcctcagcgaccctgtgcatctgactgtgctttctggtcagtggaggaaggccccagggtggacctgggagggccaggacggatgaaatctgctttcaggcagaggtttgcaggaaaggggggtggcctgcttactgggaagtatcgctgtgagttgcctcagcacatatcagtggttgtttttgcctcagttctgattgaacagaagaaggtttcaaggccaaaaacaggcagccaagtgtgagagaagcagaaggaaatccctactgcataaaacccatttccattttaatggcagaattgaaaagcacagaccacaactgaatcctagccctggaaatgactcactatacaacatgatgaattcatttaacccttgagtttccatttcttcacctgctccgtggggcactaacgcctccctcagaggcttctggtgagaatcagtgtttccctgcccccgccccgccctccatgccccttctccacgttctcactgtgctaggtgctcttctctgtctttctcttccaccagcctgtgggaaacctgagatgaaagtcgtgtcttacccatctttgtatttccagcatctgaaactgggcagagcttaataaatattttgctggagaggttgatgatcttacaaagctcccattgaaaggtggctctctgtaaagcaaagttacaatgagattgtgatgaacattgtccttgtggcttttcacttagtcccctcccttcacctgaagagcaaattttcctcaaaagtacacagcaaacgaatgacccactggtgacactgttgcctttagaccctgctggaaagaagctccacatttattaacattcccgaagtaaatttatcaggtagcattcatcaggtaacatttgttgcacattcatgacttttctactgtccacaaaggcatatgtccttatcatatgcggactcctcggtcacactggattcttccttccctcctcgacatggaagagatggcatcttagggtctcttgtgttcttcctgcagaggcctgtcgggcaggaaaaggctgcagctgccttcctgggagaaggaggagatgagtgtatcctgaacacctattatgtgctaggggctattgtagatacatgacactatcatgctcattttcacgaatgaggaaactgaggctcagaagacttaaattatttgcccaagagttataaatgacagagccagcattagagtccaggactgtctgatttcagacctaagctgttccctctgcacatcgtgtcccaccagtaaggaagatctgggtctcagagctgagccaagacctcccgggtcctctgcggttttttgtgtctttcagagtggctggtgctccagacccctcacctggagttccaggagggagaaaccatcgtgctgaggtgccacagctggaaggacaagcctctggtcaaggtcacattcttccagaatggaaaatccaagaaattttcccgttcggatcccaacttctccatcccacaagcaaaccacagtcacagtggtgattaccactgcacaggaaacataggctacacgctgtactcatccaagcctgtgaccatcactgtccaagctcccagctcttcaccgatggggatcattgtggctgtggtcactgggattgctgtagcggccattgttgctgctgtagtggccttgatctactgcaggaaaaagcggatttcagccaatcccactaatcctgatgaggctgacaaagttggggctgagaacacaatcacctattcacttctcatgcacccggatgctctggaagagcctgatgaccagaaccgtatttagtctccattgtcttgcattgggatttgagaagaaaatcagagagggaagatctggtatttcctggcctaaattccccttggggaggacagggagatgctgcagttccaaaagagaaggtttcttccagagtcatctacctgagtcctgaagctccctgtcctgaaagccacagacaatatggtcccaaatgaccgactgcaccttctgtgcttcagctcttcttgacatcaaggctcttccgttccacatccacacagccaatccaattaatcaaaccactgttattaacagataatagcaacttgggaaatgcttatgttacaggttacgtgagaacaatcatgtaaatctatatgatttcagaaatgttaaaatagactaacctctaccagcacattaaaagtgattgtttctgggtgataaaattattgatgatttttattttctttatttttctataaagatcatatattacttttataataaaacattataaaaacaacattctgtttaccttttcaaggctgtattggttggagtgtagactgaactgcctggggtctgtttctcttcagtgatgagactcttaggaaggcaggaatggataggatagggggaggagaggagagatggggatttagaatgtagagtgagtgccccttttcttaaaactgaatacagtcacgcaccacataatgatgtttagttcaacaacagactgcatatatgatggtgatcccataaaattataataccatatttctattgtaccttttctattcctatgtttagatatatgagtacttaccattgtgttacaattgcctaaagtattcagtacagtagcatgctgtacaggtttgtagcctaggggcaataggctatacgctacagcctaggtgtgtagtaggccacaccatttaggtttgtataagtacctgctatgatgttcacacaacaaaattgcctgcatttctcaaaatgtatccccatatttcaacaatgcatgactgtactcttctgccaatgaccttgtattcttgtttccatgtcttcttctctttcctcctatggcaaataaaacactgttttgcaacacaaaaagagaaaaaaaaaaaaacaaaaaaaaaatttgttgggaggctttgggccttcgaaaaagttttttataaaccattctggtttggggcggggggcccgtatgggttaagtgtgaaccggtgcccacgaggtgtgttacccctgagaaaactcggggccaggaaccaatgcgcgggagactccgtccccactcaaaaacccccgcgggtcacacccggacggtttgcgacaaatcccgatggccttcccgaggcccaacggggatc

SEQ ID NO: 288298 - DNA, 2363 bp, Homo sapiens
gtttgccctctagggtagaatccgccaagctttgagagaaggctgtgactgctgtgctctgggcgccactcgctccagggagtgatgggaatcctgtcattcttacctgtccttgccactgagagtgactgggctgactgcaagtccccccagccttggggtcatatgcttctgtggacagctgtgctattcctggcagctcccccaaaggctgtgctgaaactcgagccccagtggatcaacgtgctccaggaggactctgtgactctgacatgccgggggactcacagccctgagagcgactccattcagtggttccacaatgggaatctcattcccacccacacgcagcccagctacaggttcaaggccaacaacaatgacagcggggagtacacgtgccagactggccagaccagcctcagcgaccctgtgcatctgactgtgctttctgagtggctggtgctccagacccctcacctggagttccaggagggagaaaccatcgtgctgaggtgccacagctggaaggacaagcctctggtcaaggtcacattcttccagaatggaaaatccaagaaattttcccgttcggatcccaacttctccatcccacaagcaaaccacagtcacagtggtgattaccactgcacaggaaacataggctacacgctgtactcatccaagcctgtgaccatcactgtccaagctcccagctcttcaccgatggggatcattgtggctgtggtcactgggattgctgtagcggccattgttgctgctgtagtggccttgatctactgcaggaaaaagcggatttcagctctcccaggataccctgagtgcagggaaatgggagagaccctccctgagaaaccagccaatcccactaatcctgatgaggctgacaaagttggggctgagaacacaatcacctattcacttctcatgcacccggatgctctggaagagcctgatgaccagaaccgtatttagtctccattgtcttgcattgggatttgagaagaaaatcagagagggaagatctggtatttcctggcctaaattccccttggggaggacagggagatgctgcagttccaaaagagaaggtttcttccagagtcatctacctgagtcctgaagctccctgtcctgaaagccacagacaatatggtcccaaatgaccgactgcaccttctgtgcttcagctcttcttgacatcaaggctcttccgttccacatccacacagccaatccaattaatcaaaccactgttattaacagataatagcaacttgggaaatgcttatgttacaggttacgtgagaacaatcatgtaaatctatatgatttcagaaatgttaaaatagactaacctctaccagcacattaaaagtgattgtttctgggtgataaaattattgatgatttttattttctttatttttctataaagatcatatattacttttataataaaacattataaaaacaacattctgtttaccttttcaaggctgtattggttggagtgtagactgaactgcctggggtctgtttctcttcagtgatgagactcttaggaaggcaggaatggataggatagggggaggagaggagagatggggatttagaatgtagagtgagtgccccttttcttaaaactgaatacagtcacgcaccacataatgatgtttagttcaacaacagactgcatatatgatggtgatcccataaaattataataccatatttctattgtaccttttctattcctatgtttagatatatgagtacttaccattgtgttacaattgcctaaagtattcagtacagtagcatgctgtacaggtttgtagcctaggggcaataggctatacgctacagcctaggtgtgtagtaggccacaccatttaggtttgtataagtacctgctatgatgttcacacaacaaaattgcctgcatttctcaaaatgtatccccatatttcaacaatgcatgactgtactcttctgccaatgaccttgtattcttgtttccatgtcttcttctctttcctcctatggcaaataaaacactgttttgcaacacaaaaagagaaaaaaaaaaaaacaaaaaaaaaatttgttgggaggctttgggccttcgaaaaagttttttataaaccattctggtttggggcggggggcccgtatgggttaagtgtgaaccggtgcccacgaggtgtgttacccctgagaaaactcggggccaggaaccaatgcgcgggagactccgtccccactcaaaaacccccgcgggtcacacccggacggtttgcgacaaatcccgatggccttcccgaggcccaacggggatc

SEQ ID NO: 288299 - DNA, 2437 bp, Homo sapiens
gtttgccctctagggtagaatccgccaagctttgagagaaggctgtgactgctgtgctctgggcgccactcgctccagggagtgatgggaatcctgtcattcttacctgtccttgccactgagagtgactgggctgactgcaagtccccccagccttggggtcatatgcttctgtggacagctgtgctattcctggctcctgttgctgggacacctgcagctcccccaaaggctgtgctgaaactcgagccccagtggatcaacgtgctccaggaggactctgtgactctgacatgccgggggactcacagccctgagagcgactccattcagtggttccacaatgggaatctcattcccacccacacgcagcccagctacaggttcaaggccaacaacaatgacagcggggagtacacgtgccagactggccagaccagcctcagcgaccctgtgcatctgactgtgctttctgagtggctggtgctccagacccctcacctggagttccaggagggagaaaccatcgtgctgaggtgccacagctggaaggacaagcctctggtcaaggtcacattcttccagaatggaaaatccaagaaattttcccgttcggatcccaacttctccatcccacaagcaaaccacagtcacagtggtgattaccactgcacaggaaacataggctacacgctgtactcatccaagcctgtgaccatcactgtccaagctcccagctcttcaccgatggggatcattgtggctgtggtcactgggattgctgtagcggccattgttgctgctgtagtggccttgatctactgcaggaaaaagcggatttcagccaatcccactaatcctgatgaggctgacaaagttggggtgagtgatcccagccatctccccctcccttctcccctgttgccttttctgttgccttctttcctaggccctctctgtggatccttactgctggtttctgccttctctaggctgagaacacaatcacctattcacttctcatgcacccggatgctctggaagagcctgatgaccagaaccgtatttagtctccattgtcttgcattgggatttgagaagaaaatcagagagggaagatctggtatttcctggcctaaattccccttggggaggacagggagatgctgcagttccaaaagagaaggtttcttccagagtcatctacctgagtcctgaagctccctgtcctgaaagccacagacaatatggtcccaaatgaccgactgcaccttctgtgcttcagctcttcttgacatcaaggctcttccgttccacatccacacagccaatccaattaatcaaaccactgttattaacagataatagcaacttgggaaatgcttatgttacaggttacgtgagaacaatcatgtaaatctatatgatttcagaaatgttaaaatagactaacctctaccagcacattaaaagtgattgtttctgggtgataaaattattgatgatttttattttctttatttttctataaagatcatatattacttttataataaaacattataaaaacaacattctgtttaccttttcaaggctgtattggttggagtgtagactgaactgcctggggtctgtttctcttcagtgatgagactcttaggaaggcaggaatggataggatagggggaggagaggagagatggggatttagaatgtagagtgagtgccccttttcttaaaactgaatacagtcacgcaccacataatgatgtttagttcaacaacagactgcatatatgatggtgatcccataaaattataataccatatttctattgtaccttttctattcctatgtttagatatatgagtacttaccattgtgttacaattgcctaaagtattcagtacagtagcatgctgtacaggtttgtagcctaggggcaataggctatacgctacagcctaggtgtgtagtaggccacaccatttaggtttgtataagtacctgctatgatgttcacacaacaaaattgcctgcatttctcaaaatgtatccccatatttcaacaatgcatgactgtactcttctgccaatgaccttgtattcttgtttccatgtcttcttctctttcctcctatggcaaataaaacactgttttgcaacacaaaaagagaaaaaaaaaaaaacaaaaaaaaaatttgttgggaggctttgggccttcgaaaaagttttttataaaccattctggtttggggcggggggcccgtatgggttaagtgtgaaccggtgcccacgaggtgtgttacccctgagaaaactcggggccaggaaccaatgcgcgggagactccgtccccactcaaaaacccccgcgggtcacacccggacggtttgcgacaaatcccgatggccttcccgaggcccaacggggatc

SEQ ID NO: 288300 - DNA, 1482 bp, Homo sapiens
  misc_feature (1087)..(1087): n is a, c, g, or t
gtttgccctctagggtagaatccgccaagctttgagagaaggctgtgactgctgtgctctgggcgccactcgctccagggagtgatgggaatcctgtcattcttacctgtccttgccactgagagtgactgggctgactgcaagtccccccagccttggggtcatatgcttctgtggacagctgtgctattcctggctcctgttgctgggacacctgcagctcccccaaaggctgtgctgaaactcgagccccagtggatcaacgtgctccaggaggactctgtgactctgacatgccgggggactcacagccctgagagcgactccattcagtggttccacaatgggaatctcattcccacccacacgcagcccagctacaggttcaaggccaacaacaatgacagcggggagtacacgtgccagactggccagaccagcctcagcgaccctgtgcatctgactgtgctttctgagtggctggtgctccagacccctcacctggagttccaggagggagaaaccatcgtgctgaggtgccacagctggaaggacaagcctctggtcaaggtcacattcttccagaatggaaaatccaagaaattttcccgttcggatcccaacttctccatcccacaagcaaaccacagtcacagtggtgattaccactgcacaggaaacataggctacacgctgtactcatccaagcctgtgaccatcactgtccaagctcccagctcttcaccgatggggatcattgtggctgtggtcactgggattgctgtagcggccattgttgctgctgtagtggccttgatctactgcaggaaaaagcggatttcagccaattccactgatcctgtgaaggctgcccaatttgagccacctggacgtcaaatgattgccatcagaaagagacaacctgaagaaaccaacaatgactatgaaacagctgacggcggctacatgactctgaaccccagggcacctactgacgatgataaaaacatctacctgactcttcctcccaacgaccatgtcaacagtaataactaaagagtaacgttatgccatgtggtcatctagnttgctgatggatgacaaaaagaggggaattgttaaaggaaaatttaaatggagactggaaaaattcctgagcaaacaaaaccacctggcccttagaaatagctttaactttgcttaaactacaaacacaagcaaaacttcacggggtcatactacatacaagcataagcaaaacttaacttggatcatttctggtaaatgcttatgttagaaataagacaaccccagccaatcacaagcagcctactaacatataattaggtggctagggactttctaagaagatacctacccccaaaaaacaattatataattgaaaaccaatcgattgcctttattttgcttccacattttcccaataaatacttgcctgtgacattttgccactggaacact

SEQ ID NO: 288301 - DNA, 1743 bp, Homo sapiens
gcaattccctgaaaagaatgcagctcaagtgactgctccactttttcaccttggcctttgcggaaggctgtggctgggctaccctatgcatcgatcaatgaggtcatatttacccagtgcttggcctagaggcccaagacagggtcagcagtgcttgctttggctctagtttgggcgttggttttgcagcctcagcatcagcacaggcaggccctcttctccagcagtgctctggctgatatttcttctttttcccacagccaatcccactaatcctgatgaggctgacaaagttggggctgagaacacaatcacctattcacttctcatgcacccggatgctctggaagagcctgatgaccagaaccgtatttagtctccattgtcttgcattgggatttgagaagaaaatcagagagggaagatctggtatttcctggcctaaattccccttggggaggacagggagatgctgcagttccaaaagagaaggtttcttccagagtcatctacctgagtcctgaagctccctgtcctgaaagccacagacaatatggtcccaaatgaccgactgcaccttctgtgcttcagctcttcttgacatcaaggctcttccgttccacatccacacagccaatccaattaatcaaaccactgttattaacagataatagcaacttgggaaatgcttatgttacaggttacgtgagaacaatcatgtaaatctatatgatttcagaaatgttaaaatagactaacctctaccagcacattaaaagtgattgtttctgggtgataaaattattgatgatttttattttctttatttttctataaagatcatatattacttttataataaaacattataaaaacaacattctgtttaccttttcaaggctgtattggttggagtgtagactgaactgcctggggtctgtttctcttcagtgatgagactcttaggaaggcaggaatggataggatagggggaggagaggagagatggggatttagaatgtagagtgagtgccccttttcttaaaactgaatacagtcacgcaccacataatgatgtttagttcaacaacagactgcatatatgatggtgatcccataaaattataataccatatttctattgtaccttttctattcctatgtttagatatatgagtacttaccattgtgttacaattgcctaaagtattcagtacagtagcatgctgtacaggtttgtagcctaggggcaataggctatacgctacagcctaggtgtgtagtaggccacaccatttaggtttgtataagtacctgctatgatgttcacacaacaaaattgcctgcatttctcaaaatgtatccccatatttcaacaatgcatgactgtactcttctgccaatgaccttgtattcttgtttccatgtcttcttctctttcctcctatggcaaataaaacactgttttgcaacacaaaaagagaaaaaaaaaaaaacaaaaaaaaaatttgttgggaggctttgggccttcgaaaaagttttttataaaccattctggtttggggcggggggcccgtatgggttaagtgtgaaccggtgcccacgaggtgtgttacccctgagaaaactcggggccaggaaccaatgcgcgggagactccgtccccactcaaaaacccccgcgggtcacacccggacggtttgcgacaaatcccgatggccttcccgaggcccaacggggatc

SEQ ID NO: 288302 - DNA, 1498 bp, Homo sapiens
  misc_feature (1103)..(1103): n is a, c, g, or t
cagcatttgtgccttgaacagtggttttttttgctggctgtacaggtccggagttcccgggcatctgctgtgctctgggcgccactcgctccagggagtgatgggaatcctgtcattcttacctgtccttgccactgagagtgactgggctgactgcaagtccccccagccttggggtcatatgcttctgtggacagctgtgctattcctggctcctgttgctgggacacctgcagctcccccaaaggctgtgctgaaactcgagccccagtggatcaacgtgctccaggaggactctgtgactctgacatgccgggggactcacagccctgagagcgactccattcagtggttccacaatgggaatctcattcccacccacacgcagcccagctacaggttcaaggccaacaacaatgacagcggggagtacacgtgccagactggccagaccagcctcagcgaccctgtgcatctgactgtgctttctgagtggctggtgctccagacccctcacctggagttccaggagggagaaaccatcgtgctgaggtgccacagctggaaggacaagcctctggtcaaggtcacattcttccagaatggaaaatccaagaaattttcccgttcggatcccaacttctccatcccacaagcaaaccacagtcacagtggtgattaccactgcacaggaaacataggctacacgctgtactcatccaagcctgtgaccatcactgtccaagctcccagctcttcaccgatggggatcattgtggctgtggtcactgggattgctgtagcggccattgttgctgctgtagtggccttgatctactgcaggaaaaagcggatttcagccaattccactgatcctgtgaaggctgcccaatttgagccacctggacgtcaaatgattgccatcagaaagagacaacctgaagaaaccaacaatgactatgaaacagctgacggcggctacatgactctgaaccccagggcacctactgacgatgataaaaacatctacctgactcttcctcccaacgaccatgtcaacagtaataactaaagagtaacgttatgccatgtggtcatctagnttgctgatggatgacaaaaagaggggaattgttaaaggaaaatttaaatggagactggaaaaattcctgagcaaacaaaaccacctggcccttagaaatagctttaactttgcttaaactacaaacacaagcaaaacttcacggggtcatactacatacaagcataagcaaaacttaacttggatcatttctggtaaatgcttatgttagaaataagacaaccccagccaatcacaagcagcctactaacatataattaggtggctagggactttctaagaagatacctacccccaaaaaacaattatataattgaaaaccaatcgattgcctttattttgcttccacattttcccaataaatacttgcctgtgacattttgccactggaacact

SEQ ID NO: 288303 - DNA, 1853 bp, Homo sapiens
gcaattccctgaaaagaatgcagctcaagtgactgctccactttttcaccttggcctttgcggaaggctgtggctgggctaccctatgcatcgatcaatgaggtcatatttacccagtgcttggcctagaggcccaagacagggtcagcagtgcttgctttggctctagtttgggcgttggttttgcagcctcagcatcagcacaggcaggccctcttctccagcagtgctctggctgatatttcttctttttcccacagccaatcccactaatcctgatgaggctgacaaagttggggtgagtgatcccagccatctccccctcccttctcccctgttgccttttctgttgccttctttcctaggccctctctgtggatccttactgctggtttctgccttctctaggctgagaacacaatcacctattcacttctcatgcacccggatgctctggaagagcctgatgaccagaaccgtatttagtctccattgtcttgcattgggatttgagaagaaaatcagagagggaagatctggtatttcctggcctaaattccccttggggaggacagggagatgctgcagttccaaaagagaaggtttcttccagagtcatctacctgagtcctgaagctccctgtcctgaaagccacagacaatatggtcccaaatgaccgactgcaccttctgtgcttcagctcttcttgacatcaaggctcttccgttccacatccacacagccaatccaattaatcaaaccactgttattaacagataatagcaacttgggaaatgcttatgttacaggttacgtgagaacaatcatgtaaatctatatgatttcagaaatgttaaaatagactaacctctaccagcacattaaaagtgattgtttctgggtgataaaattattgatgatttttattttctttatttttctataaagatcatatattacttttataataaaacattataaaaacaacattctgtttaccttttcaaggctgtattggttggagtgtagactgaactgcctggggtctgtttctcttcagtgatgagactcttaggaaggcaggaatggataggatagggggaggagaggagagatggggatttagaatgtagagtgagtgccccttttcttaaaactgaatacagtcacgcaccacataatgatgtttagttcaacaacagactgcatatatgatggtgatcccataaaattataataccatatttctattgtaccttttctattcctatgtttagatatatgagtacttaccattgtgttacaattgcctaaagtattcagtacagtagcatgctgtacaggtttgtagcctaggggcaataggctatacgctacagcctaggtgtgtagtaggccacaccatttaggtttgtataagtacctgctatgatgttcacacaacaaaattgcctgcatttctcaaaatgtatccccatatttcaacaatgcatgactgtactcttctgccaatgaccttgtattcttgtttccatgtcttcttctctttcctcctatggcaaataaaacactgttttgcaacacaaaaagagaaaaaaaaaaaaacaaaaaaaaaatttgttgggaggctttgggccttcgaaaaagttttttataaaccattctggtttggggcggggggcccgtatgggttaagtgtgaaccggtgcccacgaggtgtgttacccctgagaaaactcggggccaggaaccaatgcgcgggagactccgtccccactcaaaaacccccgcgggtcacacccggacggtttgcgacaaatcccgatggccttcccgaggcccaacggggatc

SEQ ID NO: 288304 - DNA, 1444 bp, Homo sapiens
  misc_feature (1049)..(1049): n is a, c, g, or t
gtttgccctctagggtagaatccgccaagctttgagagaaggctgtgactgctgtgctctgggcgccactcgctccagggagtgatgggaatcctgtcattcttacctgtccttgccactgagagtgactgggctgactgcaagtccccccagccttggggtcatatgcttctgtggacagctgtgctattcctggctcctgttgctgggacacctgcagctcccccaaaggctgtgctgaaactcgagccccagtggatcaacgtgctccaggaggactctgtgactctgacatgccgggggactcacagccctgagagcgactccattcagtggttccacaatgggaatctcattcccacccacacgcagcccagctacaggttcaaggccaacaacaatgacagcggggagtacacgtgccagactggccagaccagcctcagcgaccctgtgcatctgactgtgctttctgagtggctggtgctccagacccctcacctggagttccaggagggagaaaccatcgtgctgaggtgccacagctggaaggacaagcctctggtcaaggtcacattcttccagaatggaaaatccaagaaattttcccgttcggatcccaacttctccatcccacaagcaaaccacagtcacagtggtgattaccactgcacaggaaacataggctacacgctgtactcatccaagcctgtgaccatcactgtccaagctcccagctcttcaccgatggggatcattgtggctgtggtcactgggattgctgtagcggccattgttgctgctgtagtggccttgatctactgcaggaaaaagcggatttcagccacctggacgtcaaatgattgccatcagaaagagacaacctgaagaaaccaacaatgactatgaaacagctgacggcggctacatgactctgaaccccagggcacctactgacgatgataaaaacatctacctgactcttcctcccaacgaccatgtcaacagtaataactaaagagtaacgttatgccatgtggtcatctagnttgctgatggatgacaaaaagaggggaattgttaaaggaaaatttaaatggagactggaaaaattcctgagcaaacaaaaccacctggcccttagaaatagctttaactttgcttaaactacaaacacaagcaaaacttcacggggtcatactacatacaagcataagcaaaacttaacttggatcatttctggtaaatgcttatgttagaaataagacaaccccagccaatcacaagcagcctactaacatataattaggtggctagggactttctaagaagatacctacccccaaaaaacaattatataattgaaaaccaatcgattgcctttattttgcttccacattttcccaataaatacttgcctgtgacattttgccactggaacact

SEQ ID NO: 288305 - DNA, 1529 bp, Homo sapiens
  misc_feature (1134)..(1134): n is a, c, g, or t
gtttgccctctagggtagaatccgccaagctttgagagaaggctgtgactgctgtgctctgggcgccactcgctccagggagtgatgggaatcctgtcattcttacctgtccttgccactgagagtgactgggctgactgcaagtccccccagccttggggtcatatgcttctgtggacagctgtgctattcctggctcctgttgctgggacacctgcagctcccccaaaggctgtgctgaaactcgagccccagtggatcaacgtgctccaggaggactctgtgactctgacatgccgggggactcacagccctgagagcgactccattcagtggttccacaatgggaatctcattcccacccacacgcagcccagctacaggttcaaggccaacaacaatgacagcggggagtacacgtgccagactggccagaccagcctcagcgaccctgtgcatctgactgtgctttctgagtggctggtgctccagacccctcacctggagttccaggagggagaaaccatcgtgctgaggtgccacagctggaaggacaagcctctggtcaaggtcacattcttccagaatggaaaatccaagaaattttcccgttcggatcccaacttctccatcccacaagcaaaccacagtcacagtggtgattaccactgcacaggaaacataggctacacgctgtactcatccaagcctgtgaccatcactgtccaaggccccagactaaggacggcagcgaagcagagctccctcgttggtgcagaggttccctaagctcctgggcattcgtaagaactgagctcccagctcttcaccgatggggatcattgtggctgtggtcactgggattgctgtagcggccattgttgctgctgtagtggccttgatctactgcaggaaaaagcggatttcagccacctggacgtcaaatgattgccatcagaaagagacaacctgaagaaaccaacaatgactatgaaacagctgacggcggctacatgactctgaaccccagggcacctactgacgatgataaaaacatctacctgactcttcctcccaacgaccatgtcaacagtaataactaaagagtaacgttatgccatgtggtcatctagnttgctgatggatgacaaaaagaggggaattgttaaaggaaaatttaaatggagactggaaaaattcctgagcaaacaaaaccacctggcccttagaaatagctttaactttgcttaaactacaaacacaagcaaaacttcacggggtcatactacatacaagcataagcaaaacttaacttggatcatttctggtaaatgcttatgttagaaataagacaaccccagccaatcacaagcagcctactaacatataattaggtggctagggactttctaagaagatacctacccccaaaaaacaattatataattgaaaaccaatcgattgcctttattttgcttccacattttcccaataaatacttgcctgtgacattttgccactggaacact

SEQ ID NO: 288306 - DNA, 795 bp, Homo sapiens
gtttgccctctagggtagaatccgccaagctttgagagaaggctgtgactgctgtgctctgggcgccactcgctccagggagtgatgggaatcctgtcattcttacctgtccttgccactgagagtgactgggctgactgcaagtccccccagccttggggtcatatgcttctgtggacagctgtgctattcctggctcctgttgctgggacacctgcagctcccccaaaggctgtgctgaaactcgagccccagtggatcaacgtgctccaggaggactctgtgactctgacatgccgggggactcacagccctgagagcgactccattcagtggttccacaatgggaatctcattcccacccacacgcagcccagctacaggttcaaggccaacaacaatgacagcggggagtacacgtgccagactggccagaccagcctcagcgaccctgtgcatctgactgtgctttctgagtggctggtgctccagacccctcacctggagttccaggagggagaaaccatcgtgctgaggtgccacagctggaaggacaagcctctggtcaaggtcacattcttccagaatggaaaatccaagaaattttcccgttcggatcccaacttctccatcccacaagcaaaccacagtcacagtggtgattaccactgcacaggaaacataggctacacgctgtactcatccaagcctgtgaccatcactgtccaaggtatgaggagtctgccaagatgtagggaggggagaagaggggatggacaagggctgaggtcacat

SEQ ID NO: 288307 - DNA, 1567 bp, Homo sapiens
  misc_feature (1172)..(1172): n is a, c, g, or t
gtttgccctctagggtagaatccgccaagctttgagagaaggctgtgactgctgtgctctgggcgccactcgctccagggagtgatgggaatcctgtcattcttacctgtccttgccactgagagtgactgggctgactgcaagtccccccagccttggggtcatatgcttctgtggacagctgtgctattcctggctcctgttgctgggacacctgcagctcccccaaaggctgtgctgaaactcgagccccagtggatcaacgtgctccaggaggactctgtgactctgacatgccgggggactcacagccctgagagcgactccattcagtggttccacaatgggaatctcattcccacccacacgcagcccagctacaggttcaaggccaacaacaatgacagcggggagtacacgtgccagactggccagaccagcctcagcgaccctgtgcatctgactgtgctttctgagtggctggtgctccagacccctcacctggagttccaggagggagaaaccatcgtgctgaggtgccacagctggaaggacaagcctctggtcaaggtcacattcttccagaatggaaaatccaagaaattttcccgttcggatcccaacttctccatcccacaagcaaaccacagtcacagtggtgattaccactgcacaggaaacataggctacacgctgtactcatccaagcctgtgaccatcactgtccaaggccccagactaaggacggcagcgaagcagagctccctcgttggtgcagaggttccctaagctcctgggcattcgtaagaactgagctcccagctcttcaccgatggggatcattgtggctgtggtcactgggattgctgtagcggccattgttgctgctgtagtggccttgatctactgcaggaaaaagcggatttcagccaattccactgatcctgtgaaggctgcccaatttgagccacctggacgtcaaatgattgccatcagaaagagacaacctgaagaaaccaacaatgactatgaaacagctgacggcggctacatgactctgaaccccagggcacctactgacgatgataaaaacatctacctgactcttcctcccaacgaccatgtcaacagtaataactaaagagtaacgttatgccatgtggtcatctagnttgctgatggatgacaaaaagaggggaattgttaaaggaaaatttaaatggagactggaaaaattcctgagcaaacaaaaccacctggcccttagaaatagctttaactttgcttaaactacaaacacaagcaaaacttcacggggtcatactacatacaagcataagcaaaacttaacttggatcatttctggtaaatgcttatgttagaaataagacaaccccagccaatcacaagcagcctactaacatataattaggtggctagggactttctaagaagatacctacccccaaaaaacaattatataattgaaaaccaatcgattgcctttattttgcttccacattttcccaataaatacttgcctgtgacattttgccactggaacact

SEQ ID NO: 288308 - DNA, 1005 bp, Homo sapiens
ggacttccgtttcggtccagccgggctgcggccattgtttgtgtggactgagtgttttggccatcccggtccactctcacaggctccgttaagtgacatgaactctcaggaggactgagccagaagcggacagggcaagacgagctgtgcttgaaggaagaggggcagaaaatcgagggtcagggactgagaagctactccggtttagaaaccccagagacacccgtgtagatgggtacatcacggcttctctcccacgttaagacttaataaaggaacctacctttgatcagcaaggaaggactggggtggcaaaggctcatgcccccattttacagatgtcatcatttgtcccaacatcattgattgaataagccatcttttccccacaaatttgatgtaacctttgtcatgtgtaaaatgcactgttgtacttgtgtccatttctggatttgtacccgtttccattgatcttctctacttctatgtcaagccatgttatgaattgcagagtccttattaaagttttaatatgccattgaattagcctctcctcattattccactttcaaaatggttttctttcaaaagcatttgaaaatcagtttgttacagctcctccaaccccacatcaaaatcaagattaatatcttgattaaatctgcttgaaaatagagataagtttagttagaacaaaattatatttatttctcctaagactgagcagagtcatcttgttttttcaagcctatttgttgttgttgttgtttttgttgttgttttgagacagagtcatcttgctctgttgcccaggctggagttcagtggcacactcttggctcactgcaacctctgtctcccaggttaaagtgattctcatgcctcagctactcaggaggctgaagcaggagaattgcttgaacccgggaggctgaagttgcagtgagccaggatggcaccactgcactccaacctgggcaacagaggaagactccctctaaaaaa

SEQ ID NO: 288309 - DNA, 2665 bp, Homo sapiens
ggacttccgtttcggtccagccgggctgcggccattgtttgtgtggactgagtgttttggccatcccggtccactctcacaggctccgttaagtgacatgaactctcaggaggactgagccagaagcggacagggcaagacgagctgtgcttgaaggaagaggggcagaaaatcgagggtcagggactgagaagctactccggtttagaaaccccagagacacccgtgtagatgggtacatcacggcttctctcccacgttaagacttaataaagaaagcctgatctttgaccagatggcagtaacatttgaagatgtgactattatttttacatgggaggagtggaaattcctggattcttctcaaaaaagactctacagggaggtcatgtgggagaactacacaaatgtcatgtcagtagaaaactggaatgagagctacaaatcccaagaagaaaaattcagatacttagaatatgaaaatttttcctactggcaaggctggtggaatgctggcgcccagatgtatgagaatcagaactatggggaaactgttcaagggacagattccaaagacctcacacagcaagatcgttcccagtgtcaggaatggttaatactctccacacaagtaccagggtatgggaactatgaactgacttttgaaagcaaaagtctcaggaacttaaaatataaaaattttatgccttggcagtccttagaaacaaaaaccactcaagactatggtagagaaatctacatgagtggttcacatggttttcaagggggcagataccgtcttggcatatccaggaaaaacctctccatggaaaaagaacagaagctcatagttcagcattcttatatcccagtggaggaagcccttccacagtatgttggggtgatatgtcaagaagacctactgagagattcaatggaagaaaagtactgtggatgtaataaatgtaaaggaatttattattggaactcacggtgtgttttccacaagagaaatcaacctggagaaaacctctgtcaatgctccatccgtaaagcatgcttctctcagagatcagacttgtatagacatccaagaaaccacataggtaagaagctgtacggatgtgatgaagttgacggtaactttcatcagagctccggagttcactttcatcagagagttcacataggggaggtaccttatagctgtaatgcatgtggtaagagcttcagccagatctctagtcttcacaatcatcaaagagtccacacagaagagaaattctataaaattgagtgtgataaagacctcagtagaaattcattacttcacattcaccagagacttcacataggagagaagccttttaaatgtaatcagtgtggtaagagttttaatcggagttcagtacttcatgttcatcagagagtccacacaggagaaaaaccatataagtgtgatgagtgtggtaagggtttcagccagagctcaaatcttcgaattcatcagttagtacacacaggagagaagtcttataaatgtgaagactgtggtaaaggctttacccagcgctcaaatcttcaaattcatcagagagtgcatacaggagagaaaccttataaatgtgatgactgtggaaaggactttagtcacagctcagatcttcgcattcatcagagagtccatacaggggagaaaccctatacttgtcctgaatgtgggaagggcttcagtaagagttcaaagcttcacactcatcaaagagtacatactggagagaaaccctacaaatgtgaagagtgtggcaagggattcagtcagcgttcacatcttctcattcatcagagagtccatacaggagaaaagccctataaatgtcatgattgtggaaagggttttagtcacagttctaatcttcacattcatcagagggtccatacaggagagaagccttatcaatgtgctaagtgtggtaaaggtttcagtcatagctcagctcttcgaattcatcaaagagtccatgcaggagagaaaccttacaaatgccgtgaatattataagggatttgatcataattcacatcttcacaataatcatagaagaggaaacttataaatattgttcatttagttaacagctttaatcaaagtttacctaacctttaaaccctataaatcctgctgttaaggaaatcttataaataacacaagtaatcccaagcaacatttatagtttcccctatctcccactaagaattatttgcttcaaaaggagatctttagaaaaaaccctatatatttaaaattatagtgtatttttctttacctactataaatataatacagtcataaatatattaaacatttaaggagaaaactcttcattctatttcattctagtctttttttctgtgcattttaatgtgcatgaaattatattgtgtgttcaattttgtattttcactgtcttcaaaatatttacttaaattttggtttgaattgaaactggttggccaactgttaaacaacatctcttaactcccctaaaaactccctaggaagtaacagaaaagatggaaacacacagaacttaaaactcagttttggccggtagaattcaattgtttatggacaaaagccacctaataaaagataggaaagcatt

SEQ ID NO: 288310 - DNA, 481 bp, Homo sapiens
ttcttctttgcagcaaaacctcagggttttgagtctcgtattcacatctttttactaagaagggctcctccagactcctggtgtatatttgttggaggccttaagctgttcgtggcagtacattgcggagcatagaacgaaaccgggtgtggaacactgagtcccaaggatagccatcttcagagatacggctcatgacccaggtacatggtaagcagagagcatcacacctgagcagcattcttactcagctcaacagcaatatctgagcccaagtttcccattccaatcaccaggatgcgttttccctcaaatccatctggatgcttgtattggcggctatggaaatattggcctttgaacctctccataccttcagggggaagaagagagaagtctgtgagctccagagcaactatgtcaagctaatttcaataaaactgcattgccagcttttcctttctggagttaataatttgtt

SEQ ID NO: 288311 - DNA, 383 bp, Homo sapiens
ttcttctttgcagcaaaacctcagggttttgagtctcgtattcacatctttttactaagaagggctcctccagactcctggtgtatatttgttggaggccttaaggtacatggtaagcagagagcatcacacctgagcagcattcttactcagctcaacagcaatatctgagcccaagtttcccattccaatcaccaggatgcgttttccctcaaatccatctggatgcttgtattggcggctatggaaatattggcctttgaacctctccataccttcagggggaagaagagagaagtctgtgagctccagagcaactatgtcaagctaatttcaataaaactgcattgccagcttttcctttctggagttaataatttgtt

SEQ ID NO: 288312 - DNA, 737 bp, Homo sapiens
ccaggaaaggcctgcgggagggggtcgtccagccccgcgtccccggcccggggcaggacgaagccccccttcccgtcgctcccgcttccagcaggacggccaggcccgcggccagcgcccacagtccccgcccgccgccgccttctcaccagcagtcccggttggggcacttgcccagcatgtgccggcggcagaagtgcagctggtcgcaggcctggcactcgccgcgctggtagcgggcgcagaggcgcacagaggacacggccaccaccctccaggcggaggtgccgccaccgcccaccgcgccggccgccgcctcggcctccgcgtccccgaggccctcctgcgtctccacctcctgcagcaggaaacgctcgggcccggcgcgctgcagcacgtcccggagcctggcctccgacagctccacgtggccgcgcaggtccttcaggaacatgcggccgccgtgggcgcacagcaccttgaaacggggtctcctcatgttgcccaggctggtctcgaactcctcaagcgatccacctgcctcagcctcccagagcactggaattacaggcgtgagccaccccgcggggcctgctgagctttattggaaagtggctagtccgaattgagatgtgatataagtgtgaaatacacacactagattttgaggactgagaatgagaaaaagaatgtaaaatatctcactaactttatatgaatcacatgttaaacataat

SEQ ID NO: 288313 - DNA, 181 bp, Homo sapiens
ctccctggcttggcagcagatgcatacctgggaaggatgctaggtcatccgggaactctacctccttcaaatccctaaggactgtgctcccaatccgcttacgctcaaggaagaactgcctggaagccctccctggtaccataccccagccgatgagtatgtacccccagaagtacttccg

SEQ ID NO: 288314 - DNA, 870 bp, Homo sapiens
aaaggcttgttgtcacgctcttgtatagccagaatgggaggtgagaatttggctttggagagtttgtctttgttcctgctgttttatgtccctcatgtttccttttataattgttttctcaggtttgcaccttctgctccatctcctcaccacatcagcccccggagagttccagctccttcttcaatactgcaaagaacacagcctccctatacccagcagccatcaggttcacacctgaagtcctatcagccagaaacaaactcttcttttcaaccaaatggtatccatgtccatggtaagcaagaagctggcagtcccttgagttttgaaaagtgacattgtgctgttgcttttcatcttagttacctgtcgtggatttcagatgctctgttctacaccaggcttaggctttcatgacttgcctctaaaatttcacacttgataggcatgaaatcctatggtattttcctgactttggcctgatgatggtatgatttatgacacatcgcactggtcagctcaagttgctggttttttcattggccagggctctaacaccagcaatagcatcctgtttctaaacaatagacagcccatggagaaagaaatgacaggagttcttgtgcccaagcatgcctctgctctgctaggtttttgctctcattctcataggtccacatcctctccgtccttcaaggcgcaggtggaatgacacctcctctctgaagcccttcctgatcccccagctgatgtcatctctccaggctctaaactctgattttatatcgcctgtctttctctggtagtatttatgcttcctctaccttgtgttttacttatctgtgaataaaacatactttcactatt

SEQ ID NO: 288315 - DNA, 1062 bp, Homo sapiens
ttgcggtccagcacagagctccatccagacctgctcacagattgcctcaccgtgcagtccctgcagccggccacttcccctagagatgctgctgctgaagggaccgtgggacgctcccctggacccgggcctgacctctattcagctcccattttctccagcaattattcaagccgaagtggaacagctgctggggccgtaccacccccacatcctgtcagtcacccttctccaggacataatgtacaggggagccctcacaacccctcctcccagttacctccactcacagctgtggacgcaggagctgagaggtttgcaccttctgctccatctcctcaccacatcagcccccggagagttccagctccttcttcaatactgcaaagaacacagcctccctatacccagcagccatcaggttcacacctgaagtcctatcagccagaaacaaactcttcttttcaaccaaatggtatccatgtccatggtaagcaagaagctggcagtcccttgagttttgaaaagtgacattgtgctgttgcttttcatcttagttacctgtcgtggatttcagatgctctgttctacaccaggcttaggctttcatgacttgcctctaaaatttcacacttgataggcatgaaatcctatggtattttcctgactttggcctgatgatggtatgatttatgacacatcgcactggtcagctcaagttgctggttttttcattggccagggctctaacaccagcaatagcatcctgtttctaaacaatagacagcccatggagaaagaaatgacaggagttcttgtgcccaagcatgcctctgctctgctaggtttttgctctcattctcataggtccacatcctctccgtccttcaaggcgcaggtggaatgacacctcctctctgaagcccttcctgatcccccagctgatgtcatctctccaggctctaaactctgattttatatcgcctgtctttctctggtagtatttatgcttcctctaccttgtgttttacttatctgtgaataaaacatactttcactatt

SEQ ID NO: 288316 - DNA, 2753 bp, Homo sapiens
gaaggtgggtgtggagagggagagagacagagaacggaacaactgaagatttttggttggtttatgtaaggaaaatggaggggaacaccgatacaggtttctctgtaaggtagagccttagcccagggtcattgtcgaatgtgttttacgttggcatacaacatttaagggatggatgccatttttattatttctcctttcaatgaacttttccaattgtctaaccagatgtggattacagtggtttcatataagaggatttctaaatcaggattacagagcaaaaccctccaggggtgcgtgacaggttgggagctgtggtgggtccaggcagaaatggcttccctgggaagttgcggaagaggcgtctctggagacgtgcttcgtgaggagagaagctgaagtgttgcaaacaacactggttggggtgggtgaaacctgggaagagggggtgaaacctgggaagaaatggggtgtggcactagagttcataaatagtagctgtggttagttttttttttttttttttttttttgagacggagtcattgcccaggctggagactccgtctcaaaaaaaaaaaaaaaaaaagctgccatccttttttctttcactttctagtttactctcatcagcaagccttatcaataatactaccttcgaatgatcttccaatgcaatcatttctgatcatttctacttctcacacatgcaggtccaaggcatcattgtcccttgcctaactacaatagtgtcctaattgcttatttttatttttgaggaataacatatatacagtaaactataaaaacgtgaagcatatagatatatgaattacgtatgtatcaagtgtcaagataaagaaaactcagcattcctaaagcttccccatgtcacttctcaaacatcctaaaaagaaaaagaaaaaaaaatcctttctttctacagaggtacgtactactctacctttaatcaccatagacaagtttttactgcttttgaactttagaattgaatcatacagtttgtactcatttctacctaatttcagtcaacatgttgagattggtccatactgtttcacatagcaagtgtgccttattttctattattatgcagtatccgattgtatgattatatcacgaattttagcattttcgaaattcagatcatttccaggctttggctattaagaagtagcaactaaccttattacacgttttttttcttccttgcttagtagaaaaacaggctctttaacatttttaataaatctctcacaaactgctgctcctagattacaaaaagtcaaagccaattccttgaatctgaacttcaagtcaccataatagaaaccgaagctgctgtaccttacattctgaaaggtacctcaacaaaagcacatcaaggactgtttaaaacttctagtatttaaaaagatccatctttccttccaatgcctatggatgataacaataaaaggagaaccttaagagatctgctattgagtttgagaaggccaaatttaatgattccaaactccagccttaaatatttctgtagagactccgagaaattacctctcccttgtctccactcccactggcttcctcaagcgcagatgcctgggaccctgtatgattagtcaaacagtcttaccagtaccatcattatgcttctctaaagggctactagtgaaagaagctgctttaatttattttagtttttgccaatcttcagtccttagaaaagtcttaattatttaaaaaaaaaaagggttggggaggtggttaactgttctaaggcattcaacaagaggaaacaggtaccttttatgaaaaggactttcaagttaagtccacagtttaactgaaataactttacaagaacgtctccacataaaactcttaacaccttacccctggcagccggatagatgcgatctacatacaacacgtctcttaaaatgctctcacagaaacggtaataagatactcttaacttccttaagtcaaatccacattcggccgcgctgccacctgcagaattagctgaaggggaaacaataaaggtcctgccggacagccatgagcagccctggtgctgctccccggatgcccccgagccgagaagcgaaggccacgctgggaatgtcgtcctcggaggcagagtacggggaagggatggttctgagcaggtgggcatcatggaggctccagattctcgtgtagcagtcctggcccactgccaccacgattccctcttcctcgtgcacatgcaggggcagataggcggactcattcacgtgaccttcgtactgccttacacatttagtggccctcagatcccacagcttgatctttccagtcatgtctgatgccatcaggcattgctcttcttggaggatttgcacagaggtcactgctgagtcatggaacaggcgagtggccctccaccccttgcctcgatttctacaacgcagatcaatggcaaagatctccccggagcgacagccattaaacagcaaaggagccgtactagcaaactgctgggccaagacatcactgctggtatcaaatgactgctggtgtcccgtcgccacgctggtcaacaggacctgctgagacaagcctgcactaaagcagtgatatgcccgggtgttgagggaccacgcacaggaccaggcctctgggatctggaaactgcagagcatgccaggctggttaactcttgtgtgaacacttaagaaccgc

SEQ ID NO: 288317 - DNA, 780 bp, Homo sapiens
gaaggtgggtgtggagagggagagagacagagaacggaacaactgaagatttttggttggtttatgtaaggaaaatggaggggaacaccgatacaggtttctctgtaaggtagagccttagcccagggtcattgtcgaatgtgttttacgttggcatacaacatttaagggatggatgccatttttattatttctcctttcaatgaacttttccaattgtctaaccagatgtggattacagtggtttcatataagaggatttctaaatcaggattacagagcaaaaccctccaggggtgcgtgacaggttgggagctgtggtgggtccaggcagaaatggcttccctgggaagttgcggaagaggcgtctctggagacgtgcttcgtgaggagagaagctgaagtgttgcaaacaacactggttgggttgtttcctgtcagttatggagtgatgaggtcacgcacttcattctggccagtcattaatatgatttggcattctctgcatgccaggcaagagtgactgctcttcaggccagatcttccttcgagatggatgttatctcctttttaggaaggaggaaacagagagacctcgtaacttggcatggccacacaatgggaataaactgagtgaccaagaggctgaatatcttctccaaagccaaagaaccaggcagtggcagagatccaaacccaagcgatttgggtgccagggctcaagcacttccccatgcagccactgcctcgagaaataaaaagactcaccagacacttcct

SEQ ID NO: 288318 - DNA, 480 bp, Homo sapiens
tcttaagaaactggtcctttattccagaaggttcattagctgctgcggcagttagatgcagtggtccaggaacgtgagtggggatgtgtgtggacaagaatactcactggagacccttttttcttgccctagcagttgtttcctgtcagttatggagtgatgaggtcacgcacttcattctggccagtcattaatatgatttggcattctctgcatgccaggcaagagtgactgctcttcaggccagatcttccttcgagatggatgttatctcctttttaggaaggaggaaacagagagacctcgtaacttggcatggccacacagtgagtcacacagttagtaaagatggaattcatacccaggtctgcctgactctgggattacgaagaattacatggttccacctcagtcccaaggtcatctttgctgtgccaaaagggaaaactggaaataggggtggtcagagcaggaggtgct

SEQ ID NO: 288319 - DNA, 1873 bp, Homo sapiens
aggatttccgcagggcgggagctgtttatctcccggaagaaaacggctcctgtcacagaagtctcgtgattgctctgggagctttgcttagacacttgaaactacaggagaaagaaggatctagcgaaatatggctacagagagccctgctacgcgtcgggtccaggtggcagaacatcctaggttactgaagctaaaggagatgtttaactccaagtttggatctattcccaagttttatgttcgagcaccaggaagagtcaacataataggagagcatatagattattgtggatattctgttcttcctatggctgtagaacaagatgtgctaatagctgtagaacctgtgaaaacgtacgctctccaactggccaatacaaatcccttgtatccggacttcagtactagtgctaataacatccagattgataaaaccaagcctttgtggcacaactatttcttatgtggacttaaaggaattcaggaacactttggtcttagtaacctgactggaatgaactgcctggtagatggaaatatcccaccaagttctggcctctccagctccagtgctttggtctgttgtgctggcttggtgacgctcacagtgctgggaaggaatctatccaaggtggaacttgcagaaatctgtgccaagagtgagcgttacattggcactgaaggaggaggcatggaccagtctatatcatttcttgcagaagaaggaactgccaagttgatagaatttagtcctctgagggcaaccgatgtaaaactcccaagtggagcagtgtttgtgattgccaacagttgtgtggagatgaataaggcagcaacttcccatttcaatatcagggtgatggagtgtcggctggctgcgaagctcctggctaaatacaaaagcttgcaatgggacaaagtactgaggctggaggaggtgcaggctaaactagggattagtctagaagaaatgctgttggtcacagaagatgcccttcatcctgaaccctataaccctgaggagatctgcaggtgtctgggaattagcctggaggaactccgaacccaaatcctgagtccaaacactcaagatgtgctcatcttcaaactctatcagcgggcaaagcatgtgtacagcgaggctgcgcgagtgctccagtttaagaagatatgtgaagaagcacctgaaaacatggtccagctgctgggagagttgatgaaccagagccacatgagctgccgggacatgtatgagtgcagctgccccgagctggatcagctggtggacatctgtcggaagtttggggctcaagggtcacgacttactggagcaggatggggaggctgcacagtatcaatggtacctgcggacaagctgcccagctttctagcaaatgtgcacaaagcttattaccagaggagtgatggaagcttagcaccggagaagcaaagtttgtttgctaccaaacctggaggtggggctttggttttgcttgaggcctgaaaaaatgtaaaaagtctgagagaaactacttagggcacttaggaattggcaggactttctgtgccacagtaaattaatcttccttctgttttgtattatgatgaacggttgctattatatcaagatatattttcaaagaaatggttgaaagctctctatgcttcataatgattctttttccatcttaaaatatggttttactattaagagccaagatcatgcttggacagatcttttaagaataacttactgagatttattgatttgaagattttaaagatgaatggtaaaacacactcttaatactgattacatggattggacttgaattaaatatattgttacaattaaactgataccactgaa

SEQ ID NO: 288320 - DNA, 342 bp, Homo sapiens
ttcagttacataaactgttcctggtcagaagctggaaatggggaatgtgaacatgagttgtcactaaatatgtaaaacagattttcttacatgtgcatgtagatgattaagtaacaagaatgtatcctctcctgccactgtaatttgggtgtgccaccatacattgcttatgaaatattgtccagtctatataaaagaagctagagagagaattctcaattattttcagaaagaaaacctaccagtttatgtaggaacttctcaaagtcctgtttcacttcatgaggtttcttggtagcctttgcttggagtctaatcatggaataaagaaaatcagtaacc

SEQ ID NO: 288321 - DNA, 1820 bp, Homo sapiens
aggctggtacggtccgcaatggcccgtactttgcttagacacttgaaactacaggagaaagaaggatctagcgaaatatggctacagagagccctgctacgcgtcgggtccaggtggcagaacatcctaggttactgaagctaaaggagatgtttaactccaagtttggatctattcccaagttttatgttcgagcaccaggaagagtcaacataataggagagcatatagattattgtggatattctgttcttcctatggctgtagaacaagatgtgctaatagctgtagaacctgtgaaaacgtacgctctccaactggccaatacaaatcccttgtatccggacttcagtactagtgctaataacatccagattgataaaaccaagcctttgtggcacaactatttcttatgtggacttaaaggaattcaggaacactttggtcttagtaacctgactggaatgaactgcctggtagatggaaatatcccaccaagttctggcctctccagctccagtgctttggtctgttgtgctggcttggtgacgctcacagtgctgggaaggaatctatccaaggtggaacttgcagaaatctgtgccaagagtgagcgttacattggcactgaaggaggaggcatggaccagtctatatcatttcttgcagaagaaggaactgccaagttgatagaatttagtcctctgagggcaaccgatgtaaaactcccaagtggagcagtgtttgtgattgccaacagttgtgtggagatgaataaggcagcaacttcccatttcaatatcagggtgatggagtgtcggctggctgcgaagctcctggctaaatacaaaagcttgcaatgggacaaagtactgaggctggaggaggtgcaggctaaactagggattagtctagaagaaatgctgttggtcacagaagatgcccttcatcctgaaccctataaccctgaggagatctgcaggtgtctgggaattagcctggaggaactccgaacccaaatcctgagtccaaacactcaagatgtgctcatcttcaaactctatcagcgggcaaagcatgtgtacagcgaggctgcgcgagtgctccagtttaagaagatatgtgaagaagcacctgaaaacatggtccagctgctgggagagttgatgaaccagagccacatgagctgccgggacatgtatgagtgcagctgccccgagctggatcagctggtggacatctgtcggaagtttggggctcaagggtcacgacttactggagcaggatggggaggctgcacagtatcaatggtacctgcggacaagctgcccagctttctagcaaatgtgcacaaagcttattaccagaggagtgatggaagcttagcaccggagaagcaaagtttgtttgctaccaaacctggaggtggggctttggttttgcttgaggcctgaaaaaatgtaaaaagtctgagagaaactacttagggcacttaggaattggcaggactttctgtgccacagtaaattaatcttccttctgttttgtattatgatgaacggttgctattatatcaagatatattttcaaagaaatggttgaaagctctctatgcttcataatgattctttttccatcttaaaatatggttttactattaagagccaagatcatgcttggacagatcttttaagaataacttactgagatttattgatttgaagattttaaagatgaatggtaaaacacactcttaatactgattacatggattggacttgaattaaatatattgttacaattaaactgataccactgaa

SEQ ID NO: 288322 - DNA, 3154 bp, Homo sapiens
aggatttccgcagggcgggagctgtttatctcccggaagaaaacggctcctgtcacagaagtctcgtgattgctctgggagctttgcttagacacttgaaactacaggagaaagaaggatctagcgaaatatggctacagagagccctgctacgcgtcgggtccaggtggcagaacatcctaggttactgaagctaaaggagatgtttaactccaagtttggatctattcccaagttttatgttcgagcaccaggaagagtcaacataataggagagcatatagattattgtggatattctgttcttcctatggctgtagaacaagatgtgctaatagctgtagaacctgtgaaaacgtacgctctccaactggccaatacaaatcccttgtatccggacttcagtactagtgctaataacatccagattgataaaaccaagcctttgtggcacaactatttcttatgtggacttaaaggaattcaggaacactttggtcttagtaacctgactggaatgaactgcctggtagatggaaatatcccaccaagttctggcctctccagctccagtgctttggtctgttgtgctggcttggtgacgctcacagtgctgggaaggaatctatccaaggtggaacttgcagaaatctgtgccaagagtgagcgttacattggcactgaaggaggaggcatggaccagtctatatcatttcttgcagaagaaggaactgccaagttgatagaatttagtcctctgagggcaaccgatgtaaaactcccaagtggagcagtgtttgtgattgccaacagttgtgtggagatgaataaggcagcaacttcccatttcaatatcagggtgatggagtgtcggctggctgcgaagctcctggctaaatacaaaagcttgcaatgggacaaagtactgaggctggaggaggtgcaggctaaactagggattagtctagaagaaatgctgttggtcacagaagatgcccttcatcctgaaccctataaccctgaggagatctgcaggtgtctgggaattagcctggaggaactccgaacccaaatcctgagtccaaacactcaagatgtgctcatcttcaaactctatcagcgggcaaagcatgtgtacagcgaggctgcgcgagtgctccagtttaagaagatatgtgaagaagcacctgaaaacatggtccagctgctgggagagttgatgaaccagagccacatgagctgccgggacatgtatgagtgcagctgccccgagctggatcagctggtggacatctgtcggaagtttggggctcaagggtcacgacttactggagcaggatggggaggctgcacagtatcaatggtacctgcggacaagctgcccagctttctagcaaatgtgcacaaagcttattaccagaggagtgatggaagcttagcaccggagaagcaaagtttgtttgctaccaaacctggaggtggggctttggttttgcttgaggcctgaaaaaatgtaaaaagtctgagagaaactacttagggcacttaggaattggcaggactttctgtgccacagtaaattaatcttccttctgttttgtattatgatgaacggttgctattatatcaagatatattttcaaagaaatggttgaaagctctctatgcttcataatgattctttttccatcttaaaatatggttttactattaagagccaagatcatgcttggacagatcttttaagaataacttactgagatttattgatttgaagattttaaagatgaatggtaaaacacactcttaatactgattacatggattggacttgaattaaatatattgttacaattaaactgataccactgaattgtatgcattattcttgaatagagttcatttctggtttctcttagtattcttcttcctcaaagttgtagttgtctgttgatgatggtgatgatgatgatgatgacgatagtgatgccacacattctctctcaatttcagcttcggaacgctatgaaaataatacatgattaaagtttcacagatcttcttggacattgtataattgaatttgaatgtgagatttctccagttatcaagagactaaggatttttttttttttttgacaaaaggaggatacaggaagaaaattcagactcatttgaatatttgtaaaccatgtaatatataaataaccactttcaattcttttggccctgagctatctccattacttaatagaaaaactcagatgaaaaacactttaagactcttctattcacattgaaataaagaattatctagatgataattcagataattcagtttgttcatagaattactttcttatcactctttttctactactttttctcaaatacctctctaatccaagaggcacttccaagaaattccacacattccttatatcccttttttgcttgtctagcaaagcttgtttgtatatatgcaccccattgtaaagcaggtatgcaggtatgtgggtgaaagtgactatgaaaagacttaatgaattctgggatttgtaatggtattgatgggtatctctgtatgtatatcaagagtgggcagaaatgtttggctggtgatggcaaatgactggctttctcttgtggatggactataggaagcactttctgaattatgcaatgatttggaccaaaaagtattttgctgaaatactcaggtaattgagatagcaatggttttatggcatgaattatccaaaaaaatatcagaattacttattattctgtgatttcattagctcattaatgtttaactcacagattgggcatcaccatctagaatttcagtttaagggaggcctgcgcaaagctagttttatttcttaaaggataacagtcatacatagaatactaggaaagccaatattctatttaaaaataaacttctgatgcattttcattcttagcagaaaggtaaatgcttgagaaagcttgagtcaaatttgttaaaagaattttgagttctataaatccaaaaatctgaaacctgaatttatttaaatttataatcctttattttttaataccgtgccattttccacaaaggatttgtggttggtatataattctttaaagatacctggatcagtgt

SEQ ID NO: 288323 - DNA, 2731 bp, Homo sapiens
aggatttccgcagggcgggagctgtttatctcccggaagaaaacggctcctgtcacagaagtctcgtgattgctctgggagctttgcttagacacttgaaactacaggagaaagaaggatctagcgaaatatggctacagagagccctgctacgcgtcgggtccaggtggcagaacatcctaggttactgaagctaaaggagatgtttaactccaagtttggatctattcccaagttttatgttcgagcaccaggaagagtcaacataataggagagcatatagattattgtggatattctgttcttcctatggctgtagaacaagatgtgctaatagctgtagaacctgtgaaaacgtacgctctccaactggccaatacaaatcccttgtatccggacttcagtactagtgctaataacatccagattgataaaaccaagcctttgtggcacaactatttcttatgtggacttaaaggaattcaggaacactttggtcttagtaacctgactggaatgaactgcctggtagatggaaatatcccaccaagttctggcctctccagctccagtgctttggtctgttgtgctggcttggtgacgctcacagtgctgggaaggaatctatccaaggtggaacttgcagaaatctgtgccaagagtgagcgttacattggcactgaaggaggaggcatggaccagtctatatcatttcttgcagaagaaggaactgccaagttgatagaatttagtcctctgagggcaaccgatgtaaaactcccaagtggagcagtgtttgtgattgccaacagttgtgtggagatgaataaggcagcaacttcccatttcaatatcagggtgatggagtgtcggctggctgcgaagctcctggctaaatacaaaagcttgcaatgggacaaagtactgaggctggaggaggtgcaggctaaactagggattagtctagaagaaatgctgttggtcacagaagatgcccttcatcctgaaccctataaccctgaggagatctgcaggtgtctgggaattagcctggaggaactccgaacccaaatcctgagtccaaacactcaagatgtgctcatcttcaaactctatcagcgggcaaagcatgtgtacagcgaggctgcgcgagtgctccagtttaagaagatatgtgaagaagcacctgaaaacatggtccagctgctgggagagttgatgaaccagagccacatgagctgccgggacatgtatgagtgcagctgccccgagctggatcagctggtggacatctgtcggaagtttggggctcaagggtcacgacttactggagcaggatggggaggctgcacagtatcaatggtacctgcggacaagctgcccagctttctagcaaatgtgcacaaagcttattaccagaggagtgatggaagcttagcaccggagaagcaaagtttgtttgctaccaaacctggaggtggggctttggttttgcttgaggcctgaaaaaatgtaaaaagtctgagagaaactacttagggcacttaggaattggcaggactttctgtgccacagtaaattaatcttccttctgttttgtattatgatgaacggttgctattatatcaagatatattttcaaagaaatggttgaaagctctctatgcttcataatgattctttttccatcttaaaatatggttttactattaagagccaagatcatgcttggacagatcttttaagaataacttactgagatttattgatttgaagattttaaagatgaatggtaaaacacactcttaatactgattacatggattggacttgaattaaatatattgttacaattaaactgataccactgaattgtatgcattattcttgaatagagttcatttctggtttctcttagtattcttcttcctcaaagttgtagttgtctgttgatgatggtgatgatgatgatgatgacgatagtgatgccacacattctctctcaatttcagcttcggaacgctatgaaaataatacatgattaaagtttcacagatcttcttggacattgtataattgaatttgaatgtgagatttctccagttatcaagagactaaggatttttttttttttttgacaaaaggaggatacaggaagaaaattcagactcatttgaatatttgtaaaccatgtaatatataaataaccactttcaattcttttggccctgagctatctccattacttaatagaaaaactcagatgaaaaacactttaagactcttctattcacattgaaataaagaattatctagatgataattcagataattcagtttgttcatagaattactttcttatcactctttttctactactttttctcaaatacctctctaatccaagaggcacttccaagaaattccacacattccttatatcccttttttgcttgtctagcaaagcttgtttgtatatatgcaccccattgtaaagcaggtatgcaggtatgtgggtgaaagtgactatgaaaagacttaatgaattctgggatttgtaatggtattgatgggtatctctgtatgtatatcaagagtgggcagaaatgtttggctggtgatggcaaatgactggctttctcttgtggatggactataggaagcactttctgaattatgcaatgatttggaccaaatgccatgagataccataatccagggaccgtcgag

SEQ ID NO: 288324 - DNA, 2123 bp, Homo sapiens
aggatttccgcagggcgggagctgtttatctcccggaagaaaacggctcctgtcacagaagtctcgtgattgctctgggagctttgcttagacacttgaaactacaggagaaagaaggatctagcgaaatatggctacagagagccctgctacgcgtcgggtccaggtggcagaacatcctaggttactgaagctaaaggagatgtttaactccaagtttggatctattcccaagttttatgttcgagcaccaggaagagtcaacataataggagagcatatagattattgtggatattctgttcttcctatggctgtagaacaagatgtgctaatagctgtagaacctgtgaaaacgtacgctctccaactggccaatacaaatcccttgtatccggacttcagtactagtgctaataacatccagattgataaaaccaagcctttgtggcacaactatttcttatgtggacttaaaggaattcaggaacactttggtcttagtaacctgactggaatgaactgcctggtagatggaaatatcccaccaagttctggcctctccagctccagtgctttggtctgttgtgctggcttggtgacgctcacagtgctgggaaggaatctatccaaggtggaacttgcagaaatctgtgccaagagtgagcgttacattggcactgaaggaggaggcatggaccagtctatatcatttcttgcagaagaaggaactgccaagttgatagaatttagtcctctgagggcaaccgatgtaaaactcccaagtggagcagtgtttgtgattgccaacagttgtgtggagatgaataaggcagcaacttcccatttcaatatcagggtgatggagtgtcggctggctgcgaagctcctggctaaatacaaaagcttgcaatgggacaaagtactgaggctggaggaggtgcaggctaaactagggattagtctagaagaaatgctgttggtcacagaagatgcccttcatcctgaaccctataaccctgaggagatctgcaggtgtctgggaattagcctggaggaactccgaacccaaatcctgagtccaaacactcaagatgtgctcatcttcaaactctatcagcgggcaaagcatgtgtacagcgaggctgcgcgagtgctccagtttaagaagatatgtgaagaagcacctgaaaacatggtccagctgctgggagagttgatgaaccagagccacatgagctgccgggacatgtatgagtgcagctgccccgagctggatcagctggtggacatctgtcggaagtttggggctcaagggtcacgacttactggagcaggatggggaggctgcacagtatcaatggtacctgcggacaagctgcccagctttctagcaaatgtgcacaaagcttattaccagaggagtgatggaagcttagcaccggagaagcaaagtttgtttgctaccaaacctggaggtggggctttggttttgcttgaggcctgaaaaaatgtaaaaagtctgagagaaactacttagggcacttaggaattggcaggactttctgtgccacagtaaattaatcttccttctgttttgtattatgatgaacggttgctattatatcaagatatattttcaaagaaatggttgaaagctctctatgcttcataatgattctttttccatcttaaaatatggttttactattaagagccaagatcatgcttggacagatcttttaagaataacttactgagatttattgatttgaagattttaaagatgaatggtaaaacacactcttaatactgattacatggattggacttgaattaaatatattgttacaattaaactgataccactgaattgtatgcattattcttgaatagagttcatttctggtttctcttagtattcttcttcctcaaagttgtagttgtctgttgatgatggtgatgatgatgatgatgacgatagtgatgccacacattctctctcaatttcagcttcggaacgcagtttatgtaggaacttctcaaagtcctgtttcacttcatgaggtttcttggtagcctttgcttggagtctaatcatggaataaagaaaatcagtaacc

SEQ ID NO: 288325 - DNA, 1943 bp, Homo sapiens
cgtttcctccgaagtggttggtgccttagcaactaaagctggcaactgggacatcgtccggtgctgcaggtctcagccgaagggcgtcggaaactgcgctcgcatcgagcagtttccagcctcctgggtaaaggagcagtctcctcccttgcttgggactctggacgcatctcattccggtgaaagtaagggacagcttaggaccagaagcctttcgcggagaaaaggctgacatgcccgtcctatatgacaggttactgaagctaaaggagatgtttaactccaagtttggatctattcccaagttttatgttcgagcaccaggaagagtcaacataataggagagcatatagattattgtggatattctgttcttcctatggctgtagaacaagatgtgctaatagctgtagaacctgtgaaaacgtacgctctccaactggccaatacaaatcccttgtatccggacttcagtactagtgctaataacatccagattgataaaaccaagcctttgtggcacaactatttcttatgtggacttaaaggaattcaggaacactttggtcttagtaacctgactggaatgaactgcctggtagatggaaatatcccaccaagttctggcctctccagctccagtgctttggtctgttgtgctggcttggtgacgctcacagtgctgggaaggaatctatccaaggtggaacttgcagaaatctgtgccaagagtgagcgttacattggcactgaaggaggaggcatggaccagtctatatcatttcttgcagaagaaggaactgccaagttgatagaatttagtcctctgagggcaaccgatgtaaaactcccaagtggagcagtgtttgtgattgccaacagttgtgtggagatgaataaggcagcaacttcccatttcaatatcagggtgatggagtgtcggctggctgcgaagctcctggctaaatacaaaagcttgcaatgggacaaagtactgaggctggaggaggtgcaggctaaactagggattagtctagaagaaatgctgttggtcacagaagatgcccttcatcctgaaccctataaccctgaggagatctgcaggtgtctgggaattagcctggaggaactccgaacccaaatcctgagtccaaacactcaagatgtgctcatcttcaaactctatcagcgggcaaagcatgtgtacagcgaggctgcgcgagtgctccagtttaagaagatatgtgaagaagcacctgaaaacatggtccagctgctgggagagttgatgaaccagagccacatgagctgccgggacatgtatgagtgcagctgccccgagctggatcagctggtggacatctgtcggaagtttggggctcaagggtcacgacttactggagcaggatggggaggctgcacagtatcaatggtacctgcggacaagctgcccagctttctagcaaatgtgcacaaagcttattaccagaggagtgatggaagcttagcaccggagaagcaaagtttgtttgctaccaaacctggaggtggggctttggttttgcttgaggcctgaaaaaatgtaaaaagtctgagagaaactacttagggcacttaggaattggcaggactttctgtgccacagtaaattaatcttccttctgttttgtattatgatgaacggttgctattatatcaagatatattttcaaagaaatggttgaaagctctctatgcttcataatgattctttttccatcttaaaatatggttttactattaagagccaagatcatgcttggacagatcttttaagaataacttactgagatttattgatttgaagattttaaagatgaatggtaaaacacactcttaatactgattacatggattggacttgaattaaatatattgttacaattaaactgataccactgaa

SEQ ID NO: 288326 - DNA, 2065 bp, Homo sapiens
cgtttcctccgaagtggttggtgccttagcaactaaagctggcaactgggacatcgtccggtgctgcaggtctcagccgaagggcgtcggaaactgcgctcgcatcgagcagtttccagcctcctgggtaaaggagcagtctcctcccttgcttgggactctggacgcatctcattccggtgaaagtaagggacagcttaggaccagaagcctttcgcggagaaaaggctgacatgcccgtcctatatgacagatggagtcttgctttgttgcccagtctagagtgcagtggcatgatctcggctcactacaacctccgcctcctgggttcaagtgattctcctgcctcagcctccctagaagctggaattacaggttactgaagctaaaggagatgtttaactccaagtttggatctattcccaagttttatgttcgagcaccaggaagagtcaacataataggagagcatatagattattgtggatattctgttcttcctatggctgtagaacaagatgtgctaatagctgtagaacctgtgaaaacgtacgctctccaactggccaatacaaatcccttgtatccggacttcagtactagtgctaataacatccagattgataaaaccaagcctttgtggcacaactatttcttatgtggacttaaaggaattcaggaacactttggtcttagtaacctgactggaatgaactgcctggtagatggaaatatcccaccaagttctggcctctccagctccagtgctttggtctgttgtgctggcttggtgacgctcacagtgctgggaaggaatctatccaaggtggaacttgcagaaatctgtgccaagagtgagcgttacattggcactgaaggaggaggcatggaccagtctatatcatttcttgcagaagaaggaactgccaagttgatagaatttagtcctctgagggcaaccgatgtaaaactcccaagtggagcagtgtttgtgattgccaacagttgtgtggagatgaataaggcagcaacttcccatttcaatatcagggtgatggagtgtcggctggctgcgaagctcctggctaaatacaaaagcttgcaatgggacaaagtactgaggctggaggaggtgcaggctaaactagggattagtctagaagaaatgctgttggtcacagaagatgcccttcatcctgaaccctataaccctgaggagatctgcaggtgtctgggaattagcctggaggaactccgaacccaaatcctgagtccaaacactcaagatgtgctcatcttcaaactctatcagcgggcaaagcatgtgtacagcgaggctgcgcgagtgctccagtttaagaagatatgtgaagaagcacctgaaaacatggtccagctgctgggagagttgatgaaccagagccacatgagctgccgggacatgtatgagtgcagctgccccgagctggatcagctggtggacatctgtcggaagtttggggctcaagggtcacgacttactggagcaggatggggaggctgcacagtatcaatggtacctgcggacaagctgcccagctttctagcaaatgtgcacaaagcttattaccagaggagtgatggaagcttagcaccggagaagcaaagtttgtttgctaccaaacctggaggtggggctttggttttgcttgaggcctgaaaaaatgtaaaaagtctgagagaaactacttagggcacttaggaattggcaggactttctgtgccacagtaaattaatcttccttctgttttgtattatgatgaacggttgctattatatcaagatatattttcaaagaaatggttgaaagctctctatgcttcataatgattctttttccatcttaaaatatggttttactattaagagccaagatcatgcttggacagatcttttaagaataacttactgagatttattgatttgaagattttaaagatgaatggtaaaacacactcttaatactgattacatggattggacttgaattaaatatattgttacaattaaactgataccactgaa

SEQ ID NO: 288327 - DNA, 2018 bp, Homo sapiens
aggatttccgcagggcgggagctgtttatctcccggaagaaaacggctcctgtcacagaagtctcgtgattgctctgggagctttgcttagacacttgaaactacaggagaaagaaggatctagcgaaatatggctacagagagccctgctacgcgtcgggtccaggtggcagaacatcctaggttactgaagctaaaggagatgtttaactccaagtttggatctattcccaagttttatgttcgagcaccaggaagagtcaacataataggagagcatatagattattgtggatattctgttcttcctatggctgtagaacaagatgtgctaatagctgtagaacctgtgaaaacgtacgctctccaactggccaatacaaatcccttgtatccgtcttccgggctgcagggctccctcaggcagaggctatgacctgcagataggccacaccattcttggactggtcctgtagagcagggttccccaatccctgttactgcttcatggcctgttcagaagtgggccacacagcaggagggacttcagtactagtgctaataacatccagattgataaaaccaagcctttgtggcacaactatttcttatgtggacttaaaggaattcaggaacactttggtcttagtaacctgactggaatgaactgcctggtagatggaaatatcccaccaagttctggcctctccagctccagtgctttggtctgttgtgctggcttggtgacgctcacagtgctgggaaggaatctatccaaggtggaacttgcagaaatctgtgccaagagtgagcgttacattggcactgaaggaggaggcatggaccagtctatatcatttcttgcagaagaaggaactgccaagttgatagaatttagtcctctgagggcaaccgatgtaaaactcccaagtggagcagtgtttgtgattgccaacagttgtgtggagatgaataaggcagcaacttcccatttcaatatcagggtgatggagtgtcggctggctgcgaagctcctggctaaatacaaaagcttgcaatgggacaaagtactgaggctggaggaggtgcaggctaaactagggattagtctagaagaaatgctgttggtcacagaagatgcccttcatcctgaaccctataaccctgaggagatctgcaggtgtctgggaattagcctggaggaactccgaacccaaatcctgagtccaaacactcaagatgtgctcatcttcaaactctatcagcgggcaaagcatgtgtacagcgaggctgcgcgagtgctccagtttaagaagatatgtgaagaagcacctgaaaacatggtccagctgctgggagagttgatgaaccagagccacatgagctgccgggacatgtatgagtgcagctgccccgagctggatcagctggtggacatctgtcggaagtttggggctcaagggtcacgacttactggagcaggatggggaggctgcacagtatcaatggtacctgcggacaagctgcccagctttctagcaaatgtgcacaaagcttattaccagaggagtgatggaagcttagcaccggagaagcaaagtttgtttgctaccaaacctggaggtggggctttggttttgcttgaggcctgaaaaaatgtaaaaagtctgagagaaactacttagggcacttaggaattggcaggactttctgtgccacagtaaattaatcttccttctgttttgtattatgatgaacggttgctattatatcaagatatattttcaaagaaatggttgaaagctctctatgcttcataatgattctttttccatcttaaaatatggttttactattaagagccaagatcatgcttggacagatcttttaagaataacttactgagatttattgatttgaagattttaaagatgaatggtaaaacacactcttaatactgattacatggattggacttgaattaaatatattgttacaattaaactgataccactgaa

SEQ ID NO: 288328 - DNA, 1438 bp, Homo sapiens
acttagggctaggtacgaggctgggtgttgaatcggccgaggaggaattcaggaacactttggtcttagtaacctgactggaatgaactgcctggtagatggaaatatcccaccaagttctggcctctccagctccagtgctttggtctgttgtgctggcttggtgacgctcacagtgctgggaaggaatctatccaaggtggaacttgcagaaatctgtgccaagagtgagcgttacattggcactgaaggaggaggcatggaccagtctatatcatttcttgcagaagaaggaactgccaagttgatagaatttagtcctctgagggcaaccgatgtaaaactcccaagtggagcagtgtttgtgattgccaacagttgtgtggagatgaataaggcagcaacttcccatttcaatatcagggtgatggagtgtcggctggctgcgaagctcctggctaaatacaaaagcttgcaatgggacaaagtactgaggctggaggaggtgcaggctaaactagggattagtctagaagaaatgctgttggtcacagaagatgcccttcatcctgaaccctataaccctgaggagatctgcaggtgtctgggaattagcctggaggaactccgaacccaaatcctgagtccaaacactcaagatgtgctcatcttcaaactctatcagcgggcaaagcatgtgtacagcgaggctgcgcgagtgctccagtttaagaagatatgtgaagaagcacctgaaaacatggtccagctgctgggagagttgatgaaccagagccacatgagctgccgggacatgtatgagtgcagctgccccgagctggatcagctggtggacatctgtcggaagtttggggctcaagggtcacgacttactggagcaggatggggaggctgcacagtatcaatggtacctgcggacaagctgcccagctttctagcaaatgtgcacaaagcttattaccagaggagtgatggaagcttagcaccggagaagcaaagtttgtttgctaccaaacctggaggtggggctttggttttgcttgaggcctgaaaaaatgtaaaaagtctgagagaaactacttagggcacttaggaattggcaggactttctgtgccacagtaaattaatcttccttctgttttgtattatgatgaacggttgctattatatcaagatatattttcaaagaaatggttgaaagctctctatgcttcataatgattctttttccatcttaaaatatggttttactattaagagccaagatcatgcttggacagatcttttaagaataacttactgagatttattgatttgaagattttaaagatgaatggtaaaacacactcttaatactgattacatggattggacttgaattaaatatattgttacaattaaactgataccactgaa

SEQ ID NO: 288329 - DNA, 1678 bp, Homo sapiens
aggatttccgcagggcgggagctgtttatctcccggaagaaaacggctcctgtcacagaagtctcgtgattgctctgggagctttgcttagacacttgaaactacaggagaaagaaggatctagcgaaatatggctacagagagccctgctacgcgtcgggtccaggtggcagaacatcctaggttactgaagctaaaggagatgtttaactccaagtttggatctattcccaagttttatgttcgagcaccaggaagagtcaacataataggagagcatatagattattgtggatattctgttcttcctatggctgtagaacaagatgtgctaatagctgtagaacctgtgaaaacgtacgctctccaactggccaatacaaatcccttgtatccggacttcagtactagtgctaataacatccagattgataaaaccaagcctttgtggcacaactatttcttatgtggacttaaaggaattcaggaacactttggtcttagtaacctgactggaatgaactgcctggtagatggaaatatcccaccaagttctggcctctccagctccagtgctttggtctgttgtgctggcttggtgacgctcacagtgctgggaaggaatctatccaaggtggaacttgcagaaatctgtgccaagagtgagcgttacattggcactgaaggaggaggcatggaccagtctatatcatttcttgcagaagaaggaactgccaagttgatagaatttagtcctctgagggcaaccgatgtaaaactcccaagtggagcagtgtttgtgattgccaacagttgtgtggagatgaataaggcagcaacttcccatttcaatatcagggtgatggagtgtcggctggctgcgaagctcctggctaaatacaaaagcttgcaatgggacaaagtactgaggctggaggaggtgcaggctaaactagggattagtctagaagaaatgctgttggtcacagaagatgcccttcatcctgaaccctataaccctgaggagatctgcaggtgtctgggaattagcctggaggaactccgaacccaaatcctgagtccaaacactcaagatgtgctcatcttcaaactctatcagcgggcaaagcatgtgtacagcgaggctgcgcgagtgctccagtttaagaagatatgtgaagaagcacctgaaaacatggtccagctgctgggagagttgatgaaccagagccacatgagctgccgggacatgtatgagtgcagctgccccgagctggatcagctggtggacatctgtcggtgctttggaaataccagccagctcatgcatcttaagataatataaaatcaatggactctgacctccaaaattgaagagaacacgattaaactctggaccagtactactatagtgcgactgtaagaggaagaaaataatcaagacaacgattacttttgtgtttctaaaaaactgtgaataaaatataacttcatatttagcataaagttaccatttgatatattaaaataaaggaaattctacaaagcatcttcttaattagaggaatttaccaaagtatgagtctataagtacgtgcagtaaggctcttctactcttttgagttatcatcagacttgcatataggcaatagacattattcagtcttaagaacagaaa

SEQ ID NO: 288330 - DNA, 1955 bp, Homo sapiens
aggatttccgcagggcgggagctgtttatctcccggaagaaaacggctcctgtcacagaagtctcgtgattgctctgggagctttgcttagacacttgaaactacaggagaaagaaggatctagcgaaatatggctacagagagccctgctacgcgtcgggtccaggtggcagaacatcctaggttactgaagctaaaggagatgtttaactccaagtttggatctattcccaagttttatgttcgagcaccaggaagagtcaacataataggagagcatatagattattgtggatattctgttcttcctatggctgtagaacaagatgtgctaatagctgtagaacctgtgaaaacgtacgctctccaactggccaatacaaatcccttgtatccggacttcagtactagtgctaataacatccagattgataaaaccaagcctttgtggcacaactatttcttatgtggacttaaaggaattcaggaacactttggtcttagtaacctgactggaatgaactgcctggtagatggaaatatcccaccaagttctggcctctccagctccagtgctttggtctgttgtgctggcttggtgacgctcacagtgctgggaaggaatctatccaaggtggaacttgcagaaatctgtgccaagagtgagcgttacattggcactgaaggaggaggcatggaccagtctatatcatttcttgcagaagaaggaactgccaagttgatagaatttagtcctctgagggcaaccgatgtaaaactcccaagtggagcagtgtttgtgattgccaacagttgtgtggagatgaataaggcagcaacttcccatttcaatatcagggtgatggagtgtcggctggctgcgaagctcctggctaaatacaaaagcttgcaatgggacaaagtactgaggctggaggaggtgcaggctaaactagggattagtctagaagaaatgctgttggtcacagaagatgcccttcatcctgaaccctataaccctgaggagatctgcaggtgtctgggaattagcctggaggaactccgaacccaaatcctgagtccaaacactcaagatggcctgggaattttcataaattttccaaaattttcccagacccaccacaccagctcagcaactgttcagcatgggtgaaaatgtgctcatcttcaaactctatcagcgggcaaagcatgtgtacagcgaggctgcgcgagtgctccagtttaagaagatatgtgaagaagcacctgaaaacatggtccagctgctgggagagttgatgaaccagagccacatgagctgccgggacatgtatgagtgcagctgccccgagctggatcagctggtggacatctgtcggaagtttggggctcaagggtcacgacttactggagcaggatggggaggctgcacagtatcaatggtacctgcggacaagctgcccagctttctagcaaatgtgcacaaagcttattaccagaggagtgatggaagcttagcaccggagaagcaaagtttgtttgctaccaaacctggaggtggggctttggttttgcttgaggcctgaaaaaatgtaaaaagtctgagagaaactacttagggcacttaggaattggcaggactttctgtgccacagtaaattaatcttccttctgttttgtattatgatgaacggttgctattatatcaagatatattttcaaagaaatggttgaaagctctctatgcttcataatgattctttttccatcttaaaatatggttttactattaagagccaagatcatgcttggacagatcttttaagaataacttactgagatttattgatttgaagattttaaagatgaatggtaaaacacactcttaatactgattacatggattggacttgaattaaatatattgttacaattaaactgataccactgaa

SEQ ID NO: 288331 - DNA, 2041 bp, Homo sapiens
cgtttcctccgaagtggttggtgccttagcaactaaagctggcaactgggacatcgtccggtgctgcaggtctcagccgaagggcgtcggaaactgcgctcgcatcgagcagtttccagcctcctgggtaaaggagcagtctcctcccttgcttgggactctggacgcatctcattccggtgaaagtaagggacagcttaggaccagaagcctttcgcggagaaaaggctgacatgcccgtcctatatgacagtctagagtgcagtggcatgatctcggctcactacaacctccgcctcctgggttcaagtgattctcctgcctcagcctccctagaagctggaattacaggttactgaagctaaaggagatgtttaactccaagtttggatctattcccaagttttatgttcgagcaccaggaagagtcaacataataggagagcatatagattattgtggatattctgttcttcctatggctgtagaacaagatgtgctaatagctgtagaacctgtgaaaacgtacgctctccaactggccaatacaaatcccttgtatccggacttcagtactagtgctaataacatccagattgataaaaccaagcctttgtggcacaactatttcttatgtggacttaaaggaattcaggaacactttggtcttagtaacctgactggaatgaactgcctggtagatggaaatatcccaccaagttctggcctctccagctccagtgctttggtctgttgtgctggcttggtgacgctcacagtgctgggaaggaatctatccaaggtggaacttgcagaaatctgtgccaagagtgagcgttacattggcactgaaggaggaggcatggaccagtctatatcatttcttgcagaagaaggaactgccaagttgatagaatttagtcctctgagggcaaccgatgtaaaactcccaagtggagcagtgtttgtgattgccaacagttgtgtggagatgaataaggcagcaacttcccatttcaatatcagggtgatggagtgtcggctggctgcgaagctcctggctaaatacaaaagcttgcaatgggacaaagtactgaggctggaggaggtgcaggctaaactagggattagtctagaagaaatgctgttggtcacagaagatgcccttcatcctgaaccctataaccctgaggagatctgcaggtgtctgggaattagcctggaggaactccgaacccaaatcctgagtccaaacactcaagatgtgctcatcttcaaactctatcagcgggcaaagcatgtgtacagcgaggctgcgcgagtgctccagtttaagaagatatgtgaagaagcacctgaaaacatggtccagctgctgggagagttgatgaaccagagccacatgagctgccgggacatgtatgagtgcagctgccccgagctggatcagctggtggacatctgtcggaagtttggggctcaagggtcacgacttactggagcaggatggggaggctgcacagtatcaatggtacctgcggacaagctgcccagctttctagcaaatgtgcacaaagcttattaccagaggagtgatggaagcttagcaccggagaagcaaagtttgtttgctaccaaacctggaggtggggctttggttttgcttgaggcctgaaaaaatgtaaaaagtctgagagaaactacttagggcacttaggaattggcaggactttctgtgccacagtaaattaatcttccttctgttttgtattatgatgaacggttgctattatatcaagatatattttcaaagaaatggttgaaagctctctatgcttcataatgattctttttccatcttaaaatatggttttactattaagagccaagatcatgcttggacagatcttttaagaataacttactgagatttattgatttgaagattttaaagatgaatggtaaaacacactcttaatactgattacatggattggacttgaattaaatatattgttacaattaaactgataccactgaa

SEQ ID NO: 288332 - DNA, 1531 bp, Homo sapiens
gctcggttccctgtgctacctccacttacaggccaatacgatgcccttgtatccggacttcagtactagtgctaataacatccagattgataaaaccaagcctttgtggcacaactatttcttatgtggacttaaaggaattcaggaacactttggtcttagtaacctgactggaatgaactgcctggtagatggaaatatcccaccaagttctggcctctccagctccagtgctttggtctgttgtgctggcttggtgacgctcacagtgctgggaaggaatctatccaaggtggaacttgcagaaatctgtgccaagagtgagcgttacattggcactgaaggaggaggcatggaccagtctatatcatttcttgcagaagaaggaactgccaagttgatagaatttagtcctctgagggcaaccgatgtaaaactcccaagtggagcagtgtttgtgattgccaacagttgtgtggagatgaataaggcagcaacttcccatttcaatatcagggtgatggagtgtcggctggctgcgaagctcctggctaaatacaaaagcttgcaatgggacaaagtactgaggctggaggaggtgcaggctaaactagggattagtctagaagaaatgctgttggtcacagaagatgcccttcatcctgaaccctataaccctgaggagatctgcaggtgtctgggaattagcctggaggaactccgaacccaaatcctgagtccaaacactcaagatgtgctcatcttcaaactctatcagcgggcaaagcatgtgtacagcgaggctgcgcgagtgctccagtttaagaagatatgtgaagaagcacctgaaaacatggtccagctgctgggagagttgatgaaccagagccacatgagctgccgggacatgtatgagtgcagctgccccgagctggatcagctggtggacatctgtcggaagtttggggctcaagggtcacgacttactggagcaggatggggaggctgcacagtatcaatggtacctgcggacaagctgcccagctttctagcaaatgtgcacaaagcttattaccagaggagtgatggaagcttagcaccggagaagcaaagtttgtttgctaccaaacctggaggtggggctttggttttgcttgaggcctgaaaaaatgtaaaaagtctgagagaaactacttagggcacttaggaattggcaggactttctgtgccacagtaaattaatcttccttctgttttgtattatgatgaacggttgctattatatcaagatatattttcaaagaaatggttgaaagctctctatgcttcataatgattctttttccatcttaaaatatggttttactattaagagccaagatcatgcttggacagatcttttaagaataacttactgagatttattgatttgaagattttaaagatgaatggtaaaacacactcttaatactgattacatggattggacttgaattaaatatattgttacaattaaactgataccactgaa

SEQ ID NO: 288333 - DNA, 1910 bp, Homo sapiens
actccaggtcccctatcctgtcctctgcaacccaaacgtccaggaggatcatgacctgcggatcaggatttggtgggcgcgccttcagctgcatctcggcctgcgggccgcgccccggccgctgctgcatcaccgccgccccctaccgtggcatctcctgctaccgcggcctcaccgggggcttcggcagccacagcgtgtgcggaggctttcgggccggctcctgcggacgcagcttcggctaccgctccgggggcgtgtgcgggcccagtcccccatgcatcaccaccgtgtcggtcaacgagagcctcctcacgcccctcaacctggagatcgaccccaacgcgcagtgcgtgaagcaggaggagaaggagcagatcaagtccctcaacagcaggttcgcggccttcatcgacaaggtgcgcttcctggagcagcagaacaaactgctggagacaaagctgcagttctaccagaaccgcgagtgttgccagagcaacctggagcccctgtttgagggctacatcgagactctgcggcgggaggccgagtgcgtggaggccgacagcgggaggctggcctcagagcttaaccacgtgcaggaggtgctggagggctacaagaagaagtatgaggaggaggtttctctgagagcaacagctgagaacgagtttgtggctctgaagaaggatgtggactgcgcctacctccgcaagtcagacctggaggccaacgtggaggccctgatccaggagatcgacttcctgaggcggctgtatgaggaggagatccgcattctccagtcgcacatctcagacacctccgtggttgtcaagctggacaacagccgggacctgaacatggactgcatcattgccgagattaaggcacagtatgacgacattgtcacccgcagccgggccgaggccgagtcctggtaccgcagcaagtgtgaggagatgaaggccacggtgatcaggcacggggagaccctgcgccgcaccaaggaggagatcaacgagctgaaccgcatgatccagaggctgacggccgaggtggagaatgccaagtgccagaactccaagctggaggccgcggtggcccagtctgagcagcagggtgaggcggccctcagtgatgcccgctgcaagctggccgagctggagggcgccctgcagaaggccaagcaggacatggcctgcctgatcagggagtaccaggaggtgatgaactccaagctgggcctggacatcgagatcgccacctacaggcgcctgctggagggcgaggagcagaggctatgtgaaggcattggggctgtgaatgtctgtgtcagcagctcccggggcggggtcgtgtgcggggacctctgcgtgtcaggctcccggccagtgactggcagtgtctgcagcgctccgtgcaacgggaacgtggcggtgagcaccggcctgtgtgcgccctgcggccaattgaacaccacctgcggagggggttcctgcggcgtgggctcctgtggtatcagctccctgggtgtggggtcttgcggcagcagctgccggaaatgttaggcaccccaactcaagtcccaggccccaggcatctttcctgccctgccttgcttggcccatccagtccaggcgcctggagcaagtgctcagctacttctcctgcactttgaaagacccctcccactcctggcctcacatttctctgtgtgatcccccacttctgggctctgccaccccacagtgggaaaggccaccctagaaagaagtccgctggcacccataggaaggggcctcaggagcaggaagggccaggaccagaaccttgcccacggcaactgccttcctgcctctccccttcctcctctgctcttgatctgtgtttcaataaattaatgtagccaa

SEQ ID NO: 288334 - DNA, 645 bp, Homo sapiens
  misc_feature (21)..(21): n is a, c, g, or t
gcttctgcagtcacctaagcntcccctttcagaggctattaaggcattggggctgtgaatgtctgtgtcagcagctcccggggcggggtcgtgtgcggggacctctgcgtgtcaggctcccggccagtgactggcagtgtctgcagcgctccgtgcaacgggaacgtggcggtgagcaccggcctgtgtgcgccctgcggccaattgaacaccacctgcggagggggttcctgcggcgtgggctcctgtggtatcagctccctgggtgtggggtcttgcggcagcagctgccggaaatgttaggcaccccaactcaagtcccaggccccaggcatctttcctgccctgccttgcttggcccatccagtccaggcgcctggagcaagtgctcagctacttctcctgcactttgaaagacccctcccactcctggcctcacatttctctgtgtgatcccccacttctgggctctgccaccccacagtgggaaaggccaccctagaaagaagtccgctggcacccataggaaggggcctcaggagcaggaagggccaggaccagaaccttgcccacggcaactgccttcctgcctctccccttcctcctctgctcttgatctgtgtttcaataaattaatgtagccaa

SEQ ID NO: 288335 - DNA, 1777 bp, Homo sapiens
  misc_feature (1770)..(1770): n is a, c, g, or t
actccaggtcccctatcctgtcctctgcaacccaaacgtccaggaggatcatgacctgcggatcaggatttggtgggcgcgccttcagctgcatctcggcctgcgggccgcgccccggccgctgctgcatcaccgccgccccctaccgtggcatctcctgctaccgcggcctcaccgggggcttcggcagccacagcgtgtgcggaggctttcgggccggctcctgcggacgcagcttcggctaccgctccgggggcgtgtgcgggcccagtcccccatgcatcaccaccgtgtcggtcaacgagagcctcctcacgcccctcaacctggagatcgaccccaacgcgcagtgcgtgaagcaggaggagaaggagcagatcaagtccctcaacagcaggttcgcggccttcatcgacaaggtgcgcttcctggagcagcagaacaaactgctggagacaaagctgcagttctaccagaaccgcgagtgttgccagagcaacctggagcccctgtttgagggctacatcgagactctgcggcgggaggccgagtgcgtggaggccgacagcgggaggctggcctcagagcttaaccacgtgcaggaggtgctggagggctacaagaagaagtatgaggaggaggtttctctgagagcaacagctgagaacgagtttgtggctctgaagaaggatgtggactgcgcctacctccgcaagtcagacctggaggccaacgtggaggccctgatccaggagatcgacttcctgaggcggctgtatgaggaggagatccgcattctccagtcgcacatctcagacacctccgtggttgtcaagctggacaacagccgggacctgaacatggactgcatcattgccgagattaaggcacagtatgacgacattgtcacccgcagccgggccgaggccgagtcctggtaccgcagcaagtgtgaggagatgaaggccacggtgatcaggcacggggagaccctgcgccgcaccaaggaggagatcaacgagctgaaccgcatgatccagaggctgacggccgaggtggagaatgccaagtgccagaactccaagctggaggccgcggtggcccagtctgagcagcagggtgaggcggccctcagtgatgcccgctgcaagctggccgagctggagggcgccctgcagaaggccaagcaggacatggcctgcctgatcagggagtaccaggaggtgatgaactccaagctgggcctggacatcgagatcgccacctacaggcgcctgctggagggcgaggagcagaggctatgtgaaggcattggggctgtgaatgtctgtgtcagcagctcccggggcggggtcgtgtgcggggacctctgcgtgtcaggctcccggccagtgactggcagtgtctgcagcgctccgtgcaacgggaacgtggcggtgagcaccggcctgtgtgcgccctgcggccaattgaacaccacctgcggagggggttcctgcggcgtgggctcctgtggtatcagctccctgggtgtggggtcttgcggcagcagctgccggaaatgttaggcaccccaactcaagtcccaggccccaggcatctttcctgccctgccttgcttggcccatccagtccaggcgcctggagcaagtgctcagctacttctcctgcactttgaaagacccctcccactcctggcctcacatttctctgtgtgatcccccacttctgggctctgccaccccgtcgggagcgggatacctcaaggantcaacaa

SEQ ID NO: 288336 - DNA, 1506 bp, Homo sapiens
aggcgcagccgcgacctgggtgagtggctttgctgcgagcccacgcgccctttgcccagaggctcccagacccgcccagcgggaggaggggacggaccccactacttacagacattcaccgagccgacgccctcgcacagcctgcagggagagaaggcgagagggccaagggcctgactgtccacaaaaaaaaaggagcttcgagtgagaccaactgaccaactaggggaaagaaaccaagggcaaagaatgagctcacattctgggagtgttgtccttctgggagcaggagctgtatagctgccctccagctgtatcgctggcctccagccataggaaggctgagtgaccaatgggtcttctccactccccccacctctgaagcaagcaaacaagcaaaaatcctgaaagcaaggcataactgccccaagggataagtccttgctctctgcctaactcattcccacctgccacaatggaataccactttgggatgctcattggcactataatagaaaagcatgagttgatagtgtcatctatctgaagctgtccttatgggatacatctgaactcccaggtctagatggggccagggccagactaggaaaaagagaaggaatcctgagaagcacatgcagctacagctggaagggaagaagcactacccagaactccaagctggaggccgcggtggcccagtctgagcagcagggtgaggcggccctcagtgatgcccgctgcaagctggccgagctggagggcgccctgcagaaggccaagcaggacatggcctgcctgatcagggagtaccaggaggtgatgaactccaagctgggcctggacatcgagatcgccacctacaggcgcctgctggagggcgaggagcagaggctatgtgaaggcattggggctgtgaatgtctgtgtcagcagctcccggggcggggtcgtgtgcggggacctctgcgtgtcaggctcccggccagtgactggcagtgtctgcagcgctccgtgcaacgggaacgtggcggtgagcaccggcctgtgtgcgccctgcggccaattgaacaccacctgcggagggggttcctgcggcgtgggctcctgtggtatcagctccctgggtgtggggtcttgcggcagcagctgccggaaatgttaggcaccccaactcaagtcccaggccccaggcatctttcctgccctgccttgcttggcccatccagtccaggcgcctggagcaagtgctcagctacttctcctgcactttgaaagacccctcccactcctggcctcacatttctctgtgtgatcccccacttctgggctctgccaccccacagtgggaaaggccaccctagaaagaagtccgctggcacccataggaaggggcctcaggagcaggaagggccaggaccagaaccttgcccacggcaactgccttcctgcctctccccttcctcctctgctcttgatctgtgtttcaataaattaatgtagccaa

SEQ ID NO: 288337 - DNA, 1002 bp, Homo sapiens
actccaggtcccctatcctgtcctctgcaacccaaacgtccaggaggatcatgacctgcggatcaggatttggtgggcgcgccttcagctgcatctcggcctgcgggccgcgccccggccgctgctgcatcaccgccgccccctaccgtggcatctcctgctaccgcggcctcaccgggggcttcggcagccacagcgtgtgcggaggctttcgggccggctcctgcggacgcagcttcggctaccgctccgggggcgtgtgcgggcccagtcccccatgcatcaccaccgtgtcggtcaacgagagcctcctcacgcccctcaacctggagatcgaccccaacgcgcagtgcgtgaagcaggaggagaaggagcagatcaagtccctcaacagcaggttcgcggccttcatcgacaaggtgcgcttcctggagcagcagaacaaactgctggagacaaagctgcagttctaccagaaccgcgagtgttgccagagcaacctggagcccctgtttgagggctacatcgagactctgcggcgggaggccgagtgcgtggaggccgacagcgggaggctggcctcagagcttaaccacgtgcaggaggtgctggagggctacaagaagaagtatgaggaggaggtttctctgagagcaacagctgagaacgagtttgtggctctgaagaaggatgtggactgcgcctacctccgcaagtcagacctggaggccaacgtggaggccctgatccaggagatcgacttcctgaggcggctgtatgaggaggagatccgcattctccagtcgcacatctcagacacctccgtggttgtcaagctggacaacagccgggacctgaacatggactgcatcattgccgagattaaggcacagtatgacgacattgtcacccgcagccgggccgagccgtcagcctctggatcatgcggttcagctcgttgatctcctccttggtgcggcgcagggtctccccgtgcctgat

SEQ ID NO: 288338 - DNA, 1961 bp, Homo sapiens
actccaggtcccctatcctgtcctctgcaacccaaacgtccaggaggatcatgacctgcggatcaggatttggtgggcgcgccttcagctgcatctcggcctgcgggccgcgccccggccgctgctgcatcaccgccgccccctaccgtggcatctcctgctaccgcggcctcaccgggggcttcggcagccacagcgtgtgcggaggctttcgggccggctcctgcggacgcagcttcggctaccgctccgggggcgtgtgcgggcccagtcccccatgcatcaccaccgtgtcggtcaacgagagcctcctcacgcccctcaacctggagatcgaccccaacgcgcagtgcgtgaagcaggaggagaaggagcagatcaagtccctcaacagcaggttcgcggccttcatcgacaaggtgcgcttcctggagcagcagaacaaactgctggagacaaagctgcagttctaccagaaccgcgagtgttgccagagcaacctggagcccctgtttgagggctacatcgagactctgcggcgggaggccgagtgcgtggaggccgacagcgggaggctggcctcagagcttaaccacgtgcaggaggtgctggagggctacaagaagaagtatgaggaggaggtttctctgagagcaacagctgagaacgagtttgtggctctgaagaaggatgtggactgcgcctacctccgcaagtcagacctggaggccaacgtggaggccctgatccaggagatcgacttcctgaggcggctgtatgaggaggagatccgcattctccagtcgcacatctcagacacctccgtggttgtcaagctggacaacagccgggacctgaacatggactgcatcattgccgagattaaggcacagtatgacgacattgtcacccgcagccgggccgaggccgagtcctggtaccgcagcaagtgtgaggagatgaaggccacggtgatcaggcacggggagaccctgcgccgcaccaaggaggagatcaacgagctgaaccgcatgatccagaggctgacggccgaggtggagaatgccaagtgccagaactccaagctggaggccgcggtggcccagtctgagcagcagggtgaggcggccctcagtgatgcccgctgcaagctggccgagctggagggcgccctgcagaaggccaagcaggacatggcctgcctgatcagggagtaccaggaggtgatgaactccaagctgggcctggacatcgagatcgccacctacaggcgcctgctggagggcgaggagcagaggctatgtgaaggcattggggctgtgaatgtctgtgtcagcagctcccggggcggggtcgtgtgcggggacctctgcgtgtcaggctcccggccagtgactggcagtgtctgcagcgctccgtgcaacgggaacgtggcggtgagcaccggcctgtgtgcgccctgcggccaattgaacaccacctgcggagggggttcctgcggcgtgggctcctgtggtatcagctccctgggtgtggggtcttgcggcagcagctgccggaaatgttaggcaccccaactcaagtcccaggccccaggcatctttcctgccctgccttgcttggcccatccagtccaggcgcctggagcaagtgctcagctacttctcctgcactttgaaagacccctcccactcctggcctcacatttctctgtgtgatcccccacttctgggctctgccaccccacagtgggaaaggccaccctagaaagaagtccgctggcacccataggaaggggcctcaggagcaggaagggccaggaccagaaccttgcccacggcaactgccttcctgcctctccccttcctcctacctttggtctctgggtgtatggggacttttattttttttttatttttttttttttttatttttttttttttttttttttttttattaat

SEQ ID NO: 288339 - DNA, 1113 bp, Homo sapiens
gtgtggtgaaccttctgacatacatcgcgcgtctccctctgcgccgcgcatctacgttggacgtttccctgcatcattgccgagattaaggcacagtatgacgacattgtcacccgcagccgggccgaggccgagtcctggtaccgcagcaagtgtgaggagatgaaggccacggtgatcaggcacggggagaccctgcgccgcaccaaggaggagatcaacgagctgaaccgcatgatccagaggctgacggccgaggtggagaatgccaagtgccagaactccaagctggaggccgcggtggcccagtctgagcagcagggtgaggcggccctcagtgatgcccgctgcaagctggccgagctggagggcgccctgcagaaggccaagcaggacatggcctgcctgatcagggagtaccaggaggtgatgaactccaagctgggcctggacatcgagatcgccacctacaggcgcctgctggagggcgaggagcagaggctatgtgaaggcattggggctgtgaatgtctgtgtcagcagctcccggggcggggtcgtgtgcggggacctctgcgtgtcaggctcccggccagtgactggcagtgtctgcagcgctccgtgcaacgggaacgtggcggtgagcaccggcctgtgtgcgccctgcggccaattgaacaccacctgcggagggggttcctgcggcgtgggctcctgtggtatcagctccctgggtgtggggtcttgcggcagcagctgccggaaatgttaggcaccccaactcaagtcccaggccccaggcatctttcctgccctgccttgcttggcccatccagtccaggcgcctggagcaagtgctcagctacttctcctgcactttgaaagacccctcccactcctggcctcacatttctctgtgtgatcccccacttctgggctctgccaccccacagtgggaaaggccaccctagaaagaagtccgctggcacccataggaaggggcctcaggagcaggaagggccaggaccagaaccttgcccacggcaactgccttcctgcctctccccttcctcctctgctcttgatctgtgtttcaataaattaatgtagccaa

SEQ ID NO: 288340 - DNA, 641 bp, Homo sapiens
  misc_feature (43)..(43): n is a, c, g, or t
gtagactcaagagcatccccggttcgaggctatgtgaaggcanttggggctttaatgtctgtgtcagcagctcccggggcggggtcgtgtgcggggacctctgcgtgtcaggctcccggccagtgactggcagtgtctgcagcgctccgtgcaacgggaacgtggcggtgagcaccggcctgtgtgcgccctgcggccaattgaacaccacctgcggagggggttcctgcggcgtgggctcctgtggtatcagctccctgggtgtggggtcttgcggcagcagctgccggaaatgttaggcaccccaactcaagtcccaggccccaggcatctttcctgccctgccttgcttggcccatccagtccaggcgcctggagcaagtgctcagctacttctcctgcactttgaaagacccctcccactcctggcctcacatttctctgtgtgatcccccacttctgggctctgccaccccacagtgggaaaggccaccctagaaagaagtccgctggcacccataggaaggggcctcaggagcaggaagggccaggaccagaaccttgcccacggcaactgccttcctgcctctccccttcctcctctgctcttgatctgtgtttcaataaattaatgtagccaa

SEQ ID NO: 288341 - DNA, 2314 bp, Homo sapiens
tcgacccacgcgtccgcggacgcgtgggtcgacccacgcgtcgcgtgtagaatgtggggcgcctgtaaagttaaggttcacgattccttggccaccatttccatcactctgagacggtacctgagattgggggcgaccatggcaaaaagcaagttcgagtacgtgagggacttcgaggctgacgacacctgcctggcacactgctgggtggtagtgcggctggacggccggaatttccatcggtttgctgagaagcacaactttgcaaaacccaatgacagccgtgctctccagctgatgaccaaatgtgcgcagactgtgatggaagaactagaggatattgtgatcgcgtatggacagagtgatgagtacagctttgtgttcaagcggaaaaccaattggtttaaaagaagagccagtaagttcatgactcacgtggcctcccagtttgcctccagctatgtgttttattggcgggattactttgaggaccagccccttctgtatcccccaggctttgacggaagagtcgtggtgtatcccagcaaccagactttaaaggactacctcagctggcgacaagcagattgtcacatcaataatctttataatacagttttctgggcacttatacaacaatctggactaacaccagtacaagcccaagggagattacagggaactcttgcagcagacaagaatgagattttgttttctgaattcaacatcaactataataatgagctgccgatgtataggaaagggactgtgttgatatggcagaaggtggatgaagtgatgacaaaagaaattaagctgccaacagaaatggaaggaaaaaagatggcagtgacccggaccaggacaaagccagtgcccttgcactgcgatatcatcggggatgctttctggaaggaacatccagagattctagatgaagacagctgacccttttgcgcttcagttctggtgtgcttaaccatgcaagccctcccacctcccagggctccttgccttaggtggctgtagcatccctaccacccaggacactggtgcgaatgacacaactcaagttgggaggggaacagggaaggaagggatggatgggggtggtgtatcttactctgtttaagcagaacaccttgtttgcggtgttggaacatggttcctttggcagaagtgctttttttttaatcgcagtactatttttataaagcaagaactattccatgccttggagaatgaatcatttttagattgtgacataaatcttgtaaaaacctgtcagttattttcatctatgagagaagaggagcccaaactctcgcccacctgttcttaaccagaaaacccactgactttgaaaatctcacctctgccacccatctacttgcattcgtctttggcagacctcaagataaatatgggttaatgcctgcatgatgcctctgaattcaggaattgcagggaaaactcggggctttgtgccagtctctaagttggcaactttggctgaacaaatgagtagtggcttcagtgtccttgcgtacacattctgtggattgatttaatggagttgtcagcatgatcatcatcttctagccaggggcatagttgccaaggccatttacctctttctaagaagaaacatttaccccatgtactcaagacatttcagttttaaaagtcactttcctattagacttcttgaaaaacattctcacatagcctctatgtaatcagacaaatgacatttgatttcaagagcagaggggtaaacatcctctgctaatcgacaggtagcaggtgtcagaggaggcataatattaatagcgccaccttctgttgggtcagtggagatgggtgaggaacagcacagagcagcagggatcatcacatgcagccaaacttggcctctgaagggggaaggtagtgggaataggtggtgagagaactcacatttttctcttgtcctggttttatatttcggagggaaaggattatttggccccattaagaattaagaggctgggtgcggtggctcacgtctgtaatcccagcaccttgggaggcccaggcaggcagatcacctgaggtcgggagttcgagaccagcgtgaccaacgtggagaaacccccgtctctactaaaaatacaaaaaattagctgggcatggtggtgcatgcctgtgattccagctacttgggaggttgaggcaggagaatcatttgaactcaggaggcggaagttgcggtgagccaagattgtgccattgcactccagcctgggcaacgagcgaaactacatctcaaaaa

SEQ ID NO: 288342 - DNA, 2257 bp, Homo sapiens
tcgacccacgcgtccgcggacgcgtgggtcgacccacgcgtcgcgtgtagaatgtggggcgcctgtaaagttaaggttcacgattccttggccaccatttccatcactctgagacggtacctgagattgggggcgaccatggcaaaaagcaagttcgagtacgtgagggacttcgaggctgacgacacctgcctggcacactgctgggtggtagtgcggctggacggccggaatttccatcggtttgctgagaagcacaactttgcaaaacccaatgacagccgtgctctccagctgatgaccaaatgtgcgcagactgtgatggaagaactagaggatattgtgatcgcgtatggacagagtgatgagtacagctttgtgttcaagcggaaaaccaattggtttaaaagaagagccagtaagttcatgactcacgtggcctcccagtttgcctccagctatgtgttttattggcgggattactttgaggaccagccccttctgtatcccccaggctttgacggaagagtcgtggtgtatcccagcaaccagactttaaaggactacctcagctggcgacaagcagattgtcacatcaataatctttataatacagttttctgggcacttatacaacaatctggactaacaccagtacaagcccaagggagattacagggaactcttgcagcagacaagaatgagattttgttttctgaattcaacatcaactataataatgagctgccgatgtataggaaagggactgtgttgatatggcagaaggtggatgaagtgatgacaaaagaaattaagctgccaacagaaatggaaggaaaaaagatggcagtgacccggaccaggacaaagccacctcccacctcccagggctccttgccttaggtggctgtagcatccctaccacccaggacactggtgcgaatgacacaactcaagttgggaggggaacagggaaggaagggatggatgggggtggtgtatcttactctgtttaagcagaacaccttgtttgcggtgttggaacatggttcctttggcagaagtgctttttttttaatcgcagtactatttttataaagcaagaactattccatgccttggagaatgaatcatttttagattgtgacataaatcttgtaaaaacctgtcagttattttcatctatgagagaagaggagcccaaactctcgcccacctgttcttaaccagaaaacccactgactttgaaaatctcacctctgccacccatctacttgcattcgtctttggcagacctcaagataaatatgggttaatgcctgcatgatgcctctgaattcaggaattgcagggaaaactcggggctttgtgccagtctctaagttggcaactttggctgaacaaatgagtagtggcttcagtgtccttgcgtacacattctgtggattgatttaatggagttgtcagcatgatcatcatcttctagccaggggcatagttgccaaggccatttacctctttctaagaagaaacagaattatgtgtatatatgagagaaagaaacaagaatgcgtgaatgaggatgaagaaacatttaccccatgtactcaagacatttcagttttaaaagtcactttcctattagacttcttgaaaaacattctcacatagcctctatgtaatcagacaaatgacatttgatttcaagagcagaggggtaaacatcctctgctaatcgacaggtagcaggtgtcagaggaggcataatattaatagcgccaccttctgttgggtcagtggagatgggtgaggaacagcacagagcagcagggatcatcacatgcagccaaacttggcctctgaagggggaaggtagtgggaataggtggtgagagaactcacatttttctcttgtcctggttttatatttcggagggaaaggattatttggccccattaagaattaagaggctgggtgcggtggctcacgtctgtaatcccagcaccttgggaggcccaggcaggcagatcacctgaggtcgggagttcgagaccagcgtgaccaacgtggagaaacccccgtctctactaaaaatacaaaaaattagctgggcatggtggtgcatgcctgtgattccagctacttgggaggttgaggcaggagaatcatttgaactcaggaggcggaagttgcggtgagccaagattgtgccattgcactccagcctgggcaacgagcgaaactacatctcaaaaa

SEQ ID NO: 288343 - DNA, 2333 bp, Homo sapiens
tcgacccacgcgtccgcggacgcgtgggtcgacccacgcgtcgcgtgtagaatgtggggcgcctgtaaagttaaggttcacgattccttggccaccatttccatcactctgagacggtacctgagattgggggcgaccatggcaaaaagcaagttcgagtacgtgagggacttcgaggctgacgacacctgcctggcacactgctgggtggtagtgcggctggacggccggaatttccatcggtttgctgagaagcacaactttgcaaaacccaatgacagccgtgctctccagctgatgaccaaatgtgcgcagactgtgatggaagaactagaggatattgtgatcgcgtatggacagagtgatgagtacagctttgtgttcaagcggaaaaccaattggtttaaaagaagagccagtatgtgttttattggcgggattactttgaggaccagccccttctgtatcccccaggctttgacggaagagtcgtggtgtatcccagcaaccagactttaaaggactacctcagctggcgacaagcagattgtcacatcaataatctttataatacagttttctgggcacttatacaacaatctggactaacaccagtacaagcccaagggagattacagggaactcttgcagcagacaagaatgagattttgttttctgaattcaacatcaactataataatgagctgccgatgtataggaaagggactgtgttgatatggcagaaggtggatgaagtgatgacaaaagaaattaagctgccaacagaaatggaaggaaaaaagatggcagtgacccggaccaggacaaagccagtgcccttgcactgcgatatcatcggggatgctttctggaaggaacatccagagattctagatgaagacagctgacccttttgcgcttcagttctggtgtgcttaaccatgcaagccctcccacctcccagggctccttgccttaggtggctgtagcatccctaccacccaggacactggtgcgaatgacacaactcaagttgggaggggaacagggaaggaagggatggatgggggtggtgtatcttactctgtttaagcagaacaccttgtttgcggtgttggaacatggttcctttggcagaagtgctttttttttaatcgcagtactatttttataaagcaagaactattccatgccttggagaatgaatcatttttagattgtgacataaatcttgtaaaaacctgtcagttattttcatctatgagagaagaggagcccaaactctcgcccacctgttcttaaccagaaaacccactgactttgaaaatctcacctctgccacccatctacttgcattcgtctttggcagacctcaagataaatatgggttaatgcctgcatgatgcctctgaattcaggaattgcagggaaaactcggggctttgtgccagtctctaagttggcaactttggctgaacaaatgagtagtggcttcagtgtccttgcgtacacattctgtggattgatttaatggagttgtcagcatgatcatcatcttctagccaggggcatagttgccaaggccatttacctctttctaagaagaaacagaattatgtgtatatatgagagaaagaaacaagaatgcgtgaatgaggatgaagaaacatttaccccatgtactcaagacatttcagttttaaaagtcactttcctattagacttcttgaaaaacattctcacatagcctctatgtaatcagacaaatgacatttgatttcaagagcagaggggtaaacatcctctgctaatcgacaggtagcaggtgtcagaggaggcataatattaatagcgccaccttctgttgggtcagtggagatgggtgaggaacagcacagagcagcagggatcatcacatgcagccaaacttggcctctgaagggggaaggtagtgggaataggtggtgagagaactcacatttttctcttgtcctggttttatatttcggagggaaaggattatttggccccattaagaattaagaggctgggtgcggtggctcacgtctgtaatcccagcaccttgggaggcccaggcaggcagatcacctgaggtcgggagttcgagaccagcgtgaccaacgtggagaaacccccgtctctactaaaaatacaaaaaattagctgggcatggtggtgcatgcctgtgattccagctacttgggaggttgaggcaggagaatcatttgaactcaggaggcggaagttgcggtgagccaagattgtgccattgcactccagcctgggcaacgagcgaaactacatctcaaaaa

SEQ ID NO: 288344 - DNA, 400 bp, Homo sapiens
ctgtaaagttaaggttcacgattccttggccaccatttccatcactctgagacggtacctgagattgggggcgaccatggcaaaaagcaagttcgagtacgtgagggacttcgaggctgacgacacctgcctggcacactgctgggtggtagtgcggctggacggccggaatttccatcggtgagcgagctcgactcggggcgtcgcgatgcgccagcgcttccggggaatccagcttcttcccttgcaagtcctcccgcccgctccagtcacggttaccagggtaacgcggtagccaatgagtgcgcagcatggagcattgccccgccctgcgtgttggctaggacagtgcctgaacgctggctgttagcgtaattgaatgggcgatgtgctcccgtga

SEQ ID NO: 288345 - DNA, 1229 bp, Homo sapiens
tcgacccacgcgtccgcggacgcgtgggtcgacccacgcgtcgcgtgtagaatgtggggcgcctgtaaagttaaggttcacgattccttggccaccatttccatcactctgagacggtacctgagattgggggcgaccatggcaaaaagcaagttcgagtacgtgagggacttcgaggctgacgacacctgcctggcacactgctgggtggtagtgcggctggacggccggaatttccatcggtttgctgagaagcacaactttgcaaaacccaatgacagccgtgctctccagctgatgaccaaatgtgcgcagactgtgatggaagaactagaggatattgtgatcgcgtatggacagagtgatgagtacagctttgtgttcaagcggaaaaccaattggtttaaaagaagagccagtaagttcatgactcacgtggcctcccagtttgcctccagctatgtgttttattggcgggattactttgaggaccagccccttctgtatcccccaggctttgacggaagagtcgtggtgtatcccagcaaccagactttaaaggactacctcagctggcgacaagcagattgtcacatcaataatctttataatacagttttctgggcacttatacaacaatctggactaacaccagtacaagcccaagggagattacagggaactcttgcagcagacaagaatgagattttgttttctgaattcaacatcaactataataatgagctgccgatgtataggaaagggactgtgttgatatggcagaaggtggatgaagtgatgacaaaagaaattaagctgccaacagaaatggaaggaaaaaagatggcagtgacccggaccaggacaaagccagtgcccttgcactgcgatatcatcggggatgctttctggaaggaacatccagagattctagatgaagacagctgacccttttgcgcttcagttctggtgtgcttaaccatgcaagccctcccacctcccagggctccttgccttaggtggctgtagcatccctaccacccaggacactggtgcgaatgacacaactcaagttgggaggggaacagggaaggaagggatggatgggggtggtgtatcttactctgtttaagcagaacaccttgtttgcggtgttggaacatggttcctttggcagaagtgctttttttttaatcgcagtactatttttataaagcaagaactattcc

SEQ ID NO: 288346 - DNA, 2324 bp, Homo sapiens
tcgacccacgcgtccgcggacgcgtgggtcgacccacgcgtcgcgtgtagaatgtggggcgcctgtaaagttaaggttcacgattccttggccaccatttccatcactctgagacggtacctgagattgggggcgaccatggcaaaaagcaagttcgagtacgtgagggacttcgaggctgacgacacctgcctggcacactgctgggtggtagtgcggctggacggccggaatttccatcggtttgctgagaagcacaactttgcaaaacccaatgacagccgtgctctccagctgatgaccaaatgtgcgcagactgtgatggaagaactagaggatattgtgatcgcgtatggacagagtgatgagtacagctttgtgttcaagcggaaaaccaattggtttaaaagaagagccagtaagttcatgactcacgtggcctcccagtttgcctccagctatgtgttttattggcgggattactttgaggaccagccccttctgtatcccccaggctttgacggaagagtcgtggtgtatcccagcaaccagactttaaaggactacctcagctggcgacaagcagattgtcacatcaataatctttataatacagttttctgggcacttatacaacaatctggactaacaccagtacaagcccaagggagattacagggaactcttgcagcagacaagaatgagattttgttttctgaattcaacatcaactataataatgagctgccgatgtataggaaagggactgtgttgatatggcagaaggtggatgaagtgatgacaaaagaaattaagctgccaacagaaatggaaggaaaaaagatggcagtgacccggaccaggacaaagccagtgcccttgcactgcgatatcatcggggatgctttctggaaggaacatccagagattctagatgaagacagctgacccttttgcgcttcagttctggtgtgcttaaccatgcaagccacccaggacactggtgcgaatgacacaactcaagttgggaggggaacagggaaggaagggatggatgggggtggtgtatcttactctgtttaagcagaacaccttgtttgcggtgttggaacatggttcctttggcagaagtgctttttttttaatcgcagtactatttttataaagcaagaactattccatgccttggagaatgaatcatttttagattgtgacataaatcttgtaaaaacctgtcagttattttcatctatgagagaagaggagcccaaactctcgcccacctgttcttaaccagaaaacccactgactttgaaaatctcacctctgccacccatctacttgcattcgtctttggcagacctcaagataaatatgggttaatgcctgcatgatgcctctgaattcaggaattgcagggaaaactcggggctttgtgccagtctctaagttggcaactttggctgaacaaatgagtagtggcttcagtgtccttgcgtacacattctgtggattgatttaatggagttgtcagcatgatcatcatcttctagccaggggcatagttgccaaggccatttacctctttctaagaagaaacagaattatgtgtatatatgagagaaagaaacaagaatgcgtgaatgaggatgaagaaacatttaccccatgtactcaagacatttcagttttaaaagtcactttcctattagacttcttgaaaaacattctcacatagcctctatgtaatcagacaaatgacatttgatttcaagagcagaggggtaaacatcctctgctaatcgacaggtagcaggtgtcagaggaggcataatattaatagcgccaccttctgttgggtcagtggagatgggtgaggaacagcacagagcagcagggatcatcacatgcagccaaacttggcctctgaagggggaaggtagtgggaataggtggtgagagaactcacatttttctcttgtcctggttttatatttcggagggaaaggattatttggccccattaagaattaagaggctgggtgcggtggctcacgtctgtaatcccagcaccttgggaggcccaggcaggcagatcacctgaggtcgggagttcgagaccagcgtgaccaacgtggagaaacccccgtctctactaaaaatacaaaaaattagctgggcatggtggtgcatgcctgtgattccagctacttgggaggttgaggcaggagaatcatttgaactcaggaggcggaagttgcggtgagccaagattgtgccattgcactccagcctgggcaacgagcgaaactacatctcaaaaa

SEQ ID NO: 288347 - DNA, 2278 bp, Homo sapiens
tcgacccacgcgtccgcggacgcgtgggtcgacccacgcgtcgcgtgtagaatgtggggcgcctgtaaagttaaggttcacgattccttggccaccatttccatcactctgagacggtacctgagattgggggcgaccatggcaaaaagcaagttcgagtacgtgagggacttcgaggctgacgacacctgcctggcacactgctgggtggtagtgcggctggacggccggaatttccatcggtttgctgagaagcacaactttgcaaaacccaatgacagccgtgctctccagctgatgaccaaatgtgcgcagactgtgatggaagaactagaggatattgtgatcgcgtatggacagagtgatgagtacagctttgtgttcaagcggaaaaccaattggtttaaaagaagagccaggctttgacggaagagtcgtggtgtatcccagcaaccagactttaaaggactacctcagctggcgacaagcagattgtcacatcaataatctttataatacagttttctgggcacttatacaacaatctggactaacaccagtacaagcccaagggagattacagggaactcttgcagcagacaagaatgagattttgttttctgaattcaacatcaactataataatgagctgccgatgtataggaaagggactgtgttgatatggcagaaggtggatgaagtgatgacaaaagaaattaagctgccaacagaaatggaaggaaaaaagatggcagtgacccggaccaggacaaagccagtgcccttgcactgcgatatcatcggggatgctttctggaaggaacatccagagattctagatgaagacagctgacccttttgcgcttcagttctggtgtgcttaaccatgcaagccctcccacctcccagggctccttgccttaggtggctgtagcatccctaccacccaggacactggtgcgaatgacacaactcaagttgggaggggaacagggaaggaagggatggatgggggtggtgtatcttactctgtttaagcagaacaccttgtttgcggtgttggaacatggttcctttggcagaagtgctttttttttaatcgcagtactatttttataaagcaagaactattccatgccttggagaatgaatcatttttagattgtgacataaatcttgtaaaaacctgtcagttattttcatctatgagagaagaggagcccaaactctcgcccacctgttcttaaccagaaaacccactgactttgaaaatctcacctctgccacccatctacttgcattcgtctttggcagacctcaagataaatatgggttaatgcctgcatgatgcctctgaattcaggaattgcagggaaaactcggggctttgtgccagtctctaagttggcaactttggctgaacaaatgagtagtggcttcagtgtccttgcgtacacattctgtggattgatttaatggagttgtcagcatgatcatcatcttctagccaggggcatagttgccaaggccatttacctctttctaagaagaaacagaattatgtgtatatatgagagaaagaaacaagaatgcgtgaatgaggatgaagaaacatttaccccatgtactcaagacatttcagttttaaaagtcactttcctattagacttcttgaaaaacattctcacatagcctctatgtaatcagacaaatgacatttgatttcaagagcagaggggtaaacatcctctgctaatcgacaggtagcaggtgtcagaggaggcataatattaatagcgccaccttctgttgggtcagtggagatgggtgaggaacagcacagagcagcagggatcatcacatgcagccaaacttggcctctgaagggggaaggtagtgggaataggtggtgagagaactcacatttttctcttgtcctggttttatatttcggagggaaaggattatttggccccattaagaattaagaggctgggtgcggtggctcacgtctgtaatcccagcaccttgggaggcccaggcaggcagatcacctgaggtcgggagttcgagaccagcgtgaccaacgtggagaaacccccgtctctactaaaaatacaaaaaattagctgggcatggtggtgcatgcctgtgattccagctacttgggaggttgaggcaggagaatcatttgaactcaggaggcggaagttgcggtgagccaagattgtgccattgcactccagcctgggcaacgagcgaaactacatctcaaaaa

SEQ ID NO: 288348 - DNA, 1052 bp, Homo sapiens
ggtgtccacctcagtcaggccacggtggaagacgcgtgccgcggcgcctggttgcctgcagcggcccggacccgagaggaagctgaaccatctatctccagaaatgtcttcagaaagtaaagagcaacataacgtttcacccagagactcagctgaaggaaatgacagttatccatctgggatccatctggaacttcaaagggaatcaagtactgacttcaagcaatttgagaccaatgatcaatgcagaccttatcataggatccttattgagcgtcaagagaaatcagatacaaacttcaaggagtttgttattaaaaagctgcagaagaattgccagtgcagtccagccaaagccaaaaatatgattttaggtttccttcctgttttgcagtggctcccaaaatacgacctaaagaaaaacattttaggggatgtgatgtcaggcttgattgtgggcatattattggtgccccagtccattgcttattccctgctggctggccaagaacctgtctatggtctgtacacatctttttttgccagcatcatttattttctcttgggtacctcccgtcacatctctgtgggcatttttggagtactgtgccttatgattggtgagacagttgaccgagaactacagaaagctggctatgacaatgcccatagtgctccttccttaggaatggtttcaaatgggagcacattattaaatcatacatcagacaggatatgtgacaaaagttgctatgcaattatggttggcagcactgtaacctttatagctggagtttatcagtgattgttttgttaatgtggaagcaacattttctatgattaatctgctgttacctgttttgactgagctactacaaaaagaaaaatcactgaattgctatgggtttctgaaatatccaaaaaattaacctgaagcagggggaaaaatgacatcacaccattagcaggtattgtgtgaaacttctaaaaatgaaactgacatttatctgacttattaggaataaatactctctaatgaactctctaatgat

SEQ ID NO: 288349 - DNA, 3552 bp, Homo sapiens
ggtgtccacctcagtcaggccacggtggaagacgcgtgccgcggcgcctggttgcctgcagcggcccggacccgagaggaagctgaaccatctatctccagaaatgtcttcagaaagtaaagagcaacataacgtttcacccagagactcagctgaaggaaatgacagttatccatctgggatccatctggaacttcaaagggaatcaagtactgacttcaagcaatttgagaccaatgatcaatgcagaccttatcataggatccttattgagcgtcaagagaaatcagatacaaacttcaaggagtttgttattaaaaagctgcagaagaattgccagtgcagtccagccaaagccaaaaatatgattttaggtttccttcctgttttgcagtggctcccaaaatacgacctaaagaaaaacattttaggggatgtgatgtcaggcttgattgtgggcatattattggtgccccagtccattgcttattccctgctggctggccaagaacctgtctatggtctgtacacatctttttttgccagcatcatttattttctcttgggtacctcccgtcacatctctgtgggcatttttggagtactgtgccttatgattggtgagacagttgaccgagaactacagaaagctggctatgacaatgcccatagtgctccttccttaggaatggtttcaaatgggagcacattattaaatcatacatcagacaggatatgtgacaaaagttgctatgcaattatggttggcagcactgtaacctttatagctggagtttatcaggtagcgatgggcttctttcaagtgggttttgtttctgtctacctctcagatgccttgctgagtggatttgtcactggtgcctccttcactattcttacatctcaggccaagtatcttcttgggctcaaccttcctcggactaatggtgtgggctcactcatcactacctggatacatgtcttcagaaacatccataagaccaatctctgtgatcttatcaccagccttttgtgccttttggttcttttgccaaccaaagaactcaatgaacacttcaaatccaagcttaaggcaccgattcctattgaacttgttgttgttgtagcagccacattagcctctcattttggaaaactacatgaaaattataattctagtattgctggacatattcccactgggtttatgccacccaaagtaccagaatggaacctaattcctagtgtggctgtagatgcaatagctatttccatcattggttttgctatcactgtatcactttctgagatgtttgccaagaaacatggttacacagtcaaagcaaaccaggaaatgtatgccattggcttttgtaatatcatcccttccttcttccactgttttactactagtgcagctcttgcaaagacattggttaaagaatcaacaggctgccatactcagctttctggtgtggtaacagccctggttcttttgttggtcctcctagtaatagctcctttgttctattcccttcaaaaaagtgtccttggtgtgatcacaattgtaaatctacggggagcccttcgtaaatttagggatcttcccaaaatgtggagtattagtagaatggatacagttatctggtttgttactatgctgtcctctgcactgctaagtactgaaataggcctacttgttggggtttgtttttctatattttgtgtcatcctccgcactcagaagccaaagagttcactgcttggcttggtggaagagtctgaggtctttgaatctgtgtctgcttacaagaaccttcagactaagccaggcatcaagattttccgctttgtagcccctctctactacataaacaaagaatgctttaaatctgctttatacaaacaaactgtcaacccaatcttaataaaggtggcttggaagaaggcagcaaagagaaagatcaaagaaaaagtagtgactcttggtggaatccaggatgaaatgtcagtgcaactttcccatgatcccttggagctgcatactatagtgattgactgcagtgcaattcaatttttagatacagcagggatccacacactgaaagaagttcgcagagattatgaagccattggaatccaggttctgctggctcagtgcaatcccactgtgagggattccctaaccaacggagaatattgcaaaaaggaagaagaaaaccttctcttctatagtgtgtatgaagcgatggcttttgcagaagtatctaaaaatcagaaaggagtatgtgttcccaatggtctgagtcttagtagtgattaattgagaaggtagatagaagaatgtctagccaataggttaaaatttcaagtgtccaacatttcccagttccacagtgggaaattttgcacacttgaaattttaaccaagtggctagatattattcctcctttgaagctaatggcatttgtatatacacactgcagcagagcttgtagctggacagagtcaaaaagaagaaaatacggtttcaggctttcttgcagatatgaagtattcttggaatgcaataagtatgtattgaactgtactgtaaagtagctccaaaacttaattactctcctgttttaggggttatacatttggactgtgcattctccaagagatgaagcggtgaagttgggatttacattggaagtgctgtagacttctttatgtggctcagtggagagagggaaagaatgttgcacctgctctagtaccataggtcaagaggcttctggatcacaaagtcataactagacaggtttgttcttgtagttttctatccccagtctttgctccccagatggcagtagtttttagtaggaaagtgccattcctgtccttaaggcacagtctcatcagaagtctaatacctgggcaggtttataacatcctgagagccagcctgacattagacagaataccctttgtaatacattggaaatttttactcatgcctttttgtttaggataaataggtaagcacaaagagctcttcaaaatcagaaaaaacaataggagtccttccttgtcttttctgtgatctctgtccttgtttctgagactttctctaccattaagctctattttagctttcagttattctagtttgtttcccatggaatctgtcctaaactggtgtttttgtcagtgacagtcttgccagtcagcaatttctaacagcattttaaatgagtttgatgtacagtaaatattgatgacaatgacagcttttaactcttcaagtcacctaaagctattatgcaggaggatttagaagtcacattcataaaacccaagtgctatgggtgtattattcatgatagctggcccacaggtcatgaattgaggaggaatttgctttcaaaaagcaagaatgtccaacactgaaagtttatagttttatatttggaccttgaaaggtaagaaaaaaccaggttctccaaagttaggaatagggaactaatttatgaaacagccatcttaaaaaaaaaaaaagtaaactg

SEQ ID NO: 288350 - DNA, 1233 bp, Homo sapiens
aatttcttttccccttgaagaagttgatttaggcacagactctggactctggatttcccacaatgtcttatctagtcaactcaagtatctggactacaattttcttgaaagcaaagcccatatattaataatctttacttgtatataaatattcaataaatcattaagtaaatgtgtagaagaattttatgctcaataagatccacccgatcatgcatttgaaaatttatgggtaaaaatggtagttacgggcagaaaacaaggaaaaccatagctcaatttagttcttcattctgccaaaatttgatgtctgtaattcatccttaatacataacccatttattgccttctggcaagaaactggcgcttgctggcactgtgagagcagtgaatccagtaagcttctgccacaggccaaaatgggactccctgacctgaagaacacctctccaatgaataatttaaatctttaacagcctttctgagaaattcattctacttccctcttcaaggatccacctagaactccctcttgctccaacttcctcaacttctgttggcaatgatgtcatgtcttccttctaactagaactttgttttctctcttagaattacctctctgaacaggactttgtgtctgtgtttggcatcacaagagggcaatttgcagctctgcctggctggaaacagctccaaatgaagaaagaaaaggggcttttctaaagcaagaaggcctatacctattgcaaggccacagaaaagagcagatagtgccaatatcaggaaataatttatccaccaatttctgcctgacattcagctacttaatttagatataatagagtctgcaaatcacggcatgttctccattttttctcatccttgcattccttgcttgttatatacctaaaatgttaaccatatagtttttgggttttgtggccctctagctaaagcctcagcagaaagcactaaaactgcataaatctggagaaatcaaaagaaagagaaccaaaaaacaatgcttaaaatgtttaataactttatgtttaatattataccaggacctacctttgttttcaattttaagatgattatttctaaaatctatttagcctgtaaatcattgaaatcatatatgcactccataggcaaaatccaaatacccagatctgtaatgtgtcaaagcatttttcacttttcaaataaagatacctataatgaacaaatgga

SEQ ID NO: 288351 - DNA, 1701 bp, Homo sapiens
  misc_feature (547)..(547): n is a, c, g, or t
aagatacaaaaaaaaattatccaggcatggtggcgcatgccggtagtccaggctacctggcagggcactgagataggaaaatcacttgaacccgggaggctgcagtgagccgagatcacgccacggcactccagcctaggtgagagcgagactctgtctaaaaaaaaaaaaaagcactcagaacagttcttggcacacagtacctgctgaataaaaggtggctgttattattgaaggggatatcacatatcaaggttaatggccctgtcctcaaggagcttatatttgtgcagatccatgcagatgaaccaagccagaagcaataaatgagcaaacaaatgtgatgcaaagtcagtaaggacaaaagtactgaaagaacacagcataatcatcctaaaaattaacaaccataatcaccgcaagccaataaacagatccaaaaatgttccactcagtcatttttttttttaggcaggtaccttggtccttagacaaaagtgagttagaatttgactctgactcccagaggggagacgcttatatcatntggcttcatagaggtgaattaccagacaagcaaagaactcagtgtattccaccactgacctgcctttgggaatgggtggctctgcagggcttcatcaagatgaagagctaccccagcagcaccaatgtggagaccgtcaacgatggtgctgagtcggccatgttcaagcagctgttccagaagtggtcagtaaaggaccagaccatgggcctggggaaaacgttcagcattggtaaaattggtgagactgcccccagatcatcctctcattgctaagactctagaaaagcaggcacagatgcttcttactcactcggcttttcccaaccctttctccacagctaaagttttccaggataaatttgatgtgactctgctacacaccaagccagaggtagctgcccaggaaagaatggtcgatgatggcaacggaaaagttgagatctggactctgcttttcttctctctagggtgggacttccaggaagggaaatgccgagcctgaccctccagtaagactcttccaaattcatggaaatgacaaatctaacaccaaagcagtggaagttccagcctttgcctcctccctaaactccaatgatgtctttctgctgcgaactcaggcagagcactacctgtggtatggcaaggtaggatggctgggccccgggtcagaccagcccctcggagcccagacctgcactcccctcctcctgtcagcaaggtcaaaggacctagagtaggctggagtgcttgctttggcagcacatatactaaaactggaatgatacagagaagattagcatggtccctgtgcaaggatggcatgcaaattcatgaagcgtttgatattaaaaaaaaaaaaaaaaaaaaaaagctgggcacggtggctcatccctgtaatcctagcactttgggaggctgaggcaggcaaatcacgaggtcaggagttcgagaccagcctggccaacatggtgaaaccccatctctactgaaaatacaaaaattagctgggcatggtggcacgcgcccatagtcccagctactcaggaggctgaggcagaagaatctcttgaaccagggggcggaggttgcagtgagccgagattgtaccactgtactccagcctgggcgacagggtgagactccgtctc

SEQ ID NO: 288352 - DNA, 167 bp, Homo sapiens
cattgcagctcagaggaggcagagctgagctgagccagcctgttcacctcctcagagactcagcattgtgaattgaaggcaagaagaaaaagtaaaagaccttggctcatagaaagtcactttaatagatagggacagtaataaataaatgtacaatctctatatac

SEQ ID NO: 288353 - DNA, 2919 bp, Homo sapiens
gtgccagggcagtggcctaatacggaactccatttcccggcgtgctcgcggaggccgctgaactcagaagcgggaggccggttccggttgcatcagcgagggattcacggcgaaatgagactgttcgtgagtgatggcgtcccgggttgcttgccggtgctggccgccgccgggagagcccggggcagagcagaggtgctcatcagcactgtaggcccggaagattgtgtggtcccgttcctgacccggcctaaggtccctgtcttgcagctggatagcggcaactacctcttctccactagtgcaatctgccgatatttttttttgttatctggctgggagcaagatgacctcactaaccagtggctggaatgggaagcgacagagctgcagccagctttgtctgctgccctgtactatttagtggtccaaggcaagaagggggaagatgttcttggttcagtgcggagagccctgactcacattgaccacagcttgagtcgtcagaactgtcctttcctggctggggagacagaatctctagccgacattgttttgtggggagccctatacccattactgcaagatcccgcctacctccctgaggagctgagtgccctgcacagctggttccagacactgagtacccaggaaccatgtcagcgagctgcagagactgtactgaaacagcaaggtgtcctggctctccggccttacctccaaaagcagccccagcccagccccgctgagggaagggctgtcaccaatgagcctgaggaggaggagctggctaccctatctgaggaggagattgctatggctgttactgcttgggagaagggcctagaaagtttgcccccgctgcggccccagcagaatccagtgttgcctgtggctggagaaaggaatgtgctcatcaccagtgccctcccttacgtcaacaatgtcccccaccttgggaacatcattggttgtgtgctcagtgccgatgtctttgccaggtactctcgcctccgccagtggaacaccctctatctgtgtgggacagatgagtatggtacagcaacagagaccaaggctctggaggagggactaaccccccaggagatctgcgacaagtaccacatcatccatgctgacatctaccgctggtttaacatttcgtttgatatttttggtcgcaccaccactccacagcagaccaaaatcacccaggacattttccagcagttgctgaaacgaggttttgtgctgcaagatactgtggagcaactgcgatgtgagcactgtgctcgcttcctggctgaccgcttcgtggagggcgtgtgtcccttctgtggctatgaggaggctcggggtgaccagtgtgacaagtgtggcaagctcatcaatgctgtcgagcttaagaagcctcagtgtaaagtctgccgatcatgccctgtggtgcagtcgagccagcacctgtttctggacctgcctaagctggagaagcgactggaggagtggttggggaggacattgcctggcagtgactggacacccaatgcccagtttatcacccgttcttggcttcgggatggcctcaagccacgctgcataacccgagacctcaaatggggaacccctgtacccttagaaggttttgaagacaaggtattctatgtctggtttgatgccactattggctatctgtccatcacagccaactacacagaccagtgggagagatggtggaagaacccagagcaagtggacctgtatcagttcatggccaaagacaatgttcctttccatagcttagtctttccttgctcagccctaggagctgaggataactataccttggtcagccacctcattgctacagagtacctgaactatgaggatgggaaattctctaagagccgcggtgtgggagtgtttggggacatggcccaggacacggggatccctgctgacatctggcgcttctatctgctgtacattcggcctgagggccaggacagtgctttctcctggacggacctgctgctgaagaataattctgagctgcttaacaacctgggcaacttcatcaacagagctgggatgtttgtgtctaagttctttgggggctatgtgcctgagatggtgctcacccctgatgatcagcgcctgctggcccatgtcaccctggagctccagcactatcaccagctacttgagaaggttcggatccgggatgccttgcgcagtatcctcaccatatctcgacatggcaaccaatatattcaggtgaatgagccctggaagcggattaaaggcagtgaggctgacaggcaacgggcaggaacagtgactggcttggcagtgaatatagctgccttgctctctgtcatgcttcagccttacatgcccacggttagtgccacaatccaggcccagctgcagctcccacctccagcctgcagtatcctgctgacaaacttcctgtgtaccttaccagcaggacaccagattggcacagtcagtcccttgttccaaaaattggaaaatgaccagattgaaagtttaaggcagcgctttggagggggccaggcaaaaacgtccccgaagccagcagttgtagagactgttacaacagccaagccacagcagatacaagcgctgatggatgaagtgacaaaacaaggaaacattgtccgagaactgaaagcacaaaaggcagacaagaacgaggttgctgcggaggtggcgaaactcttggatctaaagaaacagttggctgtagctgaggggaaaccccctgaagcccctaaaggcaagaagaaaaagtaaaagaccttggctcatagaaagtcactttaatagatagggacagtaataaataaatgtacaatctctatatacaatatatcaaaactcgagactagttctctc

SEQ ID NO: 288354 - DNA, 2889 bp, Homo sapiens
gtgccagggcagtggcctaatacggaactccatttcccggcgtgctcgcggaggccgctgaactcagaagcgggaggccggttccggttgcatcagcgagggattcacggcgaaatgagactgttcgtgagtgatggcgtcccgggttgcttgccggtgctggccgccgccgggagagcccggggcagagcagaggtgctcatcagcactgtaggcccggaagattgtgtggtcccgttcctgacccggcctaaggtccctgtcttgcagctggatagcggcaactacctcttctccactagtgcaatctgccgatatttttttttgttatctggctgggagcaagatgacctcactaaccagtggctggaatgggaagcgacagagctgcagccagctttgtctgctgccctgtactatttagtggtccaaggcaagaagggggaagatgttcttggttcagtgcggagagccctgactcacattgaccacagcttgagtcgtcagaactgtcctttcctggctggggagacagaatctctagccgacattgttttgtggggagccctatacccattactgcaagatcccgcctacctccctgaggagctgagtgccctgcacagctggttccagacactgagtacccaggaaccatgtcagcgagctgcagagactgtactgaaacagcaaggtgtcctggctctccggccttacctccaaaagcagccccagcccagccccgctgagggaagggctgtcaccaatgagcctgaggaggaggagctggctaccctatctgaggaggagattgctatggctgttactgcttgggagaagggcctagaaagtttgcccccgctgcggccccagcagaatccagtgttgcctgtggctggagaaaggaatgtgctcatcaccagtgccctcccttacgtcaacaatgtcccccaccttgggaacatcattggttgtgtgctcagtgccgatgtctttgccaggtactctcgcctccgccagtggaacaccctctatctgtgtgggacagatgagtatggtacagcaacagagaccaaggctctggaggagggactaaccccccaggagatctgcgacaagtaccacatcatccatgctgacatctaccgctggtttaacatttcgtttgatatttttggtcgcaccaccactccacagcagaccaaaatcacccaggacattttccagcagttgctgaaacgaggttttgtgctgcaagatactgtggagcaactgcgatgtgagcactgtgctcgcttcctggctgaccgcttcgtggagggcgtgtgtcccttctgtggctatgaggaggctcggggtgaccagtgtgacaagtgtggcaagctcatcaatgctgtcgagcttaagaagcctcagtgtaaagtctgccgatcatgccctgtggtgcagtcgagccagcacctgtttctggacctgcctaagctggagaagcgactggaggagtggttggggaggacattgcctggcagtgactggacacccaatgcccagtttatcacccgttcttggcttcgggatggcctcaagccacgctgcataacccgagacctcaaatggggaacccctgtacccttagaaggttttgaagacaaggtattctatgtctggtttgatgccactattggctatctgtccatcacagccaactacacagaccagtgggagagatggtggaagaacccagagcaagtggacctgtatcagttcatggccaaagacaatgttcctttccatagcttagtctttccttgctcagccctaggagctgaggataactataccttggtcagccacctcattgctacagagtacctgaactatgaggatgggaaattctctaagagccgcggtgtgggagtgtttggggacatggcccaggacacggggatccctgctgacatctggcgcttctatctgctgtacattcggcctgagggccaggacagtgctttctcctggacggacctgctgctgaagaataattctgagctgcttaacaacctgggcaacttcatcaacagagctgggatgtttgtgtctaagttctttgggggctatgtgcctgagatggtgctcacccctgatgatcagcgcctgctggcccatgtcaccctggagctccagcactatcaccagctacttgagaaggttcggatccgggatgccttgcgcagtatcctcaccatatctcgacatggcaaccaatatattcaggtgaatgagccctggaagcggattaaaggcagtgaggctgacaggcaacgggcaggaacagtgactggcttggcagtgaatatagctgccttgctctctgtcatgcttcagccttacatgcccacggttagtgccacaatccaggcccagctgcagctcccacctccagcctgcagtatcctgctgacaaacttcctgtgtaccttaccagcaggacaccagattggcacagtcagtcccttgttccaaaaattggaaaatgaccagattgaaagtttaaggcagcgctttggagggggccaggcaaaaacgtccccgaagccagcagttgtagagactgttacaacagccaagccacagcagatacaagcgctgatggatgaagtgacaaaacaaggaaacattgtccgagaactgaaagcacaaaaggcagacaagaacgaggttgctgcggaggtggcgaaactcttggatctaaagaaacagttggctgtagctgaggggaaaccccctgaagcccctaaaggcaagaagaaaaagtaaaagaccttggctcatagaaagtcactttaatagatagggacagtaataaataaatgtacaatctctatatac

SEQ ID NO: 288355 - DNA, 843 bp, Homo sapiens
gggaacaccctctatctgtgtgggacagatgagtatggtacagcaacagagaccaaggctctggaggaggcgagagtacctggcaaagacatcggcactgagcacacaaccaatggaacaccctctatctgtgtgggacagatgagtatggtacagcaacagagaccaaggctctggaggagggactaaccccccaggagatctgcgacaagtaccacatcatccatgctgacatctaccgctggtttaacatttcgtttgatatttttggtcgcaccaccactccacagcagaccaaaatcacccaggacattttccagcagttgctgaaacgaggttttgtgctgcaagatactgtggagcaactgcgatgtgagcactgtgctcgcttcctggctgaccgcttcgtggagggcgtgtgtcccttctgtggctatgaggaggctcggggtgaccagtgtgacaagtgtggcaagctcatcaatgctgtcgagcttaagaagcctcagtgtaaagtctgccgatcatgccctgtggtgcagtcgagccagcacctgtttctggacctgcctaagctggagaagcgactggaggacgctggcggggaggacatagcctaggaagtgactcggacaccccaaagaccaagaacacatcaaccgtacaagagcccgaggataggctcaaagccaacgcagcagtaacaccgagcaactcaaatggggcgaaacccatggaccctgagaaggacaagaagacaaaggcatacaaagacatcggaaggacgccccaaaggcacacaggagcatcacaggcaaacagcacacgaacccgggcgaaaga

SEQ ID NO: 288356 - DNA, 1561 bp, Homo sapiens
agtaaagatgggatttcaccatgttggccaggctggtcttgaactcctgacctcaggtgatccacccacctctggtctcccaaagtgctgggattacaggtgtgagccaccatgcccggcccttaactcattctttaaaaatgagtttttaaaacctttgcttagaagaatctaaacacttctaattccattgtttccaatctagatcaattcactaccatctctaaattactgcagaaactttctgactgcagaaggtcttcccatttcttctcttgccacccctccgcaactctattcaccatacagcagcctgagtgagccttttaaaacaggtcattcctctgctcaaaccctccaatgacttcctatttcatgtcatggaagtcactgaagggttttgagtggaggaattacctaaggtaattcctgaccacctgatgtaccgaaaatcacctccatcctgaacattctccattcctttctctgctttagctttctccgtggcacttatattttgtttactgtaggcctcccactgagatgattttttcctcttgctcaaggatgtaccctgagccccaaactgtgtggcacacagtaggtcctcattaagtatttgttaagaatgaatggataaactccccccagtctctcttatagggaaggggcagaagcagagtggcagctgctgatccctaggggctagagatgcaatattgcccgaagtatttctctgcagggctgtcctccctggggaaccctcccttgccttccagtgtgtgggacttggctttcatcagcagtagagcctcaggtcagaaggctgcagagccaaacggggctggcctgatgcaatggttacacagagattagctgggagacaggaccgggttaaagaggcagggactaatcccgagggaaggacaataccctggggagaccccaaatggcctcctacacttaagagatccaggctgctctcttgtgcaggaggcccagagacctctacggcaaaaggaaaacacaccactccctgtccatcggcacccctcccaaaggcttgtgtctcctcaaggttcccctatccgctgcagggtccagtagccccagctaccaaggtggccatgctgacaccagaggcactgagactgagacagaattgggggtggggtagggagaaggcccgctggtggcgaagcggcggaaacggcctgagcgatggtcacccagtcttagagcgggggtgtgtcctgctgacctgcctccccgcggacaggcctaacgatgaggcctgaagttggctacgggaaagaatgaatttcccaagggcaaccgaggtccctttgcccagcagcacagagcagggcccgtgttccggctccgggcaggggtggagagacgccgtcgtccgaagcaataggggtttgtaagcaccaccccagaataagggactctccccattcctctctcggacggtccctaacttcactgtggaggagtgaggccgatcctaaagagcggacgccccacttgatcaaacccagcctctactagcttt

SEQ ID NO: 288357 - DNA, 2820 bp, Homo sapiens
agtatgatacgccgtgccggtgttatttcattcacgaggcgagcaatgagactgttcgtgagtgatggcgtcccgggttgcttgccggtgctggccgccgccgggagagcccggggcagagcagaggtgctcatcagcactgtaggcccggaagattgtgtggtcccgttcctgacccggcctaaggtccctgtcttgcagctggatagcggcaactacctcttctccactagtgcaatctgccgatatttttttttgttatctggctgggagcaagatgacctcactaaccagtggctggaatgggaagcgacagagctgcagccagctttgtctgctgccctgtactatttagtggtccaaggcaagaagggggaagatgttcttggttcagtgcggagagccctgactcacattgaccacagcttgagtcgtcagaactgtcctttcctggctggggagacagaatctctagccgacattgttttgtggggagccctatacccattactgcaagatcccgcctacctccctgaggagctgagtgccctgcacagctggttccagacactgagtacccaggaaccatgtcagcgagctgcagagactgtactgaaacagcaaggtgtcctggctctccggccttacctccaaaagcagccccagcccagccccgctgagggaagggctgtcaccaatgagcctgaggaggaggagctggctaccctatctgaggaggagattgctatggctgttactgcttgggagaagggcctagaaagtttgcccccgctgcggccccagcagaatccagtgttgcctgtggctggagaaaggaatgtgctcatcaccagtgccctcccttacgtcaacaatgtcccccaccttgggaacatcattggttgtgtgctcagtgccgatgtctttgccaggtactctcgcctccgccagtggaacaccctctatctgtgtgggacagatgagtatggtacagcaacagagaccaaggctctggaggagggactaaccccccaggagatctgcgacaagtaccacatcatccatgctgacatctaccgctggtttaacatttcgtttgatatttttggtcgcaccaccactccacagcagaccaaaatcacccaggacattttccagcagttgctgaaacgaggttttgtgctgcaagatactgtggagcaactgcgatgtgagcactgtgctcgcttcctggctgaccgcttcgtggagggcgtgtgtcccttctgtggctatgaggaggctcggggtgaccagtgtgacaagtgtggcaagctcatcaatgctgtcgagcttaagaagcctcagtgtaaagtctgccgatcatgccctgtggtgcagtcgagccagcacctgtttctggacctgcctaagctggagaagcgactggaggagtggttggggaggacattgcctggcagtgactggacacccaatgcccagtttatcacccgttcttggcttcgggatggcctcaagccacgctgcataacccgagacctcaaatggggaacccctgtacccttagaaggttttgaagacaaggtattctatgtctggtttgatgccactattggctatctgtccatcacagccaactacacagaccagtgggagagatggtggaagaacccagagcaagtggacctgtatcagttcatggccaaagacaatgttcctttccatagcttagtctttccttgctcagccctaggagctgaggataactataccttggtcagccacctcattgctacagagtacctgaactatgaggatgggaaattctctaagagccgcggtgtgggagtgtttggggacatggcccaggacacggggatccctgctgacatctggcgcttctatctgctgtacattcggcctgagggccaggacagtgctttctcctggacggacctgctgctgaagaataattctgagctgcttaacaacctgggcaacttcatcaacagagctgggatgtttgtgtctaagttctttgggggctatgtgcctgagatggtgctcacccctgatgatcagcgcctgctggcccatgtcaccctggagctccagcactatcaccagctacttgagaaggttcggatccgggatgccttgcgcagtatcctcaccatatctcgacatggcaaccaatatattcaggtgaatgagccctggaagcggattaaaggcagtgaggctgacaggcaacgggcaggaacagtgactggcttggcagtgaatatagctgccttgctctctgtcatgcttcagccttacatgcccacggttagtgccacaatccaggcccagctgcagctcccacctccagcctgcagtatcctgctgacaaacttcctgtgtaccttaccagcaggacaccagattggcacagtcagtcccttgttccaaaaattggaaaatgaccagattgaaagtttaaggcagcgctttggagggggccaggcaaaaacgtccccgaagccagcagttgtagagactgttacaacagccaagccacagcagatacaagcgctgatggatgaagtgacaaaacaaggaaacattgtccgagaactgaaagcacaaaaggcagacaagaacgaggttgctgcggaggtggcgaaactcttggatctaaagaaacagttggctgtagctgaggggaaaccccctgaagcccctaaaggcaagaagaaaaagtaaaagaccttggctcatagaaagtcactttaatagatagggacagtaataaataaatgtacaatctctatatac

SEQ ID NO: 288358 - DNA, 3658 bp, Homo sapiens
agtatgatacgccgtgccggtgttatttcattcacgaggcgagcaatgagactgttcgtgagtgatggcgtcccgggttgcttgccggtgctggccgccgccgggagagcccggggcagagcagaggtgctcatcagcactgtaggcccggaagattgtgtggtcccgttcctgacccggcctaaggtccctgtcttgcagctggatagcggcaactacctcttctccactagtgcaatctgccgatatttttttttgttatctggctgggagcaagatgacctcactaaccagtggctggaatgggaagcgacagagctgcagccagctttgtctgctgccctgtactatttagtggtccaaggcaagaagggggaagatgttcttggttcagtgcggagagccctgactcacattgaccacagcttgagtcgtcagaactgtcctttcctggctggggagacagaatctctagccgacattgttttgtggggagccctatacccattactgcaagatcccgcctacctccctgaggagctgagtgccctgcacagctggttccagacactgagtacccaggaaccatgtcagcgagctgcagagactgtactgaaacagcaaggtgtcctggctctccggccttacctccaaaagcagccccagcccagccccgctgagggaagggctgtcaccaatgagcctgaggaggaggagctggctaccctatctgaggaggagattgctatggctgttactgcttgggagaagggcctagaaagtttgcccccgctgcggccccagcagaatccagtgttgcctgtggctggagaaaggaatgtgctcatcaccagtgccctcccttacgtcaacaatgtcccccaccttgggaacatcattggttgtgtgctcagtgccgatgtctttgccaggtactctcgcctccgccagtggaacaccctctatctgtgtgggacagatgagtatggtacagcaacagagaccaaggctctggaggagggactaaccccccaggagatctgcgacaagtaccacatcatccatgctgacatctaccgctggtttaacatttcgtttgatatttttggtcgcaccaccactccacagcagaccaaaatcacccaggacattttccagcagttgctgaaacgaggttttgtgctgcaagatactgtggagcaactgcgatgtgagcactgtgctcgcttcctggctgaccgcttcgtggagggcgtgtgtcccttctgtggctatgaggaggctcggggtgaccagtgtgacaagtgtggcaagctcatcaatgctgtcgagcttaagaagcctcagtgtaaagtctgccgatcatgccctgtggtgcagtcgagccagcacctgtttctggacctgcctaagctggagaagcgactggaggagtggttggggaggacattgcctggcagtgactggacacccaatgcccagtttatcacccgttcttggcttcgggatggcctcaagccacgctgcataacccgagacctcaaatggggaacccctgtacccttagaaggttttgaagacaaggtattctatgtctggtttgatgccactattggctatctgtccatcacagccaactacacagaccagtgggagagatggtggaagaacccagagcaagtggacctgtatcagttcatggccaaagacaatgttcctttccatagcttagtctttccttgctcagccctaggagctgaggataactataccttggtcagccacctcattgctacagagtacctgaactatgaggatgggaaattctctaagagccgcggtgtgggagtgtttggggacatggcccaggacacggggatccctgctgacatctggcgcttctatctgctgtacattcggcctgagggccaggacagtgctttctcctggacggacctgctgctgaagaataattctgagctgcttaacaacctgggcaacttcatcaacagagctgggatgtttgtgtctaagttctttgggggctatgtgcctgagatggtgctcacccctgatgatcagcgcctgctggcccatgtcaccctggagctccagcactatcaccagctacttgagaaggttcggatccgggatgccttgcgcagtatcctcaccatatctcgacatggcaaccaatatattcaggtgaatgagccctggaagcggattaaaggcagtgaggctgacaggcaacgggcaggaacagtgactggcttggcagtgaatatagctgccttgctctctgtcatgcttcagccttacatgcccacggttagtgccacaatccaggcccagctgcagctcccacctccagcctgcagtatcctgctgacaaacttcctgtgtaccttaccagcaggacaccagattggcacagtcagtcccttgttccaaaaattggaaaatgaccagattgaaagtttaaggcagcgctttggagggggccaggcaaaaacgtccccgaagccagcagttgtagagactgttacaacagccaagccacagcagatacaagcgctgatggatgaagtgacaaaacaaggaaacattgtccgagaactgaaagcacaaaaggcagacaagaacgaggttgctgcggaggtggcgaaactcttggatctaaagaaacagttggctgtagctgaggggaaaccccctgaagcccctaaaggcaagaagaaaaagtaaaagaccttggctcatagaaagtcactttaatagatagggacagtaataaataaatgtacaatctctatatacaagctgagacctttccttttgtctactccaagccttccccctgcgtatgtgggattgagggtcacatcattggcactagtgagagggtagtcagtagccacttctgggaaaggtgggtagtgtggcccaagtgggggactgatgctcccaattgttcatgcttggtgcagattcaccattcggtcaatcagagctcggcgagtcgcctctacttccctggtcaggcgctcgatttcctgcttgagccgttcattctcttcagctagctgtgccactttcctttcattctcctgttctttctccttcatgcgctgctttccagcccgggctggggaatgaccactctgtttccgtttcctggttctcccttggtcttcctcctcttcctcctgagccagggagctctgactggaatctggagagtgagggctctgggaggtgcttgtgacctctgctggttctggctcctcctcagtcagccaagccagagaagcagggtcaagagtggtgaagatttttgattctcctcttcatttccaggaggtgaaacataggtacccccattttcatctgaagacaggacctcttgcaggtcctcataccaggcttccagctcccagctggacagtgtcccgaaggagaaaggcaatgactcagctgccatctctgcagttggatcagtctggaaaagcacatctgctttcaggtgtggtgatgtatgaagatacacttccttcttgaacactctctcctcaggttccagctctgattttggctctgtcgctgccacccgctcatctttaacatgatacgctcagtgccttagacttaagtctct

SEQ ID NO: 288359 - DNA, 2952 bp, Homo sapiens
agtatgatacgccgtgccggtgttatttcattcacgaggcgagcaatgagactgttcgtgagtgatggcgtcccgggttgcttgccggtgctggccgccgccgggagagcccggggcagagcagaggtgctcatcagcactgtaggcccggaagattgtgtggtcccgttcctgacccggcctaaggtccctgtcttgcagctggatagcggcaactacctcttctccactagtgcaatctgccgatatttttttttgttatctggctgggagcaagatgacctcactaaccagtggctggaatgggaagcgacagagctgcagccagctttgtctgctgccctgtactatttagtggtccaaggcaagaagggggaagatgttcttggttcagtgcggagagccctgactcacattgaccacagcttgagtcgtcagaactgtcctttcctggctggggagacagaatctctagccgacattgttttgtggggagccctatacccattactgcaagatcccgcctacctccctgaggagctgagtgccctgcacagctggttccagacactgagtacccaggaaccatgtcagcgagctgcagagactgtactgaaacagcaaggtgtcctggctctccggccttacctccaaaagcagccccagcccagccccgctgagggaagggctgtcaccaatgagcctgaggaggaggagctggctaccctatctgaggaggagattgctatggctgttactgcttgggagaagggcctagaaagtttgcccccgctgcggccccagcagaatccagtgttgcctgtggctggagaaaggaatgtgctcatcaccagtgccctcccttacgtcaacaatgtcccccaccttgggaacatcattggttgtgtgctcagtgccgatgtctttgccaggtactctcgcctccgccagtggaacaccctctatctgtgtgggacagatgagtatggtacagcaacagagaccaaggctctggaggagggactaaccccccaggagatctgcgacaagtaccacatcatccatgctgacatctaccgctggtttaacatttcgtttgatatttttggtcgcaccaccactccacagcagaccaaaatcacccaggacattttccagcagttgctgaaacgaggttttgtgctgcaagatactgtggagcaactgcgatgtgagcactgtgctcgcttcctggctgaccgcttcgtggagggcgtgtgtcccttctgtggctatgaggaggctcggggtgaccagtgtgacaagtgtggcaagctcatcaatgctgtcgagcttaagaagcctcagtgtaaagtctgccgatcatgccctgtggtgcagtcgagccagcacctgtttctggacctgcctaagctggagaagcgactggaggagtggttggggaggacattgcctggcagtgactggacacccaatgcccagtttatcacccgttcttggcttcgggatggcctcaagccacgctgcataacccgagacctcaaatggggaacccctgtacccttagaaggttttgaagacaaggtattctatgtctggtttgatgccactattggctatctgtccatcacagccaactacacagaccagtgggagagatggtggaagaacccagagcaagtgagcagttcttggttaggctgtgcatggggagggtaggcggtagggtgtgggtgttagggttgggtgtctggtcttccttgggcctttgaaggaggtctcaggaaatctctcctaaccacattcccctaggtggacctgtatcagttcatggccaaagacaatgttcctttccatagcttagtctttccttgctcagccctaggagctgaggataactataccttggtcagccacctcattgctacagagtacctgaactatgaggatgggaaattctctaagagccgcggtgtgggagtgtttggggacatggcccaggacacggggatccctgctgacatctggcgcttctatctgctgtacattcggcctgagggccaggacagtgctttctcctggacggacctgctgctgaagaataattctgagctgcttaacaacctgggcaacttcatcaacagagctgggatgtttgtgtctaagttctttgggggctatgtgcctgagatggtgctcacccctgatgatcagcgcctgctggcccatgtcaccctggagctccagcactatcaccagctacttgagaaggttcggatccgggatgccttgcgcagtatcctcaccatatctcgacatggcaaccaatatattcaggtgaatgagccctggaagcggattaaaggcagtgaggctgacaggcaacgggcaggaacagtgactggcttggcagtgaatatagctgccttgctctctgtcatgcttcagccttacatgcccacggttagtgccacaatccaggcccagctgcagctcccacctccagcctgcagtatcctgctgacaaacttcctgtgtaccttaccagcaggacaccagattggcacagtcagtcccttgttccaaaaattggaaaatgaccagattgaaagtttaaggcagcgctttggagggggccaggcaaaaacgtccccgaagccagcagttgtagagactgttacaacagccaagccacagcagatacaagcgctgatggatgaagtgacaaaacaaggaaacattgtccgagaactgaaagcacaaaaggcagacaagaacgaggttgctgcggaggtggcgaaactcttggatctaaagaaacagttggctgtagctgaggggaaaccccctgaagcccctaaaggcaagaagaaaaagtaaaagaccttggctcatagaaagtcactttaatagatagggacagtaataaataaatgtacaatctctatatac

SEQ ID NO: 288360 - DNA, 3079 bp, Homo sapiens
agtatgatacgccgtgccggtgttatttcattcacgaggcgagcaatgagactgttcgtgagtgatggcgtcccgggttgcttgccggtgctggccgccgccgggagagcccggggcagagcagaggtgctcatcagcactgtaggcccggaagattgtgtggtcccgttcctgacccggcctaaggtccctgtcttgcagctggatagcggcaactacctcttctccactagtgcaatctgccgatatttttttttgttatctggctgggagcaagatgacctcactaaccagtggctggaatgggaagcgacagagctgcagccagctttgtctgctgccctgtactatttagtggtccaaggcaagaagggggaagatgttcttggttcagtgcggagagccctgactcacattgaccacagcttgagtcgtcagaactgtcctttcctggctggggagacagaatctctagccgacattgttttgtggggagccctatacccattactgcaagatcccgcctacctccctgaggagctgagtgccctgcacagctggttccagacactgagtacccaggaaccatgtcagcgagctgcagagactgtactgaaacagcaaggtgtcctggctctccggccttacctccaaaagcagccccagcccagccccgctgagggaagggctgtcaccaatgagcctgaggaggaggagctggctaccctatctgaggaggagattgctatggctgttactgcttgggagaagggcctagaaagtttgcccccgctgcggccccagcagaatccagtgttgcctgtggctggagaaaggaatgtgctcatcaccagtgccctcccttacgtcaacaatgtcccccaccttgggaacatcattggttgtgtgctcagtgccgatgtctttgccaggtactctcgcctccgccagtggaacaccctctatctgtgtgggacagatgagtatggtacagcaacagagaccaaggctctggaggagggactaaccccccaggagatctgcgacaagtaccacatcatccatgctgacatctaccgctggtttaacatttcgtttgatatttttggtcgcaccaccactccacagcagaccaaaatcacccaggacattttccagcagttgctgaaacgaggttttgtgctgcaagatactgtggagcaactgcgatgtgagcactgtgctcgcttcctggctgaccgcttcgtggagggcgtgtgtcccttctgtggctatgaggaggctcggggtgaccagtgtgacaagtgtggcaagctcatcaatgctgtcgagcttaagaagcctcagtgtaaagtctgccgatcatgccctgtggtgcagtcgagccagcacctgtttctggacctgcctaagctggagaagcgactggaggagtggttggggaggacattgcctggcagtgactggacacccaatgcccagtttatcacccgttcttggcttcgggatggcctcaagccacgctgcataacccgagacctcaaatggggaacccctgtacccttagaaggttttgaagacaaggtattctatgtctggtttgatgccactattggctatctgtccatcacagccaactacacagaccagtgggagagatggtggaagaacccagagcaagtggacctgtatcagttcatggccaaagacaatgttcctttccatagcttagtctttccttgctcagccctaggagctgaggataactataccttggtcagccacctcattgctacagagtacctgaactatgaggatgggaaattctctaagagccgcggtgtgggagtgtttggggacatggcccaggacacggggatccctgctgacatctggcgcttctatctgctgtacattcggcctgagggccaggacagtgctttctcctggacggacctgctgctgaagaataattctgagctgcttaacaacctgggcaacttcatcaacagagctgggatgtttgtgtctaagttctttgggggctatgtgcctgagatggtgctcacccctgatgatcagcgcctgctggcccatgtcaccctggagctccagcactatcaccagctacttgagaaggttcggatccgggatgccttgcgcagtatcctcaccatatctcgacatggcaaccaatatattcaggtgaatgagccctggaagcggattaaaggcagtgaggctgacaggcaacgggcaggaacagtgactggcttggcagtgaatatagctgccttgctctctgtcatgcttcagccttacatgcccacggttagtgccacaatccaggcccagctgcagctcccacctccagcctgcagtatcctgctgacaaacttcctgtgtaccttaccagcaggacaccagattggcacagtcagtcccttgttccaaaaattggaaaatgaccagattgaaagtttaaggcagcgctttggagggggccaggcaaaaacgtccccgaagccagcagttgtagagactgttacaacagccaagccacagcagatacaagcgctgatggatgaagtgacaaaacaaggaaacattgtccgagaactgaaagcacaaaaggcagacaagaacgaggttgctgcggaggtggcgaaactcttggatctaaagaaacagttggctgtagctgaggggaaaccccctgaagcccctaaaggcaagaagaaaaagtaaaagaccttggctcatagaaagtcactttaatagatagggacagtaataaataaatgtacaatctctatatacaaaaaaaaacaaaaaaaaaaacaaaaaagaattctccgagaagagctaattgttctctcactctctcttctcttctcctccccgggtgagaagaactccgggggtgctccccaaggtgggagcgcgacggccacagccgacgtgtgtgggtacccgcggcgttttgggcgaaaaagaccaggcgcgggggaccccagaagagggtctccgctactaggcgcgggggggtgtcccctctgatgggcccaaaaagattacg

SEQ ID NO: 288361 - DNA, 2753 bp, Homo sapiens
agtatgatacgccgtgccggtgttatttcattcacgaggcgagcaatgagactgttcgtgagtgatggcgtcccgggttgcttgccggtgctggccgccgccgggagagcccggggcagagcagaggtgctcatcagcactgtaggcccggaagattgtgtggtcccgttcctgacccggcctaaggtccctgtcttgcagctggatagcggcaactacctcttctccactagtgcaatctgccgatatttttttttgttatctggctgggagcaagatgacctcactaaccagtggctggaatgggaagcgacagagctgcagccagctttgtctgctgccctgtactatttagtggtccaaggcaagaagggggaagatgttcttggttcagtgcggagagccctgactcacattgaccacagcttgagtcgtcagaactgtcctttcctggctggggagacagaatctctagccgacattgttttgtggggagccctatacccattactgcaagatcccgcctacctccctgaggagctgagtgccctgcacagctggttccagacactgagtacccaggaaccatgtcagcgagctgcagagactgtactgaaacagcaaggtgtcctggctctccggccttacctccaaaagcagccccagcccagccccgctgagggaagggctgtcaccaatgagcctgaggaggaggagctggctaccctatctgaggaggagattgctatggctgttactgcttgggagaagggcctagaaagtttgcccccgctgcggccccagcagaatccagtgttgcctgtggctggagaaaggaatgtgctcatcaccagtgccctcccttacgtcaacaatgtcccccaccttgggaacatcattggttgtgtgctcagtgccgatgtctttgccaggtactctcgcctccgccagtggaacaccctctatctgtgtgggacagatgagtatggtacagcaacagagaccaaggctctggaggagggactaaccccccaggagatctgcgacaagtaccacatcatccatgctgacatctaccgctggtttaacatttcgtttgatatttttggtcgcaccaccactccacagcagaccaaaatcacccaggacattttccagcagttgctgaaacgaggttttgtgctgcaagatactgtggagcaactgcgatgtgagcactgtgctcgcttcctggctgaccgcttcgtggagggcgtgtgtcccttctgtggctatgaggaggctcggggtgaccagtgtgacaagtgtggcaagctcatcaatgctgtcgagcttaagaagcctcagtgtaaagtctgccgatcatgccctgtggtgcagtcgagccagcacctgtttctggacctgcctaagctggagaagcgactggaggagtggttggggaggacattgcctggcagtgactggacacccaatgcccagtttatcacccgttcttggcttcgggatggcctcaagccacgctgcataacccgagacctcaaatggggaacccctgtacccttagaaggttttgaagacaaggtattctatgtctggtttgatgccactattggctatctgtccatcacagccaactacacagaccagtgggagagatggtggaagaacccagagcaaccctaggagctgaggataactataccttggtcagccacctcattgctacagagtacctgaactatgaggatgggaaattctctaagagccgcggtgtgggagtgtttggggacatggcccaggacacggggatccctgctgacatctggcgcttctatctgctgtacattcggcctgagggccaggacagtgctttctcctggacggacctgctgctgaagaataattctgagctgcttaacaacctgggcaacttcatcaacagagctgggatgtttgtgtctaagttctttgggggctatgtgcctgagatggtgctcacccctgatgatcagcgcctgctggcccatgtcaccctggagctccagcactatcaccagctacttgagaaggttcggatccgggatgccttgcgcagtatcctcaccatatctcgacatggcaaccaatatattcaggtgaatgagccctggaagcggattaaaggcagtgaggctgacaggcaacgggcaggaacagtgactggcttggcagtgaatatagctgccttgctctctgtcatgcttcagccttacatgcccacggttagtgccacaatccaggcccagctgcagctcccacctccagcctgcagtatcctgctgacaaacttcctgtgtaccttaccagcaggacaccagattggcacagtcagtcccttgttccaaaaattggaaaatgaccagattgaaagtttaaggcagcgctttggagggggccaggcaaaaacgtccccgaagccagcagttgtagagactgttacaacagccaagccacagcagatacaagcgctgatggatgaagtgacaaaacaaggaaacattgtccgagaactgaaagcacaaaaggcagacaagaacgaggttgctgcggaggtggcgaaactcttggatctaaagaaacagttggctgtagctgaggggaaaccccctgaagcccctaaaggcaagaagaaaaagtaaaagaccttggctcatagaaagtcactttaatagatagggacagtaataaataaatgtacaatctctatatac

SEQ ID NO: 288362 - DNA, 4023 bp, Homo sapiens
agtatgatacgccgtgccggtgttatttcattcacgaggcgagcaatgagactgttcgtgagtgatggcgtcccgggttgcttgccggtgctggccgccgccgggagagcccggggcagagcagaggtgctcatcagcactgtaggcccggaagattgtgtggtcccgttcctgacccggcctaaggtccctgtcttgcagctggatagcggcaactacctcttctccactagtgcaatctgccgatatttttttttgttatctggctgggagcaagatgacctcactaaccagtggctggaatgggaagcgacagagctgcagccagctttgtctgctgccctgtactatttagtggtccaaggcaagaagggggaagatgttcttggttcagtgcggagagccctgactcacattgaccacagcttgagtcgtcagaactgtcctttcctggctggggagacagaatctctagccgacattgttttgtggggagccctatacccattactgcaagatcccgcctacctccctgaggagctgagtgccctgcacagctggttccagacactgagtacccaggaaccatgtcagcgagctgcagagactgtactgaaacagcaaggtgtcctggctctccggccttacctccaaaagcagccccagcccagccccgctgagggaagggctgtcaccaatgagcctgaggaggaggagctggctaccctatctgaggaggagattgctatggctgttactgcttgggagaagggcctagaaagtttgcccccgctgcggccccagcagaatccagtgttgcctgtggctggagaaaggaatgtgctcatcaccagtgccctcccttacgtcaacaatgtcccccaccttgggaacatcattggttgtgtgctcagtgccgatgtctttgccaggtactctcgcctccgccagtggaacaccctctatctgtgtgggacagatgagtatggtacagcaacagagaccaaggctctggaggagggactaaccccccaggagatctgcgacaagtaccacatcatccatgctgacatctaccgctggtttaacatttcgtttgatatttttggtcgcaccaccactccacagcagaccaaaatcacccaggacattttccagcagttgctgaaacgaggttttgtgctgcaagatactgtggagcaactgcgatgtgagcactgtgctcgcttcctggctgaccgcttcgtggagggcgtgtgtcccttctgtggctatgaggaggctcggggtgaccagtgtgacaagtgtggcaagctcatcaatgctgtcgagcttaagaagcctcagtgtaaagtctgccgatcatgccctgtggtgcagtcgagccagcacctgtttctggacctgcctaagctggagaagcgactggaggagtggttggggaggacattgcctggcagtgactggacacccaatgcccagtttatcacccgttcttggcttcgggatggcctcaagccacgctgcataacccgagacctcaaatggggaacccctgtacccttagaaggttttgaagacaaggtattctatgtctggtttgatgccactattggctatctgtccatcacagccaactacacagaccagtgggagagatggtggaagaacccagagcaagtggacctgtatcagttcatggccaaagacaatgttcctttccatagcttagtctttccttgctcagccctaggagctgaggataactataccttggtcagccacctcattgctacagagtacctgaactatgaggatgggaaattctctaagagccgcggtgtgggagtgtttggggacatggcccaggacacggggatccctgctgacatctggcgcttctatctgctgtacattcggcctgagggccaggacagtgctttctcctggacggacctgctgctgaagaataattctgagctgcttaacaacctgggcaacttcatcaacagagctgggatgtttgtgtctaagttctttgggggctatgtgcctgagatggtgctcacccctgatgatcagcgcctgctggcccatgtcaccctggagctccagcactatcaccagctacttgagaaggttcggatccgggatgccttgcgcagtatcctcaccatatctcgacatggcaaccaatatattcaggtgaatgagccctggaagcggattaaaggcagtgaggctgacaggcaacgggcaggaacagtgactggcttggcagtgaatatagctgccttgctctctgtcatgcttcagccttacatgcccacggttagtgccacaatccaggcccagctgcagctcccacctccagcctgcagtatcctgctgacaaacttcctgtgtaccttaccagcaggacaccagattggcacagtcagtcccttgttccaaaaattggaaaatgaccagattgaaagtttaaggcagcgctttggagggggccaggcaaaaacgtccccgaagccagcagttgtagagactgttacaacagccaagccacagcagatacaagcgctgatggatgaagtgacaaaacaaagtatgaagcttaagccctgtgggagactggacaagctgaatcctaaatagatctttttcttgcctcactgttacctccccacccccctttatcttagggaaacattgtccgagaactgaaagcacaaaaggcagacaagaacgaggttgctgcggaggtggcgaaactcttggatctaaagaaacagttggctgtagctgaggggaaaccccctgaagcccctaaaggcaagaagaaaaagtaaaagaccttggctcatagaaagtcactttaatagatagggacagtaataaataaatgtacaatctctatatacaagctgagacctttccttttgtctactccaagccttccccctgcgtatgtgggattgagggtcacatcattggcactagtgagagggtagtcagtagccacttctgggaaaggtgggtagtgtggcccaagtgggggactgatgctcccaattgttcatgcttggtgcagattcaccattcggtcaatcagagctcggcgagtcgcctctacttccctggtcaggcgctcgatttcctgcttgagccgttcattctcttcagctagctgtgccactttcctttcattctcctgttctttctccttcatgcgctgctttccagcccgggctggggaatgaccactctgtttccgtttcctggttctcccttggtcttcctcctcttcctcctgagccagggagctctgactggaatctggagagtgagggctctgggaggtgcttgtgacctctgctggttctggctcctcctcagtcagccaagccagagaagcagggtcaagagtggtgaagatttttgattctcctcttcatttccaggaggtgaaacataggtacccccattttcatctgaagacaggacctcttgcaggtcctcataccaggcttccagctcccagctggacagtgtcccgaaggagaaaggcaatgactcagctgccatctctgcagttggatcagtctggaaaagcacatctgcaggataatggggagtggctggaacaagctccatgtagcaaacagtctatgccacaagttggcaagctggtctgatgcctgtttttgtaggtaaagttgtactggaatacagccacatctgtttatttacatattgtttatggctgctttggtgctacagtggcagagatgaagagtcacgctagagactataggacttttaacatctaaaatatttactgtcctgccgtttaaaatttttggaaaagggtaggttaagtttacctgctttcaggtgtggtgatgtatgaagatacacttccttcttgaacactctctcctcaggttccagctctgattttggctctgtcgctgccacccgctcatctttaacatgatacgctcagtgccttagacttaagtctct

SEQ ID NO: 288363 - DNA, 3863 bp, Homo sapiens
agtatgatacgccgtgccggtgttatttcattcacgaggcgagcaatgagactgttcgtgagtgatggcgtcccgggttgcttgccggtgctggccgccgccgggagagcccggggcagagcagaggtgctcatcagcactgtaggcccggaagattgtgtggtcccgttcctgacccggcctaaggtccctgtcttgcagctggatagcggcaactacctcttctccactagtgcaatctgccgatatttttttttgttatctggctgggagcaagatgacctcactaaccagtggctggaatgggaagcgacagagctgcagccagctttgtctgctgccctgtactatttagtggtccaaggcaagaagggggaagatgttcttggttcagtgcggagagccctgactcacattgaccacagcttgagtcgtcagaactgtcctttcctggctggggagacagaatctctagccgacattgttttgtggggagccctatacccattactgcaagatcccgcctacctccctgaggagctgagtgccctgcacagctggttccagacactgagtacccaggaaccatgtcagcgagctgcagagactgtactgaaacagcaaggtgtcctggctctccggccttacctccaaaagcagccccagcccagccccgctgagggaagggctgtcaccaatgagcctgaggaggaggagctggctaccctatctgaggaggagattgctatggctgttactgcttgggagaagggcctagaaagtttgcccccgctgcggccccagcagaatccagtgttgcctgtggctggagaaaggaatgtgctcatcaccagtgccctcccttacgtcaacaatgtcccccaccttgggaacatcattggttgtgtgctcagtgccgatgtctttgccaggtactctcgcctccgccagtggaacaccctctatctgtgtgggacagatgagtatggtacagcaacagagaccaaggctctggaggagggactaaccccccaggagatctgcgacaagtaccacatcatccatgctgacatctaccgctggtttaacatttcgtttgatatttttggtcgcaccaccactccacagcagaccaaaatcacccaggacattttccagcagttgctgaaacgaggttttgtgctgcaagatactgtggagcaactgcgatgtgagcactgtgctcgcttcctggctgaccgcttcgtggagggcgtgtgtcccttctgtggctatgaggaggctcggggtgaccagtgtgacaagtgtggcaagctcatcaatgctgtcgagcttaagaagcctcagtgtaaagtctgccgatcatgccctgtggtgcagtcgagccagcacctgtttctggacctgcctaagctggagaagcgactggaggagtggttggggaggacattgcctggcagtgactggacacccaatgcccagtttatcacccgttcttggcttcgggatggcctcaagccacgctgcataacccgagacctcaaatggggaacccctgtacccttagaaggttttgaagacaaggtattctatgtctggtttgatgccactattggctatctgtccatcacagccaactacacagaccagtgggagagatggtggaagaacccagagcaagtggacctgtatcagttcatggccaaagacaatgttcctttccatagcttagtctttccttgctcagccctaggagctgaggataactataccttggtcagccacctcattgctacagagtacctgaactatgaggatgggaaattctctaagagccgcggtgtgggagtgtttggggacatggcccaggacacggggatccctgctgacatctggcgcttctatctgctgtacattcggcctgagggccaggacagtgctttctcctggacggacctgctgctgaagaataattctgagctgcttaacaacctgggcaacttcatcaacagagctgggatgtttgtgtctaagttctttgggggctatgtgcctgagatggtgctcacccctgatgatcagcgcctgctggcccatgtcaccctggagctccagcactatcaccagctacttgagaaggttcggatccgggatgccttgcgcagtatcctcaccatatctcgacatggcaaccaatatattcaggtgaatgagccctggaagcggattaaaggcagtgaggctgacaggcaacgggcaggaacagtgactggcttggcagtgaatatagctgccttgctctctgtcatgcttcagccttacatgcccacggttagtgccacaatccaggcccagctgcagctcccacctccagcctgcagtatcctgctgacaaacttcctgtgtaccttaccagcaggacaccagattggcacagtcagtcccttgttccaaaaattggaaaatgaccagattgaaagtttaaggcagcgctttggagggggccaggcaaaaacgtccccgaagccagcagttgtagagactgttacaacagccaagccacagcagatacaagcgctgatggatgaagtgacaaaacaaggcgaaactcttggatctaaagaaacagttggctgtagctgaggggaaaccccctgaagcccctaaaggcaagaagaaaaagtaaaagaccttggctcatagaaagtcactttaatagatagggacagtaataaataaatgtacaatctctatatacaagctgagacctttccttttgtctactccaagccttccccctgcgtatgtgggattgagggtcacatcattggcactagtgagagggtagtcagtagccacttctgggaaaggtgggtagtgtggcccaagtgggggactgatgctcccaattgttcatgcttggtgcagattcaccattcggtcaatcagagctcggcgagtcgcctctacttccctggtcaggcgctcgatttcctgcttgagccgttcattctcttcagctagctgtgccactttcctttcattctcctgttctttctccttcatgcgctgctttccagcccgggctggggaatgaccactctgtttccgtttcctggttctcccttggtcttcctcctcttcctcctgagccagggagctctgactggaatctggagagtgagggctctgggaggtgcttgtgacctctgctggttctggctcctcctcagtcagccaagccagagaagcagggtcaagagtggtgaagatttttgattctcctcttcatttccaggaggtgaaacataggtacccccattttcatctgaagacaggacctcttgcaggtcctcataccaggcttccagctcccagctggacagtgtcccgaaggagaaaggcaatgactcagctgccatctctgcagttggatcagtctggaaaagcacatctgcaggataatggggagtggctggaacaagctccatgtagcaaacagtctatgccacaagttggcaagctggtctgatgcctgtttttgtaggtaaagttgtactggaatacagccacatctgtttatttacatattgtttatggctgctttggtgctacagtggcagagatgaagagtcacgctagagactataggacttttaacatctaaaatatttactgtcctgccgtttaaaatttttggaaaagggtaggttaagtttacctgctttcaggtgtggtgatgtatgaagatacacttccttcttgaacactctctcctcaggttccagctctgattttggctctgtcgctgccacccgctcatctttaacatgatacgctcagtgccttagacttaagtctct

SEQ ID NO: 288364 - DNA, 4177 bp, Homo sapiens
agtatgatacgccgtgccggtgttatttcattcacgaggcgagcaatgagactgttcgtgagtgatggcgtcccgggttgcttgccggtgctggccgccgccgggagagcccggggcagagcagaggtgctcatcagcactgtaggcccggaagattgtgtggtcccgttcctgacccggcctaaggtccctgtcttgcagctggatagcggcaactacctcttctccactagtgcaatctgccgatatttttttttgttatctggctgggagcaagatgacctcactaaccagtggctggaatgggaagcgacagagctgcagccagctttgtctgctgccctgtactatttagtggtccaaggcaagaagggggaagatgttcttggttcagtgcggagagccctgactcacattgaccacagcttgagtcgtcagaactgtcctttcctggctggggagacagaatctctagccgacattgttttgtggggagccctatacccattactgcaagatcccgcctacctccctgaggagctgagtgccctgcacagctggttccagacactgagtacccaggaaccatgtcagcgagctgcagagactgtactgaaacagcaaggtgtcctggctctccggccttacctccaaaagcagccccagcccagccccgctgagggaagggctgtcaccaatgagcctgaggaggaggagctggctaccctatctgaggaggagattgctatggctgttactgcttgggagaagggcctagaaagtttgcccccgctgcggccccagcagaatccagtgttgcctgtggctggagaaaggaatgtgctcatcaccagtgccctcccttacgtcaacaatgtcccccaccttgggaacatcattggttgtgtgctcagtgccgatgtctttgccaggtactctcgcctccgccagtggaacaccctctatctgtgtgggacagatgagtatggtacagcaacagagaccaaggctctggaggagggactaaccccccaggagatctgcgacaagtaccacatcatccatgctgacatctaccgctggtttaacatttcgtttgatatttttggtcgcaccaccactccacagcagaccaaaatcacccaggacattttccagcagttgctgaaacgaggttttgtgctgcaagatactgtggagcaactgcgatgtgagcactgtgctcgcttcctggctgaccgcttcgtggagggcgtgtgtcccttctgtggctatgaggaggctcggggtgaccagtgtgacaagtgtggcaagctcatcaatgctgtcgagcttaagaagcctcagtgtaaagtctgccgatcatgccctgtggtgcagtcgagccagcacctgtttctggacctgcctaagctggagaagcgactggaggagtggttggggaggacattgcctggcagtgactggacacccaatgcccagtttatcacccgttcttggcttcgggatggcctcaagccacgctgcataacccgagacctcaaatggggaacccctgtacccttagaaggttttgaagacaaggtattctatgtctggtttgatgccactattggctatctgtccatcacagccaactacacagaccagtgggagagatggtggaagaacccagagcaagtggacctgtatcagttcatggccaaagacaatgttcctttccatagcttagtctttccttgctcagccctaggagctgaggataactataccttggtcagccacctcattgctacagagtacctgaactatgaggatgggaaattctctaagagccgcggtgtgggagtgtttggggacatggcccaggacacggggatccctgctgacatctggcgcttctatctgctgtacattcggcctgagggccaggacagtgctttctcctggacggacctgctgctgaagaataattctgagctgcttaacaacctgggcaacttcatcaacagagctgggatgtttgtgtctaagttctttgggggctatgtgcctgagatggtgctcacccctgatgatcagcgcctgctggcccatgtcaccctggagctccagcactatcaccagctacttgagaaggttcggatccgggatgccttgcgcagtatcctcaccatatctcgacatggcaaccaatatattcaggtgaatgagccctggaagcggattaaaggcagtgaggctgacaggcaacgggcaggaacagtgactggcttggcagtgaatatagctgccttgctctctgtcatgcttcagccttacatgcccacggttagtgccacaatccaggcccagctgcagctcccacctccagcctgcagtatcctgctgacaaacttcctgtgtaccttaccagcaggacaccagattggcacagtcagtcccttgttccaaaaattggaaaatgaccagattgaaagtttaaggcagcgctttggagggggccagtgagaaagctaaaggctgtgccctcgctccacaacagccacagcatcacttccctaatttccctaagtagtcctcacccatcactctttccatcttttggccctgccgcttcctcacttacagtttttctttcctgtcttaactagaagagaccttcgacttaaaggtaaccactttccctctgagatgctgtataaaactggaggttaggggatatttatggttgctggtgataactttgttgttctccaggcaaaaacgtccccgaagccagcagttgtagagactgttacaacagccaagccacagcagatacaagcgctgatggatgaagtgacaaaacaaggaaacattgtccgagaactgaaagcacaaaaggcagacaagaacgaggttgctgcggaggtggcgaaactcttggatctaaagaaacagttggctgtagctgaggggaaaccccctgaagcccctaaaggcaagaagaaaaagtaaaagaccttggctcatagaaagtcactttaatagatagggacagtaataaataaatgtacaatctctatatacaagctgagacctttccttttgtctactccaagccttccccctgcgtatgtgggattgagggtcacatcattggcactagtgagagggtagtcagtagccacttctgggaaaggtgggtagtgtggcccaagtgggggactgatgctcccaattgttcatgcttggtgcagattcaccattcggtcaatcagagctcggcgagtcgcctctacttccctggtcaggcgctcgatttcctgcttgagccgttcattctcttcagctagctgtgccactttcctttcattctcctgttctttctccttcatgcgctgctttccagcccgggctggggaatgaccactctgtttccgtttcctggttctcccttggtcttcctcctcttcctcctgagccagggagctctgactggaatctggagagtgagggctctgggaggtgcttgtgacctctgctggttctggctcctcctcagtcagccaagccagagaagcagggtcaagagtggtgaagatttttgattctcctcttcatttccaggaggtgaaacataggtacccccattttcatctgaagacaggacctcttgcaggtcctcataccaggcttccagctcccagctggacagtgtcccgaaggagaaaggcaatgactcagctgccatctctgcagttggatcagtctggaaaagcacatctgcaggataatggggagtggctggaacaagctccatgtagcaaacagtctatgccacaagttggcaagctggtctgatgcctgtttttgtaggtaaagttgtactggaatacagccacatctgtttatttacatattgtttatggctgctttggtgctacagtggcagagatgaagagtcacgctagagactataggacttttaacatctaaaatatttactgtcctgccgtttaaaatttttggaaaagggtaggttaagtttacctgctttcaggtgtggtgatgtatgaagatacacttccttcttgaacactctctcctcaggttccagctctgattttggctctgtcgctgccacccgctcatctttaacatgatacgctcagtgccttagacttaagtctct

SEQ ID NO: 288365 - DNA, 3867 bp, Homo sapiens
agtatgatacgccgtgccggtgttatttcattcacgaggcgagcaatgagactgttcgtgagtgatggcgtcccgggttgcttgccggtgctggccgccgccgggagagcccggggcagagcagaggtgctcatcagcactgtaggcccggaagattgtgtggtcccgttcctgacccggcctaaggtccctgtcttgcagctggatagcggcaactacctcttctccactagtgcaatctgccgatatttttttttgttatctggctgggagcaagatgacctcactaaccagtggctggaatgggaagcgacagagctgcagccagctttgtctgctgccctgtactatttagtggtccaaggcaagaagggggaagatgttcttggttcagtgcggagagccctgactcacattgaccacagcttgagtcgtcagaactgtcctttcctggctggggagacagaatctctagccgacattgttttgtggggagccctatacccattactgcaagatcccgcctacctccctgaggagctgagtgccctgcacagctggttccagacactgagtacccaggaaccatgtcagcgagctgcagagactgtactgaaacagcaaggtgtcctggctctccggccttacctccaaaagcagccccagcccagccccgctgagggaagggctgtcaccaatgagcctgaggaggaggagctggctaccctatctgaggaggagattgctatggctgttactgcttgggagaagggcctagaaagtttgcccccgctgcggccccagcagaatccagtgttgcctgtggctggagaaaggaatgtgctcatcaccagtgccctcccttacgtcaacaatgtcccccaccttgggaacatcattggttgtgtgctcagtgccgatgtctttgccaggtactctcgcctccgccagtggaacaccctctatctgtgtgggacagatgagtatggtacagcaacagagaccaaggctctggaggagggactaaccccccaggagatctgcgacaagtaccacatcatccatgctgacatctaccgctggtttaacatttcgtttgatatttttggtcgcaccaccactccacagcagaccaaaatcacccaggacattttccagcagttgctgaaacgaggttttgtgctgcaagatactgtggagcaactgcgatgtgagcactgtgctcgcttcctggctgaccgcttcgtggagggcgtgtgtcccttctgtggctatgaggaggctcggggtgaccagtgtgacaagtgtggcaagctcatcaatgctgtcgagcttaagaagcctcagtgtaaagtctgccgatcatgccctgtggtgcagtcgagccagcacctgtttctggacctgcctaagctggagaagcgactggaggagtggttggggaggacattgcctggcagtgactggacacccaatgcccagtttatcacccgttcttggcttcgggatggcctcaagccacgctgcataacccgagacctcaaatggggaacccctgtacccttagaaggttttgaagacaaggtattctatgtctggtttgatgccactattggctatctgtccatcacagccaactacacagaccagtgggagagatggtggaagaacccagagcaagtggacctgtatcagttcatggccaaagacaatgttcctttccatagcttagtctttccttgctcagccctaggagctgaggataactataccttggtcagccacctcattgctacagagtacctgaactatgaggatgggaaattctctaagagccgcggtgtgggagtgtttggggacatggcccaggacacggggatccctgctgacatctggcgcttctatctgctgtacattcggcctgagggccaggacagtgctttctcctggacggacctgctgctgaagaataattctgagctgcttaacaacctgggcaacttcatcaacagagctgggatgtttgtgtctaagttctttgggggctatgtgcctgagatggtgctcacccctgatgatcagcgcctgctggcccatgtcaccctggagctccagcactatcaccagctacttgagaaggttcggatccgggatgccttgcgcagtatcctcaccatatctcgacatggcaaccaatatattcaggtgaatgagccctggaagcggattaaaggcagtgaggctgacaggcaacgggcaggaacagtgactggcttggcagtgaatatagctgccttgctctctgtcatgcttcagcctgcagtatcctgctgacaaacttcctgtgtaccttaccagcaggacaccagattggcacagtcagtcccttgttccaaaaattggaaaatgaccagattgaaagtttaaggcagcgctttggagggggccaggcaaaaacgtccccgaagccagcagttgtagagactgttacaacagccaagccacagcagatacaagcgctgatggatgaagtgacaaaacaaggaaacattgtccgagaactgaaagcacaaaaggcagacaagaacgaggttgctgcggaggtggcgaaactcttggatctaaagaaacagttggctgtagctgaggggaaaccccctgaagcccctaaaggcaagaagaaaaagtaaaagaccttggctcatagaaagtcactttaatagatagggacagtaataaataaatgtacaatctctatatacaagctgagacctttccttttgtctactccaagccttccccctgcgtatgtgggattgagggtcacatcattggcactagtgagagggtagtcagtagccacttctgggaaaggtgggtagtgtggcccaagtgggggactgatgctcccaattgttcatgcttggtgcagattcaccattcggtcaatcagagctcggcgagtcgcctctacttccctggtcaggcgctcgatttcctgcttgagccgttcattctcttcagctagctgtgccactttcctttcattctcctgttctttctccttcatgcgctgctttccagcccgggctggggaatgaccactctgtttccgtttcctggttctcccttggtcttcctcctcttcctcctgagccagggagctctgactggaatctggagagtgagggctctgggaggtgcttgtgacctctgctggttctggctcctcctcagtcagccaagccagagaagcagggtcaagagtggtgaagatttttgattctcctcttcatttccaggaggtgaaacataggtacccccattttcatctgaagacaggacctcttgcaggtcctcataccaggcttccagctcccagctggacagtgtcccgaaggagaaaggcaatgactcagctgccatctctgcagttggatcagtctggaaaagcacatctgcaggataatggggagtggctggaacaagctccatgtagcaaacagtctatgccacaagttggcaagctggtctgatgcctgtttttgtaggtaaagttgtactggaatacagccacatctgtttatttacatattgtttatggctgctttggtgctacagtggcagagatgaagagtcacgctagagactataggacttttaacatctaaaatatttactgtcctgccgtttaaaatttttggaaaagggtaggttaagtttacctgctttcaggtgtggtgatgtatgaagatacacttccttcttgaacactctctcctcaggttccagctctgattttggctctgtcgctgccacccgctcatctttaacatgatacgctcagtgccttagacttaagtctct

SEQ ID NO: 288366 - DNA, 2786 bp, Homo sapiens
agtatgatacgccgtgccggtgttatttcattcacgaggcgagcaatgagactgttcgtgagtgatggcgtcccgggttgcttgccggtgctggccgccgccgggagagcccggggcagagcagaggtgctcatcagcactgtaggcccggaagattgtgtggtcccgttcctgacccggcctaaggtccctgtcttgcagctggatagcggcaactacctcttctccactagtgcaatctgccgatatttttttttgttatctggctgggagcaagatgacctcactaaccagtggctggaatgggaagcgacagagctgcagccagctttgtctgctgccctgtactatttagtggtccaaggcaagaagggggaagatgttcttggttcagtgcggagagccctgactcacattgaccacagcttgagtcgtcagaactgtcctttcctggctggggagacagaatctctagccgacattgttttgtggggagccctatacccattactgcaagatcccgcctacctccctgaggagctgagtgccctgcacagctggttccagacactgagtacccaggaaccatgtcagcgagctgcagagactgtactgaaacagcaaggtgtcctggctctccggccttacctccaaaagcagccccagcccagccccgctgagggaagggctgtcaccaatgagcctgaggaggaggagctggctaccctatctgaggaggagattgctatggctgttactgcttgggagaagggcctagaaagttgcctgtggctggagaaaggaatgtgctcatcaccagtgccctcccttacgtcaacaatgtcccccaccttgggaacatcattggttgtgtgctcagtgccgatgtctttgccaggtactctcgcctccgccagtggaacaccctctatctgtgtgggacagatgagtatggtacagcaacagagaccaaggctctggaggagggactaaccccccaggagatctgcgacaagtaccacatcatccatgctgacatctaccgctggtttaacatttcgtttgatatttttggtcgcaccaccactccacagcagaccaaaatcacccaggacattttccagcagttgctgaaacgaggttttgtgctgcaagatactgtggagcaactgcgatgtgagcactgtgctcgcttcctggctgaccgcttcgtggagggcgtgtgtcccttctgtggctatgaggaggctcggggtgaccagtgtgacaagtgtggcaagctcatcaatgctgtcgagcttaagaagcctcagtgtaaagtctgccgatcatgccctgtggtgcagtcgagccagcacctgtttctggacctgcctaagctggagaagcgactggaggagtggttggggaggacattgcctggcagtgactggacacccaatgcccagtttatcacccgttcttggcttcgggatggcctcaagccacgctgcataacccgagacctcaaatggggaacccctgtacccttagaaggttttgaagacaaggtattctatgtctggtttgatgccactattggctatctgtccatcacagccaactacacagaccagtgggagagatggtggaagaacccagagcaagtggacctgtatcagttcatggccaaagacaatgttcctttccatagcttagtctttccttgctcagccctaggagctgaggataactataccttggtcagccacctcattgctacagagtacctgaactatgaggatgggaaattctctaagagccgcggtgtgggagtgtttggggacatggcccaggacacggggatccctgctgacatctggcgcttctatctgctgtacattcggcctgagggccaggacagtgctttctcctggacggacctgctgctgaagaataattctgagctgcttaacaacctgggcaacttcatcaacagagctgggatgtttgtgtctaagttctttgggggctatgtgcctgagatggtgctcacccctgatgatcagcgcctgctggcccatgtcaccctggagctccagcactatcaccagctacttgagaaggttcggatccgggatgccttgcgcagtatcctcaccatatctcgacatggcaaccaatatattcaggtgaatgagccctggaagcggattaaaggcagtgaggctgacaggcaacgggcaggaacagtgactggcttggcagtgaatatagctgccttgctctctgtcatgcttcagccttacatgcccacggttagtgccacaatccaggcccagctgcagctcccacctccagcctgcagtatcctgctgacaaacttcctgtgtaccttaccagcaggacaccagattggcacagtcagtcccttgttccaaaaattggaaaatgaccagattgaaagtttaaggcagcgctttggagggggccaggcaaaaacgtccccgaagccagcagttgtagagactgttacaacagccaagccacagcagatacaagcgctgatggatgaagtgacaaaacaaggaaacattgtccgagaactgaaagcacaaaaggcagacaagaacgaggttgctgcggaggtggcgaaactcttggatctaaagaaacagttggctgtagctgaggggaaaccccctgaagcccctaaaggcaagaagaaaaagtaaaagaccttggctcatagaaagtcactttaatagatagggacagtaataaataaatgtacaatctctatatac

SEQ ID NO: 288367 - DNA, 3450 bp, Homo sapiens
agtatgatacgccgtgccggtgttatttcattcacgaggcgagcaatgagactgttcgtgagtgatggcgtcccgggttgcttgccggtgctggccgccgccgggagagcccggggcagagcagaggtgctcatcagcactgtaggcccggaagattgtgtggtcccgttcctgacccggcctaaggtccctgtcttgcagctggatagcggcaactacctcttctccactagtgcaatctgccgatatttttttttgttatctggctgggagcaagatgacctcactaaccagtggctggaatgggaagcgacagagctgcagccagctttgtctgctgccctgtactatttagtggtccaaggcaagaagggggaagatgttcttggttcagtgcggagagccctgactcacattgaccacagcttgagtcgtcagaactgtcctttcctggctggggagacagaatctctagccgacattgttttgtggggagccctatacccattactgcaagatcccgcctacctccctgaggagctgagtgccctgcacagctggttccagacactgagtacccaggaaccatgtcagcgagctgcagagactgtactgaaacagcaaggtgtcctggctctccggccttacctccaaaagcagccccagcccagccccgctgagggaagggctgtcaccaatgagcctgaggaggaggagctggctaccctatctgaggaggagattgctatggctgttactgcttgggagaagggcctagaaagtttgcccccgctgcggccccagcagaatccagtgttgcctgtggctggagaaaggaatgtgctcatcaccagtgccctcccttacgtcaacaatgtcccccaccttgggaacatcattggttgtgtgctcagtgccgatgtctttgccaggtactctcgcctccgccagtggaacaccctctatctgtgtgggacagatgagtatggtacagcaacagagaccaaggctctggaggagggactaaccccccaggagatctgcgacaagtaccacatcatccatgctgacatctaccgctggtttaacatttcgtttgatatttttggtcgcaccaccactccacagcagaccaaaatcacccaggacattttccagcagttgctgaaacgaggttttgtgctgcaagatactgtggagcaactgcgatgtgagcactgtgctcgcttcctggctgaccgcttcgtggagggcgtgtgtcccttctgtggctatgaggaggctcggggtgaccagtgtgacaagtgtggcaagctcatcaatgctgtcgagcttaagaagcctcagtgtaaagtctgccgatcatgccctgtggtgcagtcgagccagcacctgtttctggacctgcctaagctggagaagcgactggaggagtggttggggaggacattgcctggcagtgactggacacccaatgcccagtttatcacccgttcttggcttcgggatggcctcaagccacgctgcataacccgagacctcaaatggggaacccctgtacccttagaaggttttgaagacaaggtattctatgtctggtttgatgccactattggctatctgtccatcacagccaactacacagaccagtgggagagatggtggaagaacccagagcaagtggacctgtatcagttcatggccaaagacaatgttcctttccatagcttagtctttccttgctcagccctaggagctgaggataactataccttggtcagccacctcattgctacagagtacctgaactatgaggatgggaaattctctaagagccgcggtgtgggagtgtttggggacatggcccaggacacggggatccctgctgacatctggcgcttctatctgctgtacattcggcctgagggccaggacagtgctttctcctggacggacctgctgctgaagaataattctgagctgcttaacaacctgggcaacttcatcaacagagctgggatgtttgtgtctaagttctttgggggctatgtgcctgagatggtgctcacccctgatgatcagcgcctgctggcccatgtcaccctggagctccagcactatcaccagctacttgagaaggttcggatccgggatgccttgcgcagtatcctcaccatatctcgacatgggcgaaactcttggatctaaagaaacagttggctgtagctgaggggaaaccccctgaagcccctaaaggcaagaagaaaaagtaaaagaccttggctcatagaaagtcactttaatagatagggacagtaataaataaatgtacaatctctatatacaagctgagacctttccttttgtctactccaagccttccccctgcgtatgtgggattgagggtcacatcattggcactagtgagagggtagtcagtagccacttctgggaaaggtgggtagtgtggcccaagtgggggactgatgctcccaattgttcatgcttggtgcagattcaccattcggtcaatcagagctcggcgagtcgcctctacttccctggtcaggcgctcgatttcctgcttgagccgttcattctcttcagctagctgtgccactttcctttcattctcctgttctttctccttcatgcgctgctttccagcccgggctggggaatgaccactctgtttccgtttcctggttctcccttggtcttcctcctcttcctcctgagccagggagctctgactggaatctggagagtgagggctctgggaggtgcttgtgacctctgctggttctggctcctcctcagtcagccaagccagagaagcagggtcaagagtggtgaagatttttgattctcctcttcatttccaggaggtgaaacataggtacccccattttcatctgaagacaggacctcttgcaggtcctcataccaggcttccagctcccagctggacagtgtcccgaaggagaaaggcaatgactcagctgccatctctgcagttggatcagtctggaaaagcacatctgcaggataatggggagtggctggaacaagctccatgtagcaaacagtctatgccacaagttggcaagctggtctgatgcctgtttttgtaggtaaagttgtactggaatacagccacatctgtttatttacatattgtttatggctgctttggtgctacagtggcagagatgaagagtcacgctagagactataggacttttaacatctaaaatatttactgtcctgccgtttaaaatttttggaaaagggtaggttaagtttacctgctttcaggtgtggtgatgtatgaagatacacttccttcttgaacactctctcctcaggttccagctctgattttggctctgtcgctgccacccgctcatctttaacatgatacgctcagtgccttagacttaagtctct

SEQ ID NO: 288368 - DNA, 3072 bp, Homo sapiens
agtatgatacgccgtgccggtgttatttcattcacgaggcgagcaatgagactgttcgtgagtgatggcgtcccgggttgcttgccggtgctggccgccgccgggagagcccggggcagagcagaggtgctcatcagcactgtaggcccggaagattgtgtggtcccgttcctgacccggcctaaggtccctgtcttgcagctggatagcggcaactacctcttctccactagtgcaatctgccgatatttttttttgttatctggctgggagcaagatgacctcactaaccagtggctggaatgggaagcgacagagctgcagccagctttgtctgctgccctgtactatttagtggtccaaggcaagaagggggaagatgttcttggttcagtgcggagagccctgactcacattgaccacagcttgagtcgtcagaactgtcctttcctggctggggagacagaatctctagccgacattgttttgtggggagccctatacccattactgcaagatcccgcctacctccctgaggagctgagtgccctgcacagctggttccagacactgagtacccaggaaccatgtcagcgagctgcagagactgtactgaaacagcaaggtgtcctggctctccggccttacctccaaaagcagccccagcccagccccgctgagggaagggctgtcaccaatgagcctgaggaggaggagctggctaccctatctgaggaggagattgctatggctgttactgcttgggagaagggcctagaaagtttgcccccgctgcggccccagcagaatccagtgttgcctgtggctggagaaaggaatgtgctcatcaccagtgccctcccttacgtcaacaatgtcccccaccttgggaacatcattggttgtgtgctcagtgccgatgtctttgccaggtactctcgcctccgccagtggaacaccctctatctgtgtgggacagatgagtatggtacagcaacagagaccaaggctctggaggagggactaaccccccaggagatctgcgacaagtaccacatcatccatgctgacatctaccgctggtttaacatttcgtttgatatttttggtcgcaccaccactccacagcagaccaaaatcacccaggacattttccagcagttgctgaaacgaggttttgtgctgcaagatactgtggagcaactgcgatgtgagcactgtgctcgcttcctggctgaccgcttcgtggagggcgtgtgtcccttctgtggctatgaggaggctcggggtgaccagtgtgacaagtgtggcaagctcatcaatgctgtcgagcttaagaagcctcagtgtaaagtctgccgatcatgccctgtggtgcagtcgagccagcacctgtttctggacctgcctaagctggagaagcgactggaggagtggttggggaggacattgcctggcagtgactggacacccaatgcccagtttatcacccgttcttggcttcgggatggcctcaagccacgctgcataacccgagacctcaaatggggaacccctgtacccttagaaggttttgaagacaaggtattctatgtctggtttgatgccactattggctatctgtccatcacagccaactacacagaccagtgggagagatggtggaagaacccagagcaagtggacctgtatcagttcatggccaaagacaatgttcctttccatagcttagtctttccttgctcagccctaggagctgaggataactataccttggtcagccacctcattgctacagagtacctgaactatgaggatgggaaattctctaagagccgcggtgtgggagtgtttggggacatggcccaggacacggggatccctgctgacatctggcgcttctatctgctgtacattcggcctgagggccaggacagtgctttctcctggacggacctgctgctgaagaataattctgagctgcttaacaacctgggcaacttcatcaacagagctgggatgtttgtgtctaagttctttgggggctatgtgcctgagatggtgctcacccctgatgatcagcgcctgctggcccatgtcaccctggagctccagcactatcaccagctacttgagaaggttcggatccgggatgccttgcgcagtatcctcaccatatctcgacatggcaaccaatatattcaggtgaatgagccctggaagcggattaaaggcagtgaggctgacaggcaacgggcaggaacagtgactggcttggcagtgaatatagctgccttgctctctgtcatgcttcagccttacatgcccacggttagtgccacaatccaggcccagctgcagctcccacctccagcctgcagtatcctgctgacaaacttcctgtgtaccttaccagcaggacaccagattggcacagtcagtcccttgttccaaaaattggaaaatgaccagattgaaagtttaaggcagcgctttggagggggccagtgagaaagctaaaggctgtgccctcgctccacaacagccacagcatcacttccctaatttccctaagtagtcctcacccatcactctttccatcttttggccctgccgcttcctcacttacagtttttctttcctgtcttaactagaagagaccttcgacttaaaggtaaccactttccctctgagatgctgtataaaactggaggttaggggatatttatggttgctggtgataactttgttgttctccaggcaaaaacgtccccgaagccagcagttgtagagactgttacaacagccaagccacagcagatacaagcgctgatggatgaagtgacaaaacaaggaaacattgtccgagaactgaaagcacaaaaggcagacaagaacgaggttgctgcggaggtggcgaaactcttggatctaaagaaacagttggctgtagctgaggggaaaccccctgaagcccctaaaggcaagaagaaaaagtaaaagaccttggctcatagaaagtcactttaatagatagggacagtaataaataaatgtacaatctctatatac

SEQ ID NO: 288369 - DNA, 2758 bp, Homo sapiens
agtatgatacgccgtgccggtgttatttcattcacgaggcgagcaatgagactgttcgtgagtgatggcgtcccgggttgcttgccggtgctggccgccgccgggagagcccggggcagagcagaggtgctcatcagcactgtaggcccggaagattgtgtggtcccgttcctgacccggcctaaggtccctgtcttgcagctggatagcggcaactacctcttctccactagtgcaatctgccgatatttttttttgttatctggctgggagcaagatgacctcactaaccagtggctggaatgggaagcgacagagctgcagccagctttgtctgctgccctgtactatttagtggtccaaggcaagaagggggaagatgttcttggttcagtgcggagagccctgactcacattgaccacagcttgagtcgtcagaactgtcctttcctggctggggagacagaatctctagccgacattgttttgtggggagccctatacccattactgcaagatcccgcctacctccctgaggagctgagtgccctgcacagctggttccagacactgagtacccaggaaccatgtcagcgagctgcagagactgtactgaaacagcaaggtgtcctggctctccggccttacctccaaaagcagccccagcccagccccgctgagggaagggctgtcaccaatgagcctgaggaggaggagctggctaccctatctgaggaggagattgctatggctgttactgcttgggagaagggcctagaaagtttgcccccgctgcggccccagcagaatccagtgttgcctgtggctggagaaaggaatgtgctcatcaccagtgccctcccttacgtcaacaatgtcccccaccttgggaacatcattggttgtgtgctcagtgccgatgtctttgccaggtactctcgcctccgccagtggaacaccctctatctgtgtgggacagatgagtatggtacagcaacagagaccaaggctctggaggagggactaaccccccaggagatctgcgacaagtaccacatcatccatgctgacatctaccgctggtttaacatttcgtttgatatttttggtcgcaccaccactccacagcagaccaaaatcacccaggacattttccagcagttgctgaaacgaggttttgtgctgcaagatactgtggagcaactgcgatgtgagcactgtgctcgcttcctggctgaccgcttcgtggagggcgtgtgtcccttctgtggctatgaggaggctcggggtgaccagtgtgacaagtgtggcaagctcatcaatgctgtcgagcttaagaagcctcagtgtaaagtctgccgatcatgccctgtggtgcagtcgagccagcacctgtttctggacctgcctaagctggagaagcgactggaggagtggttggggaggacattgcctggcagtgactggacacccaatgcccagtttatcacccgttcttggcttcgggatggcctcaagccacgctgcataacccgagacctcaaatggggaacccctgtacccttagaaggttttgaagacaaggtattctatgtctggtttgatgccactattggctatctgtccatcacagccaactacacagaccagtgggagagatggtggaagaacccagagcaagtggacctgtatcagttcatggccaaagacaatgttcctttccatagcttagtctttccttgctcagccctaggagctgaggataactataccttggtcagccacctcattgctacagagtacctgaactatgaggatgggaaattctctaagagccgcggtgtgggagtgtttggggacatggcccaggacacggggatccctgctgacatctggcgcttctatctgctgtacattcggcctgagggccaggacagtgctttctcctggacggacctgctgctgaagaataattctgagctgcttaacaacctgggcaacttcatcaacagagctgggatgtttgtgtctaagttctttgggggctatgtgcctgagatggtgctcacccctgatgatcagcgcctgctggcccatgtcaccctggagctccagcactatcaccagctacttgagaaggttcggatccgggatgccttgcgcagtatcctcaccatatctcgacatggcaaccaatatattcaggtgaatgagccctggaagcggattaaaggcagtgaggctgacaggcaacgggcaggaacagtgactggcttggcagtgaatatagctgccttgctctctgtcatgcttcagccttacatgcccacggttagtgccacaatccaggcccagctgcagctcccacctccagcctgcagtatcctgctgacaaacttcctgtgtaccttaccagcaggacaccagattggcacagtcagtcccttgttccaaaaattggaaaatgaccagattgaaagtttaaggcagcgctttggagggggccaggcaaaaacgtccccgaagccagcagttgtagagactgttacaacagccaagccacagcagatacaagcgctgatggatgaagtgacaaaacaaggcgaaactcttggatctaaagaaacagttggctgtagctgaggggaaaccccctgaagcccctaaaggcaagaagaaaaagtaaaagaccttggctcatagaaagtcactttaatagatagggacagtaataaataaatgtacaatctctatatac

SEQ ID NO: 288370 - DNA, 2777 bp, Homo sapiens
agtatgatacgccgtgccggtgttatttcattcacgaggcgagcaatgagactgttcgtgagtgatggcgtcccgggttgcttgccggtgctggccgccgccgggagagcccggggcagagcagaggtgctcatcagcactgtaggcccggaagattgtgtggtcccgttcctgacccggcctaaggtccctgtcttgcagctggatagcggcaactacctcttctccactagtgcaatctgccgatatttttttttgttatctggctgggagcaagatgacctcactaaccagtggctggaatgggaagcgacagagctgcagccagctttgtctgctgccctgtactatttagtggtccaaggcaagaagggggaagatgttcttggttcagtgcggagagccctgactcacattgaccacagcttgagtcgtcagaactgtcctttcctggctggggagacagaatctctagccgacattgttttgtggggagccctatacccattactgcaagatcccgcctacctccctgaggagctgagtgccctgcacagctggttccagacactgagtacccaggaaccatgtcagcgagctgcagagactgtactgaaacagcaaggtgtcctggctctccggccttacctccaaaagcagccccagcccagccccgctgagggaagggctgtcaccaatgagcctgaggaggaggagctggctaccctatctgaggaggagattgctatggctgttactgcttgggagaagggcctagaaagtttgcccccgctgcggccccagcagaatccagtgttgcctgtggctggagaaaggaatgtgctcatcaccagtgccctcccttacgtcaacaatgtcccccaccttgggaacatcattggttgtgtgctcagtgccgatgtctttgccaggtactctcgcctccgccagtggaacaccctctatctgtgtgggacagatgagtatggtacagcaacagagaccaaggctctggaggagggactaaccccccaggagatctgcgacaagtaccacatcatccatgctgacatctaccgctggtttaacatttcgtttgatatttttggtcgcaccaccactccacagcagaccaaaatcacccaggacattttccagcagttgctgaaacgaggttttgtgctgcaagatactgtggagcaactgcgatgtgagcactgtgctcgcttcctggctgaccgcttcgtggagggcgtgtgtcccttctgtggctatgaggaggctcggggtgaccagtgtgacaagtgtggcaagctcatcaatgctgtcgagcttaagaagcctcagtgtaaagtctgccgatcatgccctgtggtgcagtcgagccagcacctgtttctggacctgcctaagctggagaagcgactggaggagtggttggggaggacattgcctggcagtgactggacacccaatgcccagtttatcacccgttcttggcttcgggatggcctcaagccacgctgcataacccgagacctcaaatggggaacccctgtacccttagaaggttttgaagacaaggtattctatgtctggtttgatgccactattggctatctgtccatcacagccaactacacagaccagtgggagagatggtggaagaacccagagcaagtggacctgtatcagttcatggccaaagacaatgttcctttccatagcttagtctttccttgctcagccctaggagctgaggataactataccttggtcagccacctcattgctacagagtacctgaactatgaggatgggaaattctctaagagccgcggtgtgggagtgtttggggacatggcccaggacacggggatccctgctgacatctggcgcttctatctgctgtacattcggcctgagggccaggacagtgctttctcctggacggacctgctgctgaagaataattctgagctgcttaacaacctgggcaacttcatcaacagagctgggatgtttgtgtctaagttctttgggggctatgtgcctgagatggtgctcacccctgatgatcagcgcctgctggcccatgtcaccctggagctccagcactatcaccagctacttgagaaggttcggatccgggatgccttgcgcagtatcctcaccatatctcgacatggcaaccaatatattcaggtgaatgagccctggaagcggattaaaggcagtgaggctgacaggcaacgggcaggaacagtgactggcttggcagtgaatatagctgccttgctctctgtcatgcttcagccttacatgcccacggttagtgccacaatccaggcccagctgcagctcccacctccagcctgcagtatcctgctgacaaacttcctgtgtaccttaccagcaggacaccagattggcacagtcagtcccttgttccaaaaattggaaaatgaccagattgaaagtttaaggcagcgctttggagggggccaggcaaaaacgtccccgaagccagcagttgtagagactgttacaacagccaagccacagcagatacaagcgctgatggatgaagtgacaaaacaaagtatgaagcttaagccctgtgggagactggacaagctgaatcctaaatagatctttttcttgcctcactgttacctccccacccccctttatcttaggctgttgtaactggagctgttgtaactggagctgttgtaactggagctgttgtaactgagaaattggggccgagctga

SEQ ID NO: 288371 - DNA, 3151 bp, Homo sapiens
agtatgatacgccgtgccggtgttatttcattcacgaggcgagcaatgagactgttcgtgagtgatggcgtcccgggttgcttgccggtgctggccgccgccgggagagcccggggcagagcagaggtgctcatcagcactgtaggcccggaagattgtgtggtcccgttcctgacccggcctaaggtccctgtcttgcagctggatagcggcaactacctcttctccactagtgcaatctgccgatatttttttttgttatctggctgggagcaagatgacctcactaaccagtggctggaatgggaagcgacagagctgcagccagctttgtctgctgccctgtactatttagtggtccaaggcaagaagggggaagatgttcttggttcagtgcggagagccctgactcacattgaccacagcttgagtcgtcagaactgtcctttcctggctggggagacagaatctctagccgacattgttttgtggggagccctatacccattactgcaagatcccgcctacctccctgaggagctgagtgccctgcacagctggttccagacactgagtacccaggaaccatgtcagcgagctgcagagactgtactgaaacagcaaggtgtcctggctctccggccttacctccaaaagcagccccagcccagccccgctgagggaagggctgtcaccaatgagcctgaggaggaggagctggctaccctatctgaggaggagattgctatggctgttactgcttgggagaagggcctagaaagtttgcccccgctgcggccccagcagaatccagtgttgcctgtggctggagaaaggaatgtgctcatcaccagtgccctcccttacgtcaacaatgtcccccaccttgggaacatcattggttgtgtgctcagtgccgatgtctttgccaggtactctcgcctccgccagtggaacaccctctatctgtgtgggacagatgagtatggtacagcaacagagaccaaggctctggaggagggactaaccccccaggagatctgcgacaagtaccacatcatccatgctgacatctaccgctggtttaacatttcgtttgatatttttggtcgcaccaccactccacagcagaccaaaatcacccaggacattttccagcagttgctgaaacgaggttttgtgctgcaagatactgtggagcaactgcgatgtgagcactgtgctcgcttcctggctgaccgcttcgtggagggcgtgtgtcccttctgtggctatgaggaggctcggggtgaccagtgtgacaagtgtggcaagctcatcaatgctgtcgagcttaagaagcctcagtgtaaagtctgccgatcatgccctgtggtgcagtcgagccagcacctgtttctggacctgcctaagctggagaagcgactggaggagtggttggggaggacattgcctggcagtgactggacacccaatgcccagtttatcacccgttcttggcttcgggatggcctcaagccacgctgcataacccgagacctcaaatggggaacccctgtacccttagaaggttttgaagacaaggtattctatgtctggtttgatgccactattggctatctgtccatcacagccaactacacagaccagtgggagagatggtggaagaacccagagcaagtggacctgtatcagttcatggccaaagacaatgttcctttccatagcttagtctttccttgctcagccctaggagctgaggataactataccttggtcagccacctcattgctacagagtacctgaactatgaggatgggaaattctctaagagccgcggtgtgggagtgtttggggacatggcccaggacacggggatccctgctgacatctggcgcttctatctgctgtacattcggcctgagggccaggacagtgctttctcctggacggacctgctgctgaagaataattctgagctgcttaacaacctgggcaacttcatcaacagagctgggatgtttgtgtctaagttctttgggggctatgtgcctgagatggtgctcacccctgatgatcagcgcctgctggcccatgtcaccctggagctccagcactatcaccagctacttgagaaggttcggatccgggatgccttgcgcagtatcctcaccatatctcgacatggcaaccaatatattcaggtgaatgagccctggaagcggattaaaggcagtgaggctgacaggcaacgggcaggaacagtgactggcttggcagtgaatatagctgccttgctctctgtcatgcttcagccttacatgcccacggttagtgccacaatccaggcccagctgcagctcccacctccagcctgcagtatcctgctgacaaacttcctgtgtaccttaccagcaggacaccagattggcacagtcagtcccttgttccaaaaattggaaaatgaccagattgaaagtttaaggcagcgctttggagggggccagtgagaaagctaaaggctgtgccctcgctccacaacagccacagcatcacttccctaatttccctaagtagtcctcacccatcactctttccatcttttggccctgccgcttcctcacttacagtttttctttcctgtcttaactagaagagaccttcgacttaaaggtaaccactttccctctgagatgctgtataaaactggaggttaggggatatttatggttgctggtgataactttgttgttctccaggcaaaaacgtccccgaagccagcagttgtagagactgttacaacagccaagccacagcagatacaagcgctgatggatgaagtgacaaaacaaggaaacattgtccgagaactgaaagcacaaaaggcagacaagaacgaggttgctgcggaggtggcgaaactcttggatctaaagaaacagttggctgtagctgaggggaaaccccctgaagcccctaaaggcaagaagaaaaagtaaaagaccttggctcatagaaagtcactttaatagatagggacagtaataaataaatgtacaatctctatatacaacaacgagccacaaacacagcgggggggcggcacacagagaacgccccggagggggcccaagaggaaaggggaaacca

SEQ ID NO: 288372 - DNA, 2792 bp, Homo sapiens
agtatgatacgccgtgccggtgttatttcattcacgaggcgagcaatgagactgttcgtgagtgatggcgtcccgggttgcttgccggtgctggccgccgccgggagagcccggggcagagcagaggtgctcatcagcactgtaggcccggaagattgtgtggtcccgttcctgacccggcctaaggtccctgtcttgcagctggatagcggcaactacctcttctccactagtgcaatctgccgatatttttttttgttatctggctgggagcaagatgacctcactaaccagtggctggaatgggaagcgacagagctgcagccagctttgtctgctgccctgtactatttagtggtccaaggcaagaagggggaagatgttcttggttcagtgcggagagccctgactcacattgaccacagcttgagtcgtcagaactgtcctttcctggctggggagacagaatctctagccgacattgttttgtggggagccctatacccattactgcaagatcccgcctacctccctgaggagctgagtgccctgcacagctggttccagacactgagtacccaggaaccatgtcagcgagctgcagagactgtactgaaacagcaaggtgtcctggctctccggccttacctccaaaagcagccccagcccagccccgctgagggaagggctgtcaccaatgagcctgaggaggaggagctggctaccctatctgaggaggagattgctatggctgttactgcttgggagaagggcctagaaagtttgcccccgctgcggccccagcagaatccagtgttgcctgtggctggagaaaggaatgtgctcatcaccagtgccctcccttacgtcaacaatgtcccccaccttgggaacatcattggttgtgtgctcagtgccgatgtctttgccaggtactctcgcctccgccagtggaacaccctctatctgtgtgggacagatgagtatggtacagcaacagagaccaaggctctggaggagggactaaccccccaggagatctgcgacaagtaccacatcatccatgctgacatctaccgctggtttaacatttcgtttgatatttttggtcgcaccaccactccacagcagaccaaaatcacccaggacattttccagcagttgctgaaacgaggttttgtgctgcaagatactgtggagcaactgcgatgtgagcactgtgctcgcttcctggctgaccgcttcgtggagggcgtgtgtcccttctgtggctatgaggaggctcggggtgaccagtgtgacaagtgtggcaagctcatcaatgctgtcgagcttaagaagcctcagtgtaaagtctgccgatcatgccctgtggtgcagtcgagccagcacctgtttctggacctgcctaagctggagaagcgactggaggagtggttggggaggacattgcctggcagtgactggacacccaatgcccagtttatcacccgttcttggcttcgggatggcctcaagccacgctgcataacccgagacctcaaatggggaacccctgtacccttagaaggttttgaagacaaggtattctatgtctggtttgatgccactattggctatctgtccatcacagccaactacacagaccagtgggagagatggtggaagaacccagagcaagtggacctgtatcagttcatggccaaagacaatgttcctttccatagcttagtctttccttgctcagccctaggagctgaggataactataccttggtcagccacctcattgctacagagtacctgaactatgaggatgggaaattctctaagagccgcggtgtgggagtgtttggggacatggcccaggacacggggatccctgctgacatctggcgcttctatctgctgtacattcggcctgagggccaggacagtgctttctcctggacggacctgctgctgaagaataattctgagctgcttaacaacctgggcaacttcatcaacagagctgggatgtttgtgtctaagttctttgggggctatgtgcctgagatggtgctcacccctgatgatcagcgcctgctggcccatgtcaccctggagctccagcactatcaccagctacttgagaaggttcggatccgggatgccttgcgcagtatcctcaccatatctcgacatggcaaccaatatattcaggtgaatgagccctggaagcggattaaaggcagtgaggctgacaggcaacgggcaggaacagtgactggcttggcagtgaatatagctgccttgctctctgtcatgcttcagccttacatgcccacggttagtgccacaatccaggcccagctgcagctcccacctccagcctgcagtatcctgctgacaaacttcctgtgtaccttaccagcaggacaccagattggcacagtaggtggaagagccagcctctcttaaaattgatactcttgccatgcagcttttggagtgggtgagagaagacctaacatctctccagtgttactttggtcatgggactcctaagtttctgatataaagtccttggtagtcgttcacaagtccggaattatctgtacatcttcattgttcttcatgccagaaaccagaacctggcacacaaaactaactggtaaacagatatttgaagaaacactgtgatcacctagtctccataatgctagcagatagtgggcagggaaaatacaggaaagccatttcctctttgacacaaaatgaaaaagtaagtacattgctaaacttctgga

SEQ ID NO: 288373 - DNA, 1892 bp, Homo sapiens
agtatgatacgccgtgccggtgttatttcattcacgaggcgagcaatgagactgttcgtgagtgatggcgtcccgggttgcttgccggtgctggccgccgccgggagagcccggggcagagcagaggtgctcatcagcactgtaggcccggaagattgtgtggtcccgttcctgacccggcctaaggtccctgtcttgcagctggatagcggcaactacctcttctccactagtgcaatctgccgatatttttttttgttatctggctgggagcaagatgacctcactaaccagtggctggaatgggaagcgacagagctgcagccagctttgtctgctgccctgtactatttagtggtccaaggcaagaagggggaagatgttcttggttcagtgcggagagccctgactcacattgaccacagcttgagtcgtcagaactgtcctttcctggctggggagacagaatctctagccgacattgttttgtggggagccctatacccattactgcaagatcccgcctacctccctgaggagctgagtgccctgcacagctggttccagacactgagtacccaggaaccatgtcagcgagctgcagagactgtactgaaacagcaaggtgtcctggctctccggccttacctccaaaagcagccccagcccagccccgctgagggaagggctgtcaccaatgagcctgaggaggaggagctggctaccctatctgaggaggagattgctatggctgttactgcttgggagaagggcctagaaagtttgcccccgctgcggccccagcagaatccagtgttgcctgtggctggagaaaggaatgtgctcatcaccagtgccctcccttacgtcaacaatgtcccccaccttgggaacatcattggttgtgtgctcagtgccgatgtctttgccaggtactctcgcctccgccagtggaacaccctctatctgtgtgggacagatgagtatggtacagcaacagagaccaaggctctggaggagggactaaccccccaggagatctgcgacaagtaccacatcatccatgctgacatctaccgctggtttaacatttcgtttgatatttttggtcgcaccaccactccacagcagaccaaaatcacccaggacattttccagcagttgctgaaacgaggttttgtgctgcaagatactgtggagcaactgcgatgtgagcactgtgctcgcttcctggctgaccgcttcgtggagggcgtgtgtcccttctgtggctatgaggaggctcggggtgaccagtgtgacaagtgtggcaagctcatcaatgctgtcgagcttaagaagcctcagtgtaaagtctgccgatcatgccctgtggtgcagtcgagccagcacctgtttctggacctgcctaagctggagaagcgactggaggagtggttggggaggacattgcctggcagtgactggacacccaatgcccagtttatcacccgttcttggcttcgggatggcctcaagccacgctgcataacccgagacctcaaatggggaacccctgtacccttagaaggttttgaagacaaggtattctatgtctggtttgatgccactattggctatctgtccatcacagccaactacacagaccagtgggagagatggtggaagaacccagagcaagtggacctgtatcagttcatggccaaagacaatgttcctttccatagcttagtctttccttgctcagccctaggagctgaggataactataccttggtcagccacctcattgctacaggtacctaccattaggatgggaattctaagcccggttggagttttgggaatgcccgacggagtcctctgacttgcgttatctctgatttgctggc

SEQ ID NO: 288374 - DNA, 2568 bp, Homo sapiens
agtatgatacgccgtgccggtgttatttcattcacgaggcgagcaatgagactgttcgtgagtgatggcgtcccgggttgcttgccggtgctggccgccgccgggagagcccggggcagagcagaggtgctcatcagcactgtaggcccggaagattgtgtggtcccgttcctgacccggcctaaggtccctgtcttgcagctggatagcggcaactacctcttctccactagtgcaatctgccgatatttttttttgttatctggctgggagcaagatgacctcactaaccagtggctggaatgggaagcgacagagctgcagccagctttgtctgctgccctgtactatttagtggtccaaggcaagaagggggaagatgttcttggttcagtgcggagagccctgactcacattgaccacagcttgagtcgtcagaactgtcctttcctggctggggagacagaatctctagccgacattgttttgtggggagccctatacccattactgcaagatcccgcctacctccctgaggagctgagtgccctgcacagctggttccagacactgagtacccaggaaccatgtcagcgagctgcagagactgtactgaaacagcaaggtgtcctggctctccggccttacctccaaaagcagccccagcccagccccgctgagggaagggctgtcaccaatgagcctgaggaggaggagctggctaccctatctgaggaggagattgctatggctgttactgcttgggagaagggcctagaaagtttgcccccgctgcggccccagcagaatccagtgttgcctgtggctggagaaaggaatgtgctcatcaccagtgccctcccttacgtcaacaatgtcccccaccttgggaacatcattggttgtgtgctcagtgccgatgtctttgccaggtactctcgcctccgccagtggaacaccctctatctgtgtgggacagatgagtatggtacagcaacagagaccaaggctctggaggagggactaaccccccaggagatctgcgacaagtaccacatcatccatgctgacatctaccgctggtttaacatttcgtttgatatttttggtcgcaccaccactccacagcagaccaaaatcacccaggacattttccagcagttgctgaaacgaggttttgtgctgcaagatactgtggagcaactgcgatgtgagcactgtgctcgcttcctggctgaccgcttcgtggagggcgtgtgtcccttctgtggctatgaggaggctcggggtgaccagtgtgacaagtggcgaaactcttggatctaaagaaacagttggctgtagctgaggggaaaccccctgaagcccctaaaggcaagaagaaaaagtaaaagaccttggctcatagaaagtcactttaatagatagggacagtaataaataaatgtacaatctctatatacaagctgagacctttccttttgtctactccaagccttccccctgcgtatgtgggattgagggtcacatcattggcactagtgagagggtagtcagtagccacttctgggaaaggtgggtagtgtggcccaagtgggggactgatgctcccaattgttcatgcttggtgcagattcaccattcggtcaatcagagctcggcgagtcgcctctacttccctggtcaggcgctcgatttcctgcttgagccgttcattctcttcagctagctgtgccactttcctttcattctcctgttctttctccttcatgcgctgctttccagcccgggctggggaatgaccactctgtttccgtttcctggttctcccttggtcttcctcctcttcctcctgagccagggagctctgactggaatctggagagtgagggctctgggaggtgcttgtgacctctgctggttctggctcctcctcagtcagccaagccagagaagcagggtcaagagtggtgaagatttttgattctcctcttcatttccaggaggtgaaacataggtacccccattttcatctgaagacaggacctcttgcaggtcctcataccaggcttccagctcccagctggacagtgtcccgaaggagaaaggcaatgactcagctgccatctctgcagttggatcagtctggaaaagcacatctgcaggataatggggagtggctggaacaagctccatgtagcaaacagtctatgccacaagttggcaagctggtctgatgcctgtttttgtaggtaaagttgtactggaatacagccacatctgtttatttacatattgtttatggctgctttggtgctacagtggcagagatgaagagtcacgctagagactataggacttttaacatctaaaatatttactgtcctgccgtttaaaatttttggaaaagggtaggttaagtttacctgctttcaggtgtggtgatgtatgaagatacacttccttcttgaacactctctcctcaggttccagctctgattttggctctgtcgctgccacccgctcatctttaacatgatacgctcagtgccttagacttaagtctct

SEQ ID NO: 288375 - DNA, 1729 bp, Homo sapiens
agtatgatacgccgtgccggtgttatttcattcacgaggcgagcaatgagactgttcgtgagtgatggcgtcccgggttgcttgccggtgctggccgccgccgggagagcccggggcagagcagaggtgctcatcagcactgtaggcccggaagattgtgtggtcccgttcctgacccggcctaaggtccctgtcttgcagctggatagcggcaactacctcttctccactagtgcaatctgccgatatttttttttgttatctggctgggagcaagatgacctcactaaccagtggctggaatgggaagcgacagagctgcagccagctttgtctgctgccctgtactatttagtggtccaaggcaagaagggggaagatgttcttggttcagtgcggagagccctgactcacattgaccacagcttgagtcgtcagaactgtcctttcctggctggggagacagaatctctagccgacattgttttgtggggagccctatacccattactgcaagatcccgcctacctccctgaggagctgagtgccctgcacagctggttccagacactgagtacccaggaaccatgtcagcgagctgcagagactgtactgaaacagcaaggtgtcctggctctccggccttacctccaaaagcagccccagcccagccccgctgagggaagggctgtcaccaatgagcctgaggaggaggagctggctaccctatctgaggaggagattgctatggctgttactgcttgggagaagggcctagaaagtttgcccccgctgcggccccagcagaatccagtgttgcctgtggctggagaaaggaatgtgctcatcaccagtgccctcccttacgtcaacaatgtcccccaccttgggaacatcattggttgtgtgctcagtgccgatgtctttgccaggtactctcgcctccgccagtggaacaccctctatctgtgtgggacagatgagtatggtacagcaacagagaccaaggctctggaggagggactaaccccccaggagatctgcgacaagtaccacatcatccatgctgacatctaccgctggtttaacatttcgtttgatatttttggtcgcaccaccactccacagcagaccaaaatcacccaggacattttccagcagttgctgaaacgaggttttgtgctgcaagatactgtggagcaactgcgatgtgagcactgtgctcgcttcctggctgaccgcttcgtggagggcgtgtgtcccttctgtggctatgaggaggctcggggtgaccagtgtgacaagtgtggcaagctcatcaatgctgtcgagcttaagaagcctcagtgtaaagtctgccgatcatgccctgtggtgcagtcgagccagcacctgtttctggacctgcctaagctggagaagcgactggaggagtggttggggaggacattgcctggcagtgactggacacccaatgcccagtttatcacccgttcttggcttcgggatggcctcaagccacgctgcataacccgagacctcaaatggggaacccctgtacccttagaaggttttgaagacaaggcaatgaggtggctgaccaaggtatagttatcctcagctcctagggctgagcaaggaaagactaagctatggaaaggaacattgtctttggccatgaactgatacaggtccacttgctctgggttcttccaccatctctcccact

SEQ ID NO: 288376 - DNA, 3270 bp, Homo sapiens
agtatgatacgccgtgccggtgttatttcattcacgaggcgagcaatgagactgttcgtgagtgatggcgtcccgggttgcttgccggtgctggccgccgccgggagagcccggggcagagcagaggtgctcatcagcactgtaggcccggaagattgtgtggtcccgttcctgacccggcctaaggtccctgtcttgcagctggatagcggcaactacctcttctccactagtgcaatctgccgatatttttttttgttatctggctgggagcaagatgacctcactaaccagtggctggaatgggaagcgacagagctgcagccagctttgtctgctgccctgtactatttagtggtccaaggcaagaagggggaagatgttcttggttcagtgcggagagccctgactcacattgaccacagcttgagtcgtcagaactgtcctttcctggctggggagacagaatctctagccgacattgttttgtggggagccctatacccattactgcaagatcccgcctacctccctgaggagctgagtgccctgcacagctggttccagacactgagtacccaggaaccatgtcagcgagctgcagagactgtactgaaacagcaaggtgtcctggctctccggccttacctccaaaagcagccccagcccagccccgctgagggaagggctgtcaccaatgagcctgaggaggaggagctggctaccctatctgaggaggagattgctatggctgttactgcttgggagaagggcctagaaagtttgcccccgctgcggccccagcagaatccagtgttgcctgtggctggagaaaggaatgtgctcatcaccagtgccctcccttacgtcaacaatgtcccccaccttgggaacatcattggttgtgtgctcagtgccgatgtctttgccaggtactctcgcctccgccagtggaacaccctctatctgtgtgggacagatgagtatggtacagcaacagagaccaaggctctggaggagggactaaccccccaggagatctgcgacaagtaccacatcatccatgctgacatctaccgctggtttaacatttcgtttgatatttttggtcgcaccaccactccacagcagaccaaaatcacccaggacattttccagcagttgctgaaacgaggttttgtgctgcaagatactgtggagcaactgcgatgtgagcactgtgctcgcttcctggctgaccgcttcgtggagggcgtgtgtcccttctgtggctatgaggaggctcggggtgaccagtgtgacaagtgtggcaagctcatcaatgctgtcgagcttaagaaaatggagctggcgctggtgcctgtgagcgcccacggcaacttctatgagggggactgctacgtcatcctctcgacccggagagtggccagtctcctatcccaggacatccacttctggatcgggaaggactcctcccaggatgagcaaagctgcgcagccatatataccacacagctggacgactacctgggaggcagccctgtgcagcaccgagaggtccagtaccatgagtcagacactttccgtggctacttcaagcagggcatcatctacaagcaggggggtgtcgcctctgggatgaagcacgtggagaccaatacctacgacgtgaagcggctgctacatgtgaaagggaaaagaaacatcagggctaccgaggtggaaatgagctgggacagtttcaaccgaggtgatgtcttcttgctggaccttgggaaagtcatcatccaatggaatggcccagagagcaacagtggggagcgcctgaaggctatgcttctggcaaaggatattcgagacagggagcgagggggccgtgctgaaataggagtgatcgagggagacaaggaggcagccagcccagagctgatgaaggtccttcaggacacccttggccgacgctccattatcaagcctacagtccctgatgagatcatagatcagaagcagaaatcaactatcatgttgtatcatatctcagattcagctgggcagctggcagtcacagaggtagcaacaaggcctctggtccaggacttactgaaccatgatgactgctacatcctggaccaaagtggaaccaaaatctacgtgtggaaaggaaaaggagccacaaaggctgaaaaacaggcagccatgtctaaagcgctgggcttcatcaagatgaagagctaccccagcagcaccaatgtggagaccgtcaacgatggtgctgagtcggccatgttcaagcagctgttccagaagtggtcagtaaaggaccagaccatgggcctggggaaaacgttcagcattggtaaaattgctaaagttttccaggataaatttgatgtgactctgctacacaccaagccagaggtagctgcccaggaaagaatggtcgatgatggcaacggaaaagttgaggtctggagaattgagaacctggagctggtccctgtggagtatcaatggtatggcttcttttatgggggagactgttatctggtcctctacacatacgaggtaaatgggaagccacatcacatcttgtacatctggcagggccgccacgcctcacaggatgagctggcagcctcagcataccaggcagtggaggtggatcggcagtttgatggggctgctgtgcaggttcgagtcaggatgggaacggagccacgccacttcatggccatcttcaaagggaagctagttatctttgagggtgggacttccaggaagggaaatgccgagcctgaccctccagtaagactcttccaaattcatggaaatgacaaatctaacaccaaagcagtggaagttccagcctttgcctcctccctaaactccaatgatgtctttctgctgcgaactcaggcagagcactacctgtggtatggcaaggtaggatggctgggccccgggtcagaccagcccctcggagcccagacctgcactcccctcctcctgtcagcaaggtcaaaggacctagagtaggctggagtgcttgctttggcagcacatatactaaaactggaatgatacagagaagattagcatggtccctgtgcaaggatggcatgcaaattcatgaagcgtttgatattaaaaaaaaaaaaaaaaaaaaaaaccccgggggaaccaaagagcgggggggggggaaaagggggtggcacggggccctggggccaagcggttcccggcccccctttcttgtccaggggggaaacc

SEQ ID NO: 288377 - DNA, 3566 bp, Homo sapiens
agtatgatacgccgtgccggtgttatttcattcacgaggcgagcaatgagactgttcgtgagtgatggcgtcccgggttgcttgccggtgctggccgccgccgggagagcccggggcagagcagaggtgctcatcagcactgtaggcccggaagattgtgtggtcccgttcctgacccggcctaaggtccctgtcttgcagctggatagcggcaactacctcttctccactagtgcaatctgccgatatttttttttgttatctggctgggagcaagatgacctcactaaccagtggctggaatgggaagcgacagagctgcagccagctttgtctgctgccctgtactatttagtggtccaaggcaagaagggggaagatgttcttggttcagtgcggagagccctgactcacattgaccacagcttgagtcgtcagaactgtcctttcctggctggggagacagaatctctagccgacattgttttgtggggagccctatacccattactgcaagatcccgcctacctccctgaggagctgagtgccctgcacagctggttccagacactgagtacccaggaaccatgtcagcgagctgcagagactgtactgaaacagcaaggtgtcctggctctccggccttacctccaaaagcagccccagcccagccccgctgagggaagggctgtcaccaatgagcctgaggaggaggagctggctaccctatctgaggaggagattgctatggctgttactgcttgggagaagggcctagaaagtttgcccccgctgcggccccagcagaatccagtgttgcctgtggctggagaaaggaatgtgctcatcaccagtgccctcccttacgtcaacaatgtcccccaccttgggaacatcattggttgtgtgctcagtgccgatgtctttgccaggtactctcgcctccgccagtggaacaccctctatctgtgtgggacagatgagtatggtacagcaacagagaccaaggctctggaggagggactaaccccccaggagatctgcgacaagtaccacatcatccatgctgacatctaccgctggtttaacatttcgtttgatatttttggtcgcaccaccactccacagcagaccaaaatcacccaggacattttccagcagttgctgaaacgaggttttgtgctgcaagatactgtggagcaactgcgatgtgagcactgtgctcgcttcctggctgaccgcttcgtggagggcgtgtgtcccttctgtggctatgaggaggctcggggtgaccagtgtgacaagtgtggcaagctcatcaatgctgtcgagcttaagaaaatggagctggcgctggtgcctgtgagcgcccacggcaacttctatgagggggactgctacgtcatcctctcgacccggagagtggccagtctcctatcccaggacatccacttctggatcgggaaggactcctcccaggatgagcaaagctgcgcagccatatataccacacagctggacgactacctgggaggcagccctgtgcagcaccgagaggtccagtaccatgagtcagacactttccgtggctacttcaagcagggcatcatctacaagcaggggggtgtcgcctctgggatgaagcacgtggagaccaatacctacgacgtgaagcggctgctacatgtgaaagggaaaagaaacatcagggctaccgaggtggaaatgagctgggacagtttcaaccgaggtgatgtcttcttgctggaccttgggaaagtcatcatccaatggaatggcccagagagcaacagtggggagcgcctgaaggctatgcttctggcaaaggatattcgagacagggagcgagggggccgtgctgaaataggagtgatcgagggagacaaggaggcagccagcccagagctgatgaaggtccttcaggacacccttggccgacgctccattatcaagcctacagtccctgatgagatcatagatcagaagcagaaatcaactatcatgttgtatcatatctcagattcagctgggcagctggcagtcacagaggtagcaacaaggcctctggtccaggacttactgaaccatgatgactgctacatcctggaccaaagtggaaccaaaatctacgtgtggaaaggaaaaggagccacaaaggctgaaaaacaggcagccatgtctaaagcgctgggcttcatcaagatgaagagctaccccagcagcaccaatgtggagaccgtcaacgatggtgctgagtcggccatgttcaagcagctgttccagaagtggtcagtaaaggaccagaccatgggcctggggaaaacgttcagcattggtaaaattgctaaagttttccaggataaatttgatgtgactctgctacacaccaagccagaggtagctgcccaggaaagaatggtcgatgatggcaacggaaaagttgaggtctggagaattgagaacctggagctggtccctgtggagtatcaatggtatggcttcttttatgggggagactgttatctggtcctctacacatacgaggtaaatgggaagccacatcacatcttgtacatctggcagggccgccacgcctcacaggatgagctggcagcctcagcataccaggcagtggaggtggatcggcagtttgatggggctgctgtgcaggttcgagtcaggatgggaacggagccacgccacttcatggccatcttcaaagggaagctagttatctttgagggtgggacttccaggaagggaaatgccgagcctgaccctccagtaagactcttccaaattcatggaaatgacaaatctaacaccaaagcagtggaagttccagcctttgcctcctccctaaactccaatgatgtctttctgctgcgaactcaggcagagcactacctgtggtatggcaaggggtctagtggggatgagcgggcaatggctaaggagctggccagccttctctgtgatggcagcgagaacactgtggccgagggccaggagccagccgagttctgggacctactgggagggaaaactccctatgccaatgataaaaggtatgggaacacagcctccccctcttctgggctccccctgcctgccaggcttgtgaattgcacaaaggctaaaacctcagttttaaaaacatttctaagcagcttgatgcccttaaatggactatattgcagacttcagcaggaaatcctagatgtccagtctcgtctctttgaatgttccaataagaccggccaattcgttgtcactgagatcacagacttcacccaggatgacctgaaccctactgacgtgatgctcctagatacctgggaccaggtaagacacagctgcagaagtcagaacatgagaaagactcccacagtaagggttgtttttgtgtagtatccccaccctagaataaacccagggtagccctggaccatccccagctcaatcaaacctttgtcagcagtgaccaaaagaaagcccgggttttttttccaggggtgatgtttgagaatgatgtttgaaactca

SEQ ID NO: 288378 - DNA, 3120 bp, Homo sapiens
agtatgatacgccgtgccggtgttatttcattcacgaggcgagcaatgagactgttcgtgagtgatggcgtcccgggttgcttgccggtgctggccgccgccgggagagcccggggcagagcagaggtgctcatcagcactgtaggcccggaagattgtgtggtcccgttcctgacccggcctaaggtccctgtcttgcagctggatagcggcaactacctcttctccactagtgcaatctgccgatatttttttttgttatctggctgggagcaagatgacctcactaaccagtggctggaatgggaagcgacagagctgcagccagctttgtctgctgccctgtactatttagtggtccaaggcaagaagggggaagatgttcttggttcagtgcggagagccctgactcacattgaccacagcttgagtcgtcagaactgtcctttcctggctggggagacagaatctctagccgacattgttttgtggggagccctatacccattactgcaagatcccgcctacctccctgaggagctgagtgccctgcacagctggttccagacactgagtacccaggaaccatgtcagcgagctgcagagactgtactgaaacagcaaggtgtcctggctctccggccttacctccaaaagcagccccagcccagccccgctgagggaagggctgtcaccaatgagcctgaggaggaggagctggctaccctatctgaggaggagattgctatggctgttactgcttgggagaagggcctagaaagtttgcccccgctgcggccccagcagaatccagtgttgcctgtggctggagaaaggaatgtgctcatcaccagtgccctcccttacgtcaacaatgtcccccaccttgggaacatcattggttgtgtgctcagtgccgatgtctttgccaggtactctcgcctccgccagtggaacaccctctatctgtgtgggacagatgagtatggtacagcaacagagaccaaggctctggaggagggactaaccccccaggagatctgcgacaagtaccacatcatccatgctgacatctaccgctggtttaacatttcgtttgatatttttggtcgcaccaccactccacagcagaccaaaatcacccaggacattttccagcagttgctgaaacgaggttttgtgctgcaagatactgtggagcaactgcgatgtgagcactgtgctcgcttcctggctgaccgcttcgtggagggcgtgtgtcccttctgtggctatgaggaggctcggggtgaccagtgtgacaagtgtggcaagctcatcaatgctgtcgagcttaagaaaatggagctggcgctggtgcctgtgagcgcccacggcaacttctatgagggggactgctacgtcatcctctcgacccggagagtggccagtctcctatcccaggacatccacttctggatcgggaaggactcctcccaggatgagcaaagctgcgcagccatatataccacacagctggacgactacctgggaggcagccctgtgcagcaccgagaggtccagtaccatgagtcagacactttccgtggctacttcaagcagggcatcatctacaagcaggggggtgtcgcctctgggatgaagcacgtggagaccaatacctacgacgtgaagcggctgctacatgtgaaagggaaaagaaacatcagggctaccgaggtggaaatgagctgggacagtttcaaccgaggtgatgtcttcttgctggaccttgggaaagtcatcatccaatggaatggcccagagagcaacagtggggagcgcctgaaggctatgcttctggcaaaggatattcgagacagggagcgagggggccgtgctgaaataggagtgatcgagggagacaaggaggcagccagcccagagctgatgaaggtccttcaggacacccttggccgacgctccattatcaagcctacagtccctgatgagatcatagatcagaagcagaaatcaactatcatgttgtatcatatctcagattcagctgggcagctggcagtcacagaggtagcaacaaggcctctggtccaggacttactgaaccatgatgactgctacatcctggaccaaagtggaaccaaaatctacgtgtggaaaggaaaaggagccacaaaggctgaaaaacaggcagccatgtctaaagcgctgggcttcatcaagatgaagagctaccccagcagcaccaatgtggagaccgtcaacgatggtgctgagtcggccatgttcaagcagctgttccagaagtggtcagtaaaggaccagaccatgggcctggggaaaacgttcagcattggtaaaattgctaaagttttccaggataaatttgatgtgactctgctacacaccaagccagaggtagctgcccaggaaagaatggtcgatgatggcaacggaaaagttgaggtctggagaattgagaacctggagctggtccctgtggagtatcaatggtatggcttcttttatgggggagactgttatctggtcctctacacatacgaggtaaatgggaagccacatcacatcttgtacatctggcagggccgccacgcctcacaggatgagctggcagcctcagcataccaggcagtggaggtggatcggcagtttgatggggctgctgtgcaggttcgagtcaggatgggaacggagccacgccacttcatggccatcttcaaagggaagctagttatctttgagggtgggacttccaggaagggaaatgccgagcctgaccctccagtaagactcttccaaattcatggaaatgacaaatctaacaccaaagcagtggaagttccagcctttgcctcctccctaaactccaatgatgtctttctgctgcgaactcaggcagagcactacctgtggtatggcaaggggtctagtggggatgagcgggcaatggctaaggagctggccagccttctctgtgatggcagcgagaacactgtggccgagggccaggagccagccgagttctgggacctactgggagggaaaactccctatgccaatgataaaagacttccgcagggacccaagtcgggccgagta

SEQ ID NO: 288379 - DNA, 920 bp, Homo sapiens
agtatgatacgccgtgccggtgttatttcattcacgaggcgagcaatgagactgttcgtgagtgatggcgtcccgggttgcttgccggtgctggccgccgccgggagagcccggggcagagcagaggtgctcatcagcactgtaggcccggaagattgtgtggtcccgttcctgacccggcctaaggtccctgtcttgcagctggatagcggcaactacctcttctccactagtgcaatctgccgatatttttttttgttatctggctgggagcaagatgacctcactaaccagtggctggaatgggaagcgacagagctgcagccagctttgtctgctgccctgtactatttagtggtccaaggcaagaagggggaagatgttcttggttcagtgcggagagccctgactcacattgaccacagcttgagtcgtcagaactgtcctttcctggctggggagacagaatctctagccgacattgttttgtggggagccctatacccattactgcaagatcccgcctacctccctgaggagctgagtgccctgcacagctggttccagacactgagtacccaggaaccatgtcagcgagctgcagagactgtactgaaacagcaaggtgtcctggctctccggccttacctccaaaagcagccccagcccagccccgctgagggaagggctgtcaccaatgagcctgaggaggaggagctggctaccctatctgaggaggagattgctatggctgttactgcttgggagaagggcctagaaagtttgcccccgctgcggccccagcagaatccagtatgttgccgtggctggagaaggatggctatacatgcctcctactacatgcccactggacatatgtggctaagcatgcttcagattgctcgcatgaacttttggga

SEQ ID NO: 288380 - DNA, 120 bp, Homo sapiens
cctggaagcggattaaaggcagtgaggctgacaggtaggtaagcggggagggttggctaaaggcataaagtggcttgtaagctgtatcctcctggaggtcttgactaatgtctcctcttc

SEQ ID NO: 288381 - DNA, 649 bp, Homo sapiens
aatgagactgttcgtgagtgatggcgtcccgggttgcttgccggtgctggccgccgccgggagagcccggggcagagcagaggtgctcatcagcactgtaggcccggaaggtactcgtgctggtgctggtgggcggtggatgggggggcgggaccgaaacacgccagattctctgcagctgtctttgccaaacccctagccctcgccacacaccccaatcggccacttctcctattatccttgatcactccacgccttcttccctcccagtcacatctttcacttcctttaattaccctcaatataatacccttcccttatctctctcctcccctcttccgtcttcccggtccccgcctcaccccagtaaactgctcttcccttcccaaccttctcctacacctatcaggcatccccctctgctctttagttactagcatgacagcccccaggcacccttttgtgttcttaggaaatccctctctcccctcctaacacacacacacgttcctttctgtttacctcttctcattctcagccgattgtttgggtgactcttaggaggttctcttgtaagtcttctcagttcttttaattttgttctcccactgtgaccttcagataattatgaagatatcccagttacttt

SEQ ID NO: 288382 - DNA, 460 bp, Homo sapiens
ttggcaaatcacttaatctctctaatcctcaatttttttcagttgtgaaatgggataatattagtacctatctcagtgagttattgtgaggattaagtgagatcatataaagtgcttaatacagtgcttgacatataaagtgctcagtaaatgttagatattaccattgggaagaaactgagtgtctcatttgtgtacattttccttttctatccccaacaaaggagacagaatctctagccgacattgttttgtggggagccctatacccattactgcaagatcccgcctacctccctggtgagaactgtgcatatcactccaaccctaggagcttggtgtaggggttacagaatgggcagtagaatactgagaactcccttcaaggtacagcttgactgggcaactatagcagaagatggttgagggaactggggaaagcaactggagaaacctcaca

SEQ ID NO: 288383 - DNA, 347 bp, Homo sapiens
tccttcaaggaaatgaggaaagggaacatagatattagttgagaagggaaaggtaacatccccctttagctttagggctaacattcttacctctcttcatttccaggaggtgaaacataggtacccccattttcatctgaagacaggacctcttgcaggtcctcataccaggcttccagctcccagctggacagtgtcccgaaggagaaaggcaatgactcagctgccatctctgcagttggatcagtctggaaaagcacatctgcaggataatggggagtggctggaacaagctccatgtagcaaacagtctatgccacaagttggcaagctggtctgatgcctgt

SEQ ID NO: 288384 - DNA, 379 bp, Homo sapiens
tgaaatgtcttctgactccctggctcttttgcttttcctgaagacacagaccagacctaagatgtccctcccctataagaaagacctcatcctgtgttttctctctcttcttctcaggcaggaaaaacatatgaacaattaaaagaagagctgggagatgctgctgctatcatgcgaatcactgctgtgagtcgggttcgctcttgggagaagccagccacatgggcaaccagagccagagaacacacaaatgctacagatgctcacaggcaaaactcatgtccttagtattaccatagttgtctgttttgatgtaaagactttttgtaatcaatagaaaagcaggtctcagagccaagttccttattttcctgacttc

SEQ ID NO: 288385 - DNA, 2824 bp, Homo sapiens
ctcccaccttacggctaggtacgagcctgggtagaatcggccgatgagaatgagactgttcgtgagtgatggcgtcccgggttgcttgccggtgctggccgccgccgggagagcccggggcagagcagaggtgctcatcagcactgtaggcccggaagattgtgtggtcccgttcctgacccggcctaaggtccctgtcttgcagctggatagcggcaactacctcttctccactagtgcaatctgccgatatttttttttgttatctggctgggagcaagatgacctcactaaccagtggctggaatgggaagcgacagagctgcagccagctttgtctgctgccctgtactatttagtggtccaaggcaagaagggggaagatgttcttggttcagtgcggagagccctgactcacattgaccacagcttgagtcgtcagaactgtcctttcctggctggggagacagaatctctagccgacattgttttgtggggagccctatacccattactgcaagatcccgcctacctccctgaggagctgagtgccctgcacagctggttccagacactgagtacccaggaaccatgtcagcgagctgcagagactgtactgaaacagcaaggtgtcctggctctccggccttacctccaaaagcagccccagcccagccccgctgagggaagggctgtcaccaatgagcctgaggaggaggagctggctaccctatctgaggaggagattgctatggctgttactgcttgggagaagggcctagaaagtttgcccccgctgcggccccagcagaatccagtgttgcctgtggctggagaaaggaatgtgctcatcaccagtgccctcccttacgtcaacaatgtcccccaccttgggaacatcattggttgtgtgctcagtgccgatgtctttgccaggtactctcgcctccgccagtggaacaccctctatctgtgtgggacagatgagtatggtacagcaacagagaccaaggctctggaggagggactaaccccccaggagatctgcgacaagtaccacatcatccatgctgacatctaccgctggtttaacatttcgtttgatatttttggtcgcaccaccactccacagcagaccaaaatcacccaggacattttccagcagttgctgaaacgaggttttgtgctgcaagatactgtggagcaactgcgatgtgagcactgtgctcgcttcctggctgaccgcttcgtggagggcgtgtgtcccttctgtggctatgaggaggctcggggtgaccagtgtgacaagtgtggcaagctcatcaatgctgtcgagcttaagaagcctcagtgtaaagtctgccgatcatgccctgtggtgcagtcgagccagcacctgtttctggacctgcctaagctggagaagcgactggaggagtggttggggaggacattgcctggcagtgactggacacccaatgcccagtttatcacccgttcttggcttcgggatggcctcaagccacgctgcataacccgagacctcaaatggggaacccctgtacccttagaaggttttgaagacaaggtattctatgtctggtttgatgccactattggctatctgtccatcacagccaactacacagaccagtgggagagatggtggaagaacccagagcaagtggacctgtatcagttcatggccaaagacaatgttcctttccatagcttagtctttccttgctcagccctaggagctgaggataactataccttggtcagccacctcattgctacagagtacctgaactatgaggatgggaaattctctaagagccgcggtgtgggagtgtttggggacatggcccaggacacggggatccctgctgacatctggcgcttctatctgctgtacattcggcctgagggccaggacagtgctttctcctggacggacctgctgctgaagaataattctgagctgcttaacaacctgggcaacttcatcaacagagctgggatgtttgtgtctaagttctttgggggctatgtgcctgagatggtgctcacccctgatgatcagcgcctgctggcccatgtcaccctggagctccagcactatcaccagctacttgagaaggttcggatccgggatgccttgcgcagtatcctcaccatatctcgacatggcaaccaatatattcaggtgaatgagccctggaagcggattaaaggcagtgaggctgacaggcaacgggcaggaacagtgactggcttggcagtgaatatagctgccttgctctctgtcatgcttcagccttacatgcccacggttagtgccacaatccaggcccagctgcagctcccacctccagcctgcagtatcctgctgacaaacttcctgtgtaccttaccagcaggacaccagattggcacagtcagtcccttgttccaaaaattggaaaatgaccagattgaaagtttaaggcagcgctttggagggggccaggcaaaaacgtccccgaagccagcagttgtagagactgttacaacagccaagccacagcagatacaagcgctgatggatgaagtgacaaaacaaggaaacattgtccgagaactgaaagcacaaaaggcagacaagaacgaggttgctgcggaggtggcgaaactcttggatctaaagaaacagttggctgtagctgaggggaaaccccctgaagcccctaaaggcaagaagaaaaagtaaaagaccttggctcatagaaagtcactttaatagatagggacagtaataaataaatgtacaatctctatatac

SEQ ID NO: 288386 - DNA, 889 bp, Homo sapiens
gtgccagggcagtggcctaatacggaactccatttcccggcgtgctcgcggaggccgctgaactcagaagcgggaggccggttccggttgcatcagcgagggattcacggcgaaatgagactgttcgtgagtgatggcgtcccgggttgcttgccggtgctggccgccgccgggagagcccggggcagagcagaggtgctcatcagcactgtaggcccggaagattgtgtggtcccgttcctgacccggcctaaggtccctgtcttgcagctggatagcggcaactacctcttctccactagtgcaatctgccgatatttttttttgttatctggctgggagcaagatgacctcactaaccagtggctggaatgggaagcgacagagctgcagccagctttgtctgctgccctgtactatttagtggtccaaggcaagaagggggaagatgttcttggttcagtgcggagagccctgactcacattgaccacagcttgagtcgtcagaactgtcctttcctggctggggagacagaatctctagccgacattgttttgtggggagccctatacccattactgcaagatcccgcctacctccctgaggagctgagtgccctgcacagctggttccagacactgagtacccaggaaccatgtcagcgagctgcagagactgtactgaaacagcaaggtgtcctggctctccggccttacctccaaaagcagccccagcccagccccgctgagggaagggctgtcaccaatgagcctgaggaggaggagctggtaccctatctgaggaggagatcgcaaaggtgacaagtgggaaagggccaaaatttgaccatgatgccaacaaaacggtggcatgagggaagaatggaac

SEQ ID NO: 288387 - DNA, 3925 bp, Homo sapiens
agtatgatacgccgtgccggtgttatttcattcacgaggcgagcaatgagactgttcgtgagtgatggcgtcccgggttgcttgccggtgctggccgccgccgggagagcccggggcagagcagaggtgctcatcagcactgtaggcccggaagattgtgtggtcccgttcctgacccggcctaaggtccctgtcttgcagctggatagcggcaactacctcttctccactagtgcaatctgccgatatttttttttgttatctggctgggagcaagatgacctcactaaccagtggctggaatgggaagcgacagagctgcagccagctttgtctgctgccctgtactatttagtggtccaaggcaagaagggggaagatgttcttggttcagtgcggagagccctgactcacattgaccacagcttgagtcgtcagaactgtcctttcctggctggggagacagaatctctagccgacattgttttgtggggagccctatacccattactgcaagatcccgcctacctccctgaggagctgagtgccctgcacagctggttccagacactgagtacccaggaaccatgtcagcgagctgcagagactgtactgaaacagcaaggtgtcctggctctccggccttacctccaaaagcagccccagcccagccccgctgagggaagggctgtcaccaatgagcctgaggaggaggagctggctaccctatctgaggaggagattgctatggctgttactgcttgggagaagggcctagaaagtttgcccccgctgcggccccagcagaatccagtgttgcctgtggctggagaaaggaatgtgctcatcaccagtgccctcccttacgtcaacaatgtcccccaccttgggaacatcattggttgtgtgctcagtgccgatgtctttgccaggtactctcgcctccgccagtggaacaccctctatctgtgtgggacagatgagtatggtacagcaacagagaccaaggctctggaggagggactaaccccccaggagatctgcgacaagtaccacatcatccatgctgacatctaccgctggtttaacatttcgtttgatatttttggtcgcaccaccactccacagcagaccaaaatcacccaggacattttccagcagttgctgaaacgaggttttgtgctgcaagatactgtggagcaactgcgatgtgagcactgtgctcgcttcctggctgaccgcttcgtggagggcgtgtgtcccttctgtggctatgaggaggctcggggtgaccagtgtgacaagtgtggcaagctcatcaatgctgtcgagcttaagaagcctcagtgtaaagtctgccgatcatgccctgtggtgcagtcgagccagcacctgtttctggacctgcctaagctggagaagcgactggaggagtggttggggaggacattgcctggcagtgactggacacccaatgcccagtttatcacccgttcttggcttcgggatggcctcaagccacgctgcataacccgagacctcaaatggggaacccctgtacccttagaaggttttgaagacaaggtattctatgtctggtttgatgccactattggctatctgtccatcacagccaactacacagaccagtgggagagatggtggaagaacccagagcaagtggacctgtatcagttcatggccaaagacaatgttcctttccatagcttagtctttccttgctcagccctaggagctgaggataactataccttggtcagccacctcattgctacagagtacctgaactatgaggatgggaaattctctaagagccgcggtgtgggagtgtttggggacatggcccaggacacggggatccctgctgacatctggcgcttctatctgctgtacattcggcctgagggccaggacagtgctttctcctggacggacctgctgctgaagaataattctgagctgcttaacaacctgggcaacttcatcaacagagctgggatgtttgtgtctaagttctttgggggctatgtgcctgagatggtgctcacccctgatgatcagcgcctgctggcccatgtcaccctggagctccagcactatcaccagctacttgagaaggttcggatccgggatgccttgcgcagtatcctcaccatatctcgacatggcaaccaatatattcaggtgaatgagccctggaagcggattaaaggcagtgaggctgacaggcaacgggcaggaacagtgactggcttggcagtgaatatagctgccttgctctctgtcatgcttcagccttacatgcccacggttagtgccacaatccaggcccagctgcagctcccacctccagcctgcagtatcctgctgacaaacttcctgtgtaccttaccagcaggacaccagattggcacagtcagtcccttgttccaaaaattggaaaatgaccagattgaaagtttaaggcagcgctttggagggggccaggcaaaaacgtccccgaagccagcagttgtagagactgttacaacagccaagccacagcagatacaagcgctgatggatgaagtgacaaaacaaggaaacattgtccgagaactgaaagcacaaaaggcagacaagaacgaggttgctgcggaggtggcgaaactcttggatctaaagaaacagttggctgtagctgaggggaaaccccctgaagcccctaaaggcaagaagaaaaagtaaaagaccttggctcatagaaagtcactttaatagatagggacagtaataaataaatgtacaatctctatatacaagctgagacctttccttttgtctactccaagccttccccctgcgtatgtgggattgagggtcacatcattggcactagtgagagggtagtcagtagccacttctgggaaaggtgggtagtgtggcccaagtgggggactgatgctcccaattgttcatgcttggtgcagattcaccattcggtcaatcagagctcggcgagtcgcctctacttccctggtcaggcgctcgatttcctgcttgagccgttcattctcttcagctagctgtgccactttcctttcattctcctgttctttctccttcatgcgctgctttccagcccgggctggggaatgaccactctgtttccgtttcctggttctcccttggtcttcctcctcttcctcctgagccagggagctctgactggaatctggagagtgagggctctgggaggtgcttgtgacctctgctggttctggctcctcctcagtcagccaagccagagaagcagggtcaagagtggtgaagatttttgattctcctcttcatttccaggaggtgaaacataggtacccccattttcatctgaagacaggacctcttgcaggtcctcataccaggcttccagctcccagctggacagtgtcccgaaggagaaaggcaatgactcagctgccatctctgcagttggatcagtctggaaaagcacatctgcaggataatggggagtggctggaacaagctccatgtagcaaacagtctatgccacaagttggcaagctggtctgatgcctgtttttgtaggtaaagttgtactggaatacagccacatctgtttatttacatattgtttatggctgctttggtgctacagtggcagagatgaagagtcacgctagagactataggacttttaacatctaaaatatttactgtcctgccgtttaaaatttttggaaaagggtaggttaagtttacctgctttcaggtgtggtgatgtatgaagatacacttccttcttgaacactctctcctcaggttccagctctgattttggctctgtcgctgccacccgctcatctttaacatgatacgctcagtgccttagacttaagtctct

SEQ ID NO: 288388 - DNA, 3217 bp, Homo sapiens
agtatgatacgccgtgccggtgttatttcattcacgaggcgagcaatgagactgttcgtgagtgatggcgtcccgggttgcttgccggtgctggccgccgccgggagagcccggggcagagcagaggtgctcatcagcactgtaggcccggaagattgtgtggtcccgttcctgacccggcctaaggtccctgtcttgcagctggatagcggcaactacctcttctccactagtgcaatctgccgatatttttttttgttatctggctgggagcaagatgacctcactaaccagtggctggaatgggaagcgacagagctgcagccagctttgtctgctgccctgtactatttagtggtccaaggcaagaagggggaagatgttcttggttcagtgcggagagccctgactcacattgaccacagcttgagtcgtcagaactgtcctttcctggctggggagacagaatctctagccgacattgttttgtggggagccctatacccattactgcaagatcccgcctacctccctgaggagctgagtgccctgcacagctggttccagacactgagtacccaggaaccatgtcagcgagctgcagagactgtactgaaacagcaaggtgtcctggctctccggccttacctccaaaagcagccccagcccagccccgctgagggaagggctgtcaccaatgagcctgaggaggaggagctggctaccctatctgaggaggagattgctatggctgttactgcttgggagaagggcctagaaagtttgcccccgctgcggccccagcagaatccagtgttgcctgtggctggagaaaggaatgtgctcatcaccagtgccctcccttacgtcaacaatgtcccccaccttgggaacatcattggttgtgtgctcagtgccgatgtctttgccaggtactctcgcctccgccagtggaacaccctctatctgtgtgggacagatgagtatggtacagcaacagagaccaaggctctggaggagggactaaccccccaggagatctgcgacaagtaccacatcatccatgctgacatctaccgctggtttaacatttcgtttgatatttttggtcgcaccaccactccacagcagaccaaaatcacccaggacattttccagcagttgctgaaacgaggttttgtgctgcaagatactgtggagcaactgcgatgtgagcactgtgctcgcttcctggctgaccgcttcgtggagggcgtgtgtcccttctgtggctatgaggaggctcggggtgaccagtgtgacaagtgtggcaagctcatcaatgctgtcgagcttaagaagcctcagtgtaaagtctgccgatcatgccctgtggtgcagtcgagccagcacctgtttctggacctgcctaagctggagaagcgactggaggagtggttggggaggacattgcctggcagtgactggacacccaatgcccagtttatcacccgttcttggcttcgggatggcctcaagccacgctgcataacccgagacctcaaatggggaacccctgtacccttagaaggttttgaagacaaggtattctatgtctggtttgatgccactattggctatctgtccatcacagccaactacacagaccagtgggagagatggtggaagaacccagagcaagtggacctgtatcagttcatggccaaagacaatgttcctttccatagcttagtctttccttgctcagccctaggagctgaggataactataccttggtcagccacctcattgctacaggtaagtaccctggaagactactgatggggtgttcataggaaatgaggggtgaggcagtacttggaaaaagatcttggagagctgctatcttgagttaggagttgagctgaaataggaaataattaaaatgagaactcaacctagagaaacgaacaagaacctgaagaaagcaaaagtctaaagctaaaactctttagtagatataagcaaagagaaaaaagggccagaatggataggaagggactcccaaaatctgagcataccagccccttaaggagaaatgttgctagacacccatagttgaggttagaaagaggaaagaaggaagagttagtgggctagagaggggaaggatgtgatgtgagcagatggttctcactcattctcctctgtccagagtacctgaactatgaggatgggaaattctctaagagccgcggtgtgggagtgtttggggacatggcccaggacacggggatccctgctgacatctggcgcttctatctgctgtacattcggcctgagggccaggacagtgctttctcctggacggacctgctgctgaagaataattctgagctgcttaacaacctgggcaacttcatcaacagagctgggatgtttgtgtctaagttctttgggggctatgtgcctgagatggtgctcacccctgatgatcagcgcctgctggcccatgtcaccctggagctccagcactatcaccagctacttgagaaggttcggatccgggatgccttgcgcagtatcctcaccatatctcgacatggcaaccaatatattcaggtgaatgagccctggaagcggattaaaggcagtgaggctgacaggcaacgggcaggaacagtgactggcttggcagtgaatatagctgccttgctctctgtcatgcttcagccttacatgcccacggttagtgccacaatccaggcccagctgcagctcccacctccagcctgcagtatcctgctgacaaacttcctgtgtaccttaccagcaggacaccagattggcacagtcagtcccttgttccaaaaattggaaaatgaccagattgaaagtttaaggcagcgctttggagggggccaggcaaaaacgtccccgaagccagcagttgtagagactgttacaacagccaagccacagcagatacaagcgctgatggatgaagtgacaaaacaaggaaacattgtccgagaactgaaagcacaaaaggcagacaagaacgaggttgctgcggaggtggcgaaactcttggatctaaagaaacagttggctgtagctgaggggaaaccccctgaagcccctaaaggcaagaagaaaaagtaaaagaccttggctcatagaaagtcactttaatagatagggacagtaataaataaatgtacaatctctatatac

SEQ ID NO: 288389 - DNA, 2773 bp, Homo sapiens
agtatgatacgccgtgccggtgttatttcattcacgaggcgagcaatgagactgttcgtgagtgatggcgtcccgggttgcttgccggtgctggccgccgccgggagagcccggggcagagcagaggtgctcatcagcactgtaggcccggaagattgtgtggtcccgttcctgacccggcctaaggtccctgtcttgcagctggatagcggcaactacctcttctccactagtgcaatctgccgatatttttttttgttatctggctgggagcaagatgacctcactaaccagtggctggaatgggaagcgacagagctgcagccagctttgtctgctgccctgtactatttagtggtccaaggcaagaagggggaagatgttcttggttcagtgcggagagccctgactcacattgaccacagcttgagtcgtcagaactgtcctttcctggctggggagacagaatctctagccgacattgttttgtggggagccctatacccattactgcaagatcccgcctacctccctgaggagctgagtgccctgcacagctggttccagacactgagtacccaggaaccatgtcagcgagctgcagagactgtactgaaacagcaaggtgtcctggctctccggccttacctccaaaagcagccccagcccagccccgctgagggaagggctgtcaccaatgagcctgaggaggaggagctggctaccctatctgaggaggagattgctatggctgttactgcttgggagaagggcctagaaagtttgcccccgctgcggccccagcagaatccagtgttgcctgtggctggagaaaggaatgtgctcatcaccagtgccctcccttacgtcaacaatgtcccccaccttgggaacatcattggttgtgtgctcagtgccgatgtctttgccagatgagtatggtacagcaacagagaccaaggctctggaggagggactaaccccccaggagatctgcgacaagtaccacatcatccatgctgacatctaccgctggtttaacatttcgtttgatatttttggtcgcaccaccactccacagcagaccaaaatcacccaggacattttccagcagttgctgaaacgaggttttgtgctgcaagatactgtggagcaactgcgatgtgagcactgtgctcgcttcctggctgaccgcttcgtggagggcgtgtgtcccttctgtggctatgaggaggctcggggtgaccagtgtgacaagtgtggcaagctcatcaatgctgtcgagcttaagaagcctcagtgtaaagtctgccgatcatgccctgtggtgcagtcgagccagcacctgtttctggacctgcctaagctggagaagcgactggaggagtggttggggaggacattgcctggcagtgactggacacccaatgcccagtttatcacccgttcttggcttcgggatggcctcaagccacgctgcataacccgagacctcaaatggggaacccctgtacccttagaaggttttgaagacaaggtattctatgtctggtttgatgccactattggctatctgtccatcacagccaactacacagaccagtgggagagatggtggaagaacccagagcaagtggacctgtatcagttcatggccaaagacaatgttcctttccatagcttagtctttccttgctcagccctaggagctgaggataactataccttggtcagccacctcattgctacagagtacctgaactatgaggatgggaaattctctaagagccgcggtgtgggagtgtttggggacatggcccaggacacggggatccctgctgacatctggcgcttctatctgctgtacattcggcctgagggccaggacagtgctttctcctggacggacctgctgctgaagaataattctgagctgcttaacaacctgggcaacttcatcaacagagctgggatgtttgtgtctaagttctttgggggctatgtgcctgagatggtgctcacccctgatgatcagcgcctgctggcccatgtcaccctggagctccagcactatcaccagctacttgagaaggttcggatccgggatgccttgcgcagtatcctcaccatatctcgacatggcaaccaatatattcaggtgaatgagccctggaagcggattaaaggcagtgaggctgacaggcaacgggcaggaacagtgactggcttggcagtgaatatagctgccttgctctctgtcatgcttcagccttacatgcccacggttagtgccacaatccaggcccagctgcagctcccacctccagcctgcagtatcctgctgacaaacttcctgtgtaccttaccagcaggacaccagattggcacagtcagtcccttgttccaaaaattggaaaatgaccagattgaaagtttaaggcagcgctttggagggggccaggcaaaaacgtccccgaagccagcagttgtagagactgttacaacagccaagccacagcagatacaagcgctgatggatgaagtgacaaaacaaggaaacattgtccgagaactgaaagcacaaaaggcagacaagaacgaggttgctgcggaggtggcgaaactcttggatctaaagaaacagttggctgtagctgaggggaaaccccctgaagcccctaaaggcaagaagaaaaagtaaaagaccttggctcatagaaagtcactttaatagatagggacagtaataaataaatgtacaatctctatatac

SEQ ID NO: 288390 - DNA, 3349 bp, Homo sapiens
agtatgatacgccgtgccggtgttatttcattcacgaggcgagcaatgagactgttcgtgagtgatggcgtcccgggttgcttgccggtgctggccgccgccgggagagcccggggcagagcagaggtgctcatcagcactgtaggcccggaagattgtgtggtcccgttcctgacccggcctaaggtccctgtcttgcagctggatagcggcaactacctcttctccactagtgcaatctgccgatatttttttttgttatctggctgggagcaagatgacctcactaaccagtggctggaatgggaagcgacagagctgcagccagctttgtctgctgccctgtactatttagtggtccaaggcaagaagggggaagatgttcttggttcagtgcggagagccctgactcacattgaccacagcttgagtcgtcagaactgtcctttcctggctggggagacagaatctctagccgacattgttttgtggggagccctatacccattactgcaagatcccgcctacctccctgaggagctgagtgccctgcacagctggttccagacactgagtacccaggaaccatgtcagcgagctgcagagactgtactgaaacagcaaggtgtcctggctctccggccttacctccaaaagcagccccagcccagccccgctgagggaagggctgtcaccaatgagcctgaggaggaggagctggctaccctatctgaggaggagattgctatggctgttactgcttgggagaagggcctagaaagtttgcccccgctgcggccccagcagaatccagtgttgcctgtggctggagaaaggaatgtgctcatcaccagtgccctcccttacgtcaacaatgtcccccaccttgggaacatcattggttgtgtgctcagtgccgatgtctttgccaggtactctcgcctccgccagtggaacaccctctatctgtgtgggacagatgagtatggtacagcaacagagaccaaggctctggaggagggactaaccccccaggagatctgcgacaagtaccacatcatccatgctgacatctaccgctggtttaacatttcgtttgatatttttggtcgcaccaccactccacagcagaccaaaatcacccaggacattttccagcagttgctgaaacgaggttttgtgctgcaagatactgtggagcaactgcgatgtgagcactgtgctcgcttcctggctgaccgcttcgtggagggcgtgtgtcccttctgtggctatgaggaggctcggggtgaccagtgtgacaagtgtggcaagctcatcaatgctgtcgagcttaagaagcctcagtgtaaagtctgccgatcatgccctgtggtgcagtcgagccagcacctgtttctggacctgcctaagctggagaagcgactggaggagtggttggggaggacattgcctggcagtgactggacacccaatgcccagtttatcacccgttcttggcttcgggatggcctcaagccacgctgcataacccgagacctcaaatggggaacccctgtacccttagaaggttttgaagacaaggtattctatgtctggtttgatgccactattggctatctgtccatcacagccaactacacagaccagtgggagagatggtggaagaacccagagcaagtgagcagttcttggttaggctgtgcatggggagggtaggcggtagggtgtgggtgttagggttgggtgtctggtcttccttgggcctttgaaggaggtctcaggaaatctctcctaaccacattcccctaggtggacctgtatcagttcatggccaaagacaatgttcctttccatagcttagtctttccttgctcagccctaggagctgaggataactataccttggtcagccacctcattgctacaggtaagtaccctggaagactactgatggggtgttcataggaaatgaggggtgaggcagtacttggaaaaagatcttggagagctgctatcttgagttaggagttgagctgaaataggaaataattaaaatgagaactcaacctagagaaacgaacaagaacctgaagaaagcaaaagtctaaagctaaaactctttagtagatataagcaaagagaaaaaagggccagaatggataggaagggactcccaaaatctgagcataccagccccttaaggagaaatgttgctagacacccatagttgaggttagaaagaggaaagaaggaagagttagtgggctagagaggggaaggatgtgatgtgagcagatggttctcactcattctcctctgtccagagtacctgaactatgaggatgggaaattctctaagagccgcggtgtgggagtgtttggggacatggcccaggacacggggatccctgctgacatctggcgcttctatctgctgtacattcggcctgagggccaggacagtgctttctcctggacggacctgctgctgaagaataattctgagctgcttaacaacctgggcaacttcatcaacagagctgggatgtttgtgtctaagttctttgggggctatgtgcctgagatggtgctcacccctgatgatcagcgcctgctggcccatgtcaccctggagctccagcactatcaccagctacttgagaaggttcggatccgggatgccttgcgcagtatcctcaccatatctcgacatggcaaccaatatattcaggtgaatgagccctggaagcggattaaaggcagtgaggctgacaggcaacgggcaggaacagtgactggcttggcagtgaatatagctgccttgctctctgtcatgcttcagccttacatgcccacggttagtgccacaatccaggcccagctgcagctcccacctccagcctgcagtatcctgctgacaaacttcctgtgtaccttaccagcaggacaccagattggcacagtcagtcccttgttccaaaaattggaaaatgaccagattgaaagtttaaggcagcgctttggagggggccaggcaaaaacgtccccgaagccagcagttgtagagactgttacaacagccaagccacagcagatacaagcgctgatggatgaagtgacaaaacaaggaaacattgtccgagaactgaaagcacaaaaggcagacaagaacgaggttgctgcggaggtggcgaaactcttggatctaaagaaacagttggctgtagctgaggggaaaccccctgaagcccctaaaggcaagaagaaaaagtaaaagaccttggctcatagaaagtcactttaatagatagggacagtaataaataaatgtacaatctctatatac

SEQ ID NO: 288391 - DNA, 3166 bp, Homo sapiens
agtatgatacgccgtgccggtgttatttcattcacgaggcgagcaatgagactgttcgtgagtgatggcgtcccgggttgcttgccggtgctggccgccgccgggagagcccggggcagagcagaggtgctcatcagcactgtaggcccggaagattgtgtggtcccgttcctgacccggcctaaggtccctgtcttgcagctggatagcggcaactacctcttctccactagtgcaatctgccgatatttttttttgttatctggctgggagcaagatgacctcactaaccagtggctggaatgggaagcgacagagctgcagccagctttgtctgctgccctgtactatttagtggtccaaggcaagaagggggaagatgttcttggttcagtgcggagagccctgactcacattgaccacagcttgagtcgtcagaactgtcctttcctggctggggagacagaatctctagccgacattgttttgtggggagccctatacccattactgcaagatcccgcctacctccctgaggagctgagtgccctgcacagctggttccagacactgagtacccaggaaccatgtcagcgagctgcagagactgtactgaaacagcaaggtgtcctggctctccggccttacctccaaaagcagccccagcccagccccgctgagggaagggctgtcaccaatgagcctgaggaggaggagctggctaccctatctgaggaggagattgctatggctgttactgcttgggagaagggcctagaaagtttgcccccgctgcggccccagcagaatccagtgttgcctgtggctggagaaaggaatgtgctcatcaccagtgccctcccttacgtcaacaatgtcccccaccttgggaacatcattggttgtgtgctcagtgccgatgtctttgccaggtactctcgcctccgccagtggaacaccctctatctgtgtgggacagatgagtatggtacagcaacagagaccaaggctctggaggagggactaaccccccaggagatctgcgacaagtaccacatcatccatgctgacatctaccgctggtttaacatttcgtttgatatttttggtcgcaccaccactccacagcagaccaaaatcacccaggacattttccagcagttgctgaaacgaggttttgtgctgcaagatactgtggagcaactgcgatgtgagcactgtgctcgcttcctggctgaccgcttcgtggagggcgtgtgtcccttctgtggctatgaggaggctcggggtgaccagtgtgacaagtgtggcaagctcatcaatgctgtcgagcttaagaagcctcagtgtaaagtctgccgatcatgccctgtggtgcagtcgagccagcacctgtttctggacctgcctaagctggagaagcgactggaggagtggttggggaggacattgcctggcagtgactggacacccaatgcccagtttatcacccgttcttggcttcgggatggcctcaagccacgctgcataacccgagacctcaaatggggaacccctgtacccttagaaggttttgaagacaaggtattctatgtctggtttgatgccactattggctatctgtccatcacagccaactacacagaccagtgggagagatggtggaagaacccagagcaagtggacctgtatcagttcatggccaaagacaatgttcctttccatagcttagtctttccttgctcagccctaggagctgaggataactataccttggtcagccacctcattgctacagagtacctgaactatgaggatgggaaattctctaagagccgcggtgtgggagtgtttggggacatggcccaggacacggggatccctgctgacatctggcgcttctatctgctgtacattcggcctgagggccaggacagtgctttctcctggacggacctgctgctgaagaataattctgagctgcttaacaacctgggcaacttcatcaacagagctgggatgtttgtgtctaagttctttgggggctatgtgcctgagatggtgctcacccctgatgatcagcgcctgctggcccatgtcaccctggagctccagcactatcaccagctacttgagaaggttcggatccgggatgccttgcgcagtatcctcaccatatctcgacatggcaaccaatatattcaggtgaatgagccctggaagcggattaaaggcagtgaggctgacaggcaacgggcaggaacagtgactggcttggcagtgaatatagctgccttgctctctgtcatgcttcagccttacatgcccacggttagtgccacaatccaggcccagctgcagctcccacctccagcctgcagtatcctgctgacaaacttcctgtgtaccttaccagcaggacaccagattggcacagtcagtcccttgttccaaaaattggaaaatgaccagattgaaagtttaaggcagcgctttggagggggccaggcaaaaacgtccccgaagccagcagttgtagagactgttacaacagccaagccacagcagatacaagcgctgatggatgaagtgacaaaacaaggaaacattgtccgagaactgaaagcacaaaaggcagacaagaacgaggttgctgcggaggtggcgaaactcttggatctaaagaaacagttggctgtagctgaggggaaaccccctgaagcccctaaaggcaagaagaaaaagtaaaagaccttggctcatagaaagtcactttaatagatagggacagtaataaataaatgtacaatctctatatacaagctgagacctttccttttgtctactccaagccttccccctgcgtatgtgggattgagggtcacatcattggcactagtgagagggtagtcagtagccacttctgggaaaggtgggtagtgtggcccaagtgggggactgatgctcccaattgttcatgcttggtgcagattcaccattcggtcaatcagagctcggcgagtcgcctctacttccctggtcaggcgctcgatttcctgcttgagccgttcattctcttcagctagctgtgccactttcctttcattctcctccaagccagccgggttctccagtttggccgacgcgtgggtcgacccacgcgtcc

SEQ ID NO: 288392 - DNA, 2850 bp, Homo sapiens
agtatgatacgccgtgccggtgttatttcattcacgaggcgagcaatgagactgttcgtgagtgatggcgtcccgggttgcttgccggtgctggccgccgccgggagagcccggggcagagcagaggtgctcatcagcactgtaggcccggaagattgtgtggtcccgttcctgacccggcctaaggtccctgtcttgcagctggatagcggcaactacctcttctccactagtgcaatctgccgatatttttttttgttatctggctgggagcaagatgacctcactaaccagtggctggaatgggaagcgacagagctgcagccagctttgtctgctgccctgtactatttagtggtccaaggcaagaagggggaagatgttcttggttcagtgcggagagccctgactcacattgaccacagcttgagtcgtcagaactgtcctttcctggctggggagacagaatctctagccgacattgttttgtggggagccctatacccattactgcaagatcccgcctacctccctgaggagctgagtgccctgcacagctggttccagacactgagtacccaggaaccatgtcagcgagctgcagagactgtactgaaacagcaaggtgtcctggctctccggccttacctccaaaagcagccccagcccagccccgctgagggaagggctgtcaccaatgagcctgaggaggaggagctggctaccctatctgaggaggagattgctatggctgttactgcttgggagaagggcctagaaagtttgcccccgctgcggccccagcagaatccagtgttgcctgtggctggagaaaggaatgtgctcatcaccagtgccctcccttacgtcaacaatgtcccccaccttgggaacatcattggttgtgtgctcagtgccgatgtctttgccaggtactctcgcctccgccagtggaacaccctctatctgtgtgggacagatgagtatggtacagcaacagagaccaaggctctggaggagggactaaccccccaggagatctgcgacaagtaccacatcatccatgctgacatctaccgctggtttaacatttcgtttgatatttttggtcgcaccaccactccacagcagaccaaaatcacccaggacattttccagcagttgctgaaacgaggttttgtgctgcaagatactgtggagcaactgcgatgtgagcactgtgctcgcttcctggctgaccgcttcgtggagggcgtgtgtcccttctgtggctatgaggaggctcggggtgaccagtgtgacaagtgtggcaagctcatcaatgctgtcgagcttaagaagcctcagtgtaaagtctgccgatcatgccctgtggtgcagtcgagccagcacctgtttctggacctgcctaagctggagaagcgactggaggagtggttggggaggacattgcctggcagtgactggacacccaatgcccagtttatcacccgttcttggcttcgggatggcctcaagccacgctgcataacccgagacctcaaatggggaacccctgtacccttagaaggttttgaagacaaggtattctatgtctggtttgatgccactattggctatctgtccatcacagccaactacacagaccagtgggagagatggtggaagaacccagagcaagtggacctgtatcagttcatggccaaagacaatgttcctttccatagcttagtctttccttgctcagccctaggagctgaggataactataccttggtcagccacctcattgctacagagtacctgaactatgaggatgggaaattctctaagagccgcggtgtgggagtgtttggggacatggcccaggacacggggatccctgctgacatctggcgcttctatctgctgtacattcggcctgagggccaggacagtgctttctcctggacggacctgctgctgaagaataattctgagctgcttaacaacctgggcaacttcatcaacagagctgggatgtttgtgtctaagttctttgggggctatgtgcctgagatggtgctcacccctgatgatcagcgcctgctggcccatgtcaccctggagctccagcactatcaccagctacttgagaaggttcggatccgggatgccttgcgcagtatcctcaccatatctcgacatggcaaccaatatattcaggtgaatgagccctggaagcggattaaaggcagtgaggctgacaggcaacgggcaggaacagtgactggcttggcagtgaatatagctgccttgctctctgtcatgcttcagccttacatgcccacggttagtgccacaatccaggcccagctgcagctcccacctccagcctgcagtatcctgctgacaaacttcctgtgtaccttaccagcaggacaccagattggcacagtcagtcccttgttccaaaaattggaaaatgaccagattgaaagtttaaggcagcgctttggagggggccaggcaaaaacgtccccgaagccagcagttgtagagactgttacaacagccaagccacagcagatacaagcgctgatggatgaagtgacaaaacaaggaaacattgtccgagaactgaaagcacaaaaggcagacaagaacgaggttgctgcggaggtggcgaaactcttggatctaaagaaacagttggctgtagctgaggggaaaccccctgaagcccctaaaggcaagaagaaaaagtaaaagaccttggctcatagaaagtcactttaatagatagggacagtaataaataaatgtacaatctctatatacaatatatcaaaactcgagactagttctctc

SEQ ID NO: 288393 - DNA, 2899 bp, Homo sapiens
agtatgatacgccgtgccggtgttatttcattcacgaggcgagcaatgagactgttcgtgagtgatggcgtcccgggttgcttgccggtgctggccgccgccgggagagcccggggcagagcagaggtgctcatcagcactgtaggcccggaagattgtgtggtcccgttcctgacccggcctaaggtccctgtcttgcagctggatagcggcaactacctcttctccactagtgcaatctgccgatatttttttttgttatctggctgggagcaagatgacctcactaaccagtggctggaatgggaagcgacagagctgcagccagctttgtctgctgccctgtactatttagtggtccaaggcaagaagggggaagatgttcttggttcagtgcggagagccctgactcacattgaccacagcttgagtcgtcagaactgtcctttcctggctggggagacagaatctctagccgacattgttttgtggggagccctatacccattactgcaagatcccgcctacctccctgaggagctgagtgccctgcacagctggttccagacactgagtacccaggaaccatgtcagcgagctgcagagactgtactgaaacagcaaggtgtcctggctctccggccttacctccaaaagcagccccagcccagccccgctgagggaagggctgtcaccaatgagcctgaggaggaggagctggctaccctatctgaggaggagattgctatggctgttactgcttgggagaagggcctagaaagtttgcccccgctgcggccccagcagaatccagtgttgcctgtggctggagaaaggaatgtgctcatcaccagtgccctcccttacgtcaacaatgtcccccaccttgggaacatcattggttgtgtgctcagtgccgatgtctttgccaggtactctcgcctccgccagtggaacaccctctatctgtgtgggacagatgagtatggtacagcaacagagaccaaggctctggaggagggactaaccccccaggagatctgcgacaagtaccacatcatccatgctgacatctaccgctggtttaacatttcgtttgatatttttggtcgcaccaccactccacagcagaccaaaatcacccaggacattttccagcagttgctgaaacgaggttttgtgctgcaagatactgtggagcaactgcgatgtgagcactgtgctcgcttcctggctgaccgcttcgtggagggcgtgtgtcccttctgtggctatgaggaggctcggggtgaccagtgtgacaagtgtggcaagctcatcaatgctgtcgagcttaagaagcctcagtgtaaagtctgccgatcatgccctgtggtgcagtcgagccagcacctgtttctggacctgcctaagctggagaagcgactggaggagtggttggggaggacattgcctggcagtgactggacacccaatgcccagtttatcacccgttcttggcttcgggatggcctcaagccacgctgcataacccgagacctcaaatggggaacccctgtacccttagaaggttttgaagacaaggtattctatgtctggtttgatgccactattggctatctgtccatcacagccaactacacagaccagtgggagagatggtggaagaacccagagcaagtggacctgtatcagttcatggccaaagacaatgttcctttccatagcttagtctttccttgctcagccctaggagctgaggataactataccttggtcagccacctcattgctacagagtacctgaactatgaggatgggaaattctctaagagccgcggtgtgggagtgtttggggacatggcccaggacacggggatccctgctgacatctggcgcttctatctgctgtacattcggcctgagggccaggacagtgctttctcctggacggacctgctgctgaagaataattctgagctgcttaacaacctgggcaacttcatcaacagagctgggatgtttgtgtctaagttctttgggggctatgtgcctgagatggtgctcacccctgatgatcagcgcctgctggcccatgtcaccctggagctccagcactatcaccagctacttgagaaggttcggatccgggatgccttgcgcagtatcctcaccatatctcgacatggcaaccaatatattcaggtgaatgagccctggaagcggattaaaggcagtgaggctgacaggcaacgggcaggaacagtgactggcttggcagtgaatatagctgccttgctctctgtcatgcttcagccttacatgcccacggttagtgccacaatccaggcccagctgcagctcccacctccagcctgcagtatcctgctgacaaacttcctgtgtaccttaccagcaggacaccagattggcacagtcagtcccttgttccaaaaattggaaaatgaccagattgaaagtttaaggcagcgctttggagggggccaggcaaaaacgtccccgaagccagcagttgtagagactgttacaacagccaagccacagcagatacaagcgctgatggatgaagtgacaaaacaaggaaacattgtccgagaactgaaagcacaaaaggcagacaagaacgaggttgctgcggaggtggcgaaactcttggatctaaagaaacagttggctgtagctgaggggaaaccccctgaagcccctaaaggcaagaagaaaaagtaaaagaccttggctcatagaaagtcactttaatagatagggacagtaataaataaatgtacaatctctatatacaacaacgagccacaaacacagcgggggggcggcacacagagaacgccccggagggggcccaagaggaaaggggaaacca

SEQ ID NO: 288394 - DNA, 2874 bp, Homo sapiens
agtatgatacgccgtgccggtgttatttcattcacgaggcgagcaatgagactgttcgtgagtgatggcgtcccgggttgcttgccggtgctggccgccgccgggagagcccggggcagagcagaggtgctcatcagcactgtaggcccggaagattgtgtggtcccgttcctgacccggcctaaggtccctgtcttgcagctggatagcggcaactacctcttctccactagtgcaatctgccgatatttttttttgttatctggctgggagcaagatgacctcactaaccagtggctggaatgggaagcgacagagctgcagccagctttgtctgctgccctgtactatttagtggtccaaggcaagaagggggaagatgttcttggttcagtgcggagagccctgactcacattgaccacagcttgagtcgtcagaactgtcctttcctggctggggagacagaatctctagccgacattgttttgtggggagccctatacccattactgcaagatcccgcctacctccctgaggagctgagtgccctgcacagctggttccagacactgagtacccaggaaccatgtcagcgagctgcagagactgtactgaaacagcaaggtgtcctggctctccggccttacctccaaaagcagccccagcccagccccgctgagggaagggctgtcaccaatgagcctgaggaggaggagctggctaccctatctgaggaggagattgctatggctgttactgcttgggagaagggcctagaaagtttgcccccgctgcggccccagcagaatccagtgttgcctgtggctggagaaaggaatgtgctcatcaccagtgccctcccttacgtcaacaatgtcccccaccttgggaacatcattggttgtgtgctcagtgccgatgtctttgccaggtactctcgcctccgccagtggaacaccctctatctgtgtgggacagatgagtatggtacagcaacagagaccaaggctctggaggagggactaaccccccaggagatctgcgacaagtaccacatcatccatgctgacatctaccgctggtttaacatttcgtttgatatttttggtcgcaccaccactccacagcagaccaaaatcacccaggacattttccagcagttgctgaaacgaggttttgtgctgcaagatactgtggagcaactgcgatgtgagcactgtgctcgcttcctggctgaccgcttcgtggagggcgtgtgtcccttctgtggctatgaggaggctcggggtgaccagtgtgacaagtgtggcaagctcatcaatgctgtcgagcttaagaagcctcagtgtaaagtctgccgatcatgccctgtggtgcagtcgagccagcacctgtttctggacctgcctaagctggagaagcgactggaggagtggttggggaggacattgcctggcagtgactggacacccaatgcccagtttatcacccgttcttggcttcgggatggcctcaagccacgctgcataacccgagacctcaaatggggaacccctgtacccttagaaggttttgaagacaaggtattctatgtctggtttgatgccactattggctatctgtccatcacagccaactacacagaccagtgggagagatggtggaagaacccagagcaagtggacctgtatcagttcatggccaaagacaatgttcctttccatagcttagtctttccttgctcagccctaggagctgaggataactataccttggtcagccacctcattgctacagagtacctgaactatgaggatgggaaattctctaagagccgcggtgtgggagtgtttggggacatggcccaggacacggggatccctgctgacatctggcgcttctatctgctgtacattcggcctgagggccaggacagtgctttctcctggacggacctgctgctgaagaataattctgagctgcttaacaacctgggcaacttcatcaacagagctgggatgtttgtgtctaagttctttgggggctatgtgcctgagatggtgctcacccctgatgatcagcgcctgctggcccatgtcaccctggagctccagcactatcaccagctacttgagaaggttcggatccgggatgccttgcgcagtatcctcaccatatctcgacatggcaaccaatatattcaggtgaatgagccctggaagcggattaaaggcagtgaggctgacaggcaacgggcaggaacagtgactggcttggcagtgaatatagctgccttgctctctgtcatgcttcagccttacatgcccacggttagtgccacaatccaggcccagctgcagctcccacctccagcctgcagtatcctgctgacaaacttcctgtgtaccttaccagcaggacaccagattggcacagtcagtcccttgttccaaaaattggaaaatgaccagattgaaagtttaaggcagcgctttggagggggccaggcaaaaacgtccccgaagccagcagttgtagagactgttacaacagccaagccacagcagatacaagcgctgatggatgaagtgacaaaacaaggaaacattgtccgagaactgaaagcacaaaaggcagacaagaacgaggttgctgcggaggtggcgaaactcttggatctaaagaaacagttggctgtagctgaggggaaaccccctgaagcccctactcttcatttccaggaggtgaaacataggtacccccattttcatctgaagacaggacctcttgcaggtcctcataccaggcttccagctcccagctggacagtgtcccgttaggagctttgcctgggaatcctgctgggtcagctc

SEQ ID NO: 288395 - DNA, 2762 bp, Homo sapiens
agtatgatacgccgtgccggtgttatttcattcacgaggcgagcaatgagactgttcgtgagtgatggcgtcccgggttgcttgccggtgctggccgccgccgggagagcccggggcagagcagaggtgctcatcagcactgtaggcccggaagattgtgtggtcccgttcctgacccggcctaaggtccctgtcttgcagctggatagcggcaactacctcttctccactagtgcaatctgccgatatttttttttgttatctggctgggagcaagatgacctcactaaccagtggctggaatgggaagcgacagagctgcagccagctttgtctgctgccctgtactatttagtggtccaaggcaagaagggggaagatgttcttggttcagtgcggagagccctgactcacattgaccacagcttgagtcgtcagaactgtcctttcctggctggggagacagaatctctagccgacattgttttgtggggagccctatacccattactgcaagatcccgcctacctccctgaggagctgagtgccctgcacagctggttccagacactgagtacccaggaaccatgtcagcgagctgcagagactgtactgaaacagcaaggtgtcctggctctccggccttacctccaaaagcagccccagcccagccccgctgagggaagggctgtcaccaatgagcctgaggaggaggagctggctaccctatctgaggaggagattgctatggctgttactgcttgggagaagggcctagaaagtttgcccccgctgcggccccagcagaatccagtgttgcctgtggctggagaaaggaatgtgctcatcaccagtgccctcccttacgtcaacaatgtcccccaccttgggaacatcattggttgtgtgctcagtgccgatgtctttgccaggtactctcgcctccgccagtggaacaccctctatctgtgtgggacagatgagtatggtacagcaacagagaccaaggctctggaggagggactaaccccccaggagatctgcgacaagtaccacatcatccatgctgacatctaccgctggtttaacatttcgtttgatatttttggtcgcaccaccactccacagcagaccaaaatcacccaggacattttccagcagttgctgaaacgaggttttgtgctgcaagatactgtggagcaactgcgatgtgagcactgtgctcgcttcctggctgaccgcttcgtggagggcgtgtgtcccttctgtggctatgaggaggctcggggtgaccagtgtgacaagtgtggcaagctcatcaatgctgtcgagcttaagaagcctcagtgtaaagtctgccgatcatgccctgtggtgcagtcgagccagcacctgtttctggacctgcctaagctggagaagcgactggaggagtggttggggaggacattgcctggcagtgactggacacccaatgcccagtttatcacccgttcttggcttcgggatggcctcaagccacgctgcataacccgagacctcaaatggggaacccctgtacccttagaaggttttgaagacaaggtattctatgtctggtttgatgccactattggctatctgtccatcacagccaactacacagaccagtgggagagatggtggaagaacccagagcaagtggacctgtatcagttcatggccaaagacaatgttcctttccatagcttagtctttccttgctcagccctaggagctgaggataactataccttggtcagccacctcattgctacagagtacctgaactatgaggatgggaaattctctaagagccgcggtgtgggagtgtttggggacatggcccaggacacggggatccctgctgacatctggcgcttctatctgctgtacattcggcctgagggccaggacagtgctttctcctggacggacctgctgctgaagaataattctgagctgcttaacaacctgggcaacttcatcaacagagctgggatgtttgtgtctaagttctttgggggctatgtgcctgagatggtgctcacccctgatgatcagcgcctgctggcccatgtcaccctggagctccagcactatcaccagctacttgagaaggttcggatccgggatgccttgcgcagtatcctcaccatatctcgacatggcaaccaatatattcaggtgaatgagccctggaagcggattaaaggcagtgaggctgacaggcaacgggcaggaacagtgactggcttggcagtgaatatagctgccttgctctctgtcatgcttcagcctgcagtatcctgctgacaaacttcctgtgtaccttaccagcaggacaccagattggcacagtcagtcccttgttccaaaaattggaaaatgaccagattgaaagtttaaggcagcgctttggagggggccaggcaaaaacgtccccgaagccagcagttgtagagactgttacaacagccaagccacagcagatacaagcgctgatggatgaagtgacaaaacaaggaaacattgtccgagaactgaaagcacaaaaggcagacaagaacgaggttgctgcggaggtggcgaaactcttggatctaaagaaacagttggctgtagctgaggggaaaccccctgaagcccctaaaggcaagaagaaaaagtaaaagaccttggctcatagaaagtcactttaatagatagggacagtaataaataaatgtacaatctctatatac

SEQ ID NO: 288396 - DNA, 2958 bp, Homo sapiens
agtatgatacgccgtgccggtgttatttcattcacgaggcgagcaatgagactgttcgtgagtgatggcgtcccgggttgcttgccggtgctggccgccgccgggagagcccggggcagagcagaggtgctcatcagcactgtaggcccggaagattgtgtggtcccgttcctgacccggcctaaggtccctgtcttgcagctggatagcggcaactacctcttctccactagtgcaatctgccgatatttttttttgttatctggctgggagcaagatgacctcactaaccagtggctggaatgggaagcgacagagctgcagccagctttgtctgctgccctgtactatttagtggtccaaggcaagaagggggaagatgttcttggttcagtgcggagagccctgactcacattgaccacagcttgagtcgtcagaactgtcctttcctggctggggagacagaatctctagccgacattgttttgtggggagccctatacccattactgcaagatcccgcctacctccctgaggagctgagtgccctgcacagctggttccagacactgagtacccaggaaccatgtcagcgagctgcagagactgtactgaaacagcaaggtgtcctggctctccggccttacctccaaaagcagccccagcccagccccgctgagggaagggctgtcaccaatgagcctgaggaggaggagctggctaccctatctgaggaggagattgctatggctgttactgcttgggagaagggcctagaaagtttgcccccgctgcggccccagcagaatccagtgttgcctgtggctggagaaaggaatgtgctcatcaccagtgccctcccttacgtcaacaatgtcccccaccttgggaacatcattggttgtgtgctcagtgccgatgtctttgccaggtactctcgcctccgccagtggaacaccctctatctgtgtgggacagatgagtatggtacagcaacagagaccaaggctctggaggagggactaaccccccaggagatctgcgacaagtaccacatcatccatgctgacatctaccgctggtttaacatttcgtttgatatttttggtcgcaccaccactccacagcagaccaaaatcacccaggacattttccagcagttgctgaaacgaggttttgtgctgcaagatactgtggagcaactgcgatgtgagcactgtgctcgcttcctggctgaccgcttcgtggagggcgtgtgtcccttctgtggctatgaggaggctcggggtgaccagtgtgacaagtgtggcaagctcatcaatgctgtcgagcttaagaagcctcagtgtaaagtctgccgatcatgccctgtggtgcagtcgagccagcacctgtttctggacctgcctaagctggagaagcgactggaggagtggttggggaggacattgcctggcagtgactggacacccaatgcccagtttatcacccgttcttggcttcgggatggcctcaagccacgctgcataacccgagacctcaaatggggaacccctgtacccttagaaggttttgaagacaaggtattctatgtctggtttgatgccactattggctatctgtccatcacagccaactacacagaccagtgggagagatggtggaagaacccagagcaagtggacctgtatcagttcatggccaaagacaatgttcctttccatagcttagtctttccttgctcagccctaggagctgaggataactataccttggtcagccacctcattgctacagagtacctgaactatgaggatgggaaattctctaagagccgcggtgtgggagtgtttggggacatggcccaggacacggggatccctgctgacatctggcgcttctatctgctgtacattcggcctgagggccaggacagtgctttctcctggacggacctgctgctgaagaataattctgagctgcttaacaacctgggcaacttcatcaacagagctgggatgtttgtgtctaagttctttgggggctatgtgcctgagatggtgctcacccctgatgatcagcgcctgctggcccatgtcaccctggagctccagcactatcaccagctacttgagaaggttcggatccgggatgccttgcgcagtatcctcaccatatctcgacatggcaaccaatatattcaggtgaatgagccctggaagcggattaaaggcagtgaggctgacaggcaacgggcaggaacagtgactggcttggcagtgaatatagctgccttgctctctgtcatgcttcagccttacatgcccacggttagtgccacaatccaggcccagctgcagctcccacctccagcctgcagtatcctgctgacaaacttcctgtgtaccttaccagcaggacaccagattggcacagtcagtcccttgttccaaaaattggaaaatgaccagattgaaagtttaaggcagcgctttggagggggccaggcaaaaacgtccccgaagccagcagttgtagagactgttacaacagccaagccacagcagatacaagcgctgatggatgaagtgacaaaacaaagtatgaagcttaagccctgtgggagactggacaagctgaatcctaaatagatctttttcttgcctcactgttacctccccacccccctttatcttagggaaacattgtccgagaactgaaagcacaaaaggcagacaagaacgaggttgctgcggaggtggcgaaactcttggatctaaagaaacagttggctgtagctgaggggaaaccccctgaagcccctaaaggcaagaagaaaaagtaaaagaccttggctcatagaaagtcactttaatagatagggacagtaataaataaatgtacaatctctatatacaaaaaaaagtcgacgcggccgctaatttagtagtagtagt

SEQ ID NO: 288397 - DNA, 3559 bp, Homo sapiens
agtatgatacgccgtgccggtgttatttcattcacgaggcgagcaatgagactgttcgtgagtgatggcgtcccgggttgcttgccggtgctggccgccgccgggagagcccggggcagagcagaggtgctcatcagcactgtaggcccggaagattgtgtggtcccgttcctgacccggcctaaggtccctgtcttgcagctggatagcggcaactacctcttctccactagtgcaatctgccgatatttttttttgttatctggctgggagcaagatgacctcactaaccagtggctggaatgggaagcgacagagctgcagccagctttgtctgctgccctgtactatttagtggtccaaggcaagaagggggaagatgttcttggttcagtgcggagagccctgactcacattgaccacagcttgagtcgtcagaactgtcctttcctggctggggagacagaatctctagccgacattgttttgtggggagccctatacccattactgcaagatcccgcctacctccctgaggagctgagtgccctgcacagctggttccagacactgagtacccaggaaccatgtcagcgagctgcagagactgtactgaaacagcaaggtgtcctggctctccggccttacctccaaaagcagccccagcccagccccgctgagggaagggctgtcaccaatgagcctgaggaggaggagctggctaccctatctgaggaggagattgctatggctgttactgcttgggagaagggcctagaaagtttgcccccgctgcggccccagcagaatccagtgttgcctgtggctggagaaaggaatgtgctcatcaccagtgccctcccttacgtcaacaatgtcccccaccttgggaacatcattggttgtgtgctcagtgccgatgtctttgccaggtactctcgcctccgccagtggaacaccctctatctgtgtgggacagatgagtatggtacagcaacagagaccaaggctctggaggagggactaaccccccaggagatctgcgacaagtaccacatcatccatgctgacatctaccgctggtttaacatttcgtttgatatttttggtcgcaccaccactccacagcagaccaaaatcacccaggacattttccagcagttgctgaaacgaggttttgtgctgcaagatactgtggagcaactgcgatgtgagcactgtgctcgcttcctggctgaccgcttcgtggagggcgtgtgtcccttctgtggctatgaggaggctcggggtgaccagtgtgacaagtgtggcaagctcatcaatgctgtcgagcttaagaagcctcagtgtaaagtctgccgatcatgccctgtggtgcagtcgagccagcacctgtttctggacctgcctaagctggagaagcgactggaggagtggttggggaggacattgcctggcagtgactggacacccaatgcccagtttatcacccgttcttggcttcgggatggcctcaagccacgctgcataacccgagacctcaaatggggaacccctgtacccttagaaggttttgaagacaaggtattctatgtctggtttgatgccactattggctatctgtccatcacagccaactacacagaccagtgggagagatggtggaagaacccagagcaagtggacctgtatcagttcatggccaaagacaatgttcctttccatagcttagtctttccttgctcagccctaggagctgaggataactataccttggtcagccacctcattgctacagagtacctgaactatgaggatgggaaattctctaagagccgcggtgtgggagtgtttggggacatggcccaggacacggggatccctgctgacatctggcgcttctatctgctgtacattcggcctgagggccaggacagtgctttctcctggacggacctgctgctgaagaataattctgagctgcttaacaacctgggcaacttcatcaacagagctgggatgtttgtgtctaagttctttgggggctatgtgcctgagatggtgctcacccctgatgatcagcgcctgctggcccatgtcaccctggagctccagcactatcaccagctacttgagaaggttcggatccgggatgccttgcgcagtatcctcaccatatctcgacatggcaaccaatatattcaggtgaatgagccctggaagcggattaaaggcagtgaggctgacaggcaacgggcaggaacagtgactggcttggcagtgaatatagctgccttgctctctgtcatgcttcagccttacatgcccacggttagtgccacaatccaggcccagctgcagctcccacctccagcctgcagtatcctgctgacaaacttcctgtgtaccttaccagcaggacaccagattggcacagtcagtcccttgttccaaaaattggaaaatgaccagattgaaagtttaaggcagcgctttggagggggccagtgagaaagctaaaggctgtgccctcgctccacaacagccacagcatcacttccctaatttccctaagtagtcctcacccatcactctttccatcttttggccctgccgcttcctcacttacagtttttctttcctgtcttaactagaagagaccttcgacttaaaggtaaccactttccctctgagatgctgtataaaactggaggttaggggatatttatggttgctggtgataactttgttgttctccaggcaaaaacgtccccgaagccagcagttgtagagactgttacaacagccaagccacagcagatacaagcgctgatggatgaagtgacaaaacaaggaaacattgtccgagaactgaaagcacaaaaggcagacaagaacgaggttgctgcggaggtggcgaaactcttggatctaaagaaacagttggctgtagctgaggggaaaccccctgaagcccctactcttcatttccaggaggtgaaacataggtacccccattttcatctgaagacaggacctcttgcaggtcctcataccaggcttccagctcccagctggacagtgtcccgaaggagaaaggcaatgactcagctgccatctctgcagttggatcagtctggaaaagcacatctgcaggataatggggagtggctggaacaagctccatgtagcaaacagtctatgccacaagttggcaagctggtctgatgcctgtttttgtaggtaaagttgtactggaatacagccacatctgtttatttacatattgtttatggctgctttggtgctacagtggcagagatgaagagtcacgctagagactataggacttttaacatctaaaatatttactgtcctgccgtttaaaatttttggaaaagggtaggttaagtttacctgctttcaggtgtggtgatgtatgaagatacacttccttcttgaacactctctcctcaggttccagctctgattttggctctgtcgctgccacccgctcatctttaacatgatacgctcagtgccttagacttaagtctct

SEQ ID NO: 288398 - DNA, 2986 bp, Homo sapiens
agtatgatacgccgtgccggtgttatttcattcacgaggcgagcaatgagactgttcgtgagtgatggcgtcccgggttgcttgccggtgctggccgccgccgggagagcccggggcagagcagaggtgctcatcagcactgtaggcccggaagattgtgtggtcccgttcctgacccggcctaaggtccctgtcttgcagctggatagcggcaactacctcttctccactagtgcaatctgccgatatttttttttgttatctggctgggagcaagatgacctcactaaccagtggctggaatgggaagcgacagagctgcagccagctttgtctgctgccctgtactatttagtggtccaaggcaagaagggggaagatgttcttggttcagtgcggagagccctgactcacattgaccacagcttgagtcgtcagaactgtcctttcctggctggggagacagaatctctagccgacattgttttgtggggagccctatacccattactgcaagatcccgcctacctccctgaggagctgagtgccctgcacagctggttccagacactgagtacccaggaaccatgtcagcgagctgcagagactgtactgaaacagcaaggtgtcctggctctccggccttacctccaaaagcagccccagcccagccccgctgagggaagggctgtcaccaatgagcctgaggaggaggagctggctaccctatctgaggaggagattgctatggctgttactgcttgggagaagggcctagaaagtttgcccccgctgcggccccagcagaatccagtgttgcctgtggctggagaaaggaatgtgctcatcaccagtgccctcccttacgtcaacaatgtcccccaccttgggaacatcattggttgtgtgctcagtgccgatgtctttgccaggtactctcgcctccgccagtggaacaccctctatctgtgtgggacagatgagtatggtacagcaacagagaccaaggctctggaggagggactaaccccccaggagatctgcgacaagtaccacatcatccatgctgacatctaccgctggtttaacatttcgtttgatatttttggtcgcaccaccactccacagcagaccaaaatcacccaggacattttccagcagttgctgaaacgaggttttgtgctgcaagatactgtggagcaactgcgatgtgagcactgtgctcgcttcctggctgaccgcttcgtggagggcgtgtgtcccttctgtggctatgaggaggctcggggtgaccagtgtgacaagtgtggcaagctcatcaatgctgtcgagcttaagaagcctcagtgtaaagtctgccgatcatgccctgtggtgcagtcgagccagcacctgtttctggacctgcctaagctggagaagcgactggaggagtggttggggaggacattgcctggcagtgactggacacccaatgcccagtttatcacccgttcttggcttcgggatggcctcaagccacgctgcataacccgagacctcaaatggggaacccctgtacccttagaaggttttgaagacaaggtattctatgtctggtttgatgccactattggctatctgtccatcacagccaactacacagaccagtgggagagatggtggaagaacccagagcaagtggacctgtatcagttcatggccaaagacaatgttcctttccatagcttagtctttccttgctcagccctaggagctgaggataactataccttggtcagccacctcattgctacagagtacctgaactatgaggatgggaaattctctaagagccgcggtgtgggagtgtttggggacatggcccaggacacggggatccctgctgacatctggcgcttctatctgctgtacattcggcctgagggccaggacagtgctttctcctggacggacctgctgctgaagaataattctgagctgcttaacaacctgggcaacttcatcaacagagctgggatgtttgtgtctaagttctttgggggctatgtgcctgagatggtgctcacccctgatgatcagcgcctgctggcccatgtcaccctggagctccagcactatcaccagctacttgagaaggttcggatccgggatgccttgcgcagtatcctcaccatatctcgacatggcaaccaatatattcaggtgaatgagccctggaagcggattaaaggcagtgaggctgacaggcaacgggcaggaacagtgactggcttggcagtgaatatagctgccttgctctctgtcatgcttcagccttacatgcccacggttagtgccacaatccaggcccagctgcagctcccacctccagcctgcagtatcctgctgacaaacttcctgtgtaccttaccagcaggacaccagattggcacagtcagtcccttgttccaaaaattggaaaatgaccagattgaaagtttaaggcagcgctttggagggggccagtgagaaagctaaaggctgtgccctcgctccacaacagccacagcatcacttccctaatttccctaagtagtcctcacccatcactctttccatcttttggccctgccgcttcctcacttacagtttttctttcctgtcttaactagaagagaccttcgacttaaaggcaaaaacgtccccgaagccagcagttgtagagactgttacaacagccaagccacagcagatacaagcgctgatggatgaagtgacaaaacaaggaaacattgtccgagaactgaaagcacaaaaggcagacaagaacgaggttgctgcggaggtggcgaaactcttggatctaaagaaacagttggctgtagctgaggggaaaccccctgaagcccctaaaggcaagaagaaaaagtaaaagaccttggctcatagaaagtcactttaatagatagggacagtaataaataaatgtacaatctctatatac

SEQ ID NO: 288399 - DNA, 2345 bp, Homo sapiens
agtatgatacgccgtgccggtgttatttcattcacgaggcgagcaatgagactgttcgtgagtgatggcgtcccgggttgcttgccggtgctggccgccgccgggagagcccggggcagagcagaggtgctcatcagcactgtaggcccggaagattgtgtggtcccgttcctgacccggcctaaggtccctgtcttgcagctggatagcggcaactacctcttctccactagtgcaatctgccgatatttttttttgttatctggctgggagcaagatgacctcactaaccagtggctggaatgggaagcgacagagctgcagccagctttgtctgctgccctgtactatttagtggtccaaggcaagaagggggaagatgttcttggttcagtgcggagagccctgactcacattgaccacagcttgagtcgtcagaactgtcctttcctggctggggagacagaatctctagccgacattgttttgtggggagccctatacccattactgcaagatcccgcctacctccctgaggagctgagtgccctgcacagctggttccagacactgagtacccaggaaccatgtcagcgagctgcagagactgtactgaaacagcaaggtgtcctggctctccggccttacctccaaaagcagccccagcccagccccgctgagggaagggctgtcaccaatgagcctgaggaggaggagctggctaccctatctgaggaggagattgctatggctgttactgcttgggagaagggcctagaaagtttgcccccgctgcggccccagcagaatccagtgttgcctgtggctggagaaaggaatgtgctcatcaccagtgccctcccttacgtcaacaatgtcccccaccttgggaacatcattggttgtgtgctcagtgccgatgtctttgccaggtactctcgcctccgccagtggaacaccctctatctgtgtgggacagatgagtatggtacagcaacagagaccaaggctctggaggagggactaaccccccaggagatctgcgacaagtaccacatcatccatgctgacatctaccgctggtttaacatttcgtttgatatttttggtcgcaccaccactccacagcagaccaaaatcacccaggacattttccagcagttgctgaaacgaggttttgtgctgcaagatactgtggagcaactgcgatgtgagcactgtgctcgcttcctggctgaccgcttcgtggagggcgtgtgtcccttctgtggctatgaggaggctcggggtgaccagtgtgacaagtgtggcaagctcatcaatgctgtcgagcttaagaagcctcagtgtaaagtctgccgatcatgccctgtggtgcagtcgagccagcacctgtttctggacctgcctaagctggagaagcgactggaggagtggttggggaggacattgcctggcagtgactggacacccaatgcccagtttatcacccgttcttggcttcgggatggcctcaagccacgctgcataacccgagacctcaaatggggaacccctgtacccttagaaggttttgaagacaaggtattctatgtctggtttgatgccactattggctatctgtccatcacagccaactacacagaccagtgggagagatggtggaagaacccagagcaagtggacctgtatcagttcatggccaaagacaatgttcctttccatagcttagtctttccttgctcagccctaggagctgaggataactataccttggtcagccacctcattgctacagagtacctgaactatgaggatgggaaattctctaagagccgcggtgtgggagtgtttggggacatggcccaggacacggggatccctgctgacatctggcgcttctatctgctgtacattcggcctgagggccaggacagtgctttctcctggacggacctgctgctgaagaataattctgagctgcttaacaacctgggcaacttcatcaacagagctgggatgtttgtgtctaagttctttgggggctatgtgcctgagatggtgctcacccctgatgatcagcgcctgctggcccatgtcaccctggagctccagcactatcaccagctacttgagaaggttcggatccgggatgccttgcgcagtatcctcaccatatctcgacatgggcgaaactcttggatctaaagaaacagttggctgtagctgaggggaaaccccctgaagcccctaaaggcaagaagaaaaagtaaaagaccttggctcatagaaagtcactttaatagatagggacagtaataaataaatgtacaatctctatatac

SEQ ID NO: 288400 - DNA, 1933 bp, Homo sapiens
agtatgatacgccgtgccggtgttatttcattcacgaggcgagcaatgagactgttcgtgagtgatggcgtcccgggttgcttgccggtgctggccgccgccgggagagcccggggcagagcagaggtgctcatcagcactgtaggcccggaagattgtgtggtcccgttcctgacccggcctaaggtccctgtcttgcagctggatagcggcaactacctcttctccactagtgcaatctgccgatatttttttttgttatctggctgggagcaagatgacctcactaaccagtggctggaatgggaagcgacagagctgcagccagctttgtctgctgccctgtactatttagtggtccaaggcaagaagggggaagatgttcttggttcagtgcggagagccctgactcacattgaccacagcttgagtcgtcagaactgtcctttcctggctggggagacagaatctctagccgacattgttttgtggggagccctatacccattactgcaagatcccgcctacctccctgaggagctgagtgccctgcacagctggttccagacactgagtacccaggaaccatgtcagcgagctgcagagactgtactgaaacagcaaggtgtcctggctctccggccttacctccaaaagcagccccagcccagccccgctgagggaagggctgtcaccaatgagcctgaggaggaggagctggctaccctatctgaggaggagattgctatggctgttactgcttgggagaagggcctagaaagtttgcccccgctgcggccccagcagaatccagtgttgcctgtggctggagaaaggaatgtgctcatcaccagtgccctcccttacgtcaacaatgtcccccaccttgggaacatcattggttgtgtgctcagtgccgatgtctttgccaggtactctcgcctccgccagtggaacaccctctatctgtgtgggacagatgagtatggtacagcaacagagaccaaggctctggaggagggactaaccccccaggagatctgcgacaagtaccacatcatccatgctgacatctaccgctggtttaacatttcgtttgatatttttggtcgcaccaccactccacagcagaccaaaatcacccaggacattttccagcagttgctgaaacgaggttttgtgctgcaagatactgtggagcaactgcgatgtgagcactgtgctcgcttcctggctgaccgcttcgtggagggcgtgtgtcccttctgtggctatgaggaggctcggggtgaccagtgtgacaagtgtggcaagctcatcaatgctgtcgagcttaagaagcctcagtgtaaagtctgccgatcatgccctgtggtgcagtcgagccagcacctgtttctggacctgcctaagctggagaagcgactggaggagtggttggggaggacattgcctggcagtgactggacacccaatgcccagtttatcacccgttcttggcttcgggatggcctcaagccacgctgcataacccgagacctcaaatggggaacccctgtacccttagaaggttttgaagacaaggtattctatgtctggtttgatgccactattggctatctgtccatcacagccaactacacagaccagtgggagagatggtggaagaacccagagcaagtggacctgtatcagttcatggccaaagacaatgttcctttccatagcttagtctttccttgctcagccctaggagctgaggataactataccttgggcgaaactcttggatctaaagaaacagttggctgtagctgaggggaaaccccctgaagcccctaaaggcaagaagaaaaagtaaaagaccttggctcatagaaagtcactttaatagatagggacagtaataaataaatgtacaatctctatatac

SEQ ID NO: 288401 - DNA, 4374 bp, Homo sapiens
agtatgatacgccgtgccggtgttatttcattcacgaggcgagcaatgagactgttcgtgagtgatggcgtcccgggttgcttgccggtgctggccgccgccgggagagcccggggcagagcagaggtgctcatcagcactgtaggcccggaagattgtgtggtcccgttcctgacccggcctaaggtccctgtcttgcagctggatagcggcaactacctcttctccactagtgcaatctgccgatatttttttttgttatctggctgggagcaagatgacctcactaaccagtggctggaatgggaagcgacagagctgcagccagctttgtctgctgccctgtactatttagtggtccaaggcaagaagggggaagatgttcttggttcagtgcggagagccctgactcacattgaccacagcttgagtcgtcagaactgtcctttcctggctggggagacagaatctctagccgacattgttttgtggggagccctatacccattactgcaagatcccgcctacctccctgaggagctgagtgccctgcacagctggttccagacactgagtacccaggaaccatgtcagcgagctgcagagactgtactgaaacagcaaggtgtcctggctctccggccttacctccaaaagcagccccagcccagccccgctgagggaagggctgtcaccaatgagcctgaggaggaggagctggctaccctatctgaggaggagattgctatggctgttactgcttgggagaagggcctagaaagtttgcccccgctgcggccccagcagaatccagtgttgcctgtggctggagaaaggaatgtgctcatcaccagtgccctcccttacgtcaacaatgtcccccaccttgggaacatcattggttgtgtgctcagtgccgatgtctttgccaggtactctcgcctccgccagtggaacaccctctatctgtgtgggacagatgagtatggtacagcaacagagaccaaggctctggaggagggactaaccccccaggagatctgcgacaagtaccacatcatccatgctgacatctaccgctggtttaacatttcgtttgatatttttggtcgcaccaccactccacagcagaccaaaatcacccaggacattttccagcagttgctgaaacgaggttttgtgctgcaagatactgtggagcaactgcgatgtgagcactgtgctcgcttcctggctgaccgcttcgtggagggcgtgtgtcccttctgtggctatgaggaggctcggggtgaccagtgtgacaagtgtggcaagctcatcaatgctgtcgagcttaagaaaatggagctggcgctggtgcctgtgagcgcccacggcaacttctatgagggggactgctacgtcatcctctcgacccggagagtggccagtctcctatcccaggacatccacttctggatcgggaaggactcctcccaggatgagcaaagctgcgcagccatatataccacacagctggacgactacctgggaggcagccctgtgcagcaccgagaggtccagtaccatgagtcagacactttccgtggctacttcaagcagggcatcatctacaagcaggggggtgtcgcctctgggatgaagcacgtggagaccaatacctacgacgtgaagcggctgctacatgtgaaagggaaaagaaacatcagggctaccgaggtggaaatgagctgggacagtttcaaccgaggtgatgtcttcttgctggaccttgggaaagtcatcatccaatggaatggcccagagagcaacagtggggagcgcctgaaggctatgcttctggcaaaggatattcgagacagggagcgagggggccgtgctgaaataggagtgatcgagggagacaaggaggcagccagcccagagctgatgaaggtccttcaggacacccttggccgacgctccattatcaagcctacagtccctgatgagatcatagatcagaagcagaaatcaactatcatgttgtatcatatctcagattcagctgggcagctggcagtcacagaggtagcaacaaggcctctggtccaggacttactgaaccatgatgactgctacatcctggaccaaagtggaaccaaaatctacgtgtggaaaggaaaaggagccacaaaggctgaaaaacaggcagccatgtctaaagcgctgggcttcatcaagatgaagagctaccccagcagcaccaatgtggagaccgtcaacgatggtgctgagtcggccatgttcaagcagctgttccagaagtggtcagtaaaggaccagaccatgggcctggggaaaacgttcagcattggtaaaattgctaaagttttccaggataaatttgatgtgactctgctacacaccaagccagaggtagctgcccaggaaagaatggtcgatgatggcaacggaaaagttgaggtctggagaattgagaacctggagctggtccctgtggagtatcaatggtatggcttcttttatgggggagactgttatctggtcctctacacatacgaggtaaatgggaagccacatcacatcttgtacatctggcagggccgccacgcctcacaggatgagctggcagcctcagcataccaggcagtggaggtggatcggcagtttgatggggctgctgtgcaggttcgagtcaggatgggaacggagccacgccacttcatggccatcttcaaagggaagctagttatctttgagggtgggacttccaggaagggaaatgccgagcctgaccctccagtaagactcttccaaattcatggaaatgacaaatctaacaccaaagcagtggaagttccagcctttgcctcctccctaaactccaatgatgtctttctgctgcgaactcaggcagagcactacctgtggtatggcaaggggtctagtggggatgagcgggcaatggctaaggagctggccagccttctctgtgatggcagcgagaacactgtggccgagggccaggagccagccgagttctgggacctactgggagggaaaactccctatgccaatgataaaaggtatgggaacacagcctccccctcttctgggctccccctgcctgccaggcttgtgaattgcacaaaggctaaaacctcagttttaaaaacatttctaagcagcttgatgcccttaaatggactatattgcagacttcagcaggaaatcctagatgtccagtctcgtctctttgaatgttccaataagaccggccaattcgttgtcactgagatcacagacttcacccaggatgacctgaaccctactgacgtgatgctcctagatacctgggaccaggtgttcttgtggattggggctgaggccaatgccacggagaaggagagtgcccttgccacagcacagcagtacctgcacactcaccccagcggccgagatcccgacacaccaatcctgatcattaagcaggggtttgagcctcccatcttcacaggctggttcctagcctgggaccctaacatttggagtgcaggaaaaacatatgaacaattaaaagaagagctgggagatgctgctgctatcatgcgaatcactgctgacatgaagaatgcaaccctctccctgaattctaatgacagtgagccaaaatattaccctatagcagttctgttgaaaaaccagaatcaggagctgcctgaggatgtaaaccctgccaaaaaggagaattacctctctgaacaggactttgtgtctgtgtttggcatcacaagagggcaatttgcagctctgcctggctggaaacagctccaaatgaagaaagaaaaggggcttttctaaagcaagaaggcctatacctattgcaaggccacagaaaagagcagatagtgccaatatcaggaaataatttatccaccaatttctgcctgacattcagctacttaatttagatataatagagtctgcaaatcacggcatgttctccattttttctcatccttgcattccttgcttgttatatacctaaaatgttaaccatatagtttttgggttttgtggccctctagctaaagcctcagcagaaagcactaaaactgcataaatctggagaaatcaaaagaaagagaaccaaaaaacaatgcttaaaatgtttaataactttatgtttaatattataccaggacctacctttgttttcaattttaagatgattatttctaaaatctatttagcctgtaaatcattgaaatcatatatgcactccataggcaaaatccaaatacccagatctgtaatgtgtcaaagcatttttcacttttcaaataaagatacctataatgaacaaatgga

SEQ ID NO: 288402 - DNA, 3447 bp, Homo sapiens
agtatgatacgccgtgccggtgttatttcattcacgaggcgagcaatgagactgttcgtgagtgatggcgtcccgggttgcttgccggtgctggccgccgccgggagagcccggggcagagcagaggtgctcatcagcactgtaggcccggaagattgtgtggtcccgttcctgacccggcctaaggtccctgtcttgcagctggatagcggcaactacctcttctccactagtgcaatctgccgatatttttttttgttatctggctgggagcaagatgacctcactaaccagtggctggaatgggaagcgacagagctgcagccagctttgtctgctgccctgtactatttagtggtccaaggcaagaagggggaagatgttcttggttcagtgcggagagccctgactcacattgaccacagcttgagtcgtcagaactgtcctttcctggctggggagacagaatctctagccgacattgttttgtggggagccctatacccattactgcaagatcccgcctacctccctgaggagctgagtgccctgcacagctggttccagacactgagtacccaggaaccatgtcagcgagctgcagagactgtactgaaacagcaaggtgtcctggctctccggccttacctccaaaagcagccccagcccagccccgctgagggaagggctgtcaccaatgagcctgaggaggaggagctggctaccctatctgaggaggagattgctatggctgttactgcttgggagaagggcctagaaagtttgcccccgctgcggccccagcagaatccagtgttgcctgtggctggagaaaggaatgtgctcatcaccagtgccctcccttacgtcaacaatgtcccccaccttgggaacatcattggttgtgtgctcagtgccgatgtctttgccaggtactctcgcctccgccagtggaacaccctctatctgtgtgggacagatgagtatggtacagcaacagagaccaaggctctggaggagggactaaccccccaggagatctgcgacaagtaccacatcatccatgctgacatctaccgctggtttaacatttcgtttgatatttttggtcgcaccaccactccacagcagaccaaaatcacccaggacattttccagcagttgctgaaacgaggttttgtgctgcaagatactgtggagcaactgcgatgtgagcactgtgctcgcttcctggctgaccgcttcgtggagggcgtgtgtcccttctgtggctatgaggaggctcggggtgaccagtgtgacaagtgtggcaagctcatcaatgctgtcgagcttaagaaaatggagctggcgctggtgcctgtgagcgcccacggcaacttctatgagggggactgctacgtcatcctctcgacccggagagtggccagtctcctatcccaggacatccacttctggatcgggaaggactcctcccaggatgagcaaagctgcgcagccatatataccacacagctggacgactacctgggaggcagccctgtgcagcaccgagaggtccagtaccatgagtcagacactttccgtggctacttcaagcagggcatcatctacaagcaggggggtgtcgcctctgggatgaagcacgtggagaccaatacctacgacgtgaagcggctgctacatgtgaaagggaaaagaaacatcagggctaccgaggtggaaatgagctgggacagtttcaaccgaggtgatgtcttcttgctggaccttgggaaagtcatcatccaatggaatggcccagagagcaacagtggggagcgcctgaaggctatgcttctggcaaaggatattcgagacagggagcgagggggccgtgctgaaataggagtgatcgagggagacaaggaggcagccagcccagagctgatgaaggtccttcaggacacccttggccgacgctccattatcaagcctacagtccctgatgagatcatagatcagaagcagaaatcaactatcatgttgtatcatatctcagattcagctgggcagctggcagtcacagaggtagcaacaaggcctctggtccaggacttactgaaccatgatgactgctacatcctggaccaaagtggaaccaaaatctacgtgtggaaaggaaaaggagccacaaaggctgaaaaacaggcagccatgtctaaagcgctgggcttcatcaagatgaagagctaccccagcagcaccaatgtggagaccgtcaacgatggtgctgagtcggccatgttcaagcagctgttccagaagtggtcagtaaaggaccagaccatgggcctggggaaaacgttcagcattggtaaaattgctaaagttttccaggataaatttgatgtgactctgctacacaccaagccagaggtagctgcccaggaaagaatggtcgatgatggcaacggaaaagttgaggtctggagaattgagaacctggagctggtccctgtggagtatcaatggtatggcttcttttatgggggagactgttatctggtcctctacacatacgaggtaaatgggaagccacatcacatcttgtacatctggcagggccgccacgcctcacaggatgagctggcagcctcagcataccaggcagtggaggtggatcggcagtttgatggggctgctgtgcaggttcgagtcaggatgggaacggagccacgccacttcatggccatcttcaaagggaagctagttatctttgagggtgggacttccaggaagggaaatgccgagcctgaccctccagtaagactcttccaaattcatggaaatgacaaatctaacaccaaagcagtggaagttccagcctttgcctcctccctaaactccaatgatgtctttctgctgcgaactcaggcagagcactacctgtggtatggcaaggtaggatggctgggccccgggtcagaccagcccctcggagcccagacctgcactcccctcctcctgtcagcaaggtcaaaggacctagagtaggctggagtgcttgctttggcagcacatatactaaaactggaatgatacagagaagattagcatggtccctgtgcaaggatggcatgcaaattcatgaagcgtttgatattaaaaaaaaaaaaaaaaaaaaaaagctgggcacggtggctcatccctgtaatcctagcactttgggaggctgaggcaggcaaatcacgaggtcaggagttcgagaccagcctggccaacatggtgaaaccccatctctactgaaaatacaaaaattagctgggcatggtggcacgcgcccatagtcccagctactcaggaggctgaggcagaagaatctcttgaaccagggggcggaggttgcagtgagccgagattgtaccactgtactccagcctgggcgacagggtgagactccgtctc

SEQ ID NO: 288403 - DNA, 1684 bp, Homo sapiens
  misc_feature (1603)..(1603): n is a, c, g, or t
agtatgatacgccgtgccggtgttatttcattcacgaggcgagcaatgagactgttcgtgagtgatggcgtcccgggttgcttgccggtgctggccgccgccgggagagcccggggcagagcagaggtgctcatcagcactgtaggcccggaagattgtgtggtcccgttcctgacccggcctaaggtccctgtcttgcagctggatagcggcaactacctcttctccactagtgcaatctgccgatatttttttttgttatctggctgggagcaagatgacctcactaaccagtggctggaatgggaagcgacagagctgcagccagctttgtctgctgccctgtactatttagtggtccaaggcaagaagggggaagatgttcttggttcagtgcggagagccctgactcacattgaccacagcttgagtcgtcagaactgtcctttcctggctggggagacagaatctctagccgacattgttttgtggggagccctatacccattactgcaagatcccgcctacctccctgaggagctgagtgccctgcacagctggttccagacactgagtacccaggaaccatgtcagcgagctgcagagactgtactgaaacagcaaggtgtcctggctctccggccttacctccaaaagcagccccagcccagccccgctgagggaagggctgtcaccaatgagcctgaggaggaggagctggctaccctatctgaggaggagattgctatggctgttactgcttgggagaagggcctagaaagtttgcccccgctgcggccccagcagaatccagtgttgcctgtggctggagaaaggaatgtgctcatcaccagtgccctcccttacgtcaacaatgtcccccaccttgggaacatcattggttgtgtgctcagtgccgatgtctttgccaggtactctcgcctccgccagtggaacaccctctatctgtgtgggacagatgagtatggtacagcaacagagaccaaggctctggaggagggactaaccccccaggagatctgcgacaagtaccacatcatccatgctgacatctaccgctggtttaacatttcgtttgatatttttggtcgcaccaccactccacagcagaccaaatactgtggagcaactgcgatgtgagcactgtgctcgcttcctggctgaccgcttcgtggagggcgtgtgtcccttctgtggctatgaggaggctcggggtgaccagtgtgacaagtgtggcaagctcatcaatgctgtcgagcttaagaagcctcagtgtaaagtctgccgatcatgccctgtggtgcagtcgagccagcacctgtttctggacctgcctaagctggagaagcgactggaggagtggttggggaggacattgcctggcagtgactggacacccaatgcccagtttatcacccgttcttggcttcgggatggcctcaagccacgctgcataacccgagacctcaaatggggaacccctgtacccttagaaggttttgaagacaaggagacaggatttatgctggttgtgccatatgtattgcataagcactccgacaggagagtgtgagacaagagngctgtagtatgcagcatgtctcatgtagctctgtactaagcggacttctgagccatgacggctattagtgatcagccgggg

SEQ ID NO: 288404 - DNA, 781 bp, Homo sapiens
ttaaagaggcagggactaatcccgagggaaggacaataccctggggagaccccaaatggcctcctacacttaagagatccaggctgctctcttgtgcaggaggcccagagacctctacggcaaaaggaaaacacaccactccctgtccatcggcacccctcccaaaggcttgtgtctcctcaaggttcccctatccgctgcagggtccagtagccccagctaccaaggtggccatgctgacaccagaggcactgagactgagacagaattgggggtggggtagggagaaggcccgctggtggcgaagcggcggaaacggcctgagcgatggtcacccagtcttagagcgggggtgtgtcctgctgacctgcctccccgcggacaggcctaacgatgaggcctgaagttggctacgggaaagaatgaatttcccaagggcaaccgaggtccctttgcccagcagcacagagcagggcccgtgttccggctccgggcaggggtggagagacgccgtcgtccgaagcaataggggtttgtaagcaccaccccagaataagggactctccccattcctctctcggacggtccctaacttcactgtggaggagtgaggccgatcctaaagagcggacgccccaactttgaggagacgggagggtaaaaggtagatgggaatcagtactcgcctctctcctcaggttccagctctgattttggctctgtcgctgccacccgctcatctttaacatgatacgctcagtgccttagacttaagtctctg

SEQ ID NO: 288405 - DNA, 2721 bp, Homo sapiens
gcagatttttggtttctgtaactaaaattcttatgaaagagtgatgttaaaattcacttaaaaacatgaagggacaagaacagacaaggaaaatttgaagaactctctgggaacagggcttccctactagataccaagacagactaaagttacaatggttaagacaacaggatattagagaagccaatggaatagaagagcacagaacaaacctacgcaatttgattacataaaaattaaatttttaattttttaaattaaaaattaaacaacaacaaaaacaacttccatttaacaagacaggacaaatagtgtctttgggaaaagcctttgtgaacctaccttatttaaaaataaagctgcttctaaactaataacatttaggtcaagctactcaatagtagaaatgattatacagaagtagtatagcttggtggttgaaatacagatgctggcatcagacttactgggtgtgtgtcctggttctgttacctaattgttgtgtgactctgatgagcaagttattctgcttcagtttccctatttgtcaaatggagacaaatactgtggcattgtggggattaaatcaattaacaactgtaaagtgccctggtataatgatgatgtatttgttatcagggttcgagtgtcattaaggattgttactgttatcattgcatcactactgttaccttacgtttacataacactttacaaattttcaaccatttttcatctctgccatctcattctaccatcagagcacctacatggatacagagatagaaggttccagcttacagtaaccatgagcctggtttttcaactataaaatgagaggataatcaccaaggctccttttggctctaaaaactcatttctattttacaagaaagaaatttgaggcaaagagatattaactgacttgccttaggtcatagacaagttactagcagttaggattaaaacctaggtatcccagattaatttgcatttcaaagatataataataataatttccccagactctccctgtatctaaatttcttcttggaattgtaagcagatacttaggaaggtaattcacttggggaccatttagaatattacagatacattccaatgactagaagcacctaactcattactagggagagagggagtggagatatatatcttttgtgaacaacattaacacaggtaatggtaataccagtaataataaaggagaaagaattacctgggcaagcagacctggttggatctgaagaggctgagctcctggggcttgagtgacgatgggaactgcattttccattcgcaccgagtagccagcgtgcttagagggagaggcctgcaagcctgttccagacagtgtgagggagagaagggttagctgagacgctgtgaacagctggatgaaaagaaccttcctgggcagttatgtcaactttctgcttccctttgcactggtcactgacaacaaccaggtattgcctggtccttggaagtctcccctttggcttctaacaaattaaaaaacaaaactcctcctgaaatcttgaatgtcttcaaaggctagaaggtcagattaaggaggctgtaaggccaaaagtaggacagatatgctcgcagattacaacaggaaaacaagggcttctgaccatcaagatgtacctgtgtatgtcaaaatgaggggtgttggggagatgtatgaacccatttggaattgcattgactgtaaccacacagtttacaccatgaggcttgcaaaaataaattcttaagctttctgggtaaattgtaacaaagtacacagtctagcttcttagagtctacaggagaggagtgctggggtcatggccaaagaattgttttgaggaggggtcccagggaagtacttttcagactgatggatattcttcatgggagctgggactatgtcggctgtcagagattggcagttttctacagataacccacacagaggatatttcatgcgaggaaaagcaagagctgacatcagcataacaatgaaagcacaaactatgtacttatttacagacagctggccagggacacagtccctggcaggtgtgagagtcacaaaggattgacttggtgctgaggcataagccctattgtttctaggttggccacagtaggagaggagccctctagttcagtgataccagcgctctcactggaagaaatgaggagggcctttctccatgaaaatgagcgtgacagaaaactgcaggtgccggagccccagaggccgttctgtaagaagcagaaaaagacatcacttgagactgaacttgcatgaaaaatgaggctgtataaggaaaataaattccaactttggaattctccagtttcccctatcttagccttcatactgatcctttagcaagataggtggttaccagtggtttcacattcagcactgtctacaagaggttttgcctctagaagttacaaggaccagggaatacataggaagaaaccacgaagatatcttggacacaaatagaatttcaagtagggtgtgtatggatgtcacatttgataaaaaggacaaagtcttattttacatatgttttctatacttagattttgtgctaaatttcattgcaaagcaaattgatttgtttgaaaataatcacgaaattgagtggcacagatgtctgattttaagccacatattttaaagtgggt

SEQ ID NO: 288406 - DNA, 2630 bp, Homo sapiens
gcagatttttggtttctgtaactaaaattcttatgaaagagtgatgttaaaattcacttaaaaacatgaagggacaagaacagacaaggaaaatttgaagaactctctgggaacagggcttccctactagataccaagacagactaaagttacaatggttaagacaacaggatattagagaagccaatggaatagaagagcacagaacaaacctacgcaatttgattacataaaaattaaatttttaattttttaaattaaaaattaaacaacaacaaaaacaacttccatttaacaagacaggacaaatagtgtctttgggaaaagcctttgtgaacctaccttatttaaaaataaagctgcttctaaactaataacatttaggtcaagctactcaatagtagaaatgattatacagaagtagtatagcttggtggttgaaatacagatgctggcatcagacttactgggtgtgtgtcctggttctgttacctaattgttgtgtgactctgatgagcaagttattctgcttcagtttccctatttgtcaaatggagacaaatactgtggcattgtggggattaaatcaattaacaactgtaaagtgccctggtataatgatgatgtatttgttatcagggttcgagtgtcattaaggattgttactgttatcattgcatcactactgttaccttacgtttacataacactttacaaattttcaaccatttttcatctctgccatctcattctaccatcagagcacctacatggatacagagatagaaggttccagcttacagtaaccatgagcctggtttttcaactataaaatgagaggataatcaccaaggctccttttggctctaaaaactcatttctattttacaagaaagaaatttgaggcaaagagatattaactgacttgccttaggtcatagacaagttactagcagttaggattaaaacctaggtatcccagattaatttgcatttcaaagatataataataataatttccccagactctccctgtatctaaatttcttcttggaattgtaagcagatacttaggaaggtaattcacttggggaccatttagaatattacagatacattccaatgactagaagcacctaactcattactagggagagagggagtggagatatatatcttttgtgaacaacattaacacaggtaatggtaataccagtaataataaaggagaaagaattacctgggcaagcagacctggttggatctgaagaggctgagctcctggggcttgagtgacgatgggaactgcattttccattcgcaccgagtagccagcgtgcttagagggagaggcctgcaagcctgttccagacagtgtgagggagagaagggttagctgagacgctgtgaacagctggatgaaaagaaccttcctgggcagttatgtcaactttctgcttccctttgcactggtcactgacaacaaccaggtattgcctggtccttggaagtctcccctttggcttctaacaaattaaaaaacaaaactcctcctgaaatcttgaatgtcttcaaaggctagaaggtcagattaaggaggctgtaaggccaaaagtaggacagatatgctcgcagattacaacaggaaaacaagggcttctgaccatcaagatgtacctgtgtatgtcaaaatgaggggtgttggggagatgtatgaacccatttggaattgcattgactgtaaccacacagtttacaccatgaggcttgcaaaaataaattcttaagctttctgggtaaattgtaacaaagtacacagtctagcttcttagagtctacaggagaggagtgctggggtcatggccaaagaattgttttgaggaggggtcccagggaagtacttttcagactgatggatattcttcatgggagctgggactatgtcggctgtcagagattggcagttttctacagataacccacacagaggatatttcatgcgaggaaaagcaagagctgacatcagcataacaatgaaagcacaaactatgtacttatttacagacagctggccagggacacagtccctggcaggtgtgagagtcacaaaggattgacttggtgctgaggcataagccctattgtttctaggttggccacagtaggagaggagccctctagttcagtgataccagcgctctcactggaagaaatgaggagggcctttctccatgaaaatgagcgtgacagaaaactgcaggtgccggagccccagaggccgttctgtaagaagcaggtgagaggctgtggctgctcaatcttaccttggaagccggggggacacacgatgagagcttgctggaacgggtcaggccgggcacaaatctgggctgttcctgtctgcaggggcatgctccgctgggccactgcagccatggatgccgctgagggctggtagagtgtagatgggtagtttagtatggagacttcgggattggctaaggaaatagtggcactggtagaggagggagcctaaaggagtgatggggattaaacaaaaataaacaaaaataaaaaatgagggaggtggcatgttgggagacacgaatctaaatcaaataaatgaactc

SEQ ID NO: 288407 - DNA, 6035 bp, Homo sapiens
agggcggggctcgggccggtccgcccgcgcgcaggtgagtgagccagggcggagcgcagctgcgccgggcttgggcgcctggggccgccgctccccaccgtcgttttccccaccgaggccgaggcgtcccggagtcatggccggcctgaactgcggggtctctatcgcactgctaggggttctgctgctgggtgcggcgcgcctgccgcgcggggcagaagcttttgagattgctctgccacgagaaagcaacattacagttctcataaagctggggaccccgactctgctggcaaaaccctgttacatcgtcatttctaaaagacatataaccatgttgtccatcaagtctggagaaagaatagtctttacctttagctgccagagtcctgagaatcactttgtcatagagatccagaaaaatattgactgtatgtcaggcccatgtccttttggggaggttcagcttcagccctcgacatcgttgttgcctaccctcaacagaactttcatctgggatgtcaaagctcataagagcatcggtttagagctgcagttttccatccctcgcctgaggcagatcggtccgggtgagagctgcccagacggagtcactcactccatcagcggccgaatcgatgccaccgtggtcaggatcggaaccttctgcagcaatggcactgtgtcccggatcaagatgcaagaaggagtgaaaatggccttacacctcccatggttccaccccagaaatgtctccggcttcagcattgcaaaccgctcatctataaaacgtctgtgcatcatcgagtctgtgtttgagggtgaaggctcagcaaccctgatgtctgccaactacccagaaggcttccctgaggatgagctcatgacgtggcagtttgtcgttcctgcacacctgcgggccagcgtctccttcctcaacttcaacctctccaactgtgagaggaaggaggagcgggttgaatactacatcccgggctccaccaccaaccccgaggtgttcaagctggaggacaagcagcctgggaacatggcggggaacttcaacctctctctgcaaggctgtgaccaagatgcccaaagtccagggatcctccggctgcagttccaagttttggtccaacatccacaaaatgaaagcaataaaatctacgtggttgacttgagtaatgagcgagccatgtcactcaccatcgagccacggcccgtcaaacagagccgcaagtttgtccctggctgtttcgtgtgtctagaatctcggacctgcagtagcaacctcaccctgacatctggctccaaacacaaaatctccttcctttgtgatgatctgacacgtctgtggatgaatgtggaaaaaaccataagctgcacagaccaccggtactgccaaaggaaatcctactcactccaggtgcccagtgacatcctccacctgcctgtggagctgcatgacttctcctggaagctgctggtgcccaaggacaggctcagcctggtgctggtgccagcccagaagctgcagcagcatacacacgagaagccctgcaacaccagcttcagctacctcgtggccagtgccatacccagccaggacctgtacttcggctccttctgcccgggaggctctatcaagcagatccaggtgaagcagaacatctcggtgacccttcgcacctttgcccccagcttccgacaagaggcctccaggcagggtctgacggtgtcctttataccttatttcaaagaggaaggcgttttcacggtgacccctgacacaaaaagcaaggtctacctgaggacccccaactgggaccggggcctgccatccctcacctctgtgtcctggaacatcagcgtgcccagagaccaggtggcctgcctgactttctttaaggagcggagcggcgtggtctgccagacagggcgcgcattcatgatcatccaggagcagcggacccgggctgaggagatcttcagcctggacgaggatgtgctccccaagccaagcttccaccatcacagcttctgggtcaacatctctaactgcagccccacgagcggcaagcagctagacctgctcttctcggtgacacttaccccaaggactgtggacttgactgtcatcctcatcgcagcggtgggaggtggagtcttactgctgtctgccctcgggctcatcatttgctgtgtgaaaaagaagaaaaagaagacaaacaagggccccgctgtgggtatctacaatggcaacatcaatactgagatgccgaggcagccaaaaaagtttcagaaagggcgaaaggacaatgactcccatgtgtatgcagtcatcgaggacaccatggtatatgggcatctgctacaggattccagcggctccttcctgcagccagaggtggacacctaccggccgttccagggcaccatgggggtctgtcctccctccccacccaccatatgctccagggccccaactgcaaagttggccactgaggagccacctcctcgctcccctcctgagtctgagagtgaaccgtacaccttctcccatcccaacaatggggatgtaagcagcaaggacacagacattcccttactgaacactcaggagcccatggagccagcagaataacttgatccattccagacgctttgctgagtttcataaagcagggcactgagacacccgtccgtgttcctaaccagaaatcctaaagaagaggaattatacagaaggaacagcaggaggttttcctggacaccgccaacttcacattgctcagtggactcattctaagggcaagacattgaaaatgatgaattccaatctggatacagtcatgacagctcatgtgctcctcaacttaggctgtgcggttagccagcctgtaatgagaggagagaggcctgagtcacctagcatagggttgcagcaagccctggattcagagtgttaaacagaggcttgccctcttcaggacaacagttccaattccaaggagcctacctgaggtccctactctcactggggtccccaggatgaaaacgacaatgtgcctttttattattatttatttggtggtcctgtgttatttaagagatcaaatgtataaccacctagctcttttcacctgacttagtaataactcatactaactggtttggatgcctgggttgtgacttctactgaccgctagataaacgtgtgcctgtcccccaggtggtgggaataatttacaatctgtccaaccagaaaagaatgtgtgtgtttgagcagcattgacacatatctgctttgataagagacttcctgattctctaggtcggttcgtggttatcccattgtggaaattcatcttgaatcccattgtcctatagtcctagcaataagagaaatttcctcaagtttccatgtgcggttctcctagctgcagcaatactttgacatttaaagagaaatttagagaatattctcatcctctaaaaatgtttaaatatataccaaacagtggccccctgcattagttttctgttgccactgcaacccattacttggtagcttaaaaacaacacattagcttatagtcctggggatcagaattccaaaatggatgtccctgaatgaaaatcaaggtgtcagcagagctgtgctccttctgaaggctctagggagaagccggttccttgccatttcaagcttctagaggctggctgcattcccaggctccagtggctggtcaagcttttctcacatggcatcactgtgacactggccctcccacttccctctttgacttacaaagcccaccaggaagatccaggataatctctccatctaaagatccttcatcatcctggaagagccttttgccatgcaagacaacatagccacaggtggggattaggaccaggacatctttggggtgctgttattctgcctaccacaccttcctgccactgactcccacaggagaggctacaaaatgatctggcgcacagggatgttttgtttagcttgcggactctaacacttaaaaaaaaccccagatcagaagatctggccatgctggggctcacattctcacctagcaacaactggctggagctgggcaccagctctgcctttagaaggggtgtccacttcaccaggtcaccacagcccacactacgccctatcacttcccacaatgaggctgagtgtttgtttctactgatcaatgcccctgcaggttgcatttattgtaatgaaaaagaaagactgggattaatctctaatcaggtgagtagaccatgagaccaatgtgtgctcacattaccctttttcttttttttctttttctttttctttttttttttaatgtgagacaggatctcattctgttgcctaggctggagtgcagtggcgcaatctcggctcactgcaacctctgcctcctgggctcaagcaattctcccacctcagcctcccaaatagctgggatcactggcacaaaccaccatgcccagctaattttgtattttttgtagagacagggtttcaccatgttgcccaggctggtctcaacctcctgggctcaagcaatcctcctgcctcggcctcccaaagtgctgggattacagatgtgagccaccgcatccagccccacaccctcatttataccaattacctgcccagtaactgtggacttttgcttcctcacccctgctctgatctggaaggagagggattatgttatagcttgtcagcacagtcccaagttcaatatttctgcggcaaaaacttccttcaaaaaataaatgtacttcattgtattcaatgaattcaccttggaaatgcaccgcctcaacttgttcacatggcataaatgaaaggaattttatagtctcctaaatggcgtgtactgcaagacctcttgaacactttccagaggataggatatttaagtcatgcccttggcgttgcctatggcacctttcccttctgaaagtctggttcctgcccagtgacccttggccttgtgagccgagatgctgaccctgcataaagggccaaaggagggctgcggcttccttccctcactgaagagcccttatttgaattcactgtgtggagccctagccctccattctcgacattccccaacctcccagccccttccaagcaggactaggtgccctgcattccacccaaggtgggattggccttccttaggctggctacttgtcaccatcaccgacatcactgttgcctgcaaggacaccacgtggccattttccttcaactgagggctcaaaactcctggacaagttgctggctcctgagaccagtatttcctggagctgtgcctcagtgaaggggcccagcctgaggaaccctggctcttttctttaaagcccaggccccacttacataaaacatttcagggtcactggaaacagtgaagtgccatttgttgaagcctactgcatgccagcccactgctcatccacgtggtctgccatgcctacgaggaaggccagcgcatgcaggactggtctctaatgctgtggtcattgcacagaagggaaaggtctcaaggaagagtcaactgggacaagcacaagcccaccggacatggccttggtaaaggttagcagactggtgtgtgtggatctgcagtgcttcactggaaataatttattcattgcagatactttttaggtggcattttattcatttcctgtgctttaaataaacaaatgtaccaaaaaacaagtatcaagctgtttaagtgcttcggctacttgtcccctggttcagtagaggccccggtttcccagttgttgactgtgacaggctcagcatgggctcagcagatgctgtcttaatttgtggatgatacagaaagccaggctttgggatacaagttctttcctcttcatttgatgccgtgcactgtgtgaagcagatgtttttgtccggaaataaaaataatagtcttggagtctcgccaaaaaaaaaaccagcagcgaagacgagg

SEQ ID NO: 288408 - DNA, 5762 bp, Homo sapiens
agggcggggctcgggccggtccgcccgcgcgcaggtgagtgagccagggcggagcgcagctgcgccgggcttgggcgcctggggccgccgctccccaccgtcgttttccccaccgaggccgaggcgtcccggagtcatggccggcctgaactgcggggtctctatcgcactgctaggggttctgctgctgggtgcggcgcgcctgccgcgcggggcagaagcttttgagattgctctgccacgagaaagcaacattacagttctcataaagctggggaccccgactctgctggcaaaaccctgttacatcgtcatttctaaaagacatataaccatgttgtccatcaagtctggagaaagaatagtctttacctttagctgccagagtcctgagaatcactttgtcatagagatccagaaaaatattgactgtatgtcaggcccatgtccttttggggaggttcagcttcagccctcgacatcgttgttgcctaccctcaacagaactttcatctgggatgtcaaagctcataagagcatcggtttagagctgcagttttccatccctcgcctgaggcagatcggtccgggtgagagctgcccagacggagtcactcactccatcagcggccgaatcgatgccaccgtggtcaggatcggaaccttctgcagcaatggcactgtgtcccggatcaagatgcaagaaggagtgaaaatggccttacacctcccatggttccaccccagaaatgtctccggcttcagcattgcaaaccgctcatctataaaacgtctgtgcatcatcgagtctgtgtttgagggtgaaggctcagcaaccctgatgtctgccaactacccagaaggcttccctgaggatgagctcatgacgtggcagtttgtcgttcctgcacacctgcgggccagcgtctccttcctcaacttcaacctctccaactgtgagaggaaggaggagcgggttgaatactacatcccgggctccaccaccaaccccgaggtgttcaagctggaggacaagcagcctgggaacatggcggggaacttcaacctctctctgcaaggctgtgaccaagatgcccaaagtccagggatcctccggctgcagttccaagttttggtccaacatccacaaaatgaaagcaataaaatctacgtggttgacttgagtaatgagcgagccatgtcactcaccatcgagccacggcccgtcaaacagagccgcaagtttgtccctggctgtttcgtgtgtctagaatctcggacctgcagtagcaacctcaccctgacatctggctccaaacacaaaatctccttcctttgtgatgatctgacacgtctgtggatgaatgtggaaaaaaccataagctgcacagaccaccggtactgccaaaggaaatcctactcactccaggtgcccagtgacatcctccacctgcctgtggagctgcatgacttctcctggaagctgctggtgcccaaggacaggctcagcctggtgctggtgccagcccagaagctgcagcagcatacacacgagaagccctgcaacaccagcttcagctacctcgtggccagtgccatacccagccaggacctgtacttcggctccttctgcccgggaggctctatcaagcagatccaggtgaagcagaacatctcggtgacccttcgcacctttgcccccagcttccgacaagaggcctccaggcagggtctgacggtgtcctttataccttatttcaaagaggaaggcgttttcacggtgacccctgacacaaaaagcaaggtctacctgaggacccccaactgggaccggggcctgccatccctcacctctgtgtcctggaacatcagcgtgcccagagaccaggtggcctgcctgactttctttaaggagcggagcggcgtggtctgccagacagggcgcgcattcatgatcatccaggagcagcggacccgggctgaggagatcttcagcctggacgaggatgtgctccccaagccaagcttccaccatcacagcttctgggtcaacatctctaactgcagccccacgagcggcaagcagctagacctgctcttctcggtgacacttaccccaaggactgtggacttgactgtcatcctcatcgcagcggtgggaggtggagtcttactgctgtctgccctcgggctcatcatttgctgtgtgaaaaagaagaaaaagaagacaaacaagggccccgctgtgggtatctacaatggcaacatcaatactgagatgccgaggcagccaaaaaagtttcagaaagggcgaaaggacaatgactcccatgtgtatgcagtcatcgaggacaccatggtatatgggcatctgctacaggattccagcggctccttcctgcagccagaggtggacacctaccggccgttccagggcaccatgggggtctgtcctccctccccacccaccatatgctccagggccccaactgcaaagttggccactgaggagccacctcctcgctcccctcctgagtctgagagtgaaccgtacaccttctcccatcccaacaatggggatgtaagcagcaaggacacagacattcccttactgaacactcaggagcccatggagccagcagaataacttgatccattccagacgctttgctgagtttcataaagcagggcactgagacacccgtccgtgttcctaaccagaaatcctaaagaagaggaattatacagaaggaacagcaggaggttttcctggacaccgccaacttcacattgctcagtggactcattctaagggcaagacattgaaaatgatgaattccaatctggatacagtcatgacagctcatgtgctcctcaacttaggctgtgcggttagccagcctgtaatgagaggagagaggcctgagtcacctagcatagggttgcagcaagccctggattcagagtgttaaacagaggcttgccctcttcaggacaacagttccaattccaaggagcctacctgaggtccctactctcactggggtccccaggatgaaaacgacaatgtgcctttttattattatttatttggtggtcctgtgttatttaagagatcaaatgtataaccacctagctcttttcacctgacttagtaataactcatactaactggtttggatgcctgggttgtgacttctactgaccgctagataaacgtgtgcctgtcccccaggtggtgggaataatttacaatctgtccaaccagaaaagaatgtgtgtgtttgagcagcattgacacatatctgctttgataagagacttcctgattctctaggtcggttcgtggttatcccattgtggaaattcatcttgaatcccattgtcctatagtcctagcaataagagaaatttcctcaagtttccatgtgcggttctcctagctgcagcaatactttgacatttaaagagaaatttagagaatattctcatcctctaaaaatgtttaaatatataccaaacagtggccccctgcattagttttctgttgccactgcaacccattacttggtagcttaaaaacaacacattagcttatagtcctggggatcagaattccaaaatggatgtccctgaatgaaaatcaaggtgtcagcagagctgtgctccttctgaaggctctagggagaagccggttccttgccatttcaagcttctagaggctggctgcattcccaggctccagtggctggtcaagcttttctcacatggcatcactgtgacactggccctcccacttccctctttgacttacaaagcccaccaggaagatccaggataatctctccatctaaagatccttcatcatcctggaagagccttttgccatgcaagacaacatagccacaggtggggattaggaccaggacatctttggggtgctgttattctgcctaccacaccttcctgccactgactcccacaggagaggctacaaaatgatctggcgcacagggatgttttgtttagcttgcggactctaacacttaaaaaaaaccccagatcagaagatctggccatgctggggctcacattctcacctagcaacaactggctggagctgggcaccagctctgcctttagaaggggtgtccacttcaccaggtcaccacagcccacactacgccctatcacttcccacaatgaggctgagtgtttgtttctactgatcaatgcccctgcaggttgcatttattgtaatgaaaaagaaagactgggattaatctctaatcaggtgagtagaccatgagaccaatgtgtgctcacattaccctttttcttttttttctttttctttttctttttttttttaatgtgagacaggatctcattctgttgcctaggctggagtgcagtggcgcaatctcggctcactgcaacctctgcctcctgggctcaagcaattctcccacctcagcctcccaaatagctgggatcactggcacaaaccaccatgcccagctaattttgtattttttgtagagacagggtttcaccatgttgcccaggctggtctcaacctcctgggctcaagcaatcctcctgcctcggcctcccaaagtgctgggattacagatgtgagccaccgcatccagccccacaccctcatttataccaattacctgcccagtaactgtggacttttgcttcctcacccctgctctgatctggaaggagagggattatgttatagcttgtcagcacagtcccaagttcaatatttctgcggcaaaaacttccttcaaaaaataaatgtacttcattgtattcaatgaattcaccttggaaatgcaccgcctcaacttgttcacatggcataaatgaaaggaattttatagtctcctaaatggcgtgtactgcaagacctcttgaacactttccagaggataggatatttaagtcatgcccttggcgttgcctatggcacctttcccttctgaaagtctggttcctgcccagtgacccttggccttgtgagccgagatgctgaccctgcataaagggccaaaggagggctgcggcttccttccctcactgaagagcccttatttgaattcactgtgtggagccctagccctccattctcgacattccccaacctcccagccccttccaagcaggactaggtgccctgcattccacccaaggtgggattggccttccttaggctggctacttgtcaccatcaccgacatcactgttgcctgcaaggacaccacgtggccattttccttcaactgagggctcaaaactcctggacaagttgctggctcctgagaccagtatttcctggagctgtgcctcagtgaaggggcccagcctgaggaaccctggctcttttctttaaagcccaggccccacttacataaaacatttcagggtcactggaaacagtgaagtgccatttgttgaagcctactgcatgccagcccactgctcatccacgtggtctgccatgcctacgaggaaggccagcgcatgcaggactggtctctaatgctgtggtcattgcacagaagggaaaggtctcaaggaagagtcaactgggacaagcacaagcccaccggacatggccttggtaaaggttagcagactggtgtgtgtggatctgcagtgcttcactggaaataatttattcattgcagatactttttaggtggcattttattcatttcctgtgctttaaataaacaaatgtacca

SEQ ID NO: 288409 - DNA, 5737 bp, Homo sapiens
agggcggggctcgggccggtccgcccgcgcgcaggtgagtgagccagggcggagcgcagctgcgccgggcttgggcgcctggggccgccgctccccaccgtcgttttccccaccgaggccgaggcgtcccggagtcatggccggcctgaactgcggggtctctatcgcactgctaggggttctgctgctgggtgcggcgcgcctgccgcgcggggcagaagcttttgagattgctctgccacgagaaagcaacattacagttctcataaagctggggaccccgactctgctggcaaaaccctgttacatcgtcatttctaaaagacatataaccatgttgtccatcaagtctggagaaagaatagtctttacctttagctgccagagtcctgagaatcactttgtcatagagatccagaaaaatattgactgtatgtcaggcccatgtccttttggggaggttcagcttcagccctcgacatcgttgttgcctaccctcaacagaactttcatctgggatgtcaaagctcataagagcatcggtttagagctgcagttttccatccctcgcctgaggcagatcggtccgggtgagagctgcccagacggagtcactcactccatcagcggccgaatcgatgccaccgtggtcaggatcggaaccttctgcagcaatggcactgtgtcccggatcaagatgcaagaaggagtgaaaatggccttacacctcccatggttccaccccagaaatgtctccggcttcagcattgcaaaccgctcatctataaaacgtctgtgcatcatcgagtctgtgtttgagggtgaaggctcagcaaccctgatgtctgccaactacccagaaggcttccctgaggatgagctcatgacgtggcagtttgtcgttcctgcacacctgcgggccagcgtctccttcctcaacttcaacctctccaactgtgagaggaaggaggagcgggttgaatactacatcccgggctccaccaccaaccccgaggtgttcaagctggaggacaagcagcctgggaacatggcggggaacttcaacctctctctgcaaggctgtgaccaagatgcccaaagtccagggatcctccggctgcagttccaagttttggtccaacatccacaaaatgaaagcaataaaatctacgtggttgacttgagtaatgagcgagccatgtcactcaccatcgagccacggcccgtcaaacagagccgcaagtttgtccctggctgtttcgtgtgtctagaatctcggacctgcagtagcaacctcaccctgacatctggctccaaacacaaaatctccttcctttgtgatgatctgacacgtctgtggatgaatgtggaaaaaaccataagctgcacagaccaccggtactgccaaaggaaatcctactcactccaggtgcccagtgacatcctccacctgcctgtggagctgcatgacttctcctggaagctgctggtgcccaaggacaggctcagcctggtgctggtgccagcccagaagctgcagcagcatacacacgagaagccctgcaacaccagcttcagctacctcgtggccagtgccatacccagccaggacctgtacttcggctccttctgcccgggaggctctatcaagcagatccaggtgaagcagaacatctcggtgacccttcgcacctttgcccccagcttccgacaagaggcctccaggcagggtctgacggtgtcctttataccttatttcaaagaggaaggcgttttcacggtgacccctgacacaaaaagcaaggtctacctgaggacccccaactgggaccggggcctgccatccctcacctctgtgtcctggaacatcagcgtgcccagagaccaggtggcctgcctgactttctttaaggagcggagcggcgtggtctgccagacagggcgcgcattcatgatcatccaggagcagcggacccgggctgaggagatcttcagcctggacgaggatgtgctccccaagccaagcttccaccatcacagcttctgggtcaacatctctaactgcagccccacgagcggcaagcagctagacctgctcttctcggtgacacttaccccaaggactgtggacttgactgtcatcctcatcgcagcggtgggaggtggagtcttactgctgtctgccctcgggctcatcatttgctgtgtgaaaaagaagaaaaagaagacaaacaagggccccgctgtgggtatctacaatggcaacatcaatactgagatgccgaggcagccaaaaaagtttcagaaagggcgaaaggacaatgactcccatgtgtatgcagtcatcgaggacaccatggtatatgggcatctgctacaggattccagcggctccttcctgcagccagaggtggacacctaccggccgttccagggcaccatgggggtctgtcctccctccccacccaccatatgctccagggccccaactgcaaagttggccactgaggagccacctcctcgctcccctcctgagtctgagagtgaaccgtacaccttctcccatcccaacaatggggatgtaagcagcaaggacacagacattcccttactgaacactcaggagcccatggagccagcagaataacttgatccattccagacgctttgctgagtttcataaagcagggcactgagacacccgtccgtgttcctaaccagaaatcctaaagaagaggaattatacagaaggaacagcaggaggttttcctggacaccgccaacttcacattgctcagtggactcattctaagggcaagacattgaaaatgatgaattccaatctggatacagtcatgacagctcatgtgctcctcaacttaggctgtgcggttagccagcctgtaatgagaggagagaggcctgagtcacctagcatagggttgcagcaagccctggattcagagtgttaaacagaggcttgccctcttcaggacaacagttccaattccaaggagcctacctgaggtccctactctcactggggtccccaggatgaaaacgacaatgtgcctttttattattatttatttggtggtcctgtgttatttaagagatcaaatgtataaccacctagctcttttcacctgacttagtaataactcatactaactggtttggatgcctgggttgtgacttctactgaccgctagataaacgtgtgcctgtcccccaggtggtgggaataatttacaatctgtccaaccagaaaagaatgtgtgtgtttgagcagcattgacacatatctgctttgataagagacttcctgattctctaggtcggttcgtggttatcccattgtggaaattcatcttgaatcccattgtcctatagtcctagcaataagagaaatttcctcaagtttccatgtgcggttctcctagctgcagcaatactttgacatttaaagagaaatttagagaatattctcatcctctaaaaatgtttaaatatataccaaacagtggccccctgcattagttttctgttgccactgcaacccattacttggtagcttaaaaacaacacattagcttatagtcctggggatcagaattccaaaatggatgtccctgaatgaaaatcaaggtgtcagcagagctgtgctccttctgaaggctctagggagaagccggttccttgccatttcaagcttctagaggctggctgcattcccaggctccagtggctggtcaagcttttctcacatggcatcactgtgacactggccctcccacttccctctttgacttacaaagcccaccaggaagatccaggataatctctccatctaaagatccttcatcatcctggaagagccttttgccatgcaagacaacatagccacaggtggggattaggaccaggacatctttggggtgctgttattctgcctaccacaccttcctgccactgactcccacaggagaggctacaaaatgatctggcgcacagggatgttttgtttagcttgcggactctaacacttaaaaaaaaccccagatcagaagatctggccatgctggggctcacattctcacctagcaacaactggctggagctgggcaccagctctgcctttagaaggggtgtccacttcaccaggtcaccacagcccacactacgccctatcacttcccacctcagcctcccaaatagctgggatcactggcacaaaccaccatgcccagctaattttgtattttttgtagagacagggtttcaccatgttgcccaggctggtctcaacctcctgggctcaagcaatcctcctgcctcggcctcccaaagtgctgggattacagatgtgagccaccgcatccagccccacaccctcatttataccaattacctgcccagtaactgtggacttttgcttcctcacccctgctctgatctggaaggagagggattatgttatagcttgtcagcacagtcccaagttcaatatttctgcggcaaaaacttccttcaaaaaataaatgtacttcattgtattcaatgaattcaccttggaaatgcaccgcctcaacttgttcacatggcataaatgaaaggaattttatagtctcctaaatggcgtgtactgcaagacctcttgaacactttccagaggataggatatttaagtcatgcccttggcgttgcctatggcacctttcccttctgaaagtctggttcctgcccagtgacccttggccttgtgagccgagatgctgaccctgcataaagggccaaaggagggctgcggcttccttccctcactgaagagcccttatttgaattcactgtgtggagccctagccctccattctcgacattccccaacctcccagccccttccaagcaggactaggtgccctgcattccacccaaggtgggattggccttccttaggctggctacttgtcaccatcaccgacatcactgttgcctgcaaggacaccacgtggccattttccttcaactgagggctcaaaactcctggacaagttgctggctcctgagaccagtatttcctggagctgtgcctcagtgaaggggcccagcctgaggaaccctggctcttttctttaaagcccaggccccacttacataaaacatttcagggtcactggaaacagtgaagtgccatttgttgaagcctactgcatgccagcccactgctcatccacgtggtctgccatgcctacgaggaaggccagcgcatgcaggactggtctctaatgctgtggtcattgcacagaagggaaaggtctcaaggaagagtcaactgggacaagcacaagcccaccggacatggccttggtaaaggttagcagactggtgtgtgtggatctgcagtgcttcactggaaataatttattcattgcagatactttttaggtggcattttattcatttcctgtgctttaaataaacaaatgtaccaaaaaacaagtatcaagctgtttaagtgcttcggctacttgtcccctggttcagtagaggccccggtttcccagttgttgactgtgacaggctcagcatgggctcagcagatgctgtcttaatttgtggatgatacagaaagccaggctttgggatacaagttctttcctcttcatttgatgccgtgcactgtgtgaagcagatgtttttgtccggaaataaaaataatagtcttggagtctcgcca

SEQ ID NO: 288410 - DNA, 5174 bp, Homo sapiens
caacagccacctccttgctgggctaccatgacttctgatgtgtgctcttagttcaaatgcaggaactaaggccacaagaggcaaagtagcctgcccaagaacaccctattaggaagtggcagagccagaagacgaactaacatctccccaacgccactcacagctccaaccactgcccagaactgcctcctgagcaacacgtctgggtggagtgaaacctgtgccctgccccatgacacttagcatctaagacacagatacacagaagaaaaacttaagcaaaaaaggagaggaaatttcaaccctgagtactacccagaagtttgtttgccagcttagtaaacagtaagaatgtttactaagagagcagagggaccgctagaaaaggaacacagaggagccagaagcagagggcagggtgggagaagagagaccgaagggaaacacagggcagcatgcagacacccaacctcaggctgacgggagagctggggagggtgcacttctggtctcctttgtgcatggctagcatgccccacttcttccaggctgcacagaccaccggtactgccaaaggaaatcctactcactccaggtgcccagtgacatcctccacctgcctgtggagctgcatgacttctcctggaagctgctggtgcccaaggacaggctcagcctggtgctggtgccagcccagaagctgcagcagcatacacacgagaagccctgcaacaccagcttcagctacctcgtggccagtgccatacccagccaggacctgtacttcggctccttctgcccgggaggctctatcaagcagatccaggtgaagcagaacatctcggtgacccttcgcacctttgcccccagcttccgacaagaggcctccaggcagggtctgacggtgtcctttataccttatttcaaagaggaaggcgttttcacggtgacccctgacacaaaaagcaaggtctacctgaggacccccaactgggaccggggcctgccatccctcacctctgtgtcctggaacatcagcgtgcccagagaccaggtggcctgcctgactttctttaaggagcggagcggcgtggtctgccagacagggcgcgcattcatgatcatccaggagcagcggacccgggctgaggagatcttcagcctggacgaggatgtgctccccaagccaagcttccaccatcacagcttctgggtcaacatctctaactgcagccccacgagcggcaagcagctagacctgctcttctcggtgacacttaccccaaggactgtggacttgactgtcatcctcatcgcagcggtgggaggtggagtcttactgctgtctgccctcgggctcatcatttgctgtgtgaaaaagaagaaaaagaagacaaacaagggccccgctgtgggtatctacaatggcaacatcaatactgagatgccgaggcagccaaaaaagtttcagaaagggcgaaaggacaatgactcccatgtgtatgcagtcatcgaggacaccatggtatatgggcatctgctacaggattccagcggctccttcctgcagccagaggtggacacctaccggccgttccagggcaccatgggggtctgtcctccctccccacccaccatatgctccagggccccaactgcaaagttggccactgaggagccacctcctcgctcccctcctgagtctgagagtgaaccgtacaccttctcccatcccaacaatggggatgtaagcagcaaggacacagacattcccttactgaacactcaggagcccatggagccagcagaataacttgatccattccagacgctttgctgagtttcataaagcagggcactgagacacccgtccgtgttcctaaccagaaatcctaaagaagaggaattatacagaaggaacagcaggaggttttcctggacaccgccaacttcacattgctcagtggactcattctaagggcaagacattgaaaatgatgaattccaatctggatacagtcatgacagctcatgtgctcctcaacttaggctgtgcggttagccagcctgtaatgagaggagagaggcctgagtcacctagcatagggttgcagcaagccctggattcagagtgttaaacagaggcttgccctcttcaggacaacagttccaattccaaggagcctacctgaggtccctactctcactggggtccccaggatgaaaacgacaatgtgcctttttattattatttatttggtggtcctgtgttatttaagagatcaaatgtataaccacctagctcttttcacctgacttagtaataactcatactaactggtttggatgcctgggttgtgacttctactgaccgctagataaacgtgtgcctgtcccccaggtggtgggaataatttacaatctgtccaaccagaaaagaatgtgtgtgtttgagcagcattgacacatatctgctttgataagagacttcctgattctctaggtcggttcgtggttatcccattgtggaaattcatcttgaatcccattgtcctatagtcctagcaataagagaaatttcctcaagtttccatgtgcggttctcctagctgcagcaatactttgacatttaaagagaaatttagagaatattctcatcctctaaaaatgtttaaatatataccaaacagtggccccctgcattagttttctgttgccactgcaacccattacttggtagcttaaaaacaacacattagcttatagtcctggggatcagaattccaaaatggatgtccctgaatgaaaatcaaggtgtcagcagagctgtgctccttctgaaggctctagggagaagccggttccttgccatttcaagcttctagaggctggctgcattcccaggctccagtggctggtcaagcttttctcacatggcatcactgtgacactggccctcccacttccctctttgacttacaaagcccaccaggaagatccaggataatctctccatctaaagatccttcatcatcctggaagagccttttgccatgcaagacaacatagccacaggtggggattaggaccaggacatctttggggtgctgttattctgcctaccacaccttcctgccactgactcccacaggagaggctacaaaatgatctggcgcacagggatgttttgtttagcttgcggactctaacacttaaaaaaaaccccagatcagaagatctggccatgctggggctcacattctcacctagcaacaactggctggagctgggcaccagctctgcctttagaaggggtgtccacttcaccaggtcaccacagcccacactacgccctatcacttcccacaatgaggctgagtgtttgtttctactgatcaatgcccctgcaggttgcatttattgtaatgaaaaagaaagactgggattaatctctaatcaggtgagtagaccatgagaccaatgtgtgctcacattaccctttttcttttttttctttttctttttctttttttttttaatgtgagacaggatctcattctgttgcctaggctggagtgcagtggcgcaatctcggctcactgcaacctctgcctcctgggctcaagcaattctcccacctcagcctcccaaatagctgggatcactggcacaaaccaccatgcccagctaattttgtattttttgtagagacagggtttcaccatgttgcccaggctggtctcaacctcctgggctcaagcaatcctcctgcctcggcctcccaaagtgctgggattacagatgtgagccaccgcatccagccccacaccctcatttataccaattacctgcccagtaactgtggacttttgcttcctcacccctgctctgatctggaaggagagggattatgttatagcttgtcagcacagtcccaagttcaatatttctgcggcaaaaacttccttcaaaaaataaatgtacttcattgtattcaatgaattcaccttggaaatgcaccgcctcaacttgttcacatggcataaatgaaaggaattttatagtctcctaaatggcgtgtactgcaagacctcttgaacactttccagaggataggatatttaagtcatgcccttggcgttgcctatggcacctttcccttctgaaagtctggttcctgcccagtgacccttggccttgtgagccgagatgctgaccctgcataaagggccaaaggagggctgcggcttccttccctcactgaagagcccttatttgaattcactgtgtggagccctagccctccattctcgacattccccaacctcccagccccttccaagcaggactaggtgccctgcattccacccaaggtgggattggccttccttaggctggctacttgtcaccatcaccgacatcactgttgcctgcaaggacaccacgtggccattttccttcaactgagggctcaaaactcctggacaagttgctggctcctgagaccagtatttcctggagctgtgcctcagtgaaggggcccagcctgaggaaccctggctcttttctttaaagcccaggccccacttacataaaacatttcagggtcactggaaacagtgaagtgccatttgttgaagcctactgcatgccagcccactgctcatccacgtggtctgccatgcctacgaggaaggccagcgcatgcaggactggtctctaatgctgtggtcattgcacagaagggaaaggtctcaaggaagagtcaactgggacaagcacaagcccaccggacatggccttggtaaaggttagcagactggtgtgtgtggatctgcagtgcttcactggaaataatttattcattgcagatactttttaggtggcattttattcatttcctgtgctttaaataaacaaatgtaccaaaaaacaagtatcaagctgtttaagtgcttcggctacttgtcccctggttcagtagaggccccggtttcccagttgttgactgtgacaggctcagcatgggctcagcagatgctgtcttaatttgtggatgatacagaaagccaggctttgggatacaagttctttcctcttcatttgatgccgtgcactgtgtgaagcagatgtttttgtccggaaataaaaataatagtcttggagtctcgcca

SEQ ID NO: 288411 - DNA, 1743 bp, Homo sapiens
agggcggggctcgggccggtccgcccgcgcgcaggtgagtgagccagggcggagcgcagctgcgccgggcttgggcgcctggggccgccgctccccaccgtcgttttccccaccgaggccgaggcgtcccggagtcatggccggcctgaactgcggggtctctatcgcactgctaggggttctgctgctgggtgcggcgcgcctgccgcgcggggcagaagcttttgagattgctctgccacgagaaagcaacattacagttctcataaagctggggaccccgactctgctggcaaaaccctgttacatcgtcatttctaaaagacatataaccatgttgtccatcaagtctggagaaagaatagtctttacctttagctgccagagtcctgagaatcactttgtcatagagatccagaaaaatattgactgtatgtcaggcccatgtccttttggggaggttcagcttcagccctcgacatcgttgttgcctaccctcaacagaactttcatctgggatgtcaaagctcataagagcatcggtttagagctgcagttttccatccctcgcctgaggcagatcggtccgggtgagagctgcccagacggagtcactcactccatcagcggccgaatcgatgccaccgtggtcaggatcggaaccttctgcagcaatggcactgtgtcccggatcaagatgcaagaaggagtgaaaatggccttacacctcccatggttccaccccagaaatgtctccggcttcagcattgcaaaccgctcatctataaaacgtctgtgcatcatcgagtctgtgtttgagggtgaaggctcagcaaccctgatgtctgccaactacccagaaggcttccctgaggatgagctcatgacgtggcagtttgtcgttcctgcacacctgcgggccagcgtctccttcctcaacttcaacctctccaactgtgagaggaaggaggagcgggttgaatactacatcccgggctccaccaccaaccccgaggtgttcaagctggaggacaagcagcctgggaacatggcggggaacttcaacctctctctgcaaggctgtgaccaagatgcccaaagtccagggatcctccggctgcagttccaagttttggtccaacatccacaaaatgaaagcaataaaatctacgtggttgacttgagtaatgagcgagccatgtcactcaccatcgagccacggcccgtcaaacagagccgcaagtttgtccctggctgtttcgtgtgtctagaatctcggacctgcagtagcaacctcaccctgacatctggctccaaacacaaaatctccttcctttgtgatgatctgacacgtctgtggatgaatgtggaaaaaaccataagtacgcccctgaatcagtgcatttgtccctggccatggatagctcttctctccccgccttgccttagtggggttccctgggtaggttgtaaatcatatcaaaaaggcccatctggccgggcacgatggctcacgcctgtaatcccagcactttgggaggccaaggctggtggatcacttgaggtcaggagttcaagaccagcctggccaacgtggtaaaaccccatctttactaaaaatacaaaaattagctgggcatggtggcaggcgcctataatctcagctgctcagaaggctgaagcaggagaatggcctgaacctgggaggcggaggttgcagtgagccgagattgcaccacgcac

SEQ ID NO: 288412 - DNA, 3233 bp, Homo sapiens
agggcggggctcgggccggtccgcccgcgcgcaggtgagtgagccagggcggagcgcagctgcgccgggcttgggcgcctggggccgccgctccccaccgtcgttttccccaccgaggccgaggcgtcccggagtcatggccggcctgaactgcggggtctctatcgcactgctaggggttctgctgctgggtgcggcgcgcctgccgcgcggggcagaagcttttgagattgctctgccacgagaaagcaacattacagttctcataaagctggggaccccgactctgctggcaaaaccctgttacatcgtcatttctaaaagacatataaccatgttgtccatcaagtctggagaaagaatagtctttacctttagctgccagagtcctgagaatcactttgtcatagagatccagaaaaatattgactgtatgtcaggcccatgtccttttggggaggttcagcttcagccctcgacatcgttgttgcctaccctcaacagaactttcatctgggatgtcaaagctcataagagcatcggtttagagctgcagttttccatccctcgcctgaggcagatcggtccgggtgagagctgcccagacggagtcactcactccatcagcggccgaatcgatgccaccgtggtcaggatcggaaccttctgcagcaatggcactgtgtcccggatcaagatgcaagaaggagtgaaaatggccttacacctcccatggttccaccccagaaatgtctccggcttcagcattgcaaaccgctcatctataaaacgtctgtgcatcatcgagtctgtgtttgagggtgaaggctcagcaaccctgatgtctgccaactacccagaaggcttccctgaggatgagctcatgacgtggcagtttgtcgttcctgcacacctgcgggccagcgtctccttcctcaacttcaacctctccaactgtgagaggaaggaggagcgggttgaatactacatcccgggctccaccaccaaccccgaggtgttcaagctggaggacaagcagcctgggaacatggcggggaacttcaacctctctctgcaaggctgtgaccaagatgcccaaagtccagggatcctccggctgcagttccaagttttggtccaacatccacaaaatgaaagcaataaaatctacgtggttgacttgagtaatgagcgagccatgtcactcaccatcgagccacggcccgtcaaacagagccgcaagtttgtccctggctgtttcgtgtgtctagaatctcggacctgcagtagcaacctcaccctgacatctggctccaaacacaaaatctccttcctttgtgatgatctgacacgtctgtggatgaatgtggaaaaaaccataagctgcacagaccaccggtactgccaaaggaaatcctactcactccaggtgcccagtgacatcctccacctgcctgtggagctgcatgacttctcctggaagctgctggtgcccaaggacaggctcagcctggtgctggtgccagcccagaagctgcagcagcatacacacgagaagccctgcaacaccagcttcagctacctcgtggccagtgccatacccagccaggacctgtacttcggctccttctgcccgggaggctctatcaagcagatccaggtgaagcagaacatctcggtgacccttcgcacctttgcccccagcttccgacaagaggcctccaggcagggtctgacggtgtcctttataccttatttcaaagaggaaggcgttttcacggtgacccctgacacaaaaagcaaggtctacctgaggacccccaactgggaccggggcctgccatccctcacctctgtgtcctggaacatcagcgtgcccagagaccaggtggcctgcctgactttctttaaggagcggagcggcgtggtctgccagacagggcgcgcattcatgatcatccaggagcagcggacccgggctgaggagatcttcagcctggacgaggatgtgctccccaagccaagcttccaccatcacagcttctgggtcaacatctctaactgcagccccacgagcggcaagcagctagacctgctcttctcggtgacacttaccccaaggactgtggacttgactgtcatcctcatcgcagcggtgggaggtggagtcttactgctgtctgccctcgggctcatcatttgctgtgtgaaaaagaagaaaaagaagacaaacaagggccccgctgtgggtatctacaatggcaacatcaatactgagatgccgaggcagccaaaaaagtttcagaaagggcgaaaggacaatgactcccatgtgtatgcagtcatcgaggacaccatggtatatgggcatctgctacaggattccagcggctccttcctgcagccagaggtggacacctaccggccgttccagggcaccatgggggtctgtcctccctccccacccaccatatgctccagggccccaactgcaaagttggccactgaggagccacctcctcgctcccctcctgagtctgagagtgaaccgtacaccttctcccatcccaacaatggggatgtaagcagcaaggacacagacattcccttactgaacactcaggagcccatggagccagcagaataacttgatccattccagacgctttgctgagtttcataaagcagggcactgagacacccgtccgtgttcctaaccagaaatcctaaagaagaggaattatacagaaggaacagcaggaggttttcctggacaccgccaacttcacattgctcagtggactcattctaagggcaagacattgaaaatgatgaattccaatctggatacagtcatgacagctcatgtgctcctcaacttaggctgtgcggttagccagcctgtaatgagaggagagaggcctgagtcacctagcatagggttgcagcaagccctggattcagagtgttaaacagaggcttgccctcttcaggacaacagttccaattccaaggagcctacctgaggtccctactctcactggggtccccaggatgaaaacgacaatgtgcctttttattattatttatttggtggtcctgtgttatttaagagatcaaatgtataaccacctagctcttttcacctgacttagtaataactcatactaactggtttggatgcctgggttgtgacttctactgaccgctagataaacgtgtgcctgtccccc

SEQ ID NO: 288413 - DNA, 6008 bp, Homo sapiens
agggcggggctcgggccggtccgcccgcgcgcaggtgagtgagccagggcggagcgcagctgcgccgggcttgggcgcctggggccgccgctccccaccgtcgttttccccaccgaggccgaggcgtcccggagtcatggccggcctgaactgcggggtctctatcgcactgctaggggttctgctgctgggtgcggcgcgcctgccgcgcggggcagaagcttttgagattgctctgccacgagaaagcaacattacagttctcataaagctggggaccccgactctgctggcaaaaccctgttacatcgtcatttctaaaagacatataaccatgttgtccatcaagtctggagaaagaatagtctttacctttagctgccagagtcctgagaatcactttgtcatagagatccagaaaaatattgactgtatgtcaggcccatgtccttttggggaggttcagcttcagccctcgacatcgttgttgcctaccctcaacagaactttcatctgggatgtcaaagctcataagagcatcggtttagagctgcagttttccatccctcgcctgaggcagatcggtccgggtgagagctgcccagacggagtcactcactccatcagcggccgaatcgatgccaccgtggtcaggatcggaaccttctgcagcaatggcactgtgtcccggatcaagatgcaagaaggagtgaaaatggccttacacctcccatggttccaccccagaaatgtctccggcttcagcattgcaaaccgctcatctataaaacgtctgtgcatcatcgagtctgtgtttgagggtgaaggctcagcaaccctgatgtctgccaactacccagaaggcttccctgaggatgagctcatgacgtggcagtttgtcgttcctgcacacctgcgggccagcgtctccttcctcaacttcaacctctccaactgtgagaggaaggaggagcgggttgaatactacatcccgggctccaccaccaaccccgaggtgttcaagctggaggacaagcagcctgggaacatggcggggaacttcaacctctctctgcaaggctgtgaccaagatgcccaaagtccagggatcctccggctgcagttccaagttttggtccaacatccacaaaatgaaagcaataaaatctacgtggttgacttgagtaatgagcgagccatgtcactcaccatcgagccacggcccgtcaaacagagccgcaagtttgtccctggctgtttcgtgtgtctagaatctcggacctgcagtagcaacctcaccctgacatctggctccaaacacaaaatctccttcctttgtgatgatctgacacgtctgtggatgaatgtggaaaaaaccataagctgcacagaccaccggtactgccaaaggaaatcctactcactccaggtgcccagtgacatcctccacctgcctgtggagctgcatgacttctcctggaagctgctggtgcccaaggacaggctcagcctggtgctggtgccagcccagaagctgcagcagcatacacacgagaagccctgcaacaccagcttcagctacctcgtggccagtgccatacccagccaggacctgtacttcggctccttctgcccgggaggctctatcaagcagatccaggtgaagcagaacatctcggtgacccttcgcacctttgcccccagcttccgacaagaggcctccaggcagggtctgacggtgtcctttataccttatttcaaagaggaaggcgttttcacggtgacccctgacacaaaaagcaaggtctacctgaggacccccaactgggaccggggcctgccatccctcacctctgtgtcctggaacatcagcgtgcccagagaccaggtggcctgcctgactttctttaaggagcggagcggcgtggtctgccagacagggcgcgcattcatgatcatccaggagcagcggacccgggctgaggagatcttcagcctggacgaggatgtgctccccaagccaagcttccaccatcacagcttctgggtcaacatctctaactgcagccccacgagcggcaagcagctagacctgctcttctcggtgacacttaccccaaggactgtggacttgactgtcatcctcatcgcagcggtgggaggtggagtcttactgctgtctgccctcgggctcatcatttgctgtgtgaaaaagaagaaaaagaagacaaacaagggccccgctgtgggtatctacaatggcaacatcaatactgagatgccgaggcagccaaaaaagtttcagaaagggcgaaaggacaatgactcccatgtgtatgcagtcatcgaggacaccatggtatatgggcatctgctacaggattccagcggctccttcctgcagccagaggtggacacctaccggccgttccagggcaccatgggggtctgtcctccctccccacccaccatatgctccagggccccaactgcaaagttggccactgaggagccacctcctcgctcccctcctgagtctgagagtgaaccgtacaccttctcccatcccaacaatggggatgtaagcagcaaggacacagacattcccttactgaacactcaggagcccatggagccagcagaataacttgatccattccagacgctttgctgagtttcataaagcagggcactgagacacccgtccgtgttcctaaccagaaatcctaaagaagaggaattatacagaaggaacagcaggaggttttcctggacaccgccaacttcacattgctcagtggactcattctaagggcaagacattgaaaatgatgaattccaatctggatacagtcatgacagctcatgtgctcctcaacttaggctgtgcggttagccagcctgtaatgagaggagagaggcctgagtcacctagcatagggttgcagcaagccctggattcagagtgttaaacagaggcttgccctcttcaggacaacagttccaattccaaggagcctacctgaggtccctactctcactggggtccccaggatgaaaacgacaatgtgcctttttattattatttatttggtggtcctgtgttatttaagagatcaaatgtataaccacctagctcttttcacctgacttagtaataactcatactaactggtttggatgcctgggttgtgacttctactgaccgctagataaacgtgtgcctgtcccccaggtggtgggaataatttacaatctgtccaaccagaaaagaatgtgtgtgtttgagcagcattgacacatatctgctttgataagagacttcctgattctctaggtcggttcgtggttatcccattgtggaaattcatcttgaatcccattgtcctatagtcctagcaataagagaaatttcctcaagtttccatgtgcggttctcctagctgcagcaatactttgacatttaaagagaaatttagagaatattctcatcctctaaaaatgtttaaatatataccaaacagtggccccctgcattagttttctgttgccactgcaacccattacttggtagcttaaaaacaacacattagcttatagtcctggggatcagaattccaaaatggatgtccctgaatgaaaatcaaggtgtcagcagagctgtgctccttctgaaggctctagggagaagccggttccttgccatttcaagcttctagaggctggctgcattcccaggctccagtggctggtcaagcttttctcacatggcatcactgtgacactggccctcccacttccctctttgacttacaaagcccaccaggaagatccaggataatctctccatctaaagatccttcatcatcctggaagagccttttgccatgcaagacaacatagccacaggtggggattaggaccaggacatctttggggtgctgttattctgcctaccacaccttcctgccactgactcccacaggagaggctacaaaatgatctggcgcacagggatgttttgtttagcttgcggactctaacacttaaaaaaaaccccagatcagaagatctggccatgctggggctcacattctcacctagcaacaactggctggagctgggcaccagctctgcctttagaaggggtgtccacttcaccaggtcaccacagcccacactacgccctatcacttcccacaatgaggctgagtgtttgtttctactgatcaatgcccctgcaggttgcatttattgtaatgaaaaagaaagactgggattaatctctaatcaggtgagtagaccatgagaccaatgtgtgctcacattaccctttttcttttttttctttttctttttctttttttttttaatgtgagacaggatctcattctgttgcctaggctggagtgcagtggcgcaatctcggctcactgcaacctctgcctcctgggctcaagcaattctcccacctcagcctcccaaatagctgggatcactggcacaaaccaccatgcccagctaattttgtattttttgtagagacagggtttcaccatgttgcccaggctggtctcaacctcctgggctcaagcaatcctcctgcctcggcctcccaaagtgctgggattacagatgtgagccaccgcatccagccccacaccctcatttataccaattacctgcccagtaactgtggacttttgcttcctcacccctgctctgatctggaaggagagggattatgttatagcttgtcagcacagtcccaagttcaatatttctgcggcaaaaacttccttcaaaaaataaatgtacttcattgtattcaatgaattcaccttggaaatgcaccgcctcaacttgttcacatggcataaatgaaaggaattttatagtctcctaaatggcgtgtactgcaagacctcttgaacactttccagaggataggatatttaagtcatgcccttggcgttgcctatggcacctttcccttctgaaagtctggttcctgcccagtgacccttggccttgtgagccgagatgctgaccctgcataaagggccaaaggagggctgcggcttccttccctcactgaagagcccttatttgaattcactgtgtggagccctagccctccattctcgacattccccaacctcccagccccttccaagcaggactaggtgccctgcattccacccaaggtgggattggccttccttaggctggctacttgtcaccatcaccgacatcactgttgcctgcaaggacaccacgtggccattttccttcaactgagggctcaaaactcctggacaagttgctggctcctgagaccagtatttcctggagctgtgcctcagtgaaggggcccagcctgaggaaccctggctcttttctttaaagcccaggccccacttacataaaacatttcagggtcactggaaacagtgaagtgccatttgttgaagcctactgcatgccagcccactgctcatccacgtggtctgccatgcctacgaggaaggccagcgcatgcaggactggtctctaatgctgtggtcattgcacagaagggaaaggtctcaaggaagagtcaactgggacaagcacaagcccaccggacatggccttggtaaaggttagcagactggtgtgtgtggatctgcagtgcttcactggaaataatttattcattgcagatactttttaggtggcattttattcatttcctgtgctttaaataaacaaatgtaccaaaaaacaagtatcaagctgtttaagtgcttcggctacttgtcccctggttcagtagaggccccggtttcccagttgttgactgtgacaggctcagcatgggctcagcagatgctgtcttaatttgtggatgatacagaaagccaggctttgggatacaagttctttcctcttcatttgatgccgtgcactgtgtgaagcagatgtttttgtccggaaataaaaataatagtcttggagtctcgcca

SEQ ID NO: 288414 - DNA, 5911 bp, Homo sapiens
agggcggggctcgggccggtccgcccgcgcgcaggtgagtgagccagggcggagcgcagctgcgccgggcttgggcgcctggggccgccgctccccaccgtcgttttccccaccgaggccgaggcgtcccggagtcatggccggcctgaactgcggggtctctatcgcactgctaggggttctgctgctgggtgcggcgcgcctgccgcgcggggcagaagcttttgagattgctctgccacgagaaagcaacattacagttctcataaagctggggaccccgactctgctggcaaaaccctgttacatcgtcatttctaaaagacatataaccatgttgtccatcaagtctggagaaagaatagtctttacctttagctgccagagtcctgagaatcactttgtcatagagatccagaaaaatattgactgtatgtcaggcccatgtccttttggggaggttcagcttcagccctcgacatcgttgttgcctaccctcaacagaactttcatctgggatgtcaaagctcataagagcatcggtttagagctgcagttttccatccctcgcctgaggcagatcggtccgggtgagagctgcccagacggagtcactcactccatcagcggccgaatcgatgccaccgtggtcaggatcggaaccttctgcagcaatggcactgtgtcccggatcaagatgcaagaaggagtgaaaatggccttacacctcccatggttccaccccagaaatgtctccggcttcagcattgcaaaccgctcatctataaaacgtctgtgcatcatcgagtctgtgtttgagggtgaaggctcagcaaccctgatgtctgccaactacccagaaggcttccctgaggatgagctcatgacgtggcagtttgtcgttcctgcacacctgcgggccagcgtctccttcctcaacttcaacctctccaactgtgagaggaaggaggagcgggttgaatactacatcccgggctccaccaccaaccccgaggtgttcaagctggaggacaagcagcctgggaacatggcggggaacttcaacctctctctgcaaggctgtgaccaagatgcccaaagtccagggatcctccggctgcagttccaagttttggtccaacatccacaaaatgaaagcaataaaatctacgtggttgacttgagtaatgagcgagccatgtcactcaccatcgagccacggcccgtcaaacagagccgcaagtttgtccctggctgtttcgtgtgtctagaatctcggacctgcagtagcaacctcaccctgacatctggctccaaacacaaaatctccttcctttgtgatgatctgacacgtctgtggatgaatgtggaaaaaaccataagctgcacagaccaccggtactgccaaaggaaatcctactcactccaggtgcccagtgacatcctccacctgcctgtggagctgcatgacttctcctggaagctgctggtgcccaaggacaggctcagcctggtgctggtgccagcccagaagctgcagcagcatacacacgagaagccctgcaacaccagcttcagctacctcgtggccagtgccatacccagccaggacctgtacttcggctccttctgcccgggaggctctatcaagcagatccaggtgaagcagaacatctcggtgacccttcgcacctttgcccccagcttccgacaagaggcctccaggcagggtctgacggtgtcctttataccttatttcaaagaggaaggcgttttcacggtgacccctgacacaaaaagcaaggtctacctgaggacccccaactgggaccggggcctgccatccctcacctctgtgtcctggaacatcagcgtgcccagagaccaggtggcctgcctgactttctttaaggagcggagcggcgtggtctgccagacagggcgcgcattcatgatcatccaggagcagcggacccgggctgaggagatcttcagcctggacgaggatgtgctccccaagccaagcttccaccatcacagcttctgggtcaacatctctaactgcagccccacgagcggcaagcagctagacctgctcttctcggtgacacttaccccaaggactgtggacttgactgtcatcctcatcgcagcggtgggaggtggagtcttactgctgtctgccctcgggctcatcatttgctgtgtgaaaaagaagaaaaagaagacaaacaagggccccgctgtgggtatctacaatggcaacatcaatactgagatgccgaggcagccaaaaaagtttcagaaagggcgaaaggacaatgactcccatgtgtatgcagtcatcgaggacaccatggtatatgggcatctgctacaggattccagcggctccttcctgcagccagaggtggacacctaccggccgttccagggcaccatgggggtctgtcctccctccccacccaccatatgctccagggccccaactgcaaagttggccactgaggagccacctcctcgctcccctcctgagtctgagagtgaaccgtacaccttctcccatcccaacaatggggatgtaagcagcaaggacacagacattcccttactgaacactcaggagcccatggagccagcagaataacttgatccattccagacgctttgctgagtttcataaagcagggcactgagacacccgtccgtgttcctaaccagaaatcctaaagaagaggaattatacagaaggaacagcaggaggttttcctggacaccgccaacttcacattgctcagtggactcattctaagggcaagacattgaaaatgatgaattccaatctggatacagtcatgacagctcatgtgctcctcaacttaggctgtgcggttagccagcctgtaatgagaggagagaggcctgagtcacctagcatagggttgcagcaagccctggattcagagtgttaaacagaggcttgccctcttcaggacaacagttccaattccaaggagcctacctgaggtccctactctcactggggtccccaggatgaaaacgacaatgtgcctttttattattatttatttggtggtcctgtgttatttaagagatcaaatgtataaccacctagctcttttcacctgacttagtaataactcatactaactggtttggatgcctgggttgtgacttctactgaccgctagataaacgtgtgcctgtcccccaggtggtgggaataatttacaatctgtccaaccagaaaagaatgtgtgtgtttgagcagcattgacacatatctgctttgataagagacttcctgattctctaggtcggttcgtggttatcccattgtggaaattcatcttgaatcccattgtcctatagtcctagcaataagagaaatttcctcaagtttccatgtgcggttctcctagctgcagcaatactttgacatttaaagagaaatttagagaatattctcatcctctaaaaatgtttaaatatataccaaacagtggccccctgcattagttttctgttgccactgcaacccattacttggtagcttaaaaacaacacattagcttatagtcctggggatcagaattccaaaatggatgtccctgaatgaaaatcaaggtgtcagcagagctgtgctccttctgaaggctctagggagaagccggttccttgccatttcaagcttctagaggctggctgcattcccaggctccagtggctggtcaagcttttctcacatggcatcactgtgacactggccctcccacttccctctttgacttacaaagcccaccaggaagatccaggataatctctccatctaaagatccttcatcatcctggaagagccttttgccatgcaagacaacatagccacaggtggggattaggaccaggacatctttggggtgctgttattctgcctaccacaccttcctgccactgactcccacaggagaggctacaaaatgatctggcgcacagggatgttttgtttagcttgcggactctaacacttaaaaaaaaccccagatcagaagatctggccatgctggggctcacattctcacctagcaacaactggctggagctgggcaccagctctgcctttagaaggggtgtccacttcaccaggtcaccacagcccacactacgccctatcacttcccacaatgaggctgagtgtttgtttctactgatcaatgcccctgcaggttgcatttattgtaatgaaaaagaaagactgggattaatctctaatcaggtgagtagaccatgagaccaatgtgtgctcacattaccctttttcttttttttctttttctttttctttttttttttaatgtgagacaggatctcattctgttgcctaggctggagtgcagtggcgcaatctcggctcactgcaacctctgcctcctgggctcaagcaattctcccacctcagcctcccaaatagctgggatcactggcacaaaccaccatgcccagctaattttgtattttttgtagagacagggtttcaccatgttgcccaggctggtctcaacctcctgggctcaagcaatcctcctgcctcggcctcccaaagtgctgggattacagatgtgagccaccgcatccagccccacaccctcatttataccaattacctgcccagtaactgtggacttttgcttcctcacccctgctctgatctggaaggagagggattatgttatagcttgtcagcacagtcccaagttcaatatttctgcggcaaaaacttccttcaaaaaataaatgtacttcattgtattcaatgaattcaccttggaaatgcaccgcctcaacttgttcacatggcataaatgaaaggaattttatagtctcctaaatggcgtgtactgcaagacctcttgaacactttccagaggataggatatttaagtcatgcccttggcgttgcctatggcacctttccctcactgaagagcccttatttgaattcactgtgtggagccctagccctccattctcgacattccccaacctcccagccccttccaagcaggactaggtgccctgcattccacccaaggtgggattggccttccttaggctggctacttgtcaccatcaccgacatcactgttgcctgcaaggacaccacgtggccattttccttcaactgagggctcaaaactcctggacaagttgctggctcctgagaccagtatttcctggagctgtgcctcagtgaaggggcccagcctgaggaaccctggctcttttctttaaagcccaggccccacttacataaaacatttcagggtcactggaaacagtgaagtgccatttgttgaagcctactgcatgccagcccactgctcatccacgtggtctgccatgcctacgaggaaggccagcgcatgcaggactggtctctaatgctgtggtcattgcacagaagggaaaggtctcaaggaagagtcaactgggacaagcacaagcccaccggacatggccttggtaaaggttagcagactggtgtgtgtggatctgcagtgcttcactggaaataatttattcattgcagatactttttaggtggcattttattcatttcctgtgctttaaataaacaaatgtaccaaaaaacaagtatcaagctgtttaagtgcttcggctacttgtcccctggttcagtagaggccccggtttcccagttgttgactgtgacaggctcagcatgggctcagcagatgctgtcttaatttgtggatgatacagaaagccaggctttgggatacaagttctttcctcttcatttgatgccgtgcactgtgtgaagcagatgtttttgtccggaaataaaaataatagtcttggagtctcgcca

SEQ ID NO: 288415 - DNA, 5664 bp, Homo sapiens
agggcggggctcgggccggtccgcccgcgcgcaggtgagtgagccagggcggagcgcagctgcgccgggcttgggcgcctggggccgccgctccccaccgtcgttttccccaccgaggccgaggcgtcccggagtcatggccggcctgaactgcggggtctctatcgcactgctaggggttctgctgctgggtgcggcgcgcctgccgcgcggggcagaagcttttgagattgctctgccacgagaaagcaacattacagttctcataaagctggggaccccgactctgctggcaaaaccctgttacatcgtcatttctaaaagacatataaccatgttgtccatcaagtctggagaaagaatagtctttacctttagctgccagagtcctgagaatcactttgtcatagagatccagaaaaatattgactgtatgtcaggcccatgtccttttggggaggttcagcttcagccctcgacatcgttgttgcctaccctcaacagaactttcatctgggatgtcaaagctcataagagcatcggtttagagctgcagttttccatccctcgcctgaggcagatcggtccgggtgagagctgcccagacggagtcactcactccatcagcggccgaatcgatgccaccgtggtcaggatcggaaccttctgcagcaatggcactgtgtcccggatcaagatgcaagaaggagtgaaaatggccttacacctcccatggttccaccccagaaatgtctccggcttcagcattgcaaaccgctcatctataaaacgtctgtgcatcatcgagtctgtgtttgagggtgaaggctcagcaaccctgatgtctgccaactacccagaaggcttccctgaggatgagctcatgacgtggcagtttgtcgttcctgcacacctgcgggccagcgtctccttcctcaacttcaacctctccaactgtgagaggaaggaggagcgggttgaatactacatcccgggctccaccaccaaccccgaggtgttcaagctggaggacaagcagcctgggaacatggcggggaacttcaacctctctctgcaaggctgtgaccaagatgcccaaagtccagggatcctccggctgcagttccaagttttggtccaacatccacaaaatgaaagcaataaaatctacgtggttgacttgagtaatgagcgagccatgtcactcaccatcgagccacggcccgtcaaacagagccgcaagtttgtccctggctgtttcgtgtgtctagaatctcggacctgcagtagcaacctcaccctgacatctggctccaaacacaaaatctccttcctttgtgatgatctgacacgtctgtggatgaatgtggaaaaaaccataagctgcacagaccaccggtactgccaaaggaaatcctactcactccaggtgcccagtgacatcctccacctgcctgtggagctgcatgacttctcctggaagctgctggtgcccaaggacaggctcagcctggtgctggtgccagcccagaagctgcagcagcatacacacgagaagccctgcaacaccagcttcagctacctcgtggccagtgccatacccagccaggacctgtacttcggctccttctgcccgggaggctctatcaagcagatccaggtgaagcagaacatctcggtgacccttcgcacctttgcccccagcttccgacaagaggcctccaggcagggtctgacggtgtcctttataccttatttcaaagaggaaggcgttttcacggtgacccctgacacaaaaagcaaggtctacctgaggacccccaactgggaccggggcctgccatccctcacctctgtgtcctggaacatcagcgtgcccagagaccaggtggcctgcctgactttctttaaggagcggagcggcgtggtctgccagacagggcgcgcattcatgatcatccaggagcagcggacccgggctgaggagatcttcagcctggacgaggatgtgctccccaagccaagcttccaccatcacagcttctgggtcaacatctctaactgcagccccacgagcggcaagcagctagacctgctcttctcggtgacacttaccccaaggactgtggacttgactgtcatcctcatcgcagcggtgggaggtggagtcttactgctgtctgccctcgggctcatcatttgctgtgtgaaaaagaagaaaaagaagacaaacaagggccccgctgtgggtatctacaatggcaacatcaatactgagatgccgaggcagccaaaaaagtttcagaaagggcgaaaggacaatgactcccatgtgtatgcagtcatcgaggacaccatggtatatgggcatctgctacaggattccagcggctccttcctgcagccagaggtggacacctaccggccgttccagggcaccatgggggtctgtcctccctccccacccaccatatgctccagggccccaactgcaaagttggccactgaggagccacctcctcgctcccctcctgagtctgagagtgaaccgtacaccttctcccatcccaacaatggggatgtaagcagcaaggacacagacattcccttactgaacactcaggagcccatggagccagcagaataacttgatccattccagacgctttgctgagtttcataaagcagggcactgagacacccgtccgtgttcctaaccagaaatcctaaagaagaggaattatacagaaggaacagcaggaggttttcctggacaccgccaacttcacattgctcagtggactcattctaagggcaagacattgaaaatgatgaattccaatctggatacagtcatgacagctcatgtgctcctcaacttaggctgtgcggttagccagcctgtaatgagaggagagaggcctgagtcacctagcatagggttgcagcaagccctggattcagagtgttaaacagaggcttgccctcttcaggacaacagttccaattccaaggagcctacctgaggtccctactctcactggggtccccaggatgaaaacgacaatgtgcctttttattattatttatttggtggtcctgtgttatttaagagatcaaatgtataaccacctagctcttttcacctgacttagtaataactcatactaactggtttggatgcctgggttgtgacttctactgaccgctagataaacgtgtgcctgtcccccaggtggtgggaataatttacaatctgtccaaccagaaaagaatgtgtgtgtttgagcagcattgacacatatctgctttgataagagacttcctgattctctaggtcggttcgtggttatcccattgtggaaattcatcttgaatcccattgtcctatagtcctagcaataagagaaatttcctcaagtttccatgtgcggttctcctagctgcagcaatactttgacatttaaagagaaatttagagaatattctcatcctctaaaaatgtttaaatatataccaaacagtggccccctgcattagttttctgttgccactgcaacccattacttggtagcttaaaaacaacacattagcttatagtcctggggatcagaattccaaaatggatgtccctgaatgaaaatcaaggtgtcagcagagctgtgctccttctgaaggctctagggagaagccggttccttgccatttcaagcttctagaggctggctgcattcccaggctccagtggctggtcaagcttttctcacatggcatcactgtgacactggccctcccacttccctctttgacttacaaagcccaccaggaagatccaggataatctctccatctaaagatccttcatcatcctggaagagccttttgccatgcaagacaacatagccacaggtggggattaggaccaggacatctttggggtgctgttattctgcctaccacaccttcctgccactgactcccacaggagaggctacaaaatgatctggcgcacagggatgttttgtttagcttgcggactctaacacttaaaaaaaaccccagatcagaagatctggccatgctggggctcacattctcacctagcaacaactggctggagctgggcaccagctctgcctttagaaggggtgtccacttcaccaggtcaccacagcccacactacgccctatcacttcccacaatgaggctgagtgtttgtttctactgatcaatgcccctgcaggttgcatttattgtaatgaaaaagaaagactgggattaatctctaatcaggtgagtagaccatgagaccaatgtgtgctcacattaccctttttcttttttttctttttctttttctttttttttttaatgtgagacaggatctcattctgttgcctaggctggagtgcagtggcgcaatctcggctcactgcaacctctgcctcctgggctcaagcaattctcccacctcagcctcccaaatagctgggatcactggcacaaaccaccatgcccagctaattttgtattttttgtagagacagggtttcaccatgttgcccaggctggtctcaacctcctgggctcaagcaatcctcctgcctcggcctcccaaagtgctgggattacagatgtgagccaccgcatccagccccacaccctcatttataccaattacctgcccagtaactgtggacttttgcttcctcacccctgctctgatctggaaggagagggattatgttatagcttgtcagcacagtcccaagttcaatatttctgcggcaaaaacttccttcaaaaaataaatgtacttcattgtattcaatgaattcaccttggaaatgcaccgcctcaacttgttcacatggcataaatgaaaggaattttatagtctcctaaatggcgtgtactgcaagacctcttgaacactttccagaggataggatatttaagtcatgcccttggcgttgcctatggcacctttcccttctgaaagtctggttcctgcccagtgacccttggccttgtgagccgagatgctgaccctgcataaagggccaaaggagggctgcggcttccttccctcactgaagagcccttatttgaattcactgtgtggagccctagccctccattctcgacattccccaacctcccagccccttccaagcaggactaggtgccctgcattccacccaaggtgggattggccttccttaggctggctacttgtcaccatcaccgacatcactgttgcctgcaaggacaccacgtggccattttccttcaactgagggctcaaaactcctggacaagttgctggctcctgagaccagtatttcctggagctgtgcctcagtgaaggggcccagcctgaggaaccctggctcttttctttaaagcccaggccccacttacataaaacatttcagggtcactggaaacagtgaagtgccatttgttgaagcctactgcatgccagcccactgctcatccacgtggtctgccatgcctacgaggaaggccagcgcatgcaggactggtctctaatgctgtggtcattgcacagaagggaaaggtctcaggagccaccaacttgtccaggagttttgagcactcagttgaaggaaaatggccacgtggagattcggtgtgcg

SEQ ID NO: 288416 - DNA, 399 bp, Homo sapiens
ggtgatctagaggatcccagcgctcagcaatcctaattgggcccttttaatgtttagtggtgacagagcacaaagactgaagatcaaggaagagagtgaggcattttctgaagcacttaaagaagaaactgagtttcattctactttatatcacatggtgaaggattttgcttctgaggaagcaatggagaaagtcaggagttccaactgtcagtttgtcaactctgtgtgccacatgctgctctctaccagattgctcagctactcctaacctccacttacaaactgtattgtaagtatgaagaaccaagcatggtgaaagacaggtatttctgcaacacaatgtaatgagtgaatgaatacatttcaaatcaactattaaaaattttctaatctgca

SEQ ID NO: 288417 - DNA, 502 bp, Homo sapiens
agcgggtcgtccgggcaacccgggagcgtttgtccacacaatttctgctccgactctgcggactactgcagtggagcttgactcttaatggtgagcaaggcaaatgaggcagacaggtggaggggcgaccactgattctgcttcaccagtgttaaataatgtaatcaagagccagtcatattttacagcgaagcgggtcggtttgggaaataactcataccttggggtgggtcggccctcttctcagcaatggctttccttacctggaccaggcggacaggtaggagtcccaaaccagtttctgcaaacgggagatggtcaaagctgtcacacggtatcctgatctcgaatgttgctaagcttgaaaattggtcccaacctagtaactttcagtagtgatagacgttcccactaaattttcttattgcaacttggcggaaatgttttagtacttctccagcagttaattaaaagctaatgcaatttactctgctttgaaaaa

SEQ ID NO: 288418 - DNA, 471 bp, Homo sapiens
tttgtaccctaaagttactagggatagatcaactgatgaaccaacaaccctcattgcagtatgaatttcagagtttttgatccaccctaaaggggctacgtgatgtttatcatccagccatttgaaatcctttttgaggttggtttctctctgaatgatcccctattgctcatcagtcagaaattacatagcctgggccgagcgcagtggctcacgcctggaatcccagcactttgggaggccaaggcgggcaatcacctgaggtcagcagttcgagaccagcctggccaacatggtgaagccctactaaaaatacaaaaattagccaggcgtggtggcacacacctgtaatcccagctactcaggaggctgaggcaaaagaatcgcttgaacctgggaaggggaggttgccatgagccgagatcgtaccactgcactccagcctgggcaacagagtgaaactctgtctca

SEQ ID NO: 288419 - DNA, 2365 bp, Homo sapiens
agcgggtcgtccgggcaacccgggagcgtttgtccacacaatttctgctccgactctgcggactactgcagtggagcttgactcttaatgtctggcagtaagaaaaagaaagtcaccaaagctgaacgattgaagctgctacaagaggaggaggagagacgactgaaagaggaagaggaagcccgtttgaaatatgagaaagaagaaatggaaaggcttgaaatacagcgaattgagaaagaaaaatggcatcgacttgaagcaaaagatctagaaaggagaaatgaagaacttgaagaactttatttattagagaggtgttttcctgaagcagagaaattgaaacaggaaactaaattgctttctcagtggaagcactacattcaatgtgatgggagtcctgatccttcagtagcccaagaaatgaacacgtttattagtttgtggaaagagaaaacaaatgagacttttgaggaagtgattgagaagagtaaagtagtgctaaatttaattgagaaattgaaatttattttactggaaactccaccatgtgatttgcaagataaaaatataatacagtaccaagaatcaatactacaactgcaggagctccttcatcttaaattcggtgtagccacagaaatacttctcaaacaagctagtactttggcagatctggacagtggaaatatggaaaaagtcattaaagatgaaaatgttactctgtatgtgtgggcaaacctcaagaagaatccaaggcacagaagtgttagattctctgaaacacaaattggatttgagattccaaggatattagcaacaagtgacattgctgtacgactcctgcatacccactatgatcatgtttctgcactgcaccctgtttcaacaccatcaaaagaatacacttctgcagtaactgagcttgtcaaagatgatgttaagaatgtagaaaaagcaatcagcaaggaggtcgaagaagagtccaaacaacaagaaagagggtctcacttaattcaggaggaagaaataaaagttgaggaggaacaaggtgatattgaagtgaaaatgagttctgctgaggaagaatctgaagccataaaatgtgaacgagagatgaaagtattaagtgaaactgtttcagcagcacagttgttgctggtagagaattcttctgaaaagccagatttctttgaagacaatgtggtggatttatgccagttcacaactctgggtggagtataccacttggatattttggagcttcctccacagtgtaaaccagtgaagggatggatgattgtggaaatactcaaagaaggattacagaaatacacatatcctccggaaactacagaagagtttgagacagaaaatgctttcccacctatagaggtccacttgaggttcatgagaatgtaatcttttttgaggatcctgtggttgtaaggtgggatgctgaaggtaaacattggagaactgatggcatcagcaatgtatcctacaaaccaaaagaaagacttgtaacattcagcctggacacctttggccctgttaccttgattcaagatgctcatattaacatgccgtaccagtcatgggaactaagaccacttgatgtaaataaagtacttttaactgtgactacagtatttactgagattcaaatacaaattaaggaaaacctctgcatgttatcttcaatcaaactaaaagacaagaaacacatctctattttggaaggaacctggatgactcctattcctttcattattgctttgaaagaagctggactgaatatctttcctactagacactctcatttttatgttattataaacaataaggttcctttggtagaagtgaaagcttatcgacagatggccctactaagttctgcttttgcatttggttggagcaagtggaacctactatgtaattctacaaaagtcgtatttaaggtgagggaacaccttactgaagaatgtactgagaatcctaattgggcccttttaatgtttagtggtgacagagcacaaagactgaagatcaaggaagagagtgaggcattttctgaagcacttaaagaagaaactgagtttcattctactttatatcacatggtgaaggattttgcttctgaggaagcaatggagaaagtcaggagttccaactgtcagtttgtcaactctgtgtgccacatgctgctctctaccagattgctcagctactcctaacctccacttacaaactgtattgtaagtatgaagaaccaagcatggtgaaagacaggtatttctgcaacacaatgtaatgagtgaatgaatacatttcaaatcaactattaaaaattttctaatctgca

SEQ ID NO: 288420 - DNA, 2556 bp, Homo sapiens
agcgggtcgtccgggcaacccgggagcgtttgtccacacaatttctgctccgactctgcggactactgcagtggagcttgactcttaatggtgagcaaggcaaatgaggcagacaggtggaggggcgaccactgattctgcttcaccagtgttaaataatgtaatcaagagccagtcatattttacagcgaagcgggtcggtttgggaaataactcataccttggggtgggtcggccctcttctcagcaatggctttccttacctggaccaggcggacaggtctggcagtaagaaaaagaaagtcaccaaagctgaacgattgaagctgctacaagaggaggaggagagacgactgaaagaggaagaggaagcccgtttgaaatatgagaaagaagaaatggaaaggcttgaaatacagcgaattgagaaagaaaaatggcatcgacttgaagcaaaagatctagaaaggagaaatgaagaacttgaagaactttatttattagagaggtgttttcctgaagcagagaaattgaaacaggaaactaaattgctttctcagtggaagcactacattcaatgtgatgggagtcctgatccttcagtagcccaagaaatgaacacgtttattagtttgtggaaagagaaaacaaatgagacttttgaggaagtgattgagaagagtaaagtagtgctaaatttaattgagaaattgaaatttattttactggaaactccaccatgtgatttgcaagataaaaatataatacagtaccaagaatcaatactacaactgcaggagctccttcatcttaaattcggtgtagccacagaaatacttctcaaacaagctagtactttggcagatctggacagtggaaatatggaaaaagtcattaaagatgaaaatgttactctgtatgtgtgggcaaacctcaagaagaatccaaggcacagaagtgttagattctctgaaacacaaattggatttgagattccaaggatattagcaacaagtgacattgctgtacgactcctgcatacccactatgatcatgtttctgcactgcaccctgtttcaacaccatcaaaagaatacacttctgcagtaactgagcttgtcaaagatgatgttaagaatgtagaaaaagcaatcagcaaggaggtcgaagaagagtccaaacaacaagaaagagggtctcacttaattcaggaggaagaaataaaagttgaggaggaacaaggtgatattgaagtgaaaatgagttctgctgaggaagaatctgaagccataaaatgtgaacgagagatgaaagtattaagtgaaactgtttcagcagcacagttgttgctggtagagaattcttctgaaaagccagatttctttgaagacaatgtggtggatttatgccagttcacaactctgggtggagtataccacttggatattttggagcttcctccacagtgtaaaccagtgaagggatggatgattgtggaaatactcaaagaaggattacagaaatacacatatcctccggaaactacagaagagtttgagacagaaaatgctttcccacctatagaggtccacttgaggttcatgagaatgtaatcttttttgaggatcctgtggttgtaaggtgggatgctgaaggtaaacattggagaactgatggcatcagcaatgtatcctacaaaccaaaagaaagacttgtaacattcagcctggacacctttggccctgttaccttgattcaagatgctcatattaacatgccgtaccagtcatgggaactaagaccacttgatgtaaataaagtacttttaactgtgactacagtatttactgagattcaaatacaaattaaggaaaacctctgcatgttatcttcaatcaaactaaaagacaagaaacacatctctattttggaaggaacctggatgactcctattcctttcattattgctttgaaagaagctggactgaatatctttcctactagacactctcatttttatgttattataaacaataaggttcctttggtagaagtgaaagcttatcgacagatggccctactaagttctgcttttgcatttggttggagcaagtggaacctactatgtaattctacaaaagtcgtatttaaggtgagggaacaccttactgaagaatgtactgagaatcctaattgggcccttttaatgtttagtggtgacagagcacaaagactgaagatcaaggaagagagtgaggcattttctgaagcacttaaagaagaaactgagtttcattctactttatatcacatggtgaaggattttgcttctgaggaagcaatggagaaagtcaggagttccaactgtcagtttgtcaactctgtgtgccacatgctgctctctaccagattgctcagctactcctaacctccacttacaaactgtattgtaagtatgaagaaccaagcatggtgaaagacaggtatttctgcaacacaatgtaatgagtgaatgaatacatttcaaatcaactattaaaaattttctaatctgca

SEQ ID NO: 288421 - DNA, 2539 bp, Homo sapiens
  misc_feature (219)..(219): n is a, c, g, or t
  misc_feature (338)..(338): n is a, c, g, or t
agcgggtcgtccgggcaacccgggagcgtttgtccacacaatttctgctccgactctgcggactactgcagtggagcttgactcttaatgtctggcagtaagaaaaagaaagtcaccaaagctgaacgattgaagctgctacaagaggaggaggagagacgactgaaagaggaagttactgtcttgaagaaaggagaactgacacttttctcatatctnccatgtaataaagactgtgacttctataaaagattccaccactacatcttgaaaatattaggagtaattttaagggcttaaaaatacagtgatctattcactgagaaaaaaattatttntggttctttagaggaagcccgtttgaaatatgagaaagaagaaatggaaaggcttgaaatacagcgaattgagaaagaaaaatggcatcgacttgaagcaaaagatctagaaaggagaaatgaagaacttgaagaactttatttattagagaggtgttttcctgaagcagagaaattgaaacaggaaactaaattgctttctcagtggaagcactacattcaatgtgatgggagtcctgatccttcagtagcccaagaaatgaacacgtttattagtttgtggaaagagaaaacaaatgagacttttgaggaagtgattgagaagagtaaagtagtgctaaatttaattgagaaattgaaatttattttactggaaactccaccatgtgatttgcaagataaaaatataatacagtaccaagaatcaatactacaactgcaggagctccttcatcttaaattcggtgtagccacagaaatacttctcaaacaagctagtactttggcagatctggacagtggaaatatggaaaaagtcattaaagatgaaaatgttactctgtatgtgtgggcaaacctcaagaagaatccaaggcacagaagtgttagattctctgaaacacaaattggatttgagattccaaggatattagcaacaagtgacattgctgtacgactcctgcatacccactatgatcatgtttctgcactgcaccctgtttcaacaccatcaaaagaatacacttctgcagtaactgagcttgtcaaagatgatgttaagaatgtagaaaaagcaatcagcaaggaggtcgaagaagagtccaaacaacaagaaagagggtctcacttaattcaggaggaagaaataaaagttgaggaggaacaaggtgatattgaagtgaaaatgagttctgctgaggaagaatctgaagccataaaatgtgaacgagagatgaaagtattaagtgaaactgtttcagcagcacagttgttgctggtagagaattcttctgaaaagccagatttctttgaagacaatgtggtggatttatgccagttcacaactctgggtggagtataccacttggatattttggagcttcctccacagtgtaaaccagtgaagggatggatgattgtggaaatactcaaagaaggattacagaaatacacatatcctccggaaactacagaagagtttgagacagaaaatgctttcccacctatagaggtccacttgaggttcatgagaatgtaatcttttttgaggatcctgtggttgtaaggtgggatgctgaaggtaaacattggagaactgatggcatcagcaatgtatcctacaaaccaaaagaaagacttgtaacattcagcctggacacctttggccctgttaccttgattcaagatgctcatattaacatgccgtaccagtcatgggaactaagaccacttgatgtaaataaagtacttttaactgtgactacagtatttactgagattcaaatacaaattaaggaaaacctctgcatgttatcttcaatcaaactaaaagacaagaaacacatctctattttggaaggaacctggatgactcctattcctttcattattgctttgaaagaagctggactgaatatctttcctactagacactctcatttttatgttattataaacaataaggttcctttggtagaagtgaaagcttatcgacagatggccctactaagttctgcttttgcatttggttggagcaagtggaacctactatgtaattctacaaaagtcgtatttaaggtgagggaacaccttactgaagaatgtactgagaatcctaattgggcccttttaatgtttagtggtgacagagcacaaagactgaagatcaaggaagagagtgaggcattttctgaagcacttaaagaagaaactgagtttcattctactttatatcacatggtgaaggattttgcttctgaggaagcaatggagaaagtcaggagttccaactgtcagtttgtcaactctgtgtgccacatgctgctctctaccagattgctcagctactcctaacctccacttacaaactgtattgtaagtatgaagaaccaagcatggtgaaagacaggtatttctgcaacacaatgtaatgagtgaatgaatacatttcaaatcaactattaaaaattttctaatctgca

SEQ ID NO: 288422 - DNA, 1939 bp, Homo sapiens
agcgggtcgtccgggcaacccgggagcgtttgtccacacaatttctgctccgactctgcggactactgcagtggagcttgactcttaatgtctggcagtaagaaaaagaaagtcaccaaagctgaacgattgaagctgctacaagaggaggaggagagacgactgaaagaggaagaggaagcccgtttgaaatatgagaaagaagaaatggaaaggcttgaaatacagcgaattgagaaagaaaaatggcatcgacttgaagcaaaagatctagaaaggagaaatgaagaacttgaagaactttatttattagagaggtgttttcctgaagcagagaaattgaaacaggaaactaaattgctttctcagtggaagcactacattcaatgtgatgggagtcctgatccttcagtagcccaagaaatgaacacgtttattagtttgtggaaagagaaaacaaatgagacttttgaggaagtgattgagaagagtaaagtagtgctaaatttaattgagaaattgaaatttattttactggaaactccaccatgtgatttgcaagataaaaatataatacagtaccaagaatcaatactacaactgcaggagctccttcatcttaaattcggtgtagccacagaaatacttctcaaacaagctagtactttggcagatctggacagtggaaatatggaaaaagtcattaaagatgaaaatgttactctgtatgtgtgggcaaacctcaagaagaatccaaggcacagaagtgttagattctctgaaacacaaattggatttgagattccaaggatattagcaacaagtgacattgctgtacgactcctgcatacccactatgatcatgtttctgcactgcaccctgtttcaacaccatcaaaagaatacacttctgcagtaactgagcttgtcaaagatgatgttaagaatgtagaaaaagcaatcagcaaggaggtcgaagaagagtccaaacaacaagaaagagggtctcacttaattcaggaggaagaaataaaagttgaggaggaacaaggtgatattgaagtgaaaatgagttctgctgaggaagaatctgaagccataaaatgtgaacgagagatgaaagtattaagtgaaactgtttcagcagcacagttgttgctggtagagaattcttctgaaaagccagatttctttgaagacaatgtggtggatttatgccagttcacaactctgggtggagtataccacttggatattttggagcttcctccacagtgtaaaccagtgaagggatggatgattgtggaaatactcaaagaaggattacagaaatacacatatcctccggaaactacagaagagtttgagacagaaaatgctttcccacctatagaggtccacttgaggttcatgagaatgtaatcttttttgaggatcctgtggttgtaaggtgggatgctgaaggtaaacattggagaactgatggcatcagcaatgtatcctacaaaccaaaagaaagacttgtaacattcagcctggacacctttggccctgttaccttgattcaagatgctcatattaacatgccgtaccagtcatgggaactaagaccacttgatgtaaataaagtacttttaactgtgactacagtatttactgagattcaaatacaaattaaggaaaacctctgcatgttatcttcaatcaaactaaaagacaagaaacacatctctattttggaaggaacctggatgactcctattcctttcattattgctttgaaagaagctggactgaatatctttcctactagacactctcatttttatgttattataaacaataaggcaagaatgaatctttccaaatttaatgtggcgtgcatttaaaatgttagcaattattaaatgttatataatttaatattatatacactgta

SEQ ID NO: 288423 - DNA, 537 bp, Homo sapiens
caaagcaatttttttggtgctttcatttatctttttttaatagggaaaaaatgaaactagtgtcactttcttcatcaattataaaggtaaacattggagaactgatggcatcagcaatgtatcctacaaaccaaaagaaagacttgtaacattcagcctggacacctttggccctgttaccttgattcaagatgctcatattaacatgccgtaccagtcatgggaactaagaccacttgatgtaaataaagtacttttaactgtgactacagtatttactgagattcaaatacaaattaaggtgagttactcttgtagctgttatgtactatcgtatcagaggtaaaccattttgatggaatactagtttgtcaaaagcaatcagtggctgctgatttatatattgaaatataagtgtcttataatgaccttaaaaatgtaccttgagctatatttctaaatgaaatattagttgaataattaaataggcaataacatgtaaatagcaaggctcaaacttaaatttgtaccctaaag

SEQ ID NO: 288424 - DNA, 858 bp, Homo sapiens
  misc_feature (219)..(219): n is a, c, g, or t
  misc_feature (338)..(338): n is a, c, g, or t
agcgggtcgtccgggcaacccgggagcgtttgtccacacaatttctgctccgactctgcggactactgcagtggagcttgactcttaatgtctggcagtaagaaaaagaaagtcaccaaagctgaacgattgaagctgctacaagaggaggaggagagacgactgaaagaggaagttactgtcttgaagaaaggagaactgacacttttctcatatctnccatgtaataaagactgtgacttctataaaagattccaccactacatcttgaaaatattaggagtaattttaagggcttaaaaatacagtgatctattcactgagaaaaaaattatttntggttctttagaggaagcccgtttgaaatatgagaaagaagaaatggaaaggcttgaaatacagcgaattgagaaagaaaaatggcatcgacttgaagcaaaagatctagaaaggagaaatgaagaacttgaagaactttatttattagagaggtgttttcctgaagcagagaaattgaaacaggaaactaaattgctttctcagtggaagcactacattcaatgtgatgggagtcctgatccttcagtagcccaagaaatgaacacgtttattagtttgtggaaagagaaaacaaatgagacttttgaggaagtgattgagaagagtaaagtagtgctaaatttaattgagaaattgaaatttattttactggaaactccaccatgtgatttgcaagataaaaatataatacagtaccaagaatcaatactacaactgcaggagctccttcatcttaaattcggtgtagccacagaaatacttctcaaagtaagtgtgatattttgcttatatattaag

SEQ ID NO: 288425 - DNA, 2420 bp, Homo sapiens
agcgggtcgtccgggcaacccgggagcgtttgtccacacaatttctgctccgactctgcggactactgcagtggagcttgactcttaatggtcccaaagcaaaaaaggaacactgtcatcacaaacaggcttcagtggccaaagatctggcagtaagaaaaagaaagtcaccaaagctgaacgattgaagctgctacaagaggaggaggagagacgactgaaagaggaagaggaagcccgtttgaaatatgagaaagaagaaatggaaaggcttgaaatacagcgaattgagaaagaaaaatggcatcgacttgaagcaaaagatctagaaaggagaaatgaagaacttgaagaactttatttattagagaggtgttttcctgaagcagagaaattgaaacaggaaactaaattgctttctcagtggaagcactacattcaatgtgatgggagtcctgatccttcagtagcccaagaaatgaacacgtttattagtttgtggaaagagaaaacaaatgagacttttgaggaagtgattgagaagagtaaagtagtgctaaatttaattgagaaattgaaatttattttactggaaactccaccatgtgatttgcaagataaaaatataatacagtaccaagaatcaatactacaactgcaggagctccttcatcttaaattcggtgtagccacagaaatacttctcaaacaagctagtactttggcagatctggacagtggaaatatggaaaaagtcattaaagatgaaaatgttactctgtatgtgtgggcaaacctcaagaagaatccaaggcacagaagtgttagattctctgaaacacaaattggatttgagattccaaggatattagcaacaagtgacattgctgtacgactcctgcatacccactatgatcatgtttctgcactgcaccctgtttcaacaccatcaaaagaatacacttctgcagtaactgagcttgtcaaagatgatgttaagaatgtagaaaaagcaatcagcaaggaggtcgaagaagagtccaaacaacaagaaagagggtctcacttaattcaggaggaagaaataaaagttgaggaggaacaaggtgatattgaagtgaaaatgagttctgctgaggaagaatctgaagccataaaatgtgaacgagagatgaaagtattaagtgaaactgtttcagcagcacagttgttgctggtagagaattcttctgaaaagccagatttctttgaagacaatgtggtggatttatgccagttcacaactctgggtggagtataccacttggatattttggagcttcctccacagtgtaaaccagtgaagggatggatgattgtggaaatactcaaagaaggattacagaaatacacatatcctccggaaactacagaagagtttgagacagaaaatgctttcccacctatagaggtccacttgaggttcatgagaatgtaatcttttttgaggatcctgtggttgtaaggtgggatgctgaaggtaaacattggagaactgatggcatcagcaatgtatcctacaaaccaaaagaaagacttgtaacattcagcctggacacctttggccctgttaccttgattcaagatgctcatattaacatgccgtaccagtcatgggaactaagaccacttgatgtaaataaagtacttttaactgtgactacagtatttactgagattcaaatacaaattaaggaaaacctctgcatgttatcttcaatcaaactaaaagacaagaaacacatctctattttggaaggaacctggatgactcctattcctttcattattgctttgaaagaagctggactgaatatctttcctactagacactctcatttttatgttattataaacaataaggttcctttggtagaagtgaaagcttatcgacagatggccctactaagttctgcttttgcatttggttggagcaagtggaacctactatgtaattctacaaaagtcgtatttaaggtgagggaacaccttactgaagaatgtactgagaatcctaattgggcccttttaatgtttagtggtgacagagcacaaagactgaagatcaaggaagagagtgaggcattttctgaagcacttaaagaagaaactgagtttcattctactttatatcacatggtgaaggattttgcttctgaggaagcaatggagaaagtcaggagttccaactgtcagtttgtcaactctgtgtgccacatgctgctctctaccagattgctcagctactcctaacctccacttacaaactgtattgtaagtatgaagaaccaagcatggtgaaagacaggtatttctgcaacacaatgtaatgagtgaatgaatacatttcaaatcaactattaaaaattttctaatctgca

SEQ ID NO: 288426 - DNA, 2462 bp, Homo sapiens
agcgggtcgtccgggcaacccgggagcgtttgtccacacaatttctgctccgactctgcggactactgcagtggagcttgactcttaatggtgagcaaggcaaatgaggcagacaggtggaggggcgaccactgattctgcttcaccagtgttaaataatgtaatcaagagccagtcatattttacagcgaagcgggtcggtttgggaaataactcataccttggggtgggtcggccctcttctcagcaatggctttccttacctggaccaggcggacaggtctggcagtaagaaaaagaaagtcaccaaagctgaacgattgaagctgctacaagaggaggaggagagacgactgaaagaggagatctagaaaggagaaatgaagaacttgaagaactttatttattagagaggtgttttcctgaagcagagaaattgaaacaggaaactaaattgctttctcagtggaagcactacattcaatgtgatgggagtcctgatccttcagtagcccaagaaatgaacacgtttattagtttgtggaaagagaaaacaaatgagacttttgaggaagtgattgagaagagtaaagtagtgctaaatttaattgagaaattgaaatttattttactggaaactccaccatgtgatttgcaagataaaaatataatacagtaccaagaatcaatactacaactgcaggagctccttcatcttaaattcggtgtagccacagaaatacttctcaaacaagctagtactttggcagatctggacagtggaaatatggaaaaagtcattaaagatgaaaatgttactctgtatgtgtgggcaaacctcaagaagaatccaaggcacagaagtgttagattctctgaaacacaaattggatttgagattccaaggatattagcaacaagtgacattgctgtacgactcctgcatacccactatgatcatgtttctgcactgcaccctgtttcaacaccatcaaaagaatacacttctgcagtaactgagcttgtcaaagatgatgttaagaatgtagaaaaagcaatcagcaaggaggtcgaagaagagtccaaacaacaagaaagagggtctcacttaattcaggaggaagaaataaaagttgaggaggaacaaggtgatattgaagtgaaaatgagttctgctgaggaagaatctgaagccataaaatgtgaacgagagatgaaagtattaagtgaaactgtttcagcagcacagttgttgctggtagagaattcttctgaaaagccagatttctttgaagacaatgtggtggatttatgccagttcacaactctgggtggagtataccacttggatattttggagcttcctccacagtgtaaaccagtgaagggatggatgattgtggaaatactcaaagaaggattacagaaatacacatatcctccggaaactacagaagagtttgagacagaaaatgctttcccacctatagaggtccacttgaggttcatgagaatgtaatcttttttgaggatcctgtggttgtaaggtgggatgctgaaggtaaacattggagaactgatggcatcagcaatgtatcctacaaaccaaaagaaagacttgtaacattcagcctggacacctttggccctgttaccttgattcaagatgctcatattaacatgccgtaccagtcatgggaactaagaccacttgatgtaaataaagtacttttaactgtgactacagtatttactgagattcaaatacaaattaaggaaaacctctgcatgttatcttcaatcaaactaaaagacaagaaacacatctctattttggaaggaacctggatgactcctattcctttcattattgctttgaaagaagctggactgaatatctttcctactagacactctcatttttatgttattataaacaataaggttcctttggtagaagtgaaagcttatcgacagatggccctactaagttctgcttttgcatttggttggagcaagtggaacctactatgtaattctacaaaagtcgtatttaaggtgagggaacaccttactgaagaatgtactgagaatcctaattgggcccttttaatgtttagtggtgacagagcacaaagactgaagatcaaggaagagagtgaggcattttctgaagcacttaaagaagaaactgagtttcattctactttatatcacatggtgaaggattttgcttctgaggaagcaatggagaaagtcaggagttccaactgtcagtttgtcaactctgtgtgccacatgctgctctctaccagattgctcagctactcctaacctccacttacaaactgtattgtaagtatgaagaaccaagcatggtgaaagacaggtatttctgcaacacaatgtaatgagtgaatgaatacatttcaaatcaactattaaaaattttctaatctgca

SEQ ID NO: 288427 - DNA, 1746 bp, Homo sapiens
agcgggtcgtccgggcaacccgggagcgtttgtccacacaatttctgctccgactctgcggactactgcagtggagcttgactcttaatggtgagcaaggcaaatgaggcagacaggtggaggggcgaccactgattctgcttcaccagtgttaaataatgtaatcaagagccagtcatattttacagcgaagcgggtcggtttgggaaataactcataccttggggtgggtcggccctcttctcagcaatggctttccttacctggaccaggcggacaggtctggcagtaagaaaaagaaagtcaccaaagctgaacgattgaagctgctacaagaggaggaggagagacgactgaaagaggaagaggaagcccgtttgaaatatgagaaagaagaaatggaaaggcttgaaatacagcgaattgagaaagaaaaatggcatcgacttgaagcaaaagatctagaaaggagaaatgaagaacttgaagaactttatttattagagaggtgttttcctgaagcagagaaattgaaacaggaaactaaattgctttctcagtggaagcactacattcaatgtgatgggagtcctgatccttcagtagcccaagaaatgaacacgtttattagtttgtggaaagagaaaacaaatgagacttttgaggaagtgattgagaagagtaaagtagtgctaaatttaattgagaaattgaaatttattttactggaaactccaccatgtgatttgcaagataaaaatataatacagtaccaagaatcaatactacaactgcaggagctccttcatcttaaattcggtgtagccacagaaatacttctcaaagtaaacattggagaactgatggcatcagcaatgtatcctacaaaccaaaagaaagacttgtaacattcagcctggacacctttggccctgttaccttgattcaagatgctcatattaacatgccgtaccagtcatgggaactaagaccacttgatgtaaataaagtacttttaactgtgactacagtatttactgagattcaaatacaaattaaggaaaacctctgcatgttatcttcaatcaaactaaaagacaagaaacacatctctattttggaaggaacctggatgactcctattcctttcattattgctttgaaagaagctggactgaatatctttcctactagacactctcatttttatgttattataaacaataaggttcctttggtagaagtgaaagcttatcgacagatggccctactaagttctgcttttgcatttggttggagcaagtggaacctactatgtaattctacaaaagtcgtatttaaggtgagggaacaccttactgaagaatgtactgagaatcctaattgggcccttttaatgtttagtggtgacagagcacaaagactgaagatcaaggaagagagtgaggcattttctgaagcacttaaagaagaaactgagtttcattctactttatatcacatggtgaaggattttgcttctgaggaagcaatggagaaagtcaggagttccaactgtcagtttgtcaactctgtgtgccacatgctgctctctaccagattgctcagctactcctaacctccacttacaaactgtattgtaagtatgaagaaccaagcatggtgaaagacaggtatttctgcaacacaatgtaatgagtgaatgaatacatttcaaatcaactattaaaaattttctaatctgca

SEQ ID NO: 288428 - DNA, 765 bp, Homo sapiens
tctccagcttctgagaactgtcaatgatggaaacgcttcaccaccaagggctaatactcgaagagaagtagtggctgacaaaacagttgacttgataagctgagatccaaatcttctaagcaatgttggtgttgcctgtagatacattaaaaataatttatttattttccttcacttctttaaaaaggtaagcactgtagttattatttcaaagttaacatttggagcccacatggaaatgaaggctgtgtttatcaaatgggaaatcccatttggaaaactactggtgcaacattatcttcttgttttttttttttttttttttttggttttgtttgtttgttttttgagacagggtctcactctgttgatcaggctgcagtgcaatagcatgaccatggctcactgcagcctcaacctcccaggcccaagtcatcatcccacctcagcctcctgaacagcttgggactacaggcacgtaccaccacacctagctaatttttaaaattttttgtacaaatggggcctgtgttgcctaggctggtcttggactcctgggctcaagcaatcctcccactttggcctcccaaagctctaggattagcagcatgagccaccatgcctggcccaacattatcttcctaatgtgggtatcacttatgctttagaaaaaaactcaagcaaaaatattacttatatttcatcatactgattacacaaaaaggtttaggataaaaaggacaaaatctataaaatcaatttacc

SEQ ID NO: 288429 - DNA, 876 bp, Homo sapiens
tctccagcttctgagaactgtcaatgatggaaacgcttcaccaccaagggctaatactcgaagagaagtagtggctgacaaaacagttgacttgataagctgagatccaaatcttctaagcaatgttggtgttgcctgtagatacattaaaaataatttatttattttccttcacttctttaaaaagatgccaaaaggaaaggccaagggaaagaaggtggctctggcccctgctgttgtgaagaagcaggaggacaagaaagtggtgaatcccctgtttgagaaaaggcctaagaattttggcactgagcaggacatccagcccaaaagagacctcaccagctttgtgaaatagccctgctctatcaggttgcagcggcagagagccatccctcaataagcggctgaaagtgcctcctgcgattaaccagttcacccaggccctggaccgccaaacagctactcagctgcttaagctggcccacaagtacagaccagagacaaagcaagagaagaagcagaggctgttgacctgggctgagaagaaagctgctggcaaaggggatgtccccagtaagagaccacctgtccttcgagcaggagttaacaccatcaacaccttggtggagaacaaagaaagctcagctggtggtgactgcacacgtggatcccatcgagttggttgtcttcttgcctgccctgtgtcataaaatgggggtcccttattgcattatcaaggggaagggaagactgggatgtctagtccacaggaagactaagctagtggaagctattaggaccaattacaatgacagatacgatgagatccaccgtcactggggcggcaatgtcctggctcccaagtctgtggctcgc

SEQ ID NO: 288430 - DNA, 518 bp, Homo sapiens
tagtagaggcagggtttctccatgttggtcaggctggtctcgaactcctgacctcaggtgatccacccacctcggcctcccaaagtgttcggattacaggtgtgagtcaccatgcttggccatgccggttgtttctgctgcttgctgtgtagaccgctgtgatgaccatcttcttattgaccctcctttgtctctggagccccgccacctgccttctacctggagccttccttccaggtccttcttcaacatcagctccaggatctgcaagatctttggatatggccgctgcagaaggaaggagaaccacttcctggagaagcaggagtgagccaggatctgccacacaagagagccgggaacccagggcatgggttaaggcgaggagcaggtccggagggaagatctgaggcaaagagagagcctgtcacctgtgctgccttgagatgctgacatctgaggatgccccagacagggcctgtggctgctttctgaaatagtgcagcaccttctctgct

SEQ ID NO: 288431 - DNA, 607 bp, Homo sapiens
attctttttctttctttttgaggtagagtctcgctctgtcacccaggctggagtgcactggtgagatttgggctcactggaacttccacctcccgggttcaagcgattctcgtgcctcagcctcccgagtagctgggattacaggcgtgagccaccgcgcctggcagtatcagattctttttaacaactgcctcctgctctgtcgcttggctgcatacaaatgtttttgggtgtttggattgtctctgattcttcgctcttagcaggcaagtcaacagtaaacatcactgcgcaggtgcctctgcagtaggttccctccaagtgggatgggcagggcagggtgagtgtgcgcttaattgacaggcttttacctctgaaaaagctgtgactggtggcattccccctgcggtgtgtgagggtgactgtcccccacagtgtcacaacactggctgtgaacattctttacaattttgccagtccagtgggttaaaaagaacaaaacaccatagaggtgaattctaactgaggagcttgaggatggccttgggagctgagacttgaagcataatggtggttaataaaagggagggggtcctttacgaaacag

SEQ ID NO: 288432 - DNA, 1998 bp, Homo sapiens
gggtcggcggccgcaggccggaggcgcgtcgggctggagccggtcacgatgccccgaaggaagcaaagccacccgcagcccgtgaaatgcgagggggtcaaagtggatactgaagactccctcgacgaaggacccggggccctggtattggagagtgatttgctactaggccaggatctggagtttgaggaggaagaggaagaggaggaaggcgacggcaacagtgaccagctcatgggcttcgagagagactcggaaggagactctctgggggccaggcctgggcttccctatgggctgagcgacgatgagtctgggggcggccgggcactaagtgcggagagtgaagttgaggagccagccaggggtccaggggaggccaggggtgagaggccaggcccagcctgccagctgtgtggggggccgacaggtgaggggccgtgttgtggggcaggagggccgggtggggggcccctgctgcccccacggctactgtactcatgccgcctctgcaccttcgtgtcccactactcgagccacctgaagcggcacatgcagacacacagcggagagaagccgttccgctgtggccgctgcccctacgcctcagcccagctcgtcaacctgacacgacatacccgcacccacactggcgagaagccctaccgctgtccccactgcccctttgcctgcagcagcctgggcaacctgaggcggcatcagcgtacccacgcagggccccccactcctccctgcccgacctgtggcttccgctgctgtactccacgaccagcccggcctcccagtcccacagagcaggagggggcggtgccccggcgacctgaagatgctctgctccttccagatttgagcctccatgtgccaccaggtggtgccagtttcctgccagactgtgggcagctgcggggtgaaggggagggcctctgcgggactggatcagaaccactgccagagctgctattcccttggacctgccggggctgtggacaagagctggaggagggtgagggtagtcggctgggagctgccatgtgtgggcgctgcatgcgaggagaggctggagggggtgccagtggggggccccagggccccagtgacaaaggctttgcctgtagcctctgcccctttgccactcactatcccaaccacctggcccggcacatgaagacacacagtggtgagaagcccttccgctgcgcccgctgtccttatgcctctgctcatctggataacctgaaacggcaccagcgcgtccatacaggagagaagccctacaagtgccccctctgcccttatgcctgtggcaatctggccaacctcaagcgtcatggtcgcatccactctggtgacaaaccttttcggtgtagcctttgcaactacagctgcaaccagagcatgaacctcaaacgtcacatgctgcggcacacaggcgagaagcccttccgctgtgccacctgcgcctataccacgggccactgggacaactacaagcgccaccagaaggtgcatggccacggtggggcaggagggcctggtctctctgcctctgagggctgggccccacctcatagcccaccctctgttttgagctctcggggcccaccagccctggggactgctggcagccgggctgtccacacagactcatcctgaactaggtccttcttccccatgttttatacagacggaccagaagccacctttttctcccccgctggccaggggctccacacagactaacgtaggcactataaggaccagcccaaccccatgggcgggggggcccatatggaccaggggaccttgccttgactgaggcacttcacgagctcagtgagaagggccctgtattcacctccactgcccccaggggctgtggacaaaccggctgggggactgcccagcctcccacctgtttatttaacttatttcagtgctttataataaaggaaacactaacaaagccaaaaatatgct

SEQ ID NO: 288433 - DNA, 2110 bp, Homo sapiens
tagagcttagaaaaaggtcttgggggctctctccctttcgtatttttactttcttgtctcaagaattaatttcattatggattcatttcagtctgtgatccactgtgagcccttgatccttgaccattgagggaaactagatacaggtcaattctaccatcactagattagtccagtgtaagaggtagacaattcatgttgaattttctggaattactgcaggggagaccttgattcctaggagggaactaaagggatcatcaaagctaagggtggagccaagcaagtggggagaccataagtgaaaaggggagagtttggagcctgatcctaccctatgctgatgtctcttcttatgtctatttcaccaggagactctctgggggccaggcctgggcttccctatgggctgagcgacgatgagtctgggggcggccgggcactaagtgcggagagtgaagttgaggagccagccaggggtccaggggaggccaggggtgagaggccaggcccagcctgccagctgtgtggggggccgacaggtgaggggccgtgttgtggggcaggagggccgggtggggggcccctgctgcccccacggctactgtactcatgccgcctctgcaccttcgtgtcccactactcgagccacctgaagcggcacatgcagacacacagcggagagaagccgttccgctgtggccgctgcccctacgcctcagcccagctcgtcaacctgacacgacatacccgcacccacactggcgagaagccctaccgctgtccccactgcccctttgcctgcagcagcctgggcaacctgaggcggcatcagcgtacccacgcagggccccccactcctccctgcccgacctgtggcttccgctgctgtactccacgaccagcccggcctcccagtcccacagagcaggagggggcggtgccccggcgacctgaagatgctctgctccttccagatttgagcctccatgtgccaccaggtggtgccagtttcctgccagactgtgggcagctgcggggtgaaggggagggcctctgcgggactggatcagaaccactgccagagctgctattcccttggacctgccggggctgtggacaagagctggaggagggtgagggtagtcggctgggagctgccatgtgtgggcgctgcatgcgaggagaggctggagggggtgccagtggggggccccagggccccagtgacaaaggctttgcctgtagcctctgcccctttgccactcactatcccaaccacctggcccggcacatgaagacacacagtggtgagaagcccttccgctgcgcccgctgtccttatgcctctgctcatctggataacctgaaacggcaccagcgcgtccatacaggagagaagccctacaagtgccccctctgcccttatgcctgtggcaatctggccaacctcaagcgtcatggtcgcatccactctggtgacaaaccttttcggtgtagcctttgcaactacagctgcaaccagagcatgaacctcaaacgtcacatgctgcggcacacaggcgagaagcccttccgctgtgccacctgcgcctataccacgggccactgggacaactacaagcgccaccagaaggtgcatggccacggtggggcaggagggcctggtctctctgcctctgagggctgggccccacctcatagcccaccctctgttttgagctctcggggcccaccagccctggggactgctggcagccgggctgtccacacagactcatcctgaactaggtccttcttccccatgttttatacagacggaccagaagccacctttttctcccccgctggccaggggctccacacagactaacgtaggcactataaggaccagcccaaccccatgggcgggggggcccatatggaccaggggaccttgccttgactgaggcacttcacgagctcagtgagaagggccctgtattcacctccactgcccccaggggctgtggacaaaccggctgggggactgcccagcctcccacctgtttatttaacttatttcagtgctttataataaaggaaacactaacaaagccaaaaatatgct

SEQ ID NO: 288434 - DNA, 1745 bp, Homo sapiens
gggtcggcggccgcaggccggaggcgcgtcgggctggagccggtcacgatgccccgaaggaagcaaagccacccgcagcccgtgaaatgcgagggggtcaaagtggatactgaagactccctcgacgaaggacccggggccctggtattggagagtgatttgctactaggccaggatctggagtttgaggaggaagaggaagaggaggaaggcgacggcaacagtgaccagctcatgggcttcgagagagactcggaaggagactctctgggggccaggcctgggcttccctatgggctgagcgacgatgagtctgggggcggccgggcactaagtgcggagagtgaagttgaggagccagccaggggtccaggggaggccaggggtgagaggccaggcccagcctgccagctgtgtggggggccgacaggtgtgcctgcagcagcctgggcaacctgaggcggcatcagcgtacccacgcagggccccccactcctccctgcccgacctgtggcttccgctgctgtactccacgaccagcccggcctcccagtcccacagagcaggagggggcggtgccccggcgacctgaagatgctctgctccttccagatttgagcctccatgtgccaccaggtggtgccagtttcctgccagactgtgggcagctgcggggtgaaggggagggcctctgcgggactggatcagaaccactgccagagctgctattcccttggacctgccggggctgtggacaagagctggaggagggtgagggtagtcggctgggagctgccatgtgtgggcgctgcatgcgaggagaggctggagggggtgccagtggggggccccagggccccagtgacaaaggctttgcctgtagcctctgcccctttgccactcactatcccaaccacctggcccggcacatgaagacacacagtggtgagaagcccttccgctgcgcccgctgtccttatgcctctgctcatctggataacctgaaacggcaccagcgcgtccatacaggagagaagccctacaagtgccccctctgcccttatgcctgtggcaatctggccaacctcaagcgtcatggtcgcatccactctggtgacaaaccttttcggtgtagcctttgcaactacagctgcaaccagagcatgaacctcaaacgtcacatgctgcggcacacaggcgagaagcccttccgctgtgccacctgcgcctataccacgggccactgggacaactacaagcgccaccagaaggtgcatggccacggtggggcaggagggcctggtctctctgcctctgagggctgggccccacctcatagcccaccctctgttttgagctctcggggcccaccagccctggggactgctggcagccgggctgtccacacagactcatcctgaactaggtccttcttccccatgttttatacagacggaccagaagccacctttttctcccccgctggccaggggctccacacagactaacgtaggcactataaggaccagcccaaccccatgggcgggggggcccatatggaccaggggaccttgccttgactgaggcacttcacgagctcagtgagaagggccctgtattcacctccactgcccccaggggctgtggacaaaccggctgggggactgcccagcctcccacctgtttatttaacttatttcagtgctttataataaaggaaacactaacaaagccaaaaatatgct

SEQ ID NO: 288435 - DNA, 1557 bp, Homo sapiens
gggtcggcggccgcaggccggaggcgcgtcgggctggagccggtcacgatgccccgaaggaagcaaagccacccgcagcccgtgaaatgcgagggggtcaaagtggatactgaagactccctcgacgaaggacccggggccctggtattggagagtgatttgctactaggccagctcgtcaacctgacacgacatacccgcacccacactggcgagaagccctaccgctgtccccactgcccctttgcctgcagcagcctgggcaacctgaggcggcatcagcgtacccacgcagggccccccactcctccctgcccgacctgtggcttccgctgctgtactccacgaccagcccggcctcccagtcccacagagcaggagggggcggtgccccggcgacctgaagatgctctgctccttccagatttgagcctccatgtgccaccaggtggtgccagtttcctgccagactgtgggcagctgcggggtgaaggggagggcctctgcgggactggatcagaaccactgccagagctgctattcccttggacctgccggggctgtggacaagagctggaggagggtgagggtagtcggctgggagctgccatgtgtgggcgctgcatgcgaggagaggctggagggggtgccagtggggggccccagggccccagtgacaaaggctttgcctgtagcctctgcccctttgccactcactatcccaaccacctggcccggcacatgaagacacacagtggtgagaagcccttccgctgcgcccgctgtccttatgcctctgctcatctggataacctgaaacggcaccagcgcgtccatacaggagagaagccctacaagtgccccctctgcccttatgcctgtggcaatctggccaacctcaagcgtcatggtcgcatccactctggtgacaaaccttttcggtgtagcctttgcaactacagctgcaaccagagcatgaacctcaaacgtcacatgctgcggcacacaggcgagaagcccttccgctgtgccacctgcgcctataccacgggccactgggacaactacaagcgccaccagaaggtgcatggccacggtggggcaggagggcctggtctctctgcctctgagggctgggccccacctcatagcccaccctctgttttgagctctcggggcccaccagccctggggactgctggcagccgggctgtccacacagactcatcctgaactaggtccttcttccccatgttttatacagacggaccagaagccacctttttctcccccgctggccaggggctccacacagactaacgtaggcactataaggaccagcccaaccccatgggcgggggggcccatatggaccaggggaccttgccttgactgaggcacttcacgagctcagtgagaagggccctgtattcacctccactgcccccaggggctgtggacaaaccggctgggggactgcccagcctcccacctgtttatttaacttatttcagtgctttataataaaggaaacactaacaaagccaaaaatatgct

SEQ ID NO: 288436 - DNA, 1412 bp, Homo sapiens
  misc_feature (78)..(78): n is a, c, g, or t
cccttcctctcagggcccgcggcgcccccatgcagcggccggccctgggcagcccccggcctggcccggcgtagggcnagcggccattcatggagccccctgcctgcagcagcctgggcaacctgaggcggcatcagcgtacccacgcagggccccccactcctccctgcccgacctgtggcttccgctgctgtactccacgaccagcccggcctcccagtcccacagagcaggagggggcggtgccccggcgacctgaagatgctctgctccttccagatttgagcctccatgtgccaccaggtggtgccagtttcctgccagactgtgggcagctgcggggtgaaggggagggcctctgcgggactggatcagaaccactgccagagctgctattcccttggacctgccggggctgtggacaagagctggaggagggtgagggtagtcggctgggagctgccatgtgtgggcgctgcatgcgaggagaggctggagggggtgccagtggggggccccagggccccagtgacaaaggctttgcctgtagcctctgcccctttgccactcactatcccaaccacctggcccggcacatgaagacacacagtggtgagaagcccttccgctgcgcccgctgtccttatgcctctgctcatctggataacctgaaacggcaccagcgcgtccatacaggagagaagccctacaagtgccccctctgcccttatgcctgtggcaatctggccaacctcaagcgtcatggtcgcatccactctggtgacaaaccttttcggtgtagcctttgcaactacagctgcaaccagagcatgaacctcaaacgtcacatgctgcggcacacaggcgagaagcccttccgctgtgccacctgcgcctataccacgggccactgggacaactacaagcgccaccagaaggtgcatggccacggtggggcaggagggcctggtctctctgcctctgagggctgggccccacctcatagcccaccctctgttttgagctctcggggcccaccagccctggggactgctggcagccgggctgtccacacagactcatcctgaactaggtccttcttccccatgttttatacagacggaccagaagccacctttttctcccccgctggccaggggctccacacagactaacgtaggcactataaggaccagcccaaccccatgggcgggggggcccatatggaccaggggaccttgccttgactgaggcacttcacgagctcagtgagaagggccctgtattcacctccactgcccccaggggctgtggacaaaccggctgggggactgcccagcctcccacctgtttatttaacttatttcagtgctttataataaaggaaacactaacaaagccaaaaatatgct

SEQ ID NO: 288437 - DNA, 1834 bp, Homo sapiens
gggtcggcggccgcaggccggaggcgcgtcgggctggagccggtcacgatgccccgaaggaagcaaagccacccgcagcccgtgaaatgcgagggggtcaaagtggatactgaagactccctcgacgaaggacccggggccctggtattggagagtgatttgctactaggccaggatctggagtttgaggaggaagaggaagaggaggaaggcgacggcaacagtgaccagctcatgggcttcgagagagactcggaaggagactctctgggggccaggcctgggcttccctatgggctgagcgacgatgagtctgggggcggccgggcactaagtgcggagagtgaagttgaggagccagccaggggtccaggggaggccaggggtgagaggccaggcccagcctgccagctgtgtggggggccgacaggtgaggggccgtgttgtggggcaggagggccgggtggggggcccctgctgcccccacggctactgtactcatgccgcctctgcaccttcgtgtcccactactcgagccacctgaagcggcacatgcagacacacagcggagagaagccgttccgctgtggccgctgcccctacgcctcagcccagctcgtcaacctgacacgacatacccgcacccacactggcgagaagccctaccgctgtccccactgcccctttgcctgcagcagcctgggcaacctgaggcggcatcagcgtacccacgcagggccccccactcctccctgcccgacctgtggcttccgctgctgtactccacgaccagcccggcctcccagtcccacagagcaggagggggcggtgccccggcgacctgaagatgctctgctccttccagatttgagcctccatgtgccaccaggtggtgccagtttcctgccagactgtgggcagctgcggggtgaaggggagggcctctgcgggactggatcagaaccactgccagagctgctattcccttggacctgccggggctgtggacaagagctggaggaggacacacagtggtgagaagcccttccgctgcgcccgctgtccttatgcctctgctcatctggataacctgaaacggcaccagcgcgtccatacaggagagaagccctacaagtgccccctctgcccttatgcctgtggcaatctggccaacctcaagcgtcatggtcgcatccactctggtgacaaaccttttcggtgtagcctttgcaactacagctgcaaccagagcatgaacctcaaacgtcacatgctgcggcacacaggcgagaagcccttccgctgtgccacctgcgcctataccacgggccactgggacaactacaagcgccaccagaaggtgcatggccacggtggggcaggagggcctggtctctctgcctctgagggctgggccccacctcatagcccaccctctgttttgagctctcggggcccaccagccctggggactgctggcagccgggctgtccacacagactcatcctgaactaggtccttcttccccatgttttatacagacggaccagaagccacctttttctcccccgctggccaggggctccacacagactaacgtaggcactataaggaccagcccaaccccatgggcgggggggcccatatggaccaggggaccttgccttgactgaggcacttcacgagctcagtgagaagggccctgtattcacctccactgcccccaggggctgtggacaaaccggctgggggactgcccagcctcccacctgtttatttaacttatttcagtgctttataataaaggaaacactaacaaagccaaaaatatgct

SEQ ID NO: 288438 - DNA, 1553 bp, Homo sapiens
cggaagcggaagcgagtacggagtggatactgaagactccctcgacgaaggacccggggccctggtattggagagtgatttgctactaggccaggatctggagtttgaggaggaagaggaagaggaggaaggcgacggcaacagtgaccagctcatgggcttcgagagagactcggaaggagactctctgggggccaggcctgggcttccctatgggctgagcgacgatgagtctgggggcggccgggcactaagtgcggagagtgaagttgaggagccagccaggggtccaggggaggccaggggtgagaggccaggcccagcctgccagctgtgtggggggccgacaggtgtgcctgcagcagcctgggcaacctgaggcggcatcagcgtacccacgcagggccccccactcctccctgcccgacctgtggcttccgctgctgtactccacgaccagcccggcctcccagtcccacagagcaggagggggcggtgccccggcgacctgaagatgctctgctccttccagatttgagcctccatgtgccaccaggtggtgccagtttcctgccagactgtgggcagctgcggggtgaaggggagggcctctgcgggactggatcagaaccactgccagagctgctattcccttggacctgccggggctgtggacaagagctggaggaggcctctgcccctttgccactcactatcccaaccacctggcccggcacatgaagacacacagtggtgagaagcccttccgctgcgcccgctgtccttatgcctctgctcatctggataacctgaaacggcaccagcgcgtccatacaggagagaagccctacaagtgccccctctgcccttatgcctgtggcaatctggccaacctcaagcgtcatggtcgcatccactctggtgacaaaccttttcggtgtagcctttgcaactacagctgcaaccagagcatgaacctcaaacgtcacatgctgcggcacacaggcgagaagcccttccgctgtgccacctgcgcctataccacgggccactgggacaactacaagcgccaccagaaggtgcatggccacggtggggcaggagggcctggtctctctgcctctgagggctgggccccacctcatagcccaccctctgttttgagctctcggggcccaccagccctggggactgctggcagccgggctgtccacacagactcatcctgaactaggtccttcttccccatgttttatacagacggaccagaagccacctttttctcccccgctggccaggggctccacacagactaacgtaggcactataaggaccagcccaaccccatgggcgggggggcccatatggaccaggggaccttgccttgactgaggcacttcacgagctcagtgagaagggccctgtattcacctccactgcccccaggggctgtggacaaaccggctgggggactgcccagcctcccacctgtttatttaacttatttcagtgctttataataaaggaaacactaacaaagccaaaaatatgct

SEQ ID NO: 288439 - DNA, 1810 bp, Homo sapiens
gggtcggcggccgcaggccggaggcgcgtcgggctggagccggtcacgatgccccgaaggaagcaaagccacccgcagcccgtgaaatgcgagggggtcaaagtggatactgaagactccctcgacgaaggacccggggccctggtattggagagtgatttgctactaggccaggatctggagtttgaggaggaagaggaagaggaggaaggcgacggcaacagtgaccagctcatgggcttcgagagagactcggaaggagactctctgggggccaggcctgggcttccctatgggctgagcgacgatgagtctgggggcggccgggcactaagtgcggagagtgaagttgaggagccagccaggggtccaggggaggccaggggtgagaggccaggcccagcctgccagctgtgtggggggccgacaggtgaggggccgtgttgtggggcaggagggccgggtggggggcccctgctgcccccacggctactgtactcatgccgcctctgcaccttcgtgtcccactactcgagccacctgaagcggcacatgcagacacacagcggagagaagccgttccgctgtggccgctgcccctacgcctcagcccagctcgtcaacctgacacgacatacccgcacccacactggcgagaagccctaccgctgtccccactgcccctttgcctgcagcagcctgggcaacctgaggcggcatcagcgtacccacgcagggccccccactcctccctgcccgacctgtggcttccgctgctgtactccacgaccagcccggcctcccagtcccacagagcaggagggggcggtgccccggcgacctgaagatgctctgctccttccagatttgagcctccatgtgccaccaggtggtgccagtttcctgccagactgtgggcagctgcggggtgaaggggagggcctctgcgggactggatcagaaccactgccagagctgctattcccttggacctgccggggctgtggacaagagctggaggagggtgagggtagtcggctgggagctgccatgtgtgggcgctgcatgcgaggagaggctggagggggtgccagtggggggccccagggccccagtgacaaaggctttgcctgtagcctctgcccctttgccactcactatcccaaccacctggcccggcacatgaagacacacagtggtgagaagcccttccgctgcgcccgctgtccttatgcctctgctcatctggataacctgaaacggcaccagcgcgtccatacaggagagaagccctacaagtgccccctctgcccttatgcctgtggcaatctggccaacctcaagcgtcatggtcgcatccactctggtgacaaaccttttcggtgtagcctttgcaactacagctgcaaccagagcatgaacctcaaacgtcacatgctgcggcacacaggcgagaagcccttccgctgtgccacctgcgcctataccacgggccactgggacaactacaagcgccaccagaaggtgcatggccacggtggggcaggagggcctggtctctctgcctctgagggctgggccccacctcatagcccaccctctgttttgagctctcggggcccaccagccctggggactgctggcagccgggctgtccacacagactcatcctgaactaggtccttcttccccatgttttatacagacggaccagaagccacctttttctcccccgctggccaggggctccacacagactaacgtaggcactataaggacgcgaatcgtgccgttcggatcctctagatta

SEQ ID NO: 288440 - DNA, 1587 bp, Homo sapiens
gggtcggcggccgcaggccggaggcgcgtcgggctggagccggtcacgatgccccgaaggaagcaaagccacccgcagcccgtgaaatgcgagggggtcaaagtggatactgaagactccctcgacgaaggacccggggccctggtattggagagtgatttgctactaggccaggatctggagtttgaggaggaagaggaagaggaggaaggcgacggcaacagtgaccagctcatgggcttcgagagagactcggaaggagactctctgggggccaggcctgggcttccctatgggctgagcgacgatgagtctgggggcggccgggcactaagtgcggagagtgaagttgaggagccagccaggggtccaggggaggccaggggtgagaggccaggcccagcctgccagctgtgtggggggccgacaggtgaggggccgtgttgtggggcaggagggccgggtggggggcccctgctgcccccacggctactgtactcatgccgcctctgcaccttcgtgtcccactactcgagccacctgaagcggcacatgcagacacacagcggagagaagccgttccgctgtggccgctgcccctacgcctcagcccagctcgtcaacctgacacgacatacccgcacccacactggcgagaagccctaccgctgtccccactgcccctttgcctgcagcagcctgggcaacctgaggcggcatcagcgtacccacgcagggccccccactcctccctgcccgacctgtggcttccgctgctgtactccacgaccagcccggcctcccagtcccacagagcaggagggggcggtgccccggcgacctgaagatgctctgctccttccagatttgagcctccatgtgccaccaggtggtgccagtttcctgccagactgtgggcagctgcggggtgaaggggagggcctctgcgggactggatcagaaccactgccagagctgctattcccttggacctgccggggctgtggacaagagctggaggagggtgagggtagtcggctgggagctgccatgtgtgggcgctgcatgcgaggagaggctggagggggtgccagtggggggccccagggccccagtgacaaaggctttgcctgtagcctctgcccctttgccactcactatcccaaccacctggcccggcacatgaagacacacagtggtgagaagcccttccgctgcgcccgctgtccttatgcctctgctcatctggataacctgaaacggcaccagcgcgtccatacaggagagtatacagacggaccagaagccacctttttctcccccgctggccaggggctccacacagactaacgtaggcactataaggaccagcccaaccccatgggcgggggggcccatatggaccaggggaccttgccttgactgaggcacttcacgagctcagtgagaagggccctgtattcacctccactgcccccaggggctgtggacaaaccggctgggggactgcccagcctcccacctgtttatttaacttatttcagtgctttataataaaggaaacactaacaaagccaaaaatatgct

SEQ ID NO: 288441 - DNA, 1169 bp, Homo sapiens
gggtcggcggccgcaggccggaggcgcgtcgggctggagccggtcacgatgccccgaaggaagcaaagccacccgcagcccgtgaaatgcgagggggtcaaagtggatactgaagactccctcgacgaaggacccggggccctggtattggagagtgatttgctactaggccaggatctggagtttgaggaggaagaggaagaggaggaaggcgacggcaacagtgaccagctcatgggcttcgagagagactcggaaggagactctctgggggccaggcctgggcttccctatgggctgagcgacgatgagtctgggggcggccgggcactaagtgcggagagtgaagttgaggagccagccaggggtccaggggaggccaggggtgagaggccaggcccagcctgccagctgtgtggggggccgacaggtgaggggccgtgttgtggggcaggagggccgggtggggggcccctgctgcccccacggctactgtactcatgccgcctctgcaccttcgtgtcccactactcgagccacctgaagcggcacatgcagacacacagcggagagaagccgttccgctgtggccgctgcccctacgcctcagcccagctcgtcaacctgacacgacatacccgcacccacactggcgagaagccctaccgctgtccccactgcccctttgcctgcagcagcctgggcaacctgaggcggcatcagcgtacccacgcagggccccccactcctccctgcccgacctgtggcttccgctgctgtactccacgaccagcccggcctcccagtcccacagagcaggagggggcggtgccccggcgacctgaagatgctctgctccttccagattttatacagacggaccagaagccacctttttctcccccgctggccaggggctccacacagactaacgtaggcactataaggaccagcccaaccccatgggcgggggggcccatatggaccaggggaccttgccttgactgaggcacttcacgagctcagtgagaagggccctgtattcacctccactgcccccaggggctgtggacaaaccggctgggggactgcccagcctcccacctgtttatttaacttatttcagtgctttataataaaggaaacactaacaaagccaaaaatatgct

SEQ ID NO: 288442 - DNA, 733 bp, Homo sapiens
gggtcggcggccgcaggccggaggcgcgtcgggctggagccggtcacgatgccccgaaggaagcaaagccacccgcagcccgtgaaatgcgagggggtcaaagtggatactgaagactccctcgacgaaggacccggggccctggtattggagagtgatttgctactaggccaggatctggagtttgaggaggaagaggaagaggaggaaggcgacggcaacagtgaccagctcatgggcttcgagagagactcggaaggagactctctgggggccaggcctgggcttccctatgggctgagcgacgatgagtctgggggcggccgggcactaagtgcggagagtgaagttgaggagccagccaggggtccaggggaggccaggggtgagaggccaggcccagcctgccagctgtgtggggggccgacaggtgtatacagacggaccagaagccacctttttctcccccgctggccaggggctccacacagactaacgtaggcactataaggaccagcccaaccccatgggcgggggggcccatatggaccaggggaccttgccttgactgaggcacttcacgagctcagtgagaagggccctgtattcacctccactgcccccaggggctgtggacaaaccggctgggggactgcccagcctcccacctgtttatttaacttatttcagtgctttataataaaggaaacactaacaaagccaaaaatatgct

SEQ ID NO: 288443 - DNA, 2107 bp, Homo sapiens
ggggccttgaggggagaggagcgggggtggggtcagtggagtgggctcaggtcagggtggagggggactcctgagggatgaagtgggcgatccagactcctagcttcccaccgaggcactaagggaatcagagtgggtcagcgagtacgggaagtgtggtccacgagggctggttcctgagggagaatccacaagccccctcccctcttcagtggatactgaagactccctcgacgaaggacccggggccctggtattggagagtgatttgctactaggccaggatctggagtttgaggaggaagaggaagaggaggaaggcgacggcaacagtgaccagctcatgggcttcgagagagactcggaaggagactctctgggggccaggcctgggcttccctatgggctgagcgacgatgagtctgggggcggccgggcactaagtgcggagagtgaagttgaggagccagccaggggtccaggggaggccaggggtgagaggccaggcccagcctgccagctgtgtggggggccgacaggtgaggggccgtgttgtggggcaggagggccgggtggggggcccctgctgcccccacggctactgtactcatgccgcctctgcaccttcgtgtcccactactcgagccacctgaagcggcacatgcagacacacagcggagagaagccgttccgctgtggccgctgcccctacgcctcagcccagctcgtcaacctgacacgacatacccgcacccacactggcgagaagccctaccgctgtccccactgcccctttgcctgcagcagcctgggcaacctgaggcggcatcagcgtacccacgcagggccccccactcctccctgcccgacctgtggcttccgctgctgtactccacgaccagcccggcctcccagtcccacagagcaggagggggcggtgccccggcgacctgaagatgctctgctccttccagatttgagcctccatgtgccaccaggtggtgccagtttcctgccagactgtgggcagctgcggggtgaaggggagggcctctgcgggactggatcagaaccactgccagagctgctattcccttggacctgccggggctgtggacaagagctggaggagggtgagggtagtcggctgggagctgccatgtgtgggcgctgcatgcgaggagaggctggagggggtgccagtggggggccccagggccccagtgacaaaggctttgcctgtagcctctgcccctttgccactcactatcccaaccacctggcccggcacatgaagacacacagtggtgagaagcccttccgctgcgcccgctgtccttatgcctctgctcatctggataacctgaaacggcaccagcgcgtccatacaggagagaagccctacaagtgccccctctgcccttatgcctgtggcaatctggccaacctcaagcgtcatggtcgcatccactctggtgacaaaccttttcggtgtagcctttgcaactacagctgcaaccagagcatgaacctcaaacgtcacatgctgcggcacacaggcgagaagcccttccgctgtgccacctgcgcctataccacgggccactgggacaactacaagcgccaccagaaggtgcatggccacggtggggcaggagggcctggtctctctgcctctgagggctgggccccacctcatagcccaccctctgttttgagctctcggggcccaccagccctggggactgctggcagccgggctgtccacacagactcatcctgaactaggtccttcttccccatgttttatacagacggaccagaagccacctttttctcccccgctggccaggggctccacacagactaacgtaggcactataaggaccagcccaaccccatgggcgggggggcccatatggaccaggggaccttgccttgactgaggcacttcacgagctcagtgagaagggccctgtattcacctccactgcccccaggggctgtggacaaaccggctgggggactgcccagcctcccacctgtttatttaacttatttcagtgctttataataaaggaaacactaacaaagccaaaaatatgct

SEQ ID NO: 288444 - DNA, 1562 bp, Homo sapiens
gggtcggcggccgcaggccggaggcgcgtcgggctggagccggtcacgatgccccgaaggaagcaaagccacccgcagcccgtgaaatgcgagggggtcaaagtggatactgaagactccctcgacgaaggacccggggccctggtattggagagtgatttgctactaggccaggatctggagtttgaggaggaagaggaagaggaggaaggcgacggcaacagtgaccagctcatgggcttcgagagagactcggaaggagactctctgggggccaggcctgggcttccctatgggctgagcgacgatgagtctgggggcggccgggcactaagtgcggagagtgaagttgaggagccagccaggggtccaggggaggccaggggtgagaggccaggcccagcctgccagctgtgtggggggccgacaggtggagcctccatgtgccaccaggtggtgccagtttcctgccagactgtgggcagctgcggggtgaaggggagggcctctgcgggactggatcagaaccactgccagagctgctattcccttggacctgccggggctgtggacaagagctggaggagggtgagggtagtcggctgggagctgccatgtgtgggcgctgcatgcgaggagaggctggagggggtgccagtggggggccccagggccccagtgacaaaggctttgcctgtagcctctgcccctttgccactcactatcccaaccacctggcccggcacatgaagacacacagtggtgagaagcccttccgctgcgcccgctgtccttatgcctctgctcatctggataacctgaaacggcaccagcgcgtccatacaggagagaagccctacaagtgccccctctgcccttatgcctgtggcaatctggccaacctcaagcgtcatggtcgcatccactctggtgacaaaccttttcggtgtagcctttgcaactacagctgcaaccagagcatgaacctcaaacgtcacatgctgcggcacacaggcgagaagcccttccgctgtgccacctgcgcctataccacgggccactgggacaactacaagcgccaccagaaggtgcatggccacggtggggcaggagggcctggtctctctgcctctgagggctgggccccacctcatagcccaccctctgttttgagctctcggggcccaccagccctggggactgctggcagccgggctgtccacacagactcatcctgaactaggtccttcttccccatgttttatacagacggaccagaagccacctttttctcccccgctggccaggggctccacacagactaacgtaggcactataaggaccagcccaaccccatgggcgggggggcccatatggaccaggggaccttgccttgactgaggcacttcacgagctcagtgagaagggccctgtattcacctccactgcccccaggggctgtggacaaaccggctgggggactgcccagcctcccacctgtttatttaacttatttcagtgctttataataaaggaaacactaacaaagccaaaaatatgct

SEQ ID NO: 288445 - DNA, 1357 bp, Homo sapiens
gagtgacttgaaggagcctacaggggatcgaggtcatggctcaaggaagtcatgtgcaaactgagtggaaacttagcgatacacaggcaaggtcccgcactcctcccgtggcccagacctgtgttctgtcgttgttgtaatctcaagatgagggcggtgctcgcattgccatggaggtgatgtggcggtgtcctgagtgactgaagatgctctgctccttccagatttgagcctccatgtgccaccaggtggtgccagtttcctgccagactgtgggcagctgcggggtgaaggggagggcctctgcgggactggatcagaaccactgccagagctgctattcccttggacctgccggggctgtggacaagagctggaggagggtgagggtagtcggctgggagctgccatgtgtgggcgctgcatgcgaggagaggctggagggggtgccagtggggggccccagggccccagtgacaaaggctttgcctgtagcctctgcccctttgccactcactatcccaaccacctggcccggcacatgaagacacacagtggtgagaagcccttccgctgcgcccgctgtccttatgcctctgctcatctggataacctgaaacggcaccagcgcgtccatacaggagagaagccctacaagtgccccctctgcccttatgcctgtggcaatctggccaacctcaagcgtcatggtcgcatccactctggtgacaaaccttttcggtgtagcctttgcaactacagctgcaaccagagcatgaacctcaaacgtcacatgctgcggcacacaggcgagaagcccttccgctgtgccacctgcgcctataccacgggccactgggacaactacaagcgccaccagaaggtgcatggccacggtggggcaggagggcctggtctctctgcctctgagggctgggccccacctcatagcccaccctctgttttgagctctcggggcccaccagccctggggactgctggcagccgggctgtccacacagactcatcctgaactaggtccttcttccccatgttttatacagacggaccagaagccacctttttctcccccgctggccaggggctccacacagactaacgtaggcactataaggaccagcccaaccccatgggcgggggggcccatatggaccaggggaccttgccttgactgaggcacttcacgagctcagtgagaagggccctgtattcacctccactgcccccaggggctgtggacaaaccggctgggggactgcccagcctcccacctgtttatttaacttatttcagtgctttataataaaggaaacactaacaaagccaaaaatatgct

SEQ ID NO: 288446 - DNA, 1806 bp, Homo sapiens
gggtcggcggccgcaggccggaggcgcgtcgggctggagccggtcacgatgccccgaaggaagcaaagccacccgcagcccgtgaaatgcgagggggtcaaagtggatactgaagactccctcgacgaaggacccggggccctggtattggagagtgatttgctactaggccaggatctggagtttgaggaggaagaggaagaggaggaaggcgacggcaacagtgaccagctcatgggcttcgagagagactcggaaggagactctctgggggccaggcctgggcttccctatgggctgagcgacgatgagtctgggggcggccgggcactaagtgcggagagtgaagttgaggagccagccaggggtccaggggaggccaggggtgagaggccaggcccagcctgccagctgtgtggggggccgacaggtgaggggccgtgttgtggggcaggagggccgggtggggggcccctgctgcccccacggctactgtactcatgccgcctctgcaccttcgtgtcccactactcgagccacctgaagcggcacatgcagacacacagcggagagaagccgttccgctgtggccgctgcccctacgcctcagcccagctcgtcaacctgacacgacatacccgcacccacactggcgagaagccctaccgctgtccccactgcccctttgcctgcagcagcctgggcaacctgaggcggcatcagcgtacccacgcagggccccccactcctccctgcccgacctgtggcttccgctgctgtactccacgaccagcccggcctcccagtcccacagagcaggagggggcggtgccccggcgacctgaagatgctctgctccttccagatttgagcctccatgtgccaccaggtggtgccagtttcctgccagactgtgggcagctgcggggtgaaggggagggcctctgcgggactggatcagaaccactgccagagctgctattcccttggacctgccggggctgtggacaagagctggaggagggtgagggtagtcggctgggagctgccatgtgtgggcgctgcatgcgaggagaggctggagggggtgccagtggggggccccagggccccagtgacaaaggctttgcctgtagcctctgcccctttgccactcactatcccaaccacctggcccggcacatgaagacacacagtggtgagaagcccttccgctgcgcccgctgtccttatgcctctgctcatctggataacctgaaacggcaccagcgcgtccatacaggagagaagccctacaagtgccccctctgcccttatgcctgtggcaatctggccaacctcaagcgtcatggtcgcatccactctggtgacaaaccttttcggtgtagcctttgcaactacagctgcaaccagagcatgaacctcaaacgtcacatgctgcggcacacaggcgagaagcccttccgctgtgccacctgcgcctataccacgggccactgggacaactacaagcgccaccagaaggtgcatggccacggtggggcaggagggcctggtctctctgcctctgagggctgggccccacctcatagcccaccctctgttttgagctctcggggcccaccagccctggggactgctggcagccgggctgtccacacagactcatcctgaactaggtccttcttccccatgttttatacagacggaccagaagccacctttttctcccccgctggccaggggctccacacagactaacgtaggcactataaggacacccggtataagcgggtcctcctgaat

SEQ ID NO: 288447 - DNA, 1830 bp, Homo sapiens
gggtcggcggccgcaggccggaggcgcgtcgggctggagccggtcacgatgccccgaaggaagcaaagccacccgcagcccgtgaaatgcgagggggtcaaagtggatactgaagactccctcgacgaaggacccggggccctggtattggagagtgatttgctactaggccaggatctggagtttgaggaggaagaggaagaggaggaaggcgacggcaacagtgaccagctcatgggcttcgagagagactcggaaggagactctctgggggccaggcctgggcttccctatgggctgagcgacgatgagtctgggggcggccgggcactaagtgcggagagtgaagttgaggagccagccaggggtccaggggaggccaggggtgagaggccaggcccagcctgccagctgtgtggggggccgacaggtgaggggccgtgttgtggggcaggagggccgggtggggggcccctgctgcccccacggctactgtactcatgccgcctctgcaccttcgtgtcccactactcgagccacctgaagcggcacatgcagacacacagcggagagaagccgttccgctgtggccgctgcccctacgcctcagcccagctcgtcaacctgacacgacatacccgcacccacactggcgagaagccctaccgctgtccccactgcccctttgcctgcagcagcctgggcaacctgaggcggcatcagcgtacccacgcagggccccccactcctccctgcccgacctgtggcttccgctgctgtactccacgaccagcccggcctcccagtcccacagagcaggagggggcggtgccccggcgacctgaagatgctctgctccttccagatttgagcctccatgtgccaccaggtggtgccagtttcctgccagactgtgggcagctgcggggtgaaggggagggcctctgcgggactggatcagaaccactgccagagctgctattcccttggacctgccggggctgtggacaagagctggaggagggtgagggtagtcggctgggagctgccatgtgtgggcgctgcatgcgaggagaggctggagggggtgccagtggggggccccagggccccagtgacaaaggctttgcctgtagcctctgcccctttgccactcactatcccaaccacctggcccggcacatgaagacacacagtggtgagaagcccttccgctgcgcccgctgtccttatgcctctgctcatctggataacctgaaacggcaccagcgcgtccatacaggagagaagccctacaagtgccccctctgcccttatgcctgtggcaatctggccaacctcaagcgtcatggtcgcatccactctggtgacaaaccttttcggtgtagcctttgcaactacagctgcaaccagagcatgaacctcaaacgtcacatgctgcggcacacaggcgagaagcccttccgctgtgccacctgcgcctataccacgggccactgggacaactacaagcgccaccagaaggtgcattatacagacggaccagaagccacctttttctcccccgctggccaggggctccacacagactaacgtaggcactataaggaccagcccaaccccatgggcgggggggcccatatggaccaggggaccttgccttgactgaggcacttcacgagctcagtgagaagggccctgtattcacctccactgcccccaggggctgtggacaaaccggctgggggactgcccagcctcccacctgtttatttaacttatttcagtgctttataataaaggaaacactaacaaagccaaaaatatgct

SEQ ID NO: 288448 - DNA, 1497 bp, Homo sapiens
gggtcggcggccgcaggccggaggcgcgtcgggctggagccggtcacgatgccccgaaggaagcaaagccacccgcagcccgtgaaatgcgagggggtcaaagtggatactgaagactccctcgacgaaggacccggggccctggtattggagagtgatttgctactaggccaggatctggagtttgaggaggaagaggaagaggaggaaggcgacggcaacagtgaccagctcatgggcttcgagagagactcggaaggagactctctgggggccaggcctgggcttccctatgggctgagcgacgatgagtctgggggcggccgggcactaagtgcggagagtgaagttgaggagccagccaggggtccaggggaggccaggggtgagaggccaggcccagcctgccagctgtgtggggggccgacaggtgaggggccgtgttgtggggcaggagggccgggtggggggcccctgctgcccccacggctactgtactcatgccgcctctgcaccttcgtgtcccactactcgagccacctgaagcggcacatgcagacacacagcggagagaagccgttccgctgtggccgctgcccctacgcctcagcccagctcgtcaacctgacacgacatacccgcacccacactggcgagaagccctaccgctgtccccactgcccctttgcctgcagcagcctgggcaacctgaggcggcatcagcgtacccacgcagggccccccactcctccctgcccgacctgtggcttccgctgctgtactccacgaccagcccggcctcccagtcccacagagcaggagggggcggtgccccggcgacctgaagatgctctgctccttccagatttgagcctccatgtgccaccaggtggtgccagtttcctgccagactgtgggcagctgcggggtgaaggggagggcctctgcgggactggatcagaaccactgccagagctgctattcccttggacctgccggggctgtggacaagagctggaggagggtgagggtagtcggctgggagctgccatgtgtgggcgctgcatgcgaggagaggctggagggggtgccagtggggggccccagggccccagtgacaaaggctttgcctgtagcctctgcccctttgccactcactatcccaaccacctggcccggcacatgaagacacacagtggtgagaagcccttccgctgcgcccgctgtccttatgcctctgctcatctggataacctgaaacggcaccagcgcgtccatacaggagagaagccctacaagtgccccctctgcccttatgcctgtggcaatctggccaacctcaagcggcggcggcggcgggagcggcctgagctgggcgccggggccagggccgggggctgcccagggcccgcgccgctgcatgggggcggcccgcgggccctgagaggaagggcagacaggcgggccgagataggaggggcggggtcgggcggccgc

SEQ ID NO: 288449 - DNA, 300 bp, Homo sapiens
gggtcggcggccgcaggccggaggcgcgtcgggctggagccggtcacgatgccccgaaggaagcaaagccacccgcagcccgtgaaatgcgagggggtcaaagtggatactgaagactccctcgacgaaggacccggggccctggtattggagagtgatttgctactaggccaggatctggagtttgaggaggaagaggaagaggaggaaggcgacggcaacagtgaccagctcatgggcttcgagagagactcggaaggtgggttttcgggtcttggttaaggattagcggccgctgga

SEQ ID NO: 288450 - DNA, 809 bp, Homo sapiens
caacaacaactgggaagccttctcagctacacttcggggcactggtccaaccccacgcaaaatccctcgtttcccttagcgtgcagaaccacgggcacggtgatgatggtgacaagcgcagcagcacccagcagtcccagaagaaccttccacggtgtctgcaagccgagcagatcaagtccaattagagggaagcgtgtggccccagtttccgtaggagggtcggggctgctccagaggcagcaggatttgcaggaaggaagactgtacacagagaataaataacttggccaagccattcagctaggaagttgtagatcctaaattaagagttcaaggtcttaatggctactctatgcggcctctcatagtcttttcaagggttttggagaagaataaaagatcaggtatggcttctccctcccccagctctctattgttccctaaaggattattcattcgttcattcattcctacatcctcccatttattccagtcatccacagatgtttgagtggttacaatgtgccagcctcccttctaggtactggagataaagtgggacaagagaggtgaggtctggacccttggcactttcacgataaaatacacaggtaaacatttgcctttagggccccctgtgattacttccactcttgcagataagaggataaggcctcttcagcttgttcacagcagctggaaaagcaaagcctctctgtcagtagaggtaaaagattaagaatgcagagtccgatggggcattaccacatgattatgaattaatgcaattttccatcttttatttc

SEQ ID NO: 288451 - DNA, 441 bp, Homo sapiens
ctcaagacacgtggtctaggaagcaaaacactcttaactaggaataaaacttgccagcccctctctctcttaattttgcttaaaatgcaaagttaaaagccatcatgaaaccaggaaaggagtcatcatgtaggcataatcgtttattcaatcacaggcaaggagccgctttctgattctccagggcctcctctgtccccagtgttaccacagttccgctttcatagactgctgtagatacccagatccacttaatattgattgcaatttatatttacaggcttaatgccagacggtaagggagatgaggagggtaagggagatgagacggtaagggagatgaggacggtaagggagatgagacggtaagggagatgaggacggtaagggagatgagacgtaagggagatgaggaggtaaggagatgaacgtaaggaatga

SEQ ID NO: 288452 - DNA, 427 bp, Homo sapiens
tcttcctgtcactgatgtttgtgtcctgatgatctcctcccggggcaggtccctcacctttctgggaagtacaacttctgcatgttacaaattccaggaagaagcttagcccaggaaaaacaaagaccagttggacccagagatgcctgagttggagatgaactttggccaactttcctcatcaccatacttaaaatcctgtccaaggaggagcttattcaccattttctatacatgtgacatatgtagcagcataaccgacaactgggactgcgctgccttgactccacctctacatacaatgactcagctaaccagactaataaaagccatgtttgcaccattgctcagggaggcattgctttggggaattattcccagtgtcctccttacttatcgcaagtaataaaatccccctgggaaatcc

SEQ ID NO: 288453 - DNA, 710 bp, Homo sapiens
aaatgcaaaagcccaagatcaagaagtctgtaagtcatgaaagagtctccaaaatgaattttaaattgactggaaaagggatcacctttttctcatctgagagcaagaaatatgagagacccaaggatgatcgagaggaagagttcaacacgtgggtcaataatatgtacgtcttctttgtgaacacgctctttcatgcgtataaacgtgaagaagctatcaaggagaaaataagggcagacaggttacgtagcacagcacaggcccagcagcggaagatggaagatgacgaactggaagcaaggctgaacatcttcatcttgagagaggaagaggccaagagacatgactatgaggtggacatcacagtgctcaaggagccggcagacgtgtcatcctctcacctcatactggaccctcccaaggaggatgtgaccgtgtccccatccagcaagaccatcaccagcaagaagaagaaaaagtagagagacacgaggacacacacacaggcttaggatggcacgtgctgtaagatttcctgagcattacagttcttagcactgaactcgtcacagtgttttaacataccccttggcccactgcatctcaggtttcctacatggctggattacgggagttcgagaccagcctgggcaacatagtgagacccccccatctctgcaaaattaaaacatcagccgaccgtggtg

SEQ ID NO: 288454 - DNA, 525 bp, Homo sapiens
acctataacagtttctataagaatagtaaaaaggaataaatttaaagcatgaaaacaccaaggactctagttattacttaaatgatattgaatacaaatgtgatactaacgatgacaagggtaacaaattttatttcccaaatcacagaagctagcaaaaaatattctcaatgttcacctgtttttattttggctttagttaatatatttttgtgttacagactttacaaatcattaggagacaaaaaatttcccttattcagaaaaaacaggaagaggctggcattgcaattaatgaaggccaacagtataagttttaatgacttcaatcagaaaacaacaaggaagatgacattgtgggagacagctttagagacactacctctaatccttttaagatatataaacgactggtatatggcttcaaatcctcttatctttggcattaaaacgaaggaatttgactttcctttttagctgggaccataggcaggtgccaatctctatttactctaaataatgaca

SEQ ID NO: 288455 - DNA, 817 bp, Homo sapiens
acctataacagtttctataagaatagtaaaaaggaataaatttaaagcatgaaaacaccaaggactctagttattacttaaatgatattgaatacaaatgtgatactaacgatgacaagggtaacaaattttatttcccaaatcacagaagctagcaaaaaatattctcaatgttcacctgtttttattttggctttagttaatatatttttgtgttacagactttacaaatcattaggagacaaaaaatttcccttattcagaaaaaacaggaagaggctggcattgcaattaatgaaggccaacagtataagttttaatgacttcaatcagaaaacaacaaggaagatgacattgtgggagacagctttagagacactacctctaatccttttaagatatataaacgactggtatatggcttcaaatcctcttatctttggcattaaaacgaaggaatttgactttcctttttagctgggaccataggcaggtgccaccacaccaagctaatcttttaagtttttgttgatgcagagtatccttgtgttgtgctggctggttttgaactcctgggctaaaagtgattctcccacctgggcctctcaaagaactaggattacagacgtaagccactgcactcagcactttttattaaaaaaagagtgtcttgcactgtcacccaggctagagcacagtggcaggattttggctcacgccagcatagtaattcctaacctcaagcaatcctcccatctcagctttccaaaatgctgacgtcataggtgccaatctctatttactctaaataatgaca

SEQ ID NO: 288456 - DNA, 403 bp, Homo sapiens
ttatatccagttaagagataaagaggatagtagacatattttttggactgtgtggtactttacaatgtgacatattacctgtgaagataaagctttgaaaacattacaatttgaattacagcgtaaagctgacaataatgacagaaacagcaacaggtaacattcagtgctcacttaataattccctgccttaaaatgtactctcctgaatattagctaggagtactaattcttttatgtagaaagcacaacaaattgaaccaaaggcttattaggatatgcctagaagtcttttgtaatgtatcccatatcatttaaaaaatcatttgcctctgttctaaagtattaatggattaaaaataaaaatagctgttagcttaatatacttttacttacttggcca

SEQ ID NO: 288457 - DNA, 3068 bp, Homo sapiens
ctacttttttaacattcaaactgtgttttattgtatcaccaatggattatctactttttctcatgcttcaaaaatgaaaaacttttaaaagtaattattgtctggatatctttagcccatcatgcaatgttttcataagaaaaccaagctcaacataatacgttttaagcaaacagggatttaacatttaattccaattcaccaaatctttattgaacatctgttgtcagatgtagacatcctattaaaaacaagtacctctatttcagttggtttatttctgtaccatctcctacccacagccgtaaagaagacattaaaaaaggcttactgaaattatactatatagtatttttttagataagacacacacacacttcatgtctatgacttgtttacctaagataaaagggacctaattcaacttactttagcaaacatactactgccaattaatcatttcttaacccttttaggccagtgatacatgtcttgatgtgattggtggccgggacacacctggagctaaagtagctctatggactgaacatgggcaattcaggcagaagtggagactgaataaaaatggaactatcagctcttatctcagtgatcaacttgtccttgatgttaaaggtgggcctttgatgatacccaatgttgtgtccctggatattagtttcagttccaaatctcctcattttgggtaaaggacatccttatgtataagagaaatgttaagtcatttaaaattatgcttgaagaaaattaagataggcagttttacaaacaaaacaattagcagaaaaagccaaacaacaaagcttagggtttttgttcattagtacagttgtaaaactttcatttgctacgtgaactcagaacagttctaaatttcaagcaccataaaccatgaaatgaatgtcatctgtttcttagaaacatctctagctttttgccaggaattgccatggtccttaaaaaccctcaggtagaatttatggtaggtatcaattaaccttgtttttgaattcagcaaggtcagggccaatattattcatggctgttgctttaattgggttagtcacagttttgttggtgtagaaacaaaaacacagtacctgacattcagccagagtttctttcaagagcactttgttctaaagaatcacattaaggcacgccacttatacaatcatgtattataccttttagtatttcaatttgagtcataataaggtccaatttgaggtgaataatggctaagcctgttcaaactcagcttcccatttcagacttctttgtaaatgacacattcatccaccgaaatggtgagctgaacagaagcttgtgaaaattgtgaaattgctaagcacctgcctgaacaaataatcttttcttttggaatttctattttaggaggaaattattgtgacaagactcatgtaattgtaaatcagcccctggagggagaagaaacacagaaatgggacattgaaatattgtgagagaatcaacatccctagaaagatccctagaaagagcaaagaaggaaacacatctgtcattgtcttgtggacgtggaaaggaagctactgtcctcacactcctggatcactgagcagaatgaacattttctccagcctctgagactatcgctcttaaccatggaaaagctcaaaatattcttgccattactcagtgttcctataaagaaaatattatgatatcttggaaaggttctattcctgatctccagctgtggtgagcaagtttcctgaagtgtttattttctctcatatccaccaaacgtgaatcctgttcctgatggcccgttattggacactggtgatgctattatcctgtattatttattaatatcctacctagatgcttgtatgagtacaaagcataaagaaacagatttctataggtcaagtccatcactattttgccaacacccagcatgcagtcacattttttcagccaaccaccttgcacacaccatcatcactcaaacacttttcctcagcatcacacactttcacagtgtttctcatcacttgcagtgctatttcatcacatgcaaactgcaacctctgttcaaagtcatttcatcactttgtcacacttacacccccagtgcaagggcacctcacagcattatcgttcaggcacatcaaggtgcaccacagcacagtcatattttcattgtcagctcatttgtttccatccaggtccttccaacactacaacacaagtaccaaatacaactaacctattggccaaaccttgcaccttgtatacgttgtaaagccaagaacatccctattaggtgaccaatgacctctataagcagtgggttaccctggtctccatggttgagcacgttcatacctaagtacattctaatgggacgaaagggcattcaaattattatagaaaaagtataatgatgcctcagagaaggaaaaattcacagaatatatgagaatataataaaaaggataagcattgtgaaaccttgtgaagcattatcacaataatatataaaagggaaacgtcgtggagtctatacaattcatacatacataaagtagtaagtggaacaagtcctacagtatctacaacgtccccatgtgtgttagctcaactgttgtacatgctacaacgatacggtaacaccacaggggtgaggcgaacactaccctatgtgacatctgaatatccaagtgagctacatacccacccctatttatagggggacaacatgccaacaaacatgttaacaccacgggagacacaggtgaccagaccacataataacatgaggcagcaaagagccaattaaaaaccacacaaattgggcgacaacagagaaaaagggcgtcattctcacacaacacgcgataccaccgcagatgtacacacaaaaagcagccgagtgaaacaaagtacaagcaagtaaacgaaaccacagtactgagtacgtacaacaccacatcgcaccacagcaggagccaaagaaactagtgagaagtggtaagaacaacaacactgcgcggacc

SEQ ID NO: 288458 - DNA, 2252 bp, Homo sapiens
ctctcaagcccattgactatgtttttgaagaaccctccatcagcctttttgctctggagcattgtgagggaagagagttacatctagaagaggctgtgaactctgttctgaacaaggacctacacttctacacccagtctgtgtgggtaaaaagtggactatggatagcttatgaaggatccaatttcttgggaagacaaatcctactcaggcctaatgagatcccaaactggacagcattcagcagatggaaaacaattggttccctccgtcctatgaagcagcctgcagtgtacatcagaataaagaaccgtgcccagggtgaatatctgacagtcactggaagtctagcagacaccagggcaacatctgtgtgcatttctccctatagtggaaagcatactcagatctggtactactgccgaggactctttaaatccaaggccagtgatacatgtcttgatgtgattggtggccgggacacacctggagctaaagtagctctatggactgaacatgggcaattcaggcagaagtggagactgaataaaaatggaactatcagctcttatctcagtgatcaacttgtccttgatgttaaaggaggaaattattgtgacaagactcatgtaattgtaaatcagcccctggagggagaagaaacacagaaatgggacattgaaatattgtgagagaatcaacatccctagaaagatccctagaaagagcaaagaaggaaacacatctgtcattgtcttgtggacgtggaaaggaagctactgtcctcacactcctggatcactgagcagaatgaacattttctccagcctctgagactatcgctcttaaccatggaaaagctcaaaatattcttgccattactcagtgttcctataaagaaaatattatgatatcttggaaaggttctattcctgatctccagctgtggtgagcaagtttcctgaagtgtttattttctctcatatccaccaaacgtgaatcctgttcctgatggcccgttattggacactggtgatgctattatcctgtattatttattaatatcctacctagatgcttgtatgagtacaaagcataaagaaacagatttctataggtcaagtccatcactattttgccaacacccagcatgcagtcacattttttcagccaaccaccttgcacacaccatcatcactcaaacacttttcctcagcatcacacactttcacagtgtttctcatcacttgcagtgctatttcatcacatgcaaactgcaacctctgttcaaagtcatttcatcactttgtcacacttacacccccagtgcaagggcacctcacagcattatcgttcaggcacatcaaggtgcaccacagcacagtcatattttcattgtcagctcatttgtttccatccaggtccttccaacactacaacacaagtaccaaatacaactaacctattggccaaaccttgcaccttgtatacgttgtaaagccaagaacatccctattaggtgaccaatgacctctataagcagtgggttaccctggtctccatggttgagcacgttcatacctaagtacattctaatgggacgaaagggcattcaaattattatagaaaaagtataatgatgcctcagagaaggaaaaattcacagaatatatgagaatataataaaaaggataagcattgtgaaaccttgtgaagcattatcacaataatatataaaagggaaacgtcgtggagtctatacaattcatacatacataaagtagtaagtggaacaagtcctacagtatctacaacgtccccatgtgtgttagctcaactgttgtacatgctacaacgatacggtaacaccacaggggtgaggcgaacactaccctatgtgacatctgaatatccaagtgagctacatacccacccctatttatagggggacaacatgccaacaaacatgttaacaccacgggagacacaggtgaccagaccacataataacatgaggcagcaaagagccaattaaaaaccacacaaattgggcgacaacagagaaaaagggcgtcattctcacacaacacgcgataccaccgcagatgtacacacaaaaagcagccgagtgaaacaaagtacaagcaagtaaacgaaaccacagtactgagtacgtacaacaccacatcgcaccacagcaggagccaaagaaactagtgagaagtggtaagaacaacaacactgcgcggacc

SEQ ID NO: 288459 - DNA, 2158 bp, Homo sapiens
ccacatgtggctagtggccacctcccgcgaagcagcccggccactcacctcctaccaccttttacctatttctccttctccgcaggcctccctagcactaccagttgtcttgttggcgagtcctttgtgactcccactatacaagcccctcaaggccaggcttcgccctgaacggtgcctgggcggagcagacgctccatcaacgctgtccccgcctgagtccacgtccaggggatccgcaggcgccgtaccctgcttccacgcgccggggccgcccctcgcccggcctcccgcaggcccacccctcgccaggcccaggcccatccccgggctgttcgctggaaatcgtggacgtgactgggaggagcctgcccgccccggctcgctgcgccgcgcgcacagggcccgcgccagcgaccatggcggagcccacagtgtgctccttcctcaccaaggtgctgtgcgcccacggcggccgcatgttcctgaaggacctgcgcggccacgtggagctgtcggaggccaggctccgggacgtgctgcagcgcgccgggcccgagcgtttcctgctgcaggaggtggagacgcaggagggcctcggggacgcggaggccgaggcggcggccggcgcggtgggcggtggcggcacctccgcctggagggtggtggccgtgtcctctgtgcgcctctgcgcccgctaccagcgcggcgagtgccaggcctgcgaccagctgcacttctgccgccggcacatgctgggcaagtgccccaaccgggactgctggtctacctgtaccctttcccatgatatccacacacctgtcaacatgcaggtcctgaaaagccatggactttttggtctcaatgaaaaccagcttcggatcctgcttttgcagaatgacccctgtcttttaccagaggtctgtttgctctacaacaaaggggaagccctgtatggctactgcaacctcaaggataaatgcaacaagtttcatgtgtgcaaatcctttgtgaaaggagaatgcaaacttcagacctgcaaacggtcccatcagcttatccatgctgcatctttgaagctgctacaggaccaaggactgaatattccaagtgttgttaattttcagataatctccactacaagcatataagctgcacaagatgcttgaaaatacagataattcatcaccttcgactgagcattcacaaggccttgagaagcaaggagtgcacgcagctggagctgcagaagctggtcctctggcttctgtccctgctcagtcggccaagaagccctgcccagtgtcttgcgagaagtaaagaagatggaaaaggagaaaatgtccttttggaagaatacatttgggcatgggtggttggggatggggtgggacattgaacaggcaaagagaggctaaaattgagtgcagatggggctagtccagggcaagtgctgaagatggcagctgctatctgcagctcctaggtgctttcctcaggctgggtagatggagctctgctgacttctgtggtccaccattgtttttctatcaatttatattgtggcaatcctagagtactttgcactcatttttttttttcacttaatattgtctcataagcatctttctatatttgttcacatcgtacataatcatgtttttgcacagatacattaatattatcatagtttgtttaactacttggctttttctaacagtttttttttttgagatggtcttgctctgttgcccaggctggagtgcagtgacgtgatctcggctcactgcagccttgacttcctgggctcaagtgatcatcccacctcagcctcctgagtagctgggactacaggtatgcaccacgaccagctaattttttgtattttttttttgtagagagggtattttgccatgttgcccaggctagtcttgaactcctgggctcaagcgatctgcctgcttcagcctcccagagtgctaggattacaggcatgagccactgcacccagcctcttaacaaattttgaatataactcctgtcttaaaatctgcagaatattgaatttttccagctattttttacttttgcttagcttatagatgctaaaggatactgtcatttgcatttttaaaaatatatgtatgagtgaatagtt

SEQ ID NO: 288460 - DNA, 1076 bp, Homo sapiens
tggccgggcgcggtggctcacgcctgtaatcccagcactgtgggaggctgaggtgggcggatcacgaggtcaggagatcgagaccatcctggctaacacggtgaaaccccatctctactaaaaataacaaaaaaattagccgggcgactataggtgcatgccaccatactcagctaatctttttaggtttttagtagagacaaggtctcactatgttgcccaggctggtcttgaactcctaagctcaagcagtcctcccgccttggcctctgaatgtgctgggattacaggcatgagccactatgcctaaccatattttttccaatattaaaaaatctttttttccccctaaggaatgtgttatataaggtcaacatgtttttagtgcttcagtttgacttgtctacatctaaagttaactctttaaggcttacatttatgattataattctttccatcgagggatttagtctccattattgtcatgtttcttgatttttttcattatacttggttcttctttttgtctaggttttatatataccttaattaattctttcttggctgttttatatctatgttgctgtcagcatgggaatctctattattagaaagctattaacttttaaaatatgtatcttttggtgattttctttgttctaacagttttagatggcctgtttgctctttctaaatataaaatcataggtatttctattttgtttttgtgtttcataaaattgtaataagtttttttgatattttttcattacatatgaagttaattgttggttttaaacaaatgttctttgttaggataacagaaataacatcttctattcttgtttgttggaagctaaaagcttgataaaaggaattggtgtcttttgatacaatcaaatttttatcacttaaattgcctaatatgattataataagggtttttgtaatattaaaacatccttaaattcctgagataaaactctacctggttatagtatatgttcttttaatgtattatctttcctatttgctgtacatctatacattcataaataaaattcatttatatttta

SEQ ID NO: 288461 - DNA, 989 bp, Homo sapiens
tggccgggcgcggtggctcacgcctgtaatcccagcactcagcttccctagtagccgggactataggtgcatgccaccatactcagctaatctttttaggtttttagtagagacaaggtctcactatgttgcccaggctggtcttgaactcctaagctcaagcagtcctcccgccttggcctctgaatgtgctgggattacaggcatgagccactatgcctaaccatattttttccaatattaaaaaatctttttttccccctaaggaatgtgttatataaggtcaacatgtttttagtgcttcagtttgacttgtctacatctaaagttaactctttaaggcttacatttatgattataattctttccatcgagggatttagtctccattattgtcatgtttcttgatttttttcattatacttggttcttctttttgtctaggttttatatataccttaattaattctttcttggctgttttatatctatgttgctgtcagcatgggaatctctattattagaaagctattaacttttaaaatatgtatcttttggtgattttctttgttctaacagttttagatggcctgtttgctctttctaaatataaaatcataggtatttctattttgtttttgtgtttcataaaattgtaataagtttttttgatattttttcattacatatgaagttaattgttggttttaaacaaatgttctttgttaggataacagaaataacatcttctattcttgtttgttggaagctaaaagcttgataaaaggaattggtgtcttttgatacaatcaaatttttatcacttaaattgcctaatatgattataataagggtttttgtaatattaaaacatccttaaattcctgagataaaactctacctggttatagtatatgttcttttaatgtattatctttcctatttgctgtacatctatacattcataaataaaattcatttatatttta

SEQ ID NO: 288462 - DNA, 2083 bp, Homo sapiens
ttgtgttgagctttttactttcattgtcaacgatatttctgaaagcccttatgctctgcatattttgtttctttttttctagtccagatttctcctggtgataattaaaaaaatttttacatttaattattactattatttacacttaccattttactatgtatatttttgtagtaagctatcttaaatctttaatggaaacagtgtagggtataaatgcatttcctttacattgagagacttgctggacctttacttgtttatgttctgtttttatatcttatcattatgcttttatatgtgatgttattggtcctctgtcatctttgttgcagtattttattcaattctataatagtctactttaatcttagttttgttggtattcattctgtaaaatattttatataaccatgcctttctctgatttttactcatgattaagctgttagaaagttatcgcattatagttggaaaagagttttctttggtaatttatcggggtttttgatgtcaagtcgcatgtctatagactctacaaattcaatgtattctaaattgaattatgaattttcctttagtcttgttcctgcttttatttccttatttttgaatgtcaccactatctacctaatgacatagacaaaaagctgtaaattgtcctatacttttttttctccttgttccctttgtcaaattggttacccagtgttggagagtttcttcccctcaaaaacctttcaaatatttatccttctctgcccctttctttccaccctgtacatactgccttgtttcaaaccctcatcatcttcctgcatatatcctacagatgcataaactcagtggttttcaagtcatctgttatgggagtttttggtaaaaggtgccctgttcccactgcagtgatggtagccctgttttaatctttaatagaataagcgtttgtggatttcactggtctccttaccactcttcacttctcctgccttccatctggctgcctgacattttgaaaacaaagctaatcatatggcttttttcctgctgaaaccttccttggtcctcatcatgtagggtggtatttgtaaactcaaaacgcctgcagggactagaaaggtgagttaaatggatgaagtgaactggatgcaagagcagtgggagaagggagaagtgctgtggcaaactgtcccatctaaaagggacgcctgcctcttgtatccacgtgggaatgtgggcccactttgtcatagtgcccagttttttaaaaagaagccagaaattcagattgttatgagaaatgttctgattgaatattgactttagtcgagtttttaaaatgcagaccaacattgtatgtacttgacctacttggaatttctggaatgtgctattttgtcttgtgattctctgtaaatgatattccctgttttttttttttttttttttctttttttttcctttggaaagggggttttgggggcccagaggggggggttacggggggaggactctcaggtctcacggggaacctctccggtcctcccgggtctcaaggtgatttctccgggcgtcaagccctcccagagtagctggggcactatgggcttggtccaccacgagcgtgggtaactttgggtgtttttaggacaaaatgggcgtctcccatgttggcgcgggggggcgtggaatcctaccctatgtgtcacccatttgcctccaagtgggggatataggggtgagagcaatggcataaagccagagtgttccctctttataaagagggaagctttttttaactcaaaacgttaggcaaattgggtctctaacagccagggggggggtttgggcctccaaaagggggcttgtgggactatagagggaaaaaacaatttagttgaaggagggcagggggggttgacaacacctgggaccaatatcttgggtgaccggggggagacattggcatagacaatagttttgtagagtaacaagggagagtgctccctaaagaattacctgcgggacagagtaattgcgtcgtgttagactgattacgtattgaattttgatctaaaagtgt

SEQ ID NO: 288463 - DNA, 3134 bp, Homo sapiens
ttgtgttgagctttttactttcattgtcaacgatatttctgaaagcccttatgctctgcatattttgtttctttttttctagtccagatttctcctggtgataattaaaaaaatttttacatttaattattactattatttacacttaccattttactatgtatatttttgtagtaagctatcttaaatctttaatggaaacagtgtagggtataaatgcatttcctttacattgagagacttgctggacctttacttgtttatgttctgtttttatatcttatcattatgcttttatatgtgatgttattggtcctctgtcatctttgttgcagtattttattcaattctataatagtctactttaatcttagttttgttggtattcattctgtaaaatattttatataaccatgcctttctctgatttttactcatgattaagctgttagaaagttatcgcattatagttggaaaagagttttctttggtaatttatcggggtttttgatgtcaagtcgcatgtctatagactctacaaattcaatgtattctaaattgaattatgaattttcctttagtcttgttcctgcttttatttccttatttttgaatgtcaccactatctacctaatgacatagacaaaaagctgtaaattgtcctatacttttttttctccttgttccctttgtcaaattggttacccagtgttggagagtttcttcccctcaaaaacctttcaaatatttatccttctctgcccctttctttccaccctgtacatactgccttgtttcaaaccctcatcatcttcctgcatatatcctacagatgcataaactcagtggttttcaagtcatctgttatgggagtttttggtaaaaggtgccctgttcccactgcagtgatggtagccctgttttaatctttaatagaataagcgtttgtggatttcactggtctccttaccactcttcacttctcctgccttccatctggctgcctgacattttgaaaacaaagctaatcatatggcttttttcctgctgaaaccttccttggtcctcatcatgtagggtggtatttgtaaactcaaaacgcctgcagggactagaaaggtgagttaaatggatgaagtgaactggatgcaagagcagtgggagaagggagaagtgctgtggcaaactgtcccatctaaaagggacgcctgcctcttgtatccacgtgggaatgtgggcccactttgtcatagtgcccagttttttaaaaagaagccagaaattcagattgttatgagaaatgttctgattgaatattgactttagtcgagtttttaaaatgcagaccaacattgtatgtacttgacctacttggaatttctggaatgtgctattttgtcttgtgattctctgtaaatgatattccctgttttttttttttttttttttcttttttcctttgagatggagtctctgtcgcccaggctggagtacagtggcatgatctcagctcactgcaacctccgtctcccaggttcaagtgattctcctgcctcagcctcccgagtagctgggattataggcatgtaccaccatgcctggctaatttttgtatttttagtagagatggggtttcaccatgttggccaggctggtcttgaactcctcacctcaagtgatccacccacctcgccctcccaaagtgttagtattataggcgtgagccactgcactcagcctgatgttccctcttttataagtgccattccttcttcctacctcacaacctagcaaaattggattcttcaaaacgccaggttggcctttcttgactccaaaagaggtgactcttgtagcattcttacaggcctaacatagcacttactttatgttgcaatgctgtgtgcaatgctgtgtttttttactcactagctctgagcaaaacattatttattcttggtaattgtaacacttggtagtgaagacatattttttgccatataatggattatactttgtatttgaatccatgtgaatcagtagcatattggtcttcattgtttttcctccttctccgacgtttttttgagacagggtctcactctgttgcccaggctggagtgcagggcacaattacagctccctgcagccttgatttctcaggctcaagccatcctcttgcctcagcttccctagtagccgggactataggtgcatgccaccatactcagctaatctttttaggtttttagtagagacaaggtctcactatgttgcccaggctggtcttgaactcctaagctcaagcagtcctcccgccttggcctctgaatgtgctgggattacaggcatgagccactatgcctaaccatattttttccaatattaaaaaatctttttttccccctaaggaatgtgttatataaggtcaacatgtttttagtgcttcagtttgacttgtctacatctaaagttaactctttaaggcttacatttatgattataattctttccatcgagggatttagtctccattattgtcatgtttcttgatttttttcattatacttggttcttctttttgtctaggttttatatataccttaattaattctttcttggctgttttatatctatgttgctgtcagcatgggaatctctattattagaaagctattaacttttaaaatatgtatcttttggtgattttctttgttctaacagttttagatggcctgtttgctctttctaaatataaaatcataggtatttctattttgtttttgtgtttcataaaattgtaataagtttttttgatattttttcattacatatgaagttaattgttggttttaaacaaatgttctttgttaggataacagaaataacatcttctattcttgtttgttggaagctaaaagcttgataaaaggaattggtgtcttttgatacaatcaaatttttatcacttaaattgcctaatatgattataataagggtttttgtaatattaaaacatccttaaattcctgagataaaactctacctggttatagtatatgttcttttaatgtattatctttcctatttgctgtacatctatacattcataaataaaattcatttatatttta

SEQ ID NO: 288464 - DNA, 1607 bp, Homo sapiens
ccacatgtggctagtggccacctcccgcgaagcagcccggccactcacctcctaccaccttttacctatttctccttctccgcaggcctccctagcactaccagttgtcttgttggcgagtcctttgtgactcccactatacaagcccctcaaggccaggcttcgccctgaacggtgcctgggcggagcagacgctccatcaacgctgtccccgcctgagtccacgtccaggggatccgcaggcgccgtaccctgcttccacgcgccggggccgcccctcgcccggcctcccgcaggcccacccctcgccaggcccaggcccatccccgggctgttcgctggaaatcgtggacgtgactgggaggagcctgcccgccccggctcgctgcgccgcgcgcacagggcccgcgccagcgaccatggcggagcccacagtgtgctccttcctcaccaaggtgctgtgcgcccacggcggccgcatgttcctgaaggacctgcgcggccacgtggagctgtcggaggccaggctccgggacgtgctgcagcgcgccgggcccgagcgtttcctgctgcaggaggtggagacgcaggagggcctcggggacgcggaggccgaggcggcggccggcgcggtgggcggtggcggcacctccgcctggagggtggtggccgtgtcgactataggtgcatgccaccatactcagctaatctttttaggtttttagtagagacaaggtctcactatgttgcccaggctggtcttgaactcctaagctcaagcagtcctcccgccttggcctctgaatgtgctgggattacaggcatgagccactatgcctaaccatattttttccaatattaaaaaatctttttttccccctaaggaatgtgttatataaggtcaacatgtttttagtgcttcagtttgacttgtctacatctaaagttaactctttaaggcttacatttatgattataattctttccatcgagggatttagtctccattattgtcatgtttcttgatttttttcattatacttggttcttctttttgtctaggttttatatataccttaattaattctttcttggctgttttatatctatgttgctgtcagcatgggaatctctattattagaaagctattaacttttaaaatatgtatcttttggtgattttctttgttctaacagttttagatggcctgtttgctctttctaaatataaaatcataggtatttctattttgtttttgtgtttcataaaattgtaataagtttttttgatattttttcattacatatgaagttaattgttggttttaaacaaatgttctttgttaggataacagaaataacatcttctattcttgtttgttggaagctaaaagcttgataaaaggaattggtgtcttttgatacaatcaaatttttatcacttaaattgcctaatatgattataataagggtttttgtaatattaaaacatccttaaattcctgagataaaactctacctggttatagtatatgttcttttaatgtattatctttcctatttgctgtacatctatacattcataaataaaattcatttatatttta

SEQ ID NO: 288465 - DNA, 2750 bp, Homo sapiens
ttgtgttgagctttttactttcattgtcaacgatatttctgaaagcccttatgctctgcatattttgtttctttttttctagtccagatttctcctggtgataattaaaaaaatttttacatttaattattactattatttacacttaccattttactatgtatatttttgtagtaagctatcttaaatctttaatggaaacagtgtagggtataaatgcatttcctttacattgagagacttgctggacctttacttgtttatgttctgtttttatatcttatcattatgcttttatatgtgatgttattggtcctctgtcatctttgttgcagtattttattcaattctataatagtctactttaatcttagttttgttggtattcattctgtaaaatattttatataaccatgcctttctctgatttttactcatgattaagctgttagaaagttatcgcattatagttggaaaagagttttctttggtaatttatcggggtttttgatgtcaagtcgcatgtctatagactctacaaattcaatgtattctaaattgaattatgaattttcctttagtcttgttcctgcttttatttccttatttttgaatgtcaccactatctacctaatgacatagacaaaaagctgtaaattgtcctatacttttttttctccttgttccctttgtcaaattggttacccagtgttggagagtttcttcccctcaaaaacctttcaaatatttatccttctctgcccctttctttccaccctgtacatactgccttgtttcaaaccctcatcatcttcctgcatatatcctacagatgcataaactcagtggttttcaagtcatctgttatgggagtttttggtaaaaggtgccctgttcccactgcagtgatggtagccctgttttaatctttaatagaataagcgtttgtggatttcactggtctccttaccactcttcacttctcctgccttccatctggctgcctgacattttgaaaacaaagctaatcatatggcttttttcctgctgaaaccttccttggtcctcatcatgtagggtggtatttgtaaactcaaaacgcctgcagggactagaaaggtgagttaaatggatgaagtgaactggatgcaagagcagtgggagaagggagaagtgctgtggcaaactgtcccatctaaaagggacgcctgcctcttgtatccacgtgggaatgtgggcccactttgtcatagtgcccagttttttaaaaagaagccagaaattcagattgttatgagaaatgttctgattgaatattgactttagtcgagtttttaaaatgcagaccaacattgtatgtacttgacctacttggaatttctggaatgtgctattttgtcttgtgattctctgtaaatgatattccctgttttttttttttttttttttcttttttcctttgagatggagtctctgtcgcccaggctggagtacagtggcatgatctcagctcactgcaacctccgtctcccaggttcaagtgattctcctgcctcagcctcccgagtagctgggattataggcatgtaccaccatgcctggctaatttttgtatttttagtagagatggggtttcaccatgttggccaggctggtcttgaactcctcacctcaagtgatccacccacctcgccctcccaaagtgttagtattataggcgtgagccactgcactcagcctgatgttccctcttttataagtgccattccttcttcctacctcacaacctagcaaaattggattcttcaaaacgccaggttggcctttcttgactccaaaagaggtgactcttgtagcattcttacaggcctaacatagcacttactttatgttgcaatgctgtgtgcaatgctgtgtttttttactcactagctctgagcaaaacattatttattcttggtaattgtaacacttggtagtgaagacatattttttgccatataatggattatactttgtatttgaatccatgtgaatcagtagcatattggtcttcattgtttttcctccttctccgacgtttttttgagacagggtctcactctgttgcccaggctggagtgcagggcacaattacagctccctgcagccttgatttctcaggctcaagccatcctcttgcctcagcttccctagtagccgggactataggtgcatgccaccatactcagctaatctttttaggtttttagtagagacaaggtctcactatgttgcccaggctggtcttgaactcctaagctcaagcagtcctcccgccttggcctctgaatgtgctgggattacaggcatgagccactatgcctaaccatattttttccaatattaaaaaatctttttttccccctaaggaatgtgttatataaggtcaacatgtttttagtgcttcagtttgacttgtctacatctaaagttaactctttaaggcttacatttatgattataattctttccatcgagggatttagtctccattattgtcatgtttcttgatttttttcattatacttggttcttctttttgtctaggttttatatataccttaattaattctttcttggctgttttatatctatgttgctgtcagcatgggaatctctattattagaaagctattaacttttaggacctttggcgattcccttgtctaccagtttaaagccccggtgcttctctcctcctcgcttcc

SEQ ID NO: 288466 - DNA, 901 bp, Homo sapiens
tggtggcgcgtgcttgtaatcccagctactcaggagtctgaggcaggagaatcgcttgaactcctaagctcaagcagtcctcccgccttggcctctgaatgtgctgggattacaggcatgagccactatgcctaaccatattttttccaatattaaaaaatctttttttccccctaaggaatgtgttatataaggtcaacatgtttttagtgcttcagtttgacttgtctacatctaaagttaactctttaaggcttacatttatgattataattctttccatcgagggatttagtctccattattgtcatgtttcttgatttttttcattatacttggttcttctttttgtctaggttttatatataccttaattaattctttcttggctgttttatatctatgttgctgtcagcatgggaatctctattattagaaagctattaacttttaaaatatgtatcttttggtgattttctttgttctaacagttttagatggcctgtttgctctttctaaatataaaatcataggtatttctattttgtttttgtgtttcataaaattgtaataagtttttttgatattttttcattacatatgaagttaattgttggttttaaacaaatgttctttgttaggataacagaaataacatcttctattcttgtttgttggaagctaaaagcttgataaaaggaattggtgtcttttgatacaatcaaatttttatcacttaaattgcctaatatgattataataagggtttttgtaatattaaaacatccttaaattcctgagataaaactctacctggttatagtatatgttcttttaatgtattatctttcctatttgctgtacatctatacattcataaataaaattcatttatatttta

SEQ ID NO: 288467 - DNA, 410 bp, Homo sapiens
agctggagctgcagaagctggtcctctggcttctgtccctgctcagtcggccaagaagccctgcccaggtaaaccttaaagggggtcagtgaactaagaagaagcttgtccagcttggaagatctgaaaacaagccttctgtttagctttaatttgtaaccattcattcatttaatgatagatttgtaatggtcataataatatctacctcacagtgtcttgcgagaagtaaagaagatggaaaaggagaaaatgtccttttggaagaatacatttgggcatgggtggttggggatggggtgggacattgaacaggcaaagagaggctaaaattgagtgcagatggggctagtccagggcaagtgctgaagatggcagctgctatctgcagctcctaggtgctttcctca

SEQ ID NO: 288468 - DNA, 289 bp, Homo sapiens
ctgccaaaaaaaaaagaaaaactaatatttcaggtgttccctcatttctgtaccaggtctgtttgctctacaacaaaggggaagccctgtatggctactgcaacctcaaggataaatgcaacaagtttcatgtgtgcaaatcctttgtgaaaggagaatgcaaacttcagacctgcaaacggtcccatcagcttatccatgctgcatctttgaagctgctacaggaccaaggactgaatattccaagtgttgttaattttcagataatctccactacaagcatataagc

SEQ ID NO: 288469 - DNA, 1666 bp, Homo sapiens
gatagaccatccgtgtggcgcgcgggtccagatgaggtaagtgaacatggtgcatagatgttcccgaggagatcctggtcttgactagtgctatggattctcgagctaatataaaagcagtccggcggaacgcgaggcgttctgacaactgttgcacgagggagttctgagggtcacttaccatcggatctgttgcataccaggacgtcctacaggcgatgctcgatgatgctaaagtaatcagccccgggctcggccactgcactcagcctgatgttccctcttttataagtgccattccttcttcctacctcacaacctagcaaaattggattcttcaaaacgccaggttggcctttcttgactccaaaagaggtgactcttgtagcattcttacaggcctaacatagcacttactttatgttgcaatgctgtgtgcaatgctgtgtttttttactcactagctctgagcaaaacattatttattcttggtaattgtaacacttggtagtgaagacatattttttgccatataatggattatactttgtatttgaatccatgtgaatcagtagcatattggtcttcattgtttttcctccttctccgacgtttttttgagacagggtctcactctgttgcccaggctggagtgcagggcacaattacagctccctgcagccttgatttctcaggctcaagccatcctcttgcctcagcttccctagtagccgggactataggtgcatgccaccatactcagctaatctttttaggtttttagtagagacaaggtctcactatgttgcccaggctggtcttgaactcctaagctcaagcagtcctcccgccttggcctctgaatgtgctgggattacaggcatgagccactatgcctaaccatattttttccaatattaaaaaatctttttttccccctaaggaatgtgttatataaggtcaacatgtttttagtgcttcagtttgacttgtctacatctaaagttaactctttaaggcttacatttatgattataattctttccatcgagggatttagtctccattattgtcatgtttcttgatttttttcattatacttggttcttctttttgtctaggttttatatataccttaattaattctttcttggctgttttatatctatgttgctgtcagcatgggaatctctattattagaaagctattaacttttaaaatatgtatcttttggtgattttctttgttctaacagttttagatggcctgtttgctctttctaaatataaaatcataggtatttctattttgtttttgtgtttcataaaattgtaataagtttttttgatattttttcattacatatgaagttaattgttggttttaaacaaatgttctttgttaggataacagaaataacatcttctattcttgtttgttggaagctaaaagcttgataaaaggaattggtgtcttttgatacaatcaaatttttatcacttaaattgcctaatatgattataataagggtttttgtaatattaaaacatccttaaattcctgagataaaactctacctggttatagtatatgttcttttaatgtattatctttcctatttgctgtacatctatacattcataaataaaattcatttatatttta

SEQ ID NO: 288470 - DNA, 433 bp, Homo sapiens
gatcccccggaagcacactgcaacacgggatgcctcgtgaaacacagctgggcaagtattaatgtatatggaacagcctggatttctgcatatggataagccaccttggaataggaagaggtgttgagcctggactgtgggaggaaagagctgcgtggatagattcaaacttcctgtggtagtgctcccagtctgacctctgtagaccttcagtactcactcttcttgcttaggctctctgtgtgttgaaagccatcccgtgttgcatgtgttgttacaattttctgtgatacttgcaatttatgtttgagaagaagtgaaaagtttgccttctgacctcatttccttcttgatcagtgaacactaacattttggggacaacttagtcaattggttttccttacaacaaaataaagtaaaatgtagcagtctg

SEQ ID NO: 288471 - DNA, 208 bp, Homo sapiens
actactactgctcgaattcaagcttctaacgatgtacggggacgtgttgttacaattttctgtgatacttgcaatttatgtttgagaagaagtgaaaagtttgccttctgacctcatttccttcttgatcagtgaacactaacattttggggacaacttagtcaattggttttccttacaacaaaataaagtaaaatgtagcagtctg

SEQ ID NO: 288472 - DNA, 1770 bp, Homo sapiens
acccggctacttccgctgctgtttcgtagccgactgctgaaggctggtttgcgtcgacatggcggttaccctgagtctcttgctgggcgggcgcgtttgcgccgccgtcactcgctgtgggttcgcgacccggggggtggcgggcccaggccctattggccgggagccggaccccgattccgactgggagccggaggaacgggagctgcaggaggtggagaggtaccggcttctccccgggccctcagcttgaagcagggcctcgtgccccggcgctccaggccgcgcccccttggcgccgggtgtcctgccgctgcttgcgcagcggcccttgtttcttcttacccgttgttaggggcgcagcgtcaggtgttcagctcccctgggaccactggtcccttcattagtgacgtatttcatcatcagtttagagagttcggcatgcttacaggcagttattgttctaggtgttagctttctgggtgtacggagcagctctaagccggcaacatggcccggttgcccttgcgatcaaagagaagagggctgggcgctccatgatttagcctgaggctcttcaaacatccattctgcttccacgcatggcttctgccattggttctcttcccccagcaccctgaaacgacagaaacaagcaatccgattccagaaaattcggaggcaaatggaggcgcctggtgccccgcccaggaccctgacgtgggaagccatggagcagatacggtatttacatgaggaatttccagagtcctggtcagttcccaggttggctgaaggctttgatgtcagcactgatgtgatccgaagagttttaaaaagcaagtttttacccacattggagcagaagctgaagcaggatcaaaaagtccttaagaaagctgggcttgcccactcgctgcagcacctccggggctctggaaatacctcaaagctgctccctgcaggccactctgtatcaggctctttgcttatgccagggcatgaagcctcatctaaagacccaaatcacagcacagctttgaaagtgatagagtcagacactcacaggacaaatacaccaaggagaaggaagggaagaaataaagaaatccaggacctggaggagagctttgtgcctgttgctgcacccctaggtcatccaagagagctgcagaagtactccagtgattctgagagccccagaggaactggcagtggtgcgttgccaagtggtcagaagctggaggagttgaaggcagaggagccagataacttcagcagcaaagtagtgcagaggggccgagagttctttgacagcaacgggaacttcctgtacagaatttgagtcggggcttggcttatggagatgcctcgtgaaacacagctgggcaagtattaatgtatatggaacagcctggatttctgcatatggataagccaccttggaataggaagaggtgttgagcctggactgtgggaggaaagagctgcgtggatagattcaaacttcctgtggtagtgctcccagtctgacctctgtagaccttcagtactcactcttcttgcttaggctctctgtgtgttgaaagccatcccgtgttgcatgtgttgttacaattttctgtgatacttgcaatttatgtttgagaagaagtgaaaagtttgccttctgacctcatttccttcttgatcagtgaacactaacattttggggacaacttagtcaattggttttccttacaacaaaataaagtaaaatgtagcagtctg

SEQ ID NO: 288473 - DNA, 260 bp, Homo sapiens
aagtataaatgtatatagaagaggaaaagctagccttcagtactcactcttcttgcttaggctctctgtgtgttgaaagccatcccgtgttgcatgtgttgttacaattttctgtgatacttgcaatttatgtttgagaagaagtgaaaagtttgccttctgacctcatttccttcttgatcagtgaacactaacattttggggacaacttagtcaattggttttccttacaacaaaataaagtaaaatgtagcagtctg

SEQ ID NO: 288474 - DNA, 1986 bp, Homo sapiens
cctgaaaggaacttacaaaagattttgctaacaaaacccccagcgggcgtttaaaatttaaaaaacgaggcatactatacgtctaggtacgaaggctgggtggcgctggtttgcgtcgacatggcggttaccctgagtctcttgctgggcgggcgcgtttgcgccgccgtcactcgctgtgggttcgcgacccggggggtggcgggcccaggccctattggccgggagccggaccccgattccgactgggagccggaggaacgggagctgcaggaggtggagaggtaccggcttctccccgggccctcagcttgaagcagggcctcgtgccccggcgctccaggccgcgcccccttggcgccgggtgtcctgccgctgcttgcgcagcggcccttgtttcttcttacccgttgttaggggcgcagcgtcaggtgttcagctcccctgggaccactggtcccttcattagtgacgtatttcatcatcagtttagagagttcggcatgcttacaggcagttattgttctaggtgttagctttctgggtgtacggagcagctctaagccggcaacatggcccggttgcccttgcgatcaaagagaagagggctgggcgctccatgatttagcctgaggctcttcaaacatccattctgcttccacgcatggcttctgccattggttctcttcccccagcaccctgaaacgacagaaacaagcaatccgattccagaaaattcggaggcaaatggaggcgcctggtgccccgcccaggaccctgacgtgggaagccatggagcagatacggtatttacatgaggaatttccagagtcctggtcagttcccaggttggctgaaggctttgatgtcagcactgatgtgatccgaagagttttaaaaagcaagtttttacccacattggagcagaagctgaagcaggatcaaaaagtccttaagaaagctgggcttgcccactcgctgcagcacctccggggctctggaaatacctcaaagctgctccctgcaggccactctgtatcaggctctttgcttatgccagggcatgaagcctcatctaaagacccaaatcacagcacagctttgaaagtgatagagtcagacactcacaggacaaatacaccaaggagaaggaagggaagaaataaagaaatccaggacctggaggagagctttgtgcctgttgctgcacccctaggtcatccaagagagctgcagaagtactccagtgattctgagagccccagaggaactggcagtggtgcgttgccaagtggtcagaagctggaggagttgaaggcagaggagccagataacttcagcagcaaagtagtgcagaggggccgagagttctttgacagcaacgggaacttcctgtacagaatttgagtcggggcttggcttatggagatgcctcgtgaaacacagctgggcaagtattaatgtatatggaacagcctggatttctgcatatggataagccaccttggaataggaagaggtgttgagcctggactgtgggaggaaagagctgcgtggatagattcaaacttcctgtggtagtgctcccagtctgacctctgtagaccttcagtactcactcttcttgcttaggctctctgtgtgttgaaagccatcccgtgttgcatgtgttgttacaattttctgtgatacttgcaatttatgtttgagaagaagtgaaaagtttgccttctgacctcatttccttcttgatcagtgaacactaacattttggggacaacttagtcaattggttttccttacaacaaaataaagtaaaatgtagcagtctgaacaacacacaacaaagacacaacaacaaaaaccggggggcaacatggggggggggggaaaagagcgtataaaaggcacacggccaaagcgtcccgccaccgtttggtacaggggaacaccggggcccaaaggagcgaaactcaaacacggaca

SEQ ID NO: 288475 - DNA, 2303 bp, Homo sapiens
cctgaaaggaacttacaaaagattttgctaacaaaacccccagcgggcgtttaaaatttaaaaaacgaggcatactatacgtctaggtacgaaggctgggtggcgctggtttgcgtcgacatggcggttaccctgagtctcttgctgggcgggcgcgtttgcgccgccgtcactcgctgtgggttcgcgacccggggggtggcgggcccaggccctattggccgggagccggaccccgattccgactgggagccggaggaacgggagctgcaggaggtggagaggtaccggcttctccccgggccctcagcttgaagcagggcctcgtgccccggcgctccaggccgcgcccccttggcgccgggtgtcctgccgctgcttgcgcagcggcccttgtttcttcttacccgttgttaggggcgcagcgtcaggtgttcagctcccctgggaccactggtcccttcattagtgacgtatttcatcatcagtttagagagttcggcatgcttacaggcagttattgttctaggtgttagctttctgggtgtacggagcagctctaagccggcaacatggcccggttgcccttgcgatcaaagagaagagggctgggcgctccatgatttagcctgaggctcttcaaacatccattctgcttccacgcatggcttctgccattggttctcttcccccagcaccctgaaacgacagaaacaagcaatccgattccagaaaattcggaggcaaatggaggcgcctggtgccccgcccaggaccctgacgtgggaagccatggagcagatacggtatttacatgaggaatttccagagtcctggtcagttcccaggttggctgaaggctttgatgtcagcactgatgtgatccgaagagttttaaaaagcaagtttttacccacattggagcagaagctgaagcaggatcaaaaagtccttaagaaagctgggcttgcccactcgctgcagcacctccggggctctggaaatacctcaaagctgctccctgcaggccactctgtatcaggctctttgcttatgccagggcatgaagcctcatctaaagacccaaatcacagcacagctttgaaagtgatagagtcagacactcacaggacaaatacaccaaggagaaggaagggaagaaataaagaaatccaggacctggaggagagctttgtgcctgttgctgcacccctaggtcatccaagagagctgcagaagtactccagtgattctgagagccccagaggaactggcagtggtgcgttgccaagtggtcagaagctggaggagttgaaggcagaggagccagataacttcagcagcaaagtagtgcagaggggccgagagttctttgacagcaacgggaacttcctgtacagaatttgagtcggggcttggcttatggagatgcctcgtgaaacacagctgggcaagtattaatgtatatggaacagcctggatttctgcatatggataagccaccttggaataggaagaggtgttgagcctggactgtgggaggaaagagctgcgtggatagattcaaacttcctgtggtagtgctcccagtctgacctctgtagaccttcagtactcactcttcttgcttaggctctctgtgtgttgaaagccatcccgtgttgcatgtgttgttacaattttctgtgatacttgcaatttatgtttgagaagaagtgaaaagtttgccttctgacctcatttccttcttgatcagtgaacactaacattttggggacaacttagtcaattggttttccttacaacaaaataaagtaaaatgtagcagtctgaaaaaaaaaaatacaaaaaaatataaatgaaaagaagtgaaaaacaaatggagaaaaaagaagaagggggaagaaaaaaaggagaacgagaatacgaaagagagggcgcggggggaagcatatcaggggaggaggagaggaaaaaagccaggagaggaaaaaaccgcacatagggcactatcaaacacacacgaaccccgacgggcggtagcacaaacgcaaacgtacagcgacaaggagcggacacgggacccacccagtacgggagagcacagaagcaagccaccataggacgctccgagagaacaagaaggcgggacgcacaccacagcgtacgggacacccgaccgaacacaacaaaagggcgcaaacaacaaacaaaacgacagacgccaagaaagcaaaacagcgacaacagaggaccgagacgacacgccgacgcagagcaaagacagccagcaggaccaccag

SEQ ID NO: 288476 - DNA, 1858 bp, Homo sapiens
cctgaaaggaacttacaaaagattttgctaacaaaacccccagcgggcgtttaaaatttaaaaaacgaggcatactatacgtctaggtacgaaggctgggtggcgctggtttgcgtcgacatggcggttaccctgagtctcttgctgggcgggcgcgtttgcgccgccgtcactcgctgtgggttcgcgacccggggggtggcgggcccaggccctattggccgggagccggaccccgattccgactgggagccggaggaacgggagctgcaggaggtggagaggtaccggcttctccccgggccctcagcttgaagcagggcctcgtgccccggcgctccaggccgcgcccccttggcgccgggtgtcctgccgctgcttgcgcagcggcccttgtttcttcttacccgttgttaggggcgcagcgtcaggtgttcagctcccctgggaccactggtcccttcattagtgacgtatttcatcatcagtttagagagttcggcatgcttacaggcagttattgttctaggtgttagctttctgggtgtacggagcagctctaagccggcaacatggcccggttgcccttgcgatcaaagagaagagggctgggcgctccatgatttagcctgaggctcttcaaacatccattctgcttccacgcatggcttctgccattggttctcttcccccagcaccctgaaacgacagaaacaagcaatccgattccagaaaattcggaggcaaatggaggcgcctggtgccccgcccaggaccctgacgtgggaagccatggagcagatacggtatttacatgaggaatttccagagtcctggtcagttcccaggttggctgaaggctttgatgtcagcactgatgtgatccgaagagttttaaaaagcaagtttttacccacattggagcagaagctgaagcaggatcaaaaagtccttaagaaagctgggcttgcccactcgctgcagcacctccggggctctggaaatacctcaaagctgctccctgcaggccactctgtatcaggctctttgcttatgccagggcatgaagcctcatctaaagacccaaatcacagcacagctttgaaagtgatagagtcagacactcacaggacaaatacaccaaggagaaggaagggaagaaataaagaaatccaggacctggaggagagctttgtgcctgttgctgcacccctaggtcatccaagagagctgcagaagtactccagtgattctgagagccccagaggaactggcagtggtgcgttgccaagtggtcagaagctggaggagttgaaggcagaggagccagataacttcagcagcaaagtagtgcagaggggccgagagttctttgacagcaacgggaacttcctgtacagaatttgagtcggggcttggcttatggagatgcctcgtgaaacacagctgggcaagtattaatgtatatggaacagcctggatttctgcatatggataagccaccttggaataggaagaggtgttgagcctggactgtgggaggaaagagctgcgtggatagattcaaacttcctgtggtagtgctcccagtctgacctctgtagaccttcagtactcactcttcttgcttaggctctctgtgtgttgaaagccatcccgtgttgcatgtgttgttacaattttctgtgatacttgcaatttatgtttgagaagaagtgaaaagtttgccttctgacctcatttccttcttgatcagtgaacactaacattttggggacaacttagtcaattggttttccttacaacaaaataaagtaaaatgtagcagtctgaaggccccaaaaggggaaccgagctg

SEQ ID NO: 288477 - DNA, 1611 bp, Homo sapiens
gccctgggaattccccgatcggtgtgttataccggaggaacgggagctgcaggaggtggagaggtaccggcttctccccgggccctcagcttgaagcagggcctcgtgccccggcgctccaggccgcgcccccttggcgccgggtgtcctgccgctgcttgcgcagcggcccttgtttcttcttacccgttgttaggggcgcagcgtcaggtgttcagctcccctgggaccactggtcccttcattagtgacgtatttcatcatcagtttagagagttcggcatgcttacaggcagttattgttctaggtgttagctttctgggtgtacggagcagctctaagccggcaacatggcccggttgcccttgcgatcaaagagaagagggctgggcgctccatgatttagcctgaggctcttcaaacatccattctgcttccacgcatggcttctgccattggttctcttcccccagcaccctgaaacgacagaaacaagcaatccgattccagaaaattcggaggcaaatggaggcgcctggtgccccgcccaggaccctgacgtgggaagccatggagcagatacggtatttacatgaggaatttccagagtcctggtcagttcccaggttggctgaaggctttgatgtcagcactgatgtgatccgaagagttttaaaaagcaagtttttacccacattggagcagaagctgaagcaggatcaaaaagtccttaagaaagctgggcttgcccactcgctgcagcacctccggggctctggaaatacctcaaagctgctccctgcaggccactctgtatcaggctctttgcttatgccagggcatgaagcctcatctaaagacccaaatcacagcacagctttgaaagtgatagagtcagacactcacaggacaaatacaccaaggagaaggaagggaagaaataaagaaatccaggacctggaggagagctttgtgcctgttgctgcacccctaggtcatccaagagagctgcagaagtactccagtgattctgagagccccagaggaactggcagtggtgcgttgccaagtggtcagaagctggaggagttgaaggcagaggagccagataacttcagcagcaaagtagtgcagaggggccgagagttctttgacagcaacgggaacttcctgtacagaatttgagtcggggcttggcttatggagatgcctcgtgaaacacagctgggcaagtattaatgtatatggaacagcctggatttctgcatatggataagccaccttggaataggaagaggtgttgagcctggactgtgggaggaaagagctgcgtggatagattcaaacttcctgtggtagtgctcccagtctgacctctgtagaccttcagtactcactcttcttgcttaggctctctgtgtgttgaaagccatcccgtgttgcatgtgttgttacaattttctgtgatacttgcaatttatgtttgagaagaagtgaaaagtttgccttctgacctcatttccttcttgatcagtgaacactaacattttggggacaacttagtcaattggttttccttacaacaaaataaagtaaaatgtagcagtctg

SEQ ID NO: 288478 - DNA, 1880 bp, Homo sapiens
cctgaaaggaacttacaaaagattttgctaacaaaacccccagcgggcgtttaaaatttaaaaaacgaggcatactatacgtctaggtacgaaggctgggtggcgctggtttgcgtcgacatggcggttaccctgagtctcttgctgggcgggcgcgtttgcgccgccgtcactcgctgtgggttcgcgacccggggggtggcgggcccaggccctattggccgggagccggaccccgattccgactgggagccggaggaacgggagctgcaggaggtggagaggtaccggcttctccccgggccctcagcttgaagcagggcctcgtgccccggcgctccaggccgcgcccccttggcgccgggtgtcctgccgctgcttgcgcagcggcccttgtttcttcttacccgttgttaggggcgcagcgtcaggtgttcagctcccctgggaccactggtcccttcattagtgacgtatttcatcatcagtttagagagttcggcatgcttacaggcagttattgttctaggtgttagctttctgggtgtacggagcagctctaagccggcaacatggcccggttgcccttgcgatcaaagagaagagggctgggcgctccatgatttagcctgaggctcttcaaacatccattctgcttccacgcatggcttctgccattggttctcttcccccagcaccctgaaacgacagaaacaagcaatccgattccagaaaattcggaggcaaatggaggcgcctggtgccccgcccaggaccctgacgtgggaagccatggagcagatacggttgtgacgttcccaacctaaggtacagggatgctggtgcttccataggtatttacatgaggaatttccagagtcctggtcagttcccaggttggctgaaggctttgatgtcagcactgatgtgatccgaagagttttaaaaagcaagtttttacccacattggagcagaagctgaagcaggatcaaaaagtccttaagaaagctgggcttgcccactcgctgcagcacctccggggctctggaaatacctcaaagctgctccctgcaggccactctgtatcaggctctttgcttatgccagggcatgaagcctcatctaaagacccaaatcacagcacagctttgaaagtgatagagtcagacactcacaggacaaatacaccaaggagaaggaagggaagaaataaagaaatccaggacctggaggagagctttgtgcctgttgctgcacccctaggtcatccaagagagctgcagaagtactccagtgattctgagagccccagaggaactggcagtggtgcgttgccaagtggtcagaagctggaggagttgaaggcagaggagccagataacttcagcagcaaagtagtgcagaggggccgagagttctttgacagcaacgggaacttcctgtacagaatttgagtcggggcttggcttatggagatgcctcgtgaaacacagctgggcaagtattaatgtatatggaacagcctggatttctgcatatggataagccaccttggaataggaagaggtgttgagcctggactgtgggaggaaagagctgcgtggatagattcaaacttcctgtggtagtgctcccagtctgacctctgtagaccttcagtactcactcttcttgcttaggctctctgtgtgttgaaagccatcccgtgttgcatgtgttgttacaattttctgtgatacttgcaatttatgtttgagaagaagtgaaaagtttgccttctgacctcatttccttcttgatcagtgaacactaacattttggggacaacttagtcaattggttttccttacaacaaaataaagtaaaatgtagcagtctg

SEQ ID NO: 288479 - DNA, 1420 bp, Homo sapiens
cctgaaaggaacttacaaaagattttgctaacaaaacccccagcgggcgtttaaaatttaaaaaacgaggcatactatacgtctaggtacgaaggctgggtggcgctggtttgcgtcgacatggcggttaccctgagtctcttgctgggcgggcgcgtttgcgccgccgtcactcgctgtgggttcgcgacccggggggtggcgggcccaggccctattggccgggagccggaccccgattccgactgggagccggaggaacgggagctgcaggaggtggagagaccctgaaacgacagaaacaagcaatccgattccagaaaattcggaggcaaatggaggcgcctggtgccccgcccaggaccctgacgtgggaagccatggagcagatacggtatttacatgaggaatttccagagtcctggtcagttcccaggttggctgaaggctttgatgtcagcactgatgtgatccgaagagttttaaaaagcaagtttttacccacattggagcagaagctgaagcaggatcaaaaagtccttaagaaagctgggcttgcccactcgctgcagcacctccggggctctggaaatacctcaaagctgctccctgcaggccactctgtatcaggctctttgcttatgccagggcatgaagcctcatctaaagacccaaatcacagcacagctttgaaagtgatagagtcagacactcacaggacaaatacaccaaggagaaggaagggaagaaataaagaaatccaggacctggaggagagctttgtgcctgttgctgcacccctaggtcatccaagagagctgcagaagtactccagtgattctgagagccccagaggaactggcagtggtgcgttgccaagtggtcagaagctggaggagttgaaggcagaggagccagataacttcagcagcaaagtagtgcagaggggccgagagttctttgacagcaacgggaacttcctgtacagaatttgagtcggggcttggcttatggagatgcctcgtgaaacacagctgggcaagtattaatgtatatggaacagcctggatttctgcatatggataagccaccttggaataggaagaggtgttgagcctggactgtgggaggaaagagctgcgtggatagattcaaacttcctgtggtagtgctcccagtctgacctctgtagaccttcagtactcactcttcttgcttaggctctctgtgtgttgaaagccatcccgtgttgcatgtgttgttacaattttctgtgatacttgcaatttatgtttgagaagaagtgaaaagtttgccttctgacctcatttccttcttgatcagtgaacactaacattttggggacaacttagtcaattggttttccttacaacaaaataaagtaaaatgtagcagtctg

SEQ ID NO: 288480 - DNA, 1804 bp, Homo sapiens
cctgaaaggaacttacaaaagattttgctaacaaaacccccagcgggcgtttaaaatttaaaaaacgaggcatactatacgtctaggtacgaaggctgggtggcgctggtttgcgtcgacatggcggttaccctgagtctcttgctgggcgggcgcgtttgcgccgccgtcactcgctgtgggttcgcgacccggggggtggcgggcccaggccctattggccgggagccggaccccgattccgactgggagccggaggaacgggagctgcaggaggtggagaggtaccggcttctccccgggccctcagcttgaagcagggcctcgtgccccggcgctccaggccgcgcccccttggcgccgggtgtcctgccgctgcttgcgcagcggcccttgtttcttcttacccgttgttaggggcgcagcgtcaggtgttcagctcccctgggaccactggtcccttcattagtgacgtatttcatcatcagtttagagagttcggcatgcttacaggcagttattgttctaggtgttagctttctgggtgtacggagcagctctaagccggcaacatggcccggttgcccttgcgatcaaagagaagagggctgggcgctccatgatttagcctgaggctcttcaaacatccattctgcttccacgcatggcttctgccattggttctcttcccccagcaccctgaaacgacagaaacaagcaatccgattccagaaaattcggaggcaaatggaggcgcctggtgccccgcccaggaccctgacgtgggaagccatggagcagatacggtatttacatgaggaatttccagagtcctggtcagttcccaggttggctgaaggctttgatgtcagcactgatgtgatccgaagagttttaaaaagcaagtttttacccacattggagcagaagctgaagcaggatcaaaaagtccttaagaaagctgggcttgcccactcgctgcagcacctccggggctctggaaatacctcaaagctgctccctgcaggccactctgtatcaggctctttgcttatgccagggcatgaagcctcatctaaagacccaaatcacagcacagctttgaaagtgatagagtcagacactcacaggacaaatacaccaaggagaaggaagggaagaaataaagaaatccaggacctggaggagagctttgtgcctgttgctgcacccctaggtcatccaagagagctgcagaagtactccagtgattctgagagccccagaggaactggcagtggtgcgttgccaagtggtcagaagctggaggagttgaaggcagaggagccagataacttcagcagcaaagtagtgcagaggggccgagagttctttgacagcaacgggaacttcctgtacagaatttgagtcggggcttggcttatggagatgcctcgtgaaacacagctgggcaagtattaatgtggataagccaccttggaataggaagaggtgttgagcctggactgtgggaggaaagagctgcgtggatagattcaaacttcctgtggtagtgctcccagtctgacctctgtagaccttcagtactcactcttcttgcttaggctctctgtgtgttgaaagccatcccgtgttgcatgtgttgttacaattttctgtgatacttgcaatttatgtttgagaagaagtgaaaagtttgccttctgacctcatttccttcttgatcagtgaacactaacattttggggacaacttagtcaattggttttccttacaacaaaataaagtaaaatgtagcagtctg

SEQ ID NO: 288481 - DNA, 1696 bp, Homo sapiens
cctgaaaggaacttacaaaagattttgctaacaaaacccccagcgggcgtttaaaatttaaaaaacgaggcatactatacgtctaggtacgaaggctgggtggcgctggtttgcgtcgacatggcggttaccctgagtctcttgctgggcgggcgcgtttgcgccgccgtcactcgctgtgggttcgcgacccggggggtggcgggcccaggccctattggccgggagccggaccccgattccgactgggagccggaggaacgggagctgcaggaggtggagaggtaccggcttctccccgggccctcagcttgaagcagggcctcgtgccccggcgctccaggccgcgcccccttggcgccgggtgtcctgccgctgcttgcgcagcggcccttgtttcttcttacccgttgttaggggcgcagcgtcaggtgttcagctcccctgggaccactggtcccttcattagtgacgtatttcatcatcagtttagagagttcggcatgcttacaggcagttattgttctaggtgttagctttctgggtgtacggagcagctctaagccggcaacatggcccggttgcccttgcgatcaaagagaagagggctgggcgctccatgatttagcctgaggctcttcaaacatccattctgcttccacgcatggcttctgccattggttctcttcccccagcaccctgaaacgacagaaacaagcaatccgattccagaaaattcggaggcaaatggaggcgcctggtgccccgcccaggaccctgacgtgggaagccatggagcagatacggtatttacatgaggaatttccagagtcctggtcagttcccaggttggctgaaggctttgatgtcagcactgatgtgatccgaagagttttaaaaagcaagtttttacccacattggagcagaagctgaagcaggatcaaaaagtccttaagaaagctgggcttgcccactcgctgcagcacctccggggctctggaaatacctcaaagctgctccctgcaggccactctgtatcaggctctttgcttatgccagggcatgaagcctcatctaaagacccaaatcacagcacagctttgaaagtgatagagtcagacactcacaggacaaatacaccaaggagaaggaagggaagaaataaagaaatccaggacctggaggagagctttgtgcctgttgctgcacccctaggtcatccaagagagctgcagaagtactccagtgattctgagagccccagaggaactggcagtggtgcgttgccaagtggtcagaagctggaggagttgaaggcagaggagccagataacttcagcagcaaagtagtgcagaggggccgagagttctttgacagcaacgggaacttcctgtacagaatttgagtcggggcttggcttatggagatgcctcgtgaaacacagctgggcaagtattaatgtatatggaacagcctggatttctgcatatggataagccaccttggaataggaagaggtgttgagcctggactgtgggaggaaagagctgcgtggatagattcaaacttcctgtggtagtgctcccagtctgacctctgtagaccttcagtactcactcttcttgcttaggctctctgtgtgttgaaagccatcccgtgttgcatccccagggggccggtaccgagctcgattt

SEQ ID NO: 288482 - DNA, 1699 bp, Homo sapiens
cctgaaaggaacttacaaaagattttgctaacaaaacccccagcgggcgtttaaaatttaaaaaacgaggcatactatacgtctaggtacgaaggctgggtggcgctggtttgcgtcgacatggcggttaccctgagtctcttgctgggcgggcgcgtttgcgccgccgtcactcgctgtgggttcgcgacccggggggtggcgggcccaggccctattggccgggagccggaccccgattccgactgggagccggaggaacgggagctgcaggaggtggagaggtaccggcttctccccgggccctcagcttgaagcagggcctcgtgccccggcgctccaggccgcgcccccttggcgccgggtgtcctgccgctgcttgcgcagcggcccttgtttcttcttacccgttgttaggggcgcagcgtcaggtgttcagctcccctgggaccactggtcccttcattagtgacgtatttcatcatcagtttagagagttcggcatgcttacaggcagttattgttctaggtgttagctttctgggtgtacggagcagctctaagccggcaacatggcccggttgcccttgcgatcaaagagaagagggctgggcgctccatgatttagcctgaggctcttcaaacatccattctgcttccacgcatggcttctgccattggttctcttcccccagcaccctgaaacgacagaaacaagcaatccgattccagaaaattcggaggcaaatggaggcgcctggtgccccgcccaggaccctgacgtgggaagccatggagcagatacggtatttacatgaggaatttccagagtcctggtcagttcccaggttggctgaaggctttgatgtcagcactgatgtgatccgaagagttttaaaaagcaagtttttacccacattggagcagaagctgaagcaggatcaaaaagtccttaagaaagctgggcttgcccactcgctgcagcacctccggggctctggaaatacctcaaagctgctccctgcaggccactctgtatcaggctctttgcttatgccagggcatgaagcctcatctaaagacccaaatcacagcacagctttgaaagtgatagagtcagacactcacaggacaaatacaccaaggagaaggaagggaagaaataaagaaatccaggacctggaggagagctttgtgcctgttgctgcacccctaggtcatccaagagagctgcagaagtactccagtgattctgagagccccagaggaactggcagtggtgcgttgccaagtggtcagaagctggaggagttgaaggcagaggagccagataacttcagcagcaaagtagtgcagaggggccgagagttctttgacagcaacgggaacttcctgtacagaatttgagtcggggcttggcttatggagatgcctcgtgaaacacagctgggcaagtattaatgtatatggaacagcctggatttctgcatatggataagccaccttggaataggaagaggtgttgagcctggactgtgggaggaaagagctgcgtggatagattcaaacttcctgtggtagtgctcccagtctgacctctgtagaccttcagtactcactcttcttgcttaggctctctgtgtgttgaaagccatcccgtgttgcatacatgcaagcccgtacatcccgtactcacagg

SEQ ID NO: 288483 - DNA, 1611 bp, Homo sapiens
cctgaaaggaacttacaaaagattttgctaacaaaacccccagcgggcgtttaaaatttaaaaaacgaggcatactatacgtctaggtacgaaggctgggtggcgctggtttgcgtcgacatggcggttaccctgagtctcttgctgggcgggcgcgtttgcgccgccgtcactcgctgtgggttcgcgacccggggggtggcgggcccaggccctattggccgggagccggaccccgattccgactgggagccggaggaacgggagctgcaggaggtggagaggtaccggcttctccccgggccctcagcttgaagcagggcctcgtgccccggcgctccaggccgcgcccccttggcgccgggtgtcctgccgctgcttgcgcagcggcccttgtttcttcttacccgttgttaggggcgcagcgtcaggtgttcagctcccctgggaccactggtcccttcattagtgacgtatttcatcatcagtttagagagttcggcatgcttacaggcagttattgttctaggtgttagctttctgggtgtacggagcagctctaagccggcaacatggcccggttgcccttgcgatcaaagagaagagggctgggcgctccatgatttagcctgaggctcttcaaacatccattctgcttccacgcatggcttctgccattggttctcttcccccagcaccctgaaacgacagaaacaagcaatccgattccagaaaattcggaggcaaatggaggcgcctggtgccccgcccaggaccctgacgtgggaagccatggagcagatacggtatttacatgaggaatttccagagtcctggtcagttcccaggttggctgaaggctttgatgtcagcactgatgtgatccgaagagttttaaaaagcaagtttttacccacattggagcagaagctgaagcaggatcaaaaagtccttaagaaagctgggcttgcccactcgctgcagcacctccggggctctggaaatacctcaaagctgctccctgcaggccactctgtatcaggctctttgcttatgccagggcatgaagcctcatctaaagacccaaatcacagcacagctttgaaagtgatagagtcagacactcacaggacaaatacaccaaggagaaggaagggaagaaataaagaaatccaggacctggaggagagctttgtgcctgttgctgcacccctaggtcatccaagagagctgcagaagtactccagtgattctgagagccccagaggaactggcagtggtgcgttgccaagtggtcagaagctggaggagttgaaggcagaggagccagataacttcagcagcaaagtagtgcagaggggccgagagttctttgacagcaacgggaacttcctgtacagaatttgagtcggggcttggcttatggagatgcctcgtgaaacacagctgggcaagtattaatgtatatggaacagcctggatttctgcatataagtgaaaagtttgccttctgacctcatttccttcttgatcagtgaacactaacattttggggacaacttagtcaattggttttccttacaacaaaataaagtaaaatgtagcagtctg

SEQ ID NO: 288484 - DNA, 1610 bp, Homo sapiens
cctgaaaggaacttacaaaagattttgctaacaaaacccccagcgggcgtttaaaatttaaaaaacgaggcatactatacgtctaggtacgaaggctgggtggcgctggtttgcgtcgacatggcggttaccctgagtctcttgctgggcgggcgcgtttgcgccgccgtcactcgctgtgggttcgcgacccggggggtggcgggcccaggccctattggccgggagccggaccccgattccgactgggagccggaggaacgggagctgcaggaggtggagaggtaccggcttctccccgggccctcagcttgaagcagggcctcgtgccccggcgctccaggccgcgcccccttggcgccgggtgtcctgccgctgcttgcgcagcggcccttgtttcttcttacccgttgttaggggcgcagcgtcaggtgttcagctcccctgggaccactggtcccttcattagtgacgtatttcatcatcagtttagagagttcggcatgcttacaggcagttattgttctaggtgttagctttctgggtgtacggagcagctctaagccggcaacatggcccggttgcccttgcgatcaaagagaagagggctgggcgctccatgatttagcctgaggctcttcaaacatccattctgcttccacgcatggcttctgccattggttctcttcccccagcaccctgaaacgacagaaacaagcaatccgattccagaaaattcggaggcaaatggaggcgcctggtgccccgcccaggaccctgacgtgggaagccatggagcagatacggtatttacatgaggaatttccagagtcctggtcagttcccaggttggctgaaggctttgatgtcagcactgatgtgatccgaagagttttaaaaagcaagtttttacccacattggagcagaagctgaagcaggatcaaaaagtccttaagaaagctgggcttgcccactcgctgcagcacctccggggctctggaaatacctcaaagctgctccctgcaggccactctgtatcaggctctttgcttatgccagggcatgaagcctcatctaaagacccaaatcacagcacagctttgaaagtgatagagtcagacactcacaggacaaatacaccaaggagaaggaagggaagaaataaagaaatccaggacctggaggagagctttgtgcctgttgctgcacccctaggtcatccaagagagctgcagaagtactccagtgattctgagagccccagaggaactggcagtggtgcgttgccaagtggtcagaagctggaggagttgaaggcagaggagccagataacttcagcagcaaagtagtgcagaggggccgagagttctttgacagcaacgggaacttcctgtacagaatttgagtcggggcttggcttatggagatgcctcgtgaaacacagctgggcaagtattaatgtatatggaacagcctggatttctgcatatggataagccaccttggaataggaagaggtgttgagcctggactgtgggaggaaagagctgcgtggatagatgaaggggctccccagtatttaaccttttggaaaaaacctaaactact

SEQ ID NO: 288485 - DNA, 1662 bp, Homo sapiens
cctgaaaggaacttacaaaagattttgctaacaaaacccccagcgggcgtttaaaatttaaaaaacgaggcatactatacgtctaggtacgaaggctgggtggcgctggtttgcgtcgacatggcggttaccctgagtctcttgctgggcgggcgcgtttgcgccgccgtcactcgctgtgggttcgcgacccggggggtggcgggcccaggccctattggccgggagccggaccccgattccgactgggagccggaggaacgggagctgcaggaggtggagaggtaccggcttctccccgggccctcagcttgaagcagggcctcgtgccccggcgctccaggccgcgcccccttggcgccgggtgtcctgccgctgcttgcgcagcggcccttgtttcttcttacccgttgttaggggcgcagcgtcaggtgttcagctcccctgggaccactggtcccttcattagtgacgtatttcatcatcagtttagagagttcggcatgcttacaggcagttattgttctaggtgttagctttctgggtgtacggagcagctctaagccggcaacatggcccggttgcccttgcgatcaaagagaagagggctgggcgctccatgatttagcctgaggctcttcaaacatccattctgcttccacgcatggcttctgccattggttctcttcccccagcaccctgaaacgacagaaacaagcaatccgattccagaaaattcggaggcaaatggaggcgcctggtgccccgcccaggaccctgacgtgggaagccatggagcagatacggtatttacatgaggaatttccagagtcctggtcagttcccaggttggctgaaggctttgatgtcagcactgatgtgatccgaagagttttaaaaagcaagtttttacccacattggagcagaagctgaagcaggatcaaaaagtccttaagaaagctgggcttgcccactcgctgcagcacctccggggctctggaaatacctcaaagctgctccctgcaggccactctgtatcaggctctttgcttatgccagggcatgaagcctcatctaaagacccaaatcacagcacagctttgaaagtgatagagtcagacactcacaggacaaatacaccaaggagaaggaagggaagaaataaagaaatccaggacctggaggagagctttgtgcctgttgctgcacccctaggtcatccaagagagctgcagaagtactccagtgattctgagagccccagaggaactggcagtggtgcgttgccaagtggtcagaagctggaggagttgaaggcagaggagccagataacttcagcagcaaagtagtgcagaggggccgagagttctttgacagcaacgggaacttcctgtacagaatttgagtcggggcttggcttatggagatgcctcgtgaaacacagctgggcaagtattaatgtatatggaacagcctggatttctgcatatggataagccaccttggaataggaagaggtgttgagcctggactgtgggaggaaagagctgcgtggatagattcggggaacaatattacacacagcaatgaatacgactagagacgatcgtattcgcgcgtcggtacacgcgcagatgcttgtgctccgcttctgggctaa

SEQ ID NO: 288486 - DNA, 1761 bp, Homo sapiens
cctgaaaggaacttacaaaagattttgctaacaaaacccccagcgggcgtttaaaatttaaaaaacgaggcatactatacgtctaggtacgaaggctgggtggcgctggtttgcgtcgacatggcggttaccctgagtctcttgctgggcgggcgcgtttgcgccgccgtcactcgctgtgggttcgcgacccggggggtggcgggcccaggccctattggccgggagccggaccccgattccgactgggagccggaggaacgggagctgcaggaggtggagaggtaccggcttctccccgggccctcagcttgaagcagggcctcgtgccccggcgctccaggccgcgcccccttggcgccgggtgtcctgccgctgcttgcgcagcggcccttgtttcttcttacccgttgttaggggcgcagcgtcaggtgttcagctcccctgggaccactggtcccttcattagtgacgtatttcatcatcagtttagagagttcggcatgcttacaggcagttattgttctaggtgttagctttctgggtgtacggagcagctctaagccggcaacatggcccggttgcccttgcgatcaaagagaagagggctgggcgctccatgatttagcctgaggctcttcaaacatccattctgcttccacgcatggcttctgccattggttctcttcccccagcaccctgaaacgacagaaacaagcaatccgattccagaaaattcggaggcaaatggaggcgcctggtgccccgcccaggaccctgacgtgggaagccatggagcagatacggtatttacatgaggaatttccagagtcctggtcagttcccaggttggctgaaggctttgatgtcagcactgatgtgatccgaagagttttaaaaagcaagtttttacccacattggagcagaagctgaagcaggatcaaaaagtccttaagaaagctgggcttgcccactcgctgcagcacctccggggctctggaaatacctcaaagctgctccctgcaggccactctgtatcaggctctttgcttatgccagggcatgaagcctcatctaaagacccaaatcacagcacagctttgaaagtgatagagtcagacactcacaggacaaatacaccaaggagaaggaagggaagaaataaagaaatccaggacctggaggagagctttgtgcctgttgctgcacccctaggtcatccaagagagctgcagaagtactccagtgattctgagagccccagaggaactggcagtggtgcgttgccaagtggtcagaagctggaggagttgaaggcagaggagccagataacttcagcagcaaagtagtgcagaggggccgagagttctttgacagcaacgggaacttcctgtacagaatttgagtcggggcttggcttatggagatgcctcgtgaaacacagctgggcaagtattaatgtatatggaacagcctggatttctgcatattcaaacttcctgtggtagtgctcccagtctgacctctgtagaccttcagtactcactcttcttgcttaggctctctgtgtgttgaaagccatcccgtgttgcatgtgttgttacaattttctgtgatacttgcaatttatgtttgagaagaagtgaaaagtttgccttctgacctcatttccttcttgatcagtgaacactaacattttggggacaacttagtcaattggttttccttacaacaaaataaagtaaaatgtagcagtctg

SEQ ID NO: 288487 - DNA, 1310 bp, Homo sapiens
cctgaaaggaacttacaaaagattttgctaacaaaacccccagcgggcgtttaaaatttaaaaaacgaggcatactatacgtctaggtacgaaggctgggtggcgctggtttgcgtcgacatggcggttaccctgagtctcttgctgggcgggcgcgtttgcgccgccgtcactcgctgtgggttcgcgacccggggggtggcgggcccaggccctattggccgggagccggaccccgattccgactgggagccggaggaacgggagctgcaggaggtggagaggtatttacatgaggaatttccagagtcctggtcagttcccaggttggctgaaggctttgatgtcagcactgatgtgatccgaagagttttaaaaagcaagtttttacccacattggagcagaagctgaagcaggatcaaaaagtccttaagaaagctgggcttgcccactcgctgcagcacctccggggctctggaaatacctcaaagctgctccctgcaggccactctgtatcaggctctttgcttatgccagggcatgaagcctcatctaaagacccaaatcacagcacagctttgaaagtgatagagtcagacactcacaggacaaatacaccaaggagaaggaagggaagaaataaagaaatccaggacctggaggagagctttgtgcctgttgctgcacccctaggtcatccaagagagctgcagaagtactccagtgattctgagagccccagaggaactggcagtggtgcgttgccaagtggtcagaagctggaggagttgaaggcagaggagccagataacttcagcagcaaagtagtgcagaggggccgagagttctttgacagcaacgggaacttcctgtacagaatttgagtcggggcttggcttatggagatgcctcgtgaaacacagctgggcaagtattaatgtatatggaacagcctggatttctgcatatggataagccaccttggaataggaagaggtgttgagcctggactgtgggaggaaagagctgcgtggatagattcaaacttcctgtggtagtgctcccagtctgacctctgtagaccttcagtactcactcttcttgcttaggctctctgtgtgttgaaagccatcccgtgttgcatgtgttgttacaattttctgtgatacttgcaatttatgtttgagaagaagtgaaaagtttgccttctgacctcatttccttcttgatcagtgaacactaacattttggggacaacttagtcaattggttttccttacaacaaaataaagtaaaatgtagcagtctg

SEQ ID NO: 288488 - DNA, 1465 bp, Homo sapiens
cctgaaaggaacttacaaaagattttgctaacaaaacccccagcgggcgtttaaaatttaaaaaacgaggcatactatacgtctaggtacgaaggctgggtggcgctggtttgcgtcgacatggcggttaccctgagtctcttgctgggcgggcgcgtttgcgccgccgtcactcgctgtgggttcgcgacccggggggtggcgggcccaggccctattggccgggagccggaccccgattccgactgggagccggaggaacgggagctgcaggaggtggagaggtaccggcttctccccgggccctcagcttgaagcagggcctcgtgccccggcgctccaggccgcgcccccttggcgccgggtgtcctgccgctgcttgcgcagcggcccttgtttcttcttacccgttgttaggggcgcagcgtcaggtgttcagctcccctgggaccactggtcccttcattagtgacgtatttcatcatcagtttagagagttcggcatgcttacaggcagttattgttctaggtgttagctttctgggtgtacggagcagctctaagccggcaacatggcccggttgcccttgcgatcaaagagaagagggctgggcgctccatgatttagcctgaggctcttcaaacatccattctgcttccacgcatggcttctgccattggttctcttcccccagcatgaagcctcatctaaagacccaaatcacagcacagctttgaaagtgatagagtcagacactcacaggacaaatacaccaaggagaaggaagggaagaaataaagaaatccaggacctggaggagagctttgtgcctgttgctgcacccctaggtcatccaagagagctgcagaagtactccagtgattctgagagccccagaggaactggcagtggtgcgttgccaagtggtcagaagctggaggagttgaaggcagaggagccagataacttcagcagcaaagtagtgcagaggggccgagagttctttgacagcaacgggaacttcctgtacagaatttgagtcggggcttggcttatggagatgcctcgtgaaacacagctgggcaagtattaatgtatatggaacagcctggatttctgcatatggataagccaccttggaataggaagaggtgttgagcctggactgtgggaggaaagagctgcgtggatagattcaaacttcctgtggtagtgctcccagtctgacctctgtagaccttcagtactcactcttcttgcttaggctctctgtgtgttgaaagccatcccgtgttgcatgtgttgttacaattttctgtgatacttgcaatttatgtttgagaagaagtgaaaagtttgccttctgacctcatttccttcttgatcagtgaacactaacattttggggacaacttagtcaattggttttccttacaacaaaataaagtaaaatgtagcagtctg

SEQ ID NO: 288489 - DNA, 1555 bp, Homo sapiens
cctgaaaggaacttacaaaagattttgctaacaaaacccccagcgggcgtttaaaatttaaaaaacgaggcatactatacgtctaggtacgaaggctgggtggcgctggtttgcgtcgacatggcggttaccctgagtctcttgctgggcgggcgcgtttgcgccgccgtcactcgctgtgggttcgcgacccggggggtggcgggcccaggccctattggccgggagccggaccccgattccgactgggagccggaggaacgggagctgcaggaggtggagaggtaccggcttctccccgggccctcagcttgaagcagggcctcgtgccccggcgctccaggccgcgcccccttggcgccgggtgtcctgccgctgcttgcgcagcggcccttgtttcttcttacccgttgttaggggcgcagcgtcaggtgttcagctcccctgggaccactggtcccttcattagtgacgtatttcatcatcagtttagagagttcggcatgcttacaggcagttattgttctaggtgttagctttctgggtgtacggagcagctctaagccggcaacatggcccggttgcccttgcgatcaaagagaagagggctgggcgctccatgatttagcctgaggctcttcaaacatccattctgcttccacgcatggcttctgccattggttctcttcccccagcaccctgaaacgacagaaacaagcaatccgattccagaaaattcggaggcaaatggaggcgcctggtgccccgcccaggaccctgacgtgggaagccatggagcagatacggtatttacatgaggaatttccagagtcctggtcagttcccaggttggctgaaggctttgatgtcagcactgatgtgatccgaagagttttaaaaagcaagtttttacccacattggagcagaagctgaagcaggatcaaaaagtccttaagaaagctgggcttgcccactcgctgcagcacctccggggctctggaaatacctcaaagctgctccctgcaggccactctgtatcaggctctttgcttatgccagggcatgaagcctcatctaaagacccaaatcacagcacagctttgaaagtgatagagtcagacactcacaggacaaatacaccaaggagaaggaagggaagaaataaagaaatccaggacctggaggagagctttgtgcctgttgctgcacccctaggtcatccaagagagctgcagaagtactccagtgattctgagagccccagaggaactggcagtggtgcgttgccaagtggtcagaagctggaggagttgaaggcagaggagccccttcagtactcactcttcttgcttaggctctctgtgtgttgaaagccatcccgtgttgcatgtgttgttacaattttctgtgatacttgcaatttatgtttgagaagaagtgaaaagtttgccttctgacctcatttccttcttgatcagtgaacactaacattttggggacaacttagtcaattggttttccttacaacaaaataaagtaaaatgtagcagtctg

SEQ ID NO: 288490 - DNA, 1637 bp, Homo sapiens
cctgaaaggaacttacaaaagattttgctaacaaaacccccagcgggcgtttaaaatttaaaaaacgaggcatactatacgtctaggtacgaaggctgggtggcgctggtttgcgtcgacatggcggttaccctgagtctcttgctgggcgggcgcgtttgcgccgccgtcactcgctgtgggttcgcgacccggggggtggcgggcccaggccctattggccgggagccggaccccgattccgactgggagccggaggaacgggagctgcaggaggtggagaggtaccggcttctccccgggccctcagcttgaagcagggcctcgtgccccggcgctccaggccgcgcccccttggcgccgggtgtcctgccgctgcttgcgcagcggcccttgtttcttcttacccgttgttaggggcgcagcgtcaggtgttcagctcccctgggaccactggtcccttcattagtgacgtatttcatcatcagtttagagagttcggcatgcttacaggcagttattgttctaggtgttagctttctgggtgtacggagcagctctaagccggcaacatggcccggttgcccttgcgatcaaagagaagagggctgggcgctccatgatttagcctgaggctcttcaaacatccattctgcttccacgcatggcttctgccattggttctcttcccccagcaccctgaaacgacagaaacaagcaatccgattccagaaaattcggaggcaaatggaggcgcctggtgccccgcccaggaccctgacgtgggaagccatggagcagatacggtatttacatgaggaatttccagagtcctggtcagttcccaggttggctgaaggctttgatgtcagcactgatgtgatccgaagagttttaaaaagcaagtttttacccacattggagcagaagctgaagcaggatcaaaaagtccttaagaaagctgggcttgcccactcgctgcagcacctccggggctctggaaatacctcaaagctgctccctgcaggccactctgtatcaggctctttgcttatgccagggcatgaagcctcatctaaagacccaaatcacagcacagctttgaaagtgatagagtcagacactcacaggacaaatacaccaaggagaaggaagggaagaaataaagaaatccaggacctggaggagagctttgtgcctgttgctgcacccctaggtcatccaagagagctgcagaagtactccagtgattctgagagccccagaggaactggcagtggtgcgttgccaagtggtcagaagctggaggagttgaaggcagaggagcctttctttatttcttcccttccttctccttggtgtatttgtcctgtgagtgtctgactctatcactttcaaagctgtgctgtgatttgggtctttagatgaggcttcatgccctggcataagcaaagagcctgatacagagtggcgtgttgttacaattttctgtgatacttgcaatttatgtttgagaagaagtgaaaagtttgccttctgacctcatttccttcttgatcagtgaacactaacattttggggacaacttagtcaattggttttccttacaacaaaataaagtaaaatgtagcagtctg

SEQ ID NO: 288491 - DNA, 1531 bp, Homo sapiens
  misc_feature (1524)..(1524): n is a, c, g, or t
  misc_feature (1529)..(1529): n is a, c, g, or t
cctgaaaggaacttacaaaagattttgctaacaaaacccccagcgggcgtttaaaatttaaaaaacgaggcatactatacgtctaggtacgaaggctgggtggcgctggtttgcgtcgacatggcggttaccctgagtctcttgctgggcgggcgcgtttgcgccgccgtcactcgctgtgggttcgcgacccggggggtggcgggcccaggccctattggccgggagccggaccccgattccgactgggagccggaggaacgggagctgcaggaggtggagaggtaccggcttctccccgggccctcagcttgaagcagggcctcgtgccccggcgctccaggccgcgcccccttggcgccgggtgtcctgccgctgcttgcgcagcggcccttgtttcttcttacccgttgttaggggcgcagcgtcaggtgttcagctcccctgggaccactggtcccttcattagtgacgtatttcatcatcagtttagagagttcggcatgcttacaggcagttattgttctaggtgttagctttctgggtgtacggagcagctctaagccggcaacatggcccggttgcccttgcgatcaaagagaagagggctgggcgctccatgatttagcctgaggctcttcaaacatccattctgcttccacgcatggcttctgccattggttctcttcccccagcaccctgaaacgacagaaacaagcaatccgattccagaaaattcggaggcaaatggaggcgcctggtgccccgcccaggaccctgacgtgggaagccatggagcagatacggtatttacatgaggaatttccagagtcctggtcagttcccaggttggctgaaggctttgatgtcagcactgatgtgatccgaagagttttaaaaagcaagtttttacccacattggagcagaagctgaagcaggatcaaaaagtccttaagaaagctgggcttgcccactcgctgcagcacctccggggctctggaaatacctcaaagctgctccctgcaggccactctgtatcaggctctttgcttatgccagggcatgaagcctcatctaaagacccaaatcacagcacagctttgaaagtgatagagtcagacactcacaggacaaatacaccaaggagaaggaagggaagaaataaagaaatccaggacctggaggagagctttgtgcctgttgctgcacccctaggtcatccaagagagctgcagaatcaaacttcctgtggtagtgctcccagtctgacctctgtagaccttcagtactcactcttcttgcttaggctctctgtgtgttgaaagccatcccgtgttgcatgtgttgttacaattttctgtgatacttgcaatttatgtttgagaagaagtgaaaagtttgccttctgacctcatttccttcttgatcagtgaacactaacattttggggacaacttagtcaattggttttccttacaacaaaataaagtaaaatgtagcagtctgggggggggggggggggngaaanct

SEQ ID NO: 288492 - DNA, 1186 bp, Homo sapiens
cctgaaaggaacttacaaaagattttgctaacaaaacccccagcgggcgtttaaaatttaaaaaacgaggcatactatacgtctaggtacgaaggctgggtggcgctggtttgcgtcgacatggcggttaccctgagtctcttgctgggcgggcgcgtttgcgccgccgtcactcgctgtgggttcgcgacccggggggtggcgggcccaggccctattggccgggagccggaccccgattccgactgggagccggaggaacgggagctgcaggaggtggagaggtaccggcttctccccgggccctcagcttgaagcagggcctcgtgccccggcgctccaggccgcgcccccttggcgccgggtgtcctgccgctgcttgcgcagcggcccttgtttcttcttacccgttgttaggggcgcagcgtcaggtgttcagctcccctgggaccactggtcccttcattagtgacgtatttcatcatcagtttagagagttcggcatgcttacaggcagttattgttctaggtgttagctttctgggtgtacggagcagctctaagccggcaacatggcccggttgcccttgcgatcaaagagaagagggctgggcgctccatgatttagcctgaggctcttcaaacatccattctgcttccacgcatggcttctgccattggttctcttcccccagcaccctgaaacgacagaaacaagcaatccgattccagaaaattcggaggcaaatggaggcgcctggtgccccgcccaggaccctgacgtgggaagccatggagcagatacggtatttacatgaggaatttccagagtcctggtcagttcccaggttggctgaaggctttgatgtcagcactgatgtgatccgaagagttttaaaaagcaagtttttacccacattggagcagaagctgaagcaggatcaaaaagtccttaagaaagctgggcttgcccactcgctgcagcacctccggggctctggaaatacctcaaagctgctccctgcaggccactctgtatcaggctctttgcttatgccagggcatgaagcctcatctaaagacccaaatcacagcacagctttgaaagtgatagagtcagacactcacaggacaaatacaccaaggagaaggaaggaaggcagtggaggctaacagcgcgtgaggg

SEQ ID NO: 288493 - DNA, 771 bp, Homo sapiens
atttagcatgcacattgcactccagcctgggcagcacgagcgaaactccatctcaaacagaaagagaaaaagcgagagagagcgcgagctcccgggaagaaataaagaaatccaggacctggaggagagctttgtgcctgttgctgcacccctaggtcatccaagagagctgcagaagtactccagtgattctgagagccccagaggaactggcagtggtgcgttgccaagtggtcagaagctggaggagttgaaggcagaggagccagataacttcagcagcaaagtagtgcagaggggccgagagttctttgacagcaacgggaacttcctgtacagaatttgagtcggggcttggcttatggagatgcctcgtgaaacacagctgggcaagtattaatgtatatggaacagcctggatttctgcatatggataagccaccttggaataggaagaggtgttgagcctggactgtgggaggaaagagctgcgtggatagattcaaacttcctgtggtagtgctcccagtctgacctctgtagaccttcagtactcactcttcttgcttaggctctctgtgtgttgaaagccatcccgtgttgcatgtgttgttacaattttctgtgatacttgcaatttatgtttgagaagaagtgaaaagtttgccttctgacctcatttccttcttgatcagtgaacactaacattttggggacaacttagtcaattggttttccttacaacaaaataaagtaaaatgtagcagtctg

SEQ ID NO: 288494 - DNA, 631 bp, Homo sapiens
aataggctagtagaggccgcgtgttactcgtgagagggtactccagtgattctgagagccccagaggaactggcagtggtgcgttgccaagtggtcagaagctggaggagttgaaggcagaggagccagataacttcagcagcaaagtagtgcagaggggccgagagttctttgacagcaacgggaacttcctgtacagaatttgagtcggggcttggcttatggagatgcctcgtgaaacacagctgggcaagtattaatgtatatggaacagcctggatttctgcatatggataagccaccttggaataggaagaggtgttgagcctggactgtgggaggaaagagctgcgtggatagattcaaacttcctgtggtagtgctcccagtctgacctctgtagaccttcagtactcactcttcttgcttaggctctctgtgtgttgaaagccatcccgtgttgcatgtgttgttacaattttctgtgatacttgcaatttatgtttgagaagaagtgaaaagtttgccttctgacctcatttccttcttgatcagtgaacactaacattttggggacaacttagtcaattggttttccttacaacaaaataaagtaaaatgtagcagtctg

SEQ ID NO: 288495 - DNA, 1083 bp, Homo sapiens
cctgaaaggaacttacaaaagattttgctaacaaaacccccagcgggcgtttaaaatttaaaaaacgaggcatactatacgtctaggtacgaaggctgggtggcgctggtttgcgtcgacatggcggttaccctgagtctcttgctgggcgggcgcgtttgcgccgccgtcactcgctgtgggttcgcgacccggggggtggcgggcccaggccctattggccgggagccggaccccgattccgactgggagccggaggaacgggagctgcaggaggtggagaggtaccggcttctccccgggccctcagcttgaagcagggcctcgtgccccggcgctccaggccgcgcccccttggcgccgggtgtcctgccgctgcttgcgcagcggcccttgtttcttcttacccgttgttaggggcgcagcgtcaggtgttcagctcccctgggaccactggtcccttcattagtgacgtatttcatcatcagtttagagagttcggcatgcttacaggcagttattgttctaggtgttagctttctgggtgtacggagcagctctaagccggcaacatggcccggttgcccttgcgatcaaagagaagagggctgggcgctccatgatttagcctgaggctcttcaaacatccattctgcttccacgcatggcttctgccattggttctcttcccccagcaccctgaaacgacagaaacaagcaatccgattccagaaaattcggaggcaaatggaggcgcctggtgccccgcccaggaccctgacgtgggaagccatggagcagatacggtatttacatgaggaatttccagagtcctggtcagttcccaggttggctgaaggctttgatgtcagcactgatgtgatccgaagagttttaaaaagcaagtttttacccacattggagcagaagctgaagcaggatcaaaaagtccttaagaaagctgggcttgcccactcgctgcagccaacctgggaactgaccaggactctggaaattcctcatgtaaataccgtctgctccatggcttcccacgtcaggtcctggcagctgttctcccagtcg

SEQ ID NO: 288496 - DNA, 1207 bp, Homo sapiens
cctgaaaggaacttacaaaagattttgctaacaaaacccccagcgggcgtttaaaatttaaaaaacgaggcatactatacgtctaggtacgaaggctgggtggcgctggtttgcgtcgacatggcggttaccctgagtctcttgctgggcgggcgcgtttgcgccgccgtcactcgctgtgggttcgcgacccggggggtggcgggcccaggccctattggccgggagccggaccccgattccgactgggagccggaggaacgggagctgcaggaggtggagagaccctgaaacgacagaaacaagcaatccgattccagaaaattcggaggcaaatggaggcgcctggtgccccgcccaggaccctgacgtgggaagccatggagcagatacggtatttacatgaggaatttccagagtcctggtcagttcccaggttggctgaaggctttgatgtcagcactgatgtgatccgaagagttttaaaaagcaagtttttacccacattggagcagaagctgaagcaggatcaaaaagtccttaagaaagctgggcttgcccactcgctgcagcacctccggggctctggaaatacctcaaagctgctccctgcaggccactctgtatcaggctctttgcttatgccagggcatgaagcctcatctaaagacccaaatcacagcacagctttgaaagtgatagaagataacttcagcagcaaagtagtgcagaggggccgagagttctttgacagcaacgggaacttcctgtacagaatttgagtcggggcttggcttatggagatgcctcgtgaaacacagctgggcaagtattaatgtatatggaacagcctggatttctgcatatggataagccaccttggaataggaagaggtgttgagcctggactgtgggaggaaagagctgcgtggatagattcaaacttcctgtggtagtgctcccagtctgacctctgtagaccttcagtactcactcttcttgcttaggctctctgtgtgttgaaagccatcccgtgttgcatgtgttgttacaattttctgtgatacttgcaatttatgtttgagaagaagtgaaaagtttgccttctgacctcatttccttcttgatcagtgaacactaacattttggggacaacttagtcaattggttttccttacaacaaaataaagtaaaatgtagcagtctg

SEQ ID NO: 288497 - DNA, 960 bp, Homo sapiens
cctgaaaggaacttacaaaagattttgctaacaaaacccccagcgggcgtttaaaatttaaaaaacgaggcatactatacgtctaggtacgaaggctgggtggcgctggtttgcgtcgacatggcggttaccctgagtctcttgctgggcgggcgcgtttgcgccgccgtcactcgctgtgggttcgcgacccggggggtggcgggcccaggccctattggccgggagccggaccccgattccgactgggagccggaggaacgggagctgcaggaggtggagaggtaccggcttctccccgggccctcagcttgaagcagggcctcgtgccccggcgctccaggccgcgcccccttggcgccgggtgtcctgccgctgcttgcgcagcggcccttgtttcttcttacccgttgttaggggcgcagcgtcaggtgttcagctcccctgggaccactggtcccttcattagtgacgtatttcatcatcagtttgagagttctttgacagcaacgggaacttcctgtacagaatttgagtcggggcttggcttatggagatgcctcgtgaaacacagctgggcaagtattaatgtatatggaacagcctggatttctgcatatggataagccaccttggaataggaagaggtgttgagcctggactgtgggaggaaagagctgcgtggatagattcaaacttcctgtggtagtgctcccagtctgacctctgtagaccttcagtactcactcttcttgcttaggctctctgtgtgttgaaagccatcccgtgttgcatgtgttgttacaattttctgtgatacttgcaatttatgtttgagaagaagtgaaaagtttgccttctgacctcatttccttcttgatcagtgaacactaacattttggggacaacttagtcaattggttttccttacaacaaaataaagtaaaatgtagcagtctg

SEQ ID NO: 288498 - DNA, 1143 bp, Homo sapiens
cctgaaaggaacttacaaaagattttgctaacaaaacccccagcgggcgtttaaaatttaaaaaacgaggcatactatacgtctaggtacgaaggctgggtggcgctggtttgcgtcgacatggcggttaccctgagtctcttgctgggcgggcgcgtttgcgccgccgtcactcgctgtgggttcgcgacccggggggtggcgggcccaggccctattggccgggagccggaccccgattccgactgggagccggaggaacgggagctgcaggaggtggagagaccctgaaacgacagaaacaagcaatccgattccagaaaattcggaggcaaatggaggcgcctggtgccccgcccaggaccctgacgtgggaagccatggagcagatacggtatttacatgaggaatttccagagtcctggtcagttcccaggttggctgaaggctttgatgtcagcactgatgtgatccgaagagttttaaaaagcaagtttttacccacattggagcagaagctgaagcaggatcaaaaagtccttaagaaagctgggcttgcccactcgctgcagcacctccggggctctggaaatacctcaaagctgctccctgcaggccactctgtatcaggctctttgcttatgccagggcatgaagcctcatctaaagacccaaatcacagcacagctttgaaagtgatagagtcagacactcacaggacaaatacaccaaggagaaggaagggaagaaataaagaaatccaggacctggaggagagctttgtgcctgttgctgcacccctaggtcatccaagagagctgcagaagtactccagtgattctgagagccccagaggaactggcagtggtgcgttgccaagtggtcagaagctggaggagttgaaggcagaggagccccttcagtactcactcttcttgcttaggctctctgtgtgttgaaagccatcccgtgttgcatgtgttgttacaattttctgtgatacttgcaatttatgtttgagaagaagtgaaaagtttgccttctgacctcatttccttcttgatcagtgaacactaacattttggggacaacttagtcaattggttttccttacaacaaaataaagtaaaatgtagcagtctg

SEQ ID NO: 288499 - DNA, 661 bp, Homo sapiens
  misc_feature (22)..(22): n is a, c, g, or t
gctctatggagctgcaggaatncttcacgaggtcacttcccaggttggctgaaggctttgatgtcagcactgatgtgatccgaagagttttaaaaagcaagtttttacccacattggagcagaagctgaagcaggatcaacctccggggctctggaaatacctcaaagctgctccctgcaggccactctgtatcaggctctttgcttatgccagggcatgaagcctcatctaaagacccaaatcacagcacagctttgaaagtgatagagtcagacactcacaggacaaatacaccaaggagaaggaagggaagaaataaagaaatccaggacctggaggagagctttgtgcctgttgctgcacccctaggtcatccaagagagctgcagaatcaaacttcctgtggtagtgctcccagtctgacctctgtagaccttcagtactcactcttcttgcttaggctctctgtgtgttgaaagccatcccgtgttgcatgtgttgttacaattttctgtgatacttgcaatttatgtttgagaagaagtgaaaagtttgccttctgacctcatttccttcttgatcagtgaacactaacattttggggacaacttagtcaattggttttccttacaacaaaataaagtaaaatgtagcagtctg

SEQ ID NO: 288500 - DNA, 569 bp, Homo sapiens
gggaacttcctgtacagaatttgagtcggggcttggcttatggagatgcctcgtgaaacacagctgggcaagtattaatgtatatggaacagcctggatttctgcatatggataagccaccttggaataggaagaggtgttgagcctggactgtgggaggaaagagctgcgtggatagattcaaacttcctgtggtagtgctcccagtctgacctctgtagaccttcagtactcactcttcttgcttaggctctctgtgtgttgaaagccatcccgtgttgcatgtgttgttacaattttctgtgatacttgcaatttatgtttgagaagaagtgaaaagtttgccttctgacctcatttccttcttgatcagtgaacactaacattttggggacaacttagtcaattggttttccttacaacaaaataaagtaaaatgtagcagtctgctgcctctttggtgctctttggggtgggatggtttacctgtgaaccttggagagagggaaggacaaaggcagaaaggaaggatccctggtcagtaaacattgggagagagatggaaccag

SEQ ID NO: 288501 - DNA, 1346 bp, Homo sapiens
ggcacgagggtttagagagttcggcatgcttacaggcagttattgttctaggtgttcagctccccgggaccactggtcccttcattagtgacgtatttcatcatcagtttaagagaagagggctgggcgctccatgatttagcctgaggctcttcaaacatccattctgcttccacgcatggcttctgccattggttctcttcccccagcaccctgaaacgacagaaacaagcaatccgattccagaaaattcggaggcaaatggaggcgcctggtgccccgcccaggaccctgacgtgggaagccatggagcagatacggtatttacatgaggaatttccagagtcctggtcagttcccaggttggctgaaggctttgatgtcagcactgatgtgatccgaagagttttaaaaagcaagtttttacccacattggagcagaagctgaagcaggatcaaaaagtccttaagaaagctgggcttgcccactcgctgcagcacctccggggctctggaaatacctcaaagctgctccctgcaggccactctgtatcaggctctttgcttatgccagggcatgaagcctcatctaaagacccaaatcacagcacagctttgaaagtgatagagtcagacactcacaggacaaatacaccaaggagaaggaagggaagaaataaagaaatccaggacctggaggagagctttgtgcctgttgctgcacccctaggtcatccaagagagctgcagaagtactccagtgattctgagagccccagaggaactggcagtggtgcgttgccaagtggtcagaagctggaggagttgaaggcagaggagccagataacttcagcagcaaagtagtgcagaggggccgagagttctttgacagcaacgggaacttcctgtacagaatttgagtcggggcttggcttatggagatgcctcgtgaaacacagctgggcaagtattaatgtatatggaacagcctggatttctgcatatggataagccaccttggaataggaagaggtgttgagcctggactgtgggaggaaagagctgcgtggatagattcaaacttcctgtggtagtgctcccagtctgacctctgtagaccttcagtactcactcttcttgcttaggctctctgtgtgttgaaagccatcccgtgttgcatgtgttgttacaattttctgtgatacttgcaatttatgtttgagaagaagtgaaaagtttgccttctgacctcatttccttcttgatcagtgaacactaacattttggggacaacttagtcaattggttttccttacaacaaaataaagtaaaatgtagcagtctg

SEQ ID NO: 288502 - DNA, 1832 bp, Homo sapiens
cctgaaaggaacttacaaaagattttgctaacaaaacccccagcgggcgtttaaaatttaaaaaacgaggcatactatacgtctaggtacgaaggctgggtggcgctggtttgcgtcgacatggcggttaccctgagtctcttgctgggcgggcgcgtttgcgccgccgtcactcgctgtgggttcgcgacccggggggtggcgggcccaggccctattggccgggagccggaccccgattccgactgggagccggaggaacgggagctgcaggaggtggagaggtaccggcttctccccgggccctcagcttgaagcagggcctcgtgccccggcgctccaggccgcgcccccttggcgccgggtgtcctgccgctgcttgcgcagcggcccttgtttcttcttacccgttgttaggggcgcagcgtcaggtgttcagctcccctgggaccactggtcccttcattagtgacgtatttcatcatcagtttagagagttcggcatgcttacaggcagttattgttctaggtgttagctttctgggtgtacggagcagctctaagccggcaacatggcccggttgcccttgcgatcaaagagaagagggctgggcgctccatgatttagcctgaggctcttcaaacatccattctgcttccacgcatggcttctgccattggttctcttcccccagcaccctgaaacgacagaaacaagcaatccgattccagaaaattcggaggcaaatggaggcgcctggtgccccgcccaggaccctgacgtgggaagccatggagcagatacggtatttacatgaggaatttccagagtcctggtcagttcccaggttggctgaaggctttgatgtcagcactgatgtgatccgaagagttttaaaaagcaagtttttacccacattggagcagaagctgaagcaggatcaaaaagtccttaagaaagctgggcttgcccactcgctgcagcacctccggggctctggaaatacctcaaagctgctccctgcaggccactctgtatcaggctctttgcttatgccagggcatgaagcctcatctaaagacccaaatcacagcacagctttgaaagtgatagagtcagacactcacaggacaaatacaccaaggagaaggaagggaagaaataaagaaatccaggacctggaggagagctttgtgcctgttgctgcacccctaggtcatccaagagagctgcagaagtactccagtgattctgagagccccagaggaactggcagtggtgcgttgccaagtggtcagaagctggaggagttgaaggcagaggagccagataacttcagcagcaaagtagtgcagaggggccgagagttctttgacagcaacgggaacttcctgtacagaatttgagtcggggcttggcttatggagatgcctcgtgaaacacagctgggcaagtattaatgtatatggaacagcctggatttctgcatatggataagccaccttggaataggaagaggtgttgagcctggactgtgggaggaaagagctgcgtggatagattcaaacttcctgtggtagtgctcccagtctgacctctgtagaccttcagtactcactcttcttgcttaggctctctgtgtgttgaaagccatcccgtgttgcatgtgttgttacaattttctgtgatacttgcaatttatgtttgagaagaagtgaaaagtttgccttctgacctcatttccttcttgatcagtgaacactaacattttggggacaacttagtcaattggttttccttacaacaaaataaagtaaaatgtagcagtctg

SEQ ID NO: 288503 - DNA, 1852 bp, Homo sapiens
cctgaaaggaacttacaaaagattttgctaacaaaacccccagcgggcgtttaaaatttaaaaaacgaggcatactatacgtctaggtacgaaggctgggtggcgctggtttgcgtcgacatggcggttaccctgagtctcttgctgggcgggcgcgtttgcgccgccgtcactcgctgtgggttcgcgacccggggggtggcgggcccaggccctattggccgggagccggaccccgattccgactgggagccggaggaacgggagctgcaggaggtggagaggtaccggcttctccccgggccctcagcttgaagcagggcctcgtgccccggcgctccaggccgcgcccccttggcgccgggtgtcctgccgctgcttgcgcagcggcccttgtttcttcttacccgttgttaggggcgcagcgtcaggtgttcagctcccctgggaccactggtcccttcattagtgacgtatttcatcatcagtttagagagttcggcatgcttacaggcagttattgttctaggtgttagctttctgggtgtacggagcagctctaagccggcaacatggcccggttgcccttgcgatcaaagagaagagggctgggcgctccatgatttagcctgaggctcttcaaacatccattctgcttccacgcatggcttctgccattggttctcttcccccagcaccctgaaacgacagaaacaagcaatccgattccagaaaattcggaggcaaatggaggcgcctggtgccccgcccaggaccctgacgtgggaagccatggagcagatacggtatttacatgaggaatttccagagtcctggtcagttcccaggttggctgaaggctttgatgtcagcactgatgtgatccgaagagttttaaaaagcaagtttttacccacattggagcagaagctgaagcaggatcaaaaagtccttaagaaagctgggcttgcccactcgctgcagcacctccggggctctggaaatacctcaaagctgctccctgcaggccactctgtatcaggctctttgcttatgccagggcatgaagcctcatctaaagacccaaatcacagcacagctttgaaagtgatagagtcagacactcacaggacaaatacaccaaggagaaggaagggaagaaataaagaaatccaggacctggaggagagctttgtgcctgttgctgcacccctaggtcatccaagagagctgcagaagtactccagtgattctgagagccccagaggaactggcagtggtgcgttgccaagtggtcagaagctggaggagttgaaggcagaggagccagataacttcagcagcaaagtagtgcagaggggccgagagttctttgacagcaacgggaacttcctgtacagaatttgagtcggggcttggcttatggagatgcctcgtgaaacacagctgggcaagtattaatgtatatggaacagcctggatttctgcatatggataagccaccttggaataggaagaggtgttgagcctggactgtgggaggaaagagctgcgtggatagattcaaacttcctgtggtagtgctcccagtctgacctctgtagaccttcagtactcactcttcttgcttaggctctctgtgtgttgaaagccatcccgtgttgcatgtgttgttacaattttctgtgatacttgcaatttatgtttgagaagaagtgaaaagtttgccttctgacctcatttccttcttgatcagtgaacactaacattttggggacaacttagtcaattggttttccttacaacaaaataaagtaaaatgtagcagtctgaaaaagaacatgaaaaaaat

SEQ ID NO: 288504 - DNA, 1619 bp, Homo sapiens
cctgaaaggaacttacaaaagattttgctaacaaaacccccagcgggcgtttaaaatttaaaaaacgaggcatactatacgtctaggtacgaaggctgggtggcgctggtttgcgtcgacatggcggttaccctgagtctcttgctgggcgggcgcgtttgcgccgccgtcactcgctgtgggttcgcgacccggggggtggcgggcccaggccctattggccgggagccggaccccgattccgactgggagccggaggaacgggagctgcaggaggtggagaggtaccggcttctccccgggccctcagcttgaagcagggcctcgtgccccggcgctccaggccgcgcccccttggcgccgggtgtcctgccgctgcttgcgcagcggcccttgtttcttcttacccgttgttaggggcgcagcgtcaggtgttcagctcccctgggaccactggtcccttcattagtgacgtatttcatcatcagtttagagagttcggcatgcttacaggcagttattgttctaggtgttagctttctgggtgtacggagcagctctaagccggcaacatggcccggttgcccttgcgatcaaagagaagagggctgggcgctccatgatttagcctgaggctcttcaaacatccattctgcttccacgcatggcttctgccattggttctcttcccccagcaccctgaaacgacagaaacaagcaatccgattccagaaaattcggaggcaaatggaggcgcctggtgccccgcccaggaccctgacgtgggaagccatggagcagatacggtatttacatgaggaatttccagagtcctggtcagttcccaggttggctgaaggctttgatgtcagcactgatgtgatccgaagagttttaaaaagcaagtttttacccacattggagcagaagctgaagcaggatcaaaaagtccttaagaaagctgggcttgcccactcgctgcagcacctccggggctctggaaatacctcaaagctgctccctgcaggccactctgtatcaggctctttgcttatgccagggcatgaagcctcatctaaagacccaaatcacagcacagctttgaaagtgatagaagataacttcagcagcaaagtagtgcagaggggccgagagttctttgacagcaacgggaacttcctgtacagaatttgagtcggggcttggcttatggagatgcctcgtgaaacacagctgggcaagtattaatgtatatggaacagcctggatttctgcatatggataagccaccttggaataggaagaggtgttgagcctggactgtgggaggaaagagctgcgtggatagattcaaacttcctgtggtagtgctcccagtctgacctctgtagaccttcagtactcactcttcttgcttaggctctctgtgtgttgaaagccatcccgtgttgcatgtgttgttacaattttctgtgatacttgcaatttatgtttgagaagaagtgaaaagtttgccttctgacctcatttccttcttgatcagtgaacactaacattttggggacaacttagtcaattggttttccttacaacaaaataaagtaaaatgtagcagtctg

SEQ ID NO: 288505 - DNA, 1690 bp, Homo sapiens
cctgaaaggaacttacaaaagattttgctaacaaaacccccagcgggcgtttaaaatttaaaaaacgaggcatactatacgtctaggtacgaaggctgggtggcgctggtttgcgtcgacatggcggttaccctgagtctcttgctgggcgggcgcgtttgcgccgccgtcactcgctgtgggttcgcgacccggggggtggcgggcccaggccctattggccgggagccggaccccgattccgactgggagccggaggaacgggagctgcaggaggtggagaggtaccggcttctccccgggccctcagcttgaagcagggcctcgtgccccggcgctccaggccgcgcccccttggcgccgggtgtcctgccgctgcttgcgcagcggcccttgtttcttcttacccgttgttaggggcgcagcgtcaggtgttcagctcccctgggaccactggtcccttcattagtgacgtatttcatcatcagtttagagagttcggcatgcttacaggcagttattgttctaggtgttagctttctgggtgtacggagcagctctaagccggcaacatggcccggttgcccttgcgatcaaagagaagagggctgggcgctccatgatttagcctgaggctcttcaaacatccattctgcttccacgcatggcttctgccattggttctcttcccccagcaccctgaaacgacagaaacaagcaatccgattccagaaaattcggaggcaaatggaggcgcctggtgccccgcccaggaccctgacgtgggaagccatggagcagatacggtatttacatgaggaatttccagagtcctggtcagttcccaggttggctgaaggctttgatgtcagcactgatgtgatccgaagagttttacaggctctttgcttatgccagggcatgaagcctcatctaaagacccaaatcacagcacagctttgaaagtgatagagtcagacactcacaggacaaatacaccaaggagaaggaagggaagaaataaagaaatccaggacctggaggagagctttgtgcctgttgctgcacccctaggtcatccaagagagctgcagaagtactccagtgattctgagagccccagaggaactggcagtggtgcgttgccaagtggtcagaagctggaggagttgaaggcagaggagccagataacttcagcagcaaagtagtgcagaggggccgagagttctttgacagcaacgggaacttcctgtacagaatttgagtcggggcttggcttatggagatgcctcgtgaaacacagctgggcaagtattaatgtatatggaacagcctggatttctgcatatggataagccaccttggaataggaagaggtgttgagcctggactgtgggaggaaagagctgcgtggatagattcaaacttcctgtggtagtgctcccagtctgacctctgtagaccttcagtactcactcttcttgcttaggctctctgtgtgttgaaagccatcccgtgttgcatgtgttgttacaattttctgtgatacttgcaatttatgtttgagaagaagtgaaaagtttgccttctgacctcatttccttcttgatcagtgaacactaacattttggggacaacttagtcaattggttttccttacaacaaaataaagtaaaatgtagcagtctg

SEQ ID NO: 288506 - DNA, 1779 bp, Homo sapiens
cctgaaaggaacttacaaaagattttgctaacaaaacccccagcgggcgtttaaaatttaaaaaacgaggcatactatacgtctaggtacgaaggctgggtggcgctggtttgcgtcgacatggcggttaccctgagtctcttgctgggcgggcgcgtttgcgccgccgtcactcgctgtgggttcgcgacccggggggtggcgggcccaggccctattggccgggagccggaccccgattccgactgggagccggaggaacgggagctgcaggaggtggagaggtaccggcttctccccgggccctcagcttgaagcagggcctcgtgccccggcgctccaggccgcgcccccttggcgccgggtgtcctgccgctgcttgcgcagcggcccttgtttcttcttacccgttgttaggggcgcagcgtcaggtgttcagctcccctgggaccactggtcccttcattagtgacgtatttcatcatcagtttagagagttcggcatgcttacaggcagttattgttctaggtgttagctttctgggtgtacggagcagctctaagccggcaacatggcccggttgcccttgcgatcaaagagaagagggctgggcgctccatgatttagcctgaggctcttcaaacatccattctgcttccacgcatggcttctgccattggttctcttcccccagcaccctgaaacgacagaaacaagcaatccgattccagaaaattcggaggcaaatggaggtatttacatgaggaatttccagagtcctggtcagttcccaggttggctgaaggctttgatgtcagcactgatgtgatccgaagagttttaaaaagcaagtttttacccacattggagcagaagctgaagcaggatcaaaaagtccttaagaaagctgggcttgcccactcgctgcagcacctccggggctctggaaatacctcaaagctgctccctgcaggccactctgtatcaggctctttgcttatgccagggcatgaagcctcatctaaagacccaaatcacagcacagctttgaaagtgatagagtcagacactcacaggacaaatacaccaaggagaaggaagggaagaaataaagaaatccaggacctggaggagagctttgtgcctgttgctgcacccctaggtcatccaagagagctgcagaagtactccagtgattctgagagccccagaggaactggcagtggtgcgttgccaagtggtcagaagctggaggagttgaaggcagaggagccagataacttcagcagcaaagtagtgcagaggggccgagagttctttgacagcaacgggaacttcctgtacagaatttgagtcggggcttggcttatggagatgcctcgtgaaacacagctgggcaagtattaatgtatatggaacagcctggatttctgcatatggataagccaccttggaataggaagaggtgttgagcctggactgtgggaggaaagagctgcgtggatagattcaaacttcctgtggtagtgctcccagtctgacctctgtagaccttcagtactcactcttcttgcttaggctctctgtgtgttgaaagccatcccgtgttgcatgtgttgttacaattttctgtgatacttgcaatttatgtttgagaagaagtgaaaagtttgccttctgacctcatttccttcttgatcagtgaacactaacattttggggacaacttagtcaattggttttccttacaacaaaataaagtaaaatgtagcagtctg

SEQ ID NO: 288507 - DNA, 396 bp, Homo sapiens
ttaaaggaagacaaaggtttttaaatggggaaaaaatacaattacataattgttttgaaataattatataaagagcaataacaagggtgatgccagtctgagattggacagttactgagcagatgttcttgtagaagtcatttttgtgtaagattatgatggtctttgtgtaaggtggtggtttttgtagtttttgttatcaggcacacatcatgagaacccgctctttctggcctttcccaattctatttgtcgggtttcttaacattagtgactccatctagattctgacagttttcatgagaacttgcttttcttttctctctcaagtccttattcagtattcaacacccttaacagattagtcccactgctgagtcaggcctcttgcatgaa

SEQ ID NO: 288508 - DNA, 396 bp, Homo sapiens
ttcagctggaagaatgctggaggaatacggaactcctcccatttctcacagccacctccaactcttaaaaacgcttccaactgcctcccagcacacaaccaagggagaaaactattctgtcaaagagacggtgccaaaaggcaaaaacaaaggagctgatggcaaagaaggtagctgtgattggagctggggtcagtggcctaatttctctgaagtgctgtgtggatgagggacttgagcccacttgctttgagagaactgaagatattggaggagtgtggaggttcaaagtaagtgagattttcttgggtcttgaacaggttgtgttgttatttcagggtgaatcacagttactgatgggtcatattgagaaatttattaaacaactctgatcag

SEQ ID NO: 288509 - DNA, 3831 bp, Homo sapiens
ttcagctggaagaatgctggaggaatacggaactcctcccatttctcacagccacctccaactcttaaaaacgcttccaactgcctcccagcacacaaccaagggagaaaactattctgtcaaagagacggtgccaaaaggcaaaaacaaaggagctgatggcaaagaaggtagctgtgattggagctggggtcagtggcctaatttctctgaagtgctgtgtggatgagggacttgagcccacttgctttgagagaactgaagatattggaggagtgtggaggttcaaagagaatgtggaagatggccgagcaagtatctatcaatctgtcgttaccaacaccagcaaagaaatgtcctgtttcagtgactttccaatgcctgaagattttccaaacttcctgcataattctaaacttctggaatatttcaggatttttgctaaaaaatttgatctgctaaaatatattcagttccagacaactgtccttagtgtgagaaaatgtccagatttctcatcctctggccaatggaaggttgtcactcagagcaacggcaaggagcagagtgctgtctttgacgcagttatggtttgcagtggccaccacattctacctcatatcccactgaagtcatttccaggtatggagaggttcaaaggccaatatttccatagccgccaatacaagcatccagatggatttgagggaaaacgcatcctggtgattggaatgggaaactcaggctcagatattgctgttgagctgagtaagaatgctgctcaggtttttatcagcaccaggcatggcacctgggtcatgagccgtatctctgaagatggctatccttgggactcagtgttccacacccggtttcgttctatgctccgcaatgtactgccacgaacagctgtaaaatggatgatagaacaacagatgaatcggtggttcaaccatgaaaattatggccttgagcctcaaaacaaatacattatgaaggaacctgtactaaatgatgatgtcccaagtcgtctactctgtggagccatcaaggtgaaatctacagtgaaagagctcacagaaacttctgccatctttgaggatggaacagtggaggagaacattgatgtcatcatttttgcaacaggatatagtttctcttttcccttccttgaagattcactcgttaaagtagagaataatatggtctcactgtataaatacatattccccgctcacctggacaagtcaaccctcgcgtgcattggtctcatccagcccctaggttccattttcccaactgctgaacttcaagctcgttgggtgacaagagttttcaaaggcttgtgtagcctgccctcagagagaactatgatgatggacattatcaaaaggaatgaaaaaagaattgacctgtttggagaaagccagagccagacgttgcagaccaattatgttgactacttggacgagctcgccttagagataggtgcgaagccagatttctgctctctcttgttcaaagatcctaaactggctgtgagactctatttcggaccctgcaactcctattagtatcgcctggttgggcctgggcaatgggaaggagccagaaatgccatcttcacccagaaacaaagaatactgaagccactcaagactcgggccctgaaggattcatctaatttctcagtttcttttctgttgaaaatcctgggccttcttgctgttgttgtggcctttttttgccaacttcaatggtcctagtcagcataatgctttgggctttattatcttgtcagtcactacctcctaaagaaaaaaaaaaaggctagaagaaaaaacattacattcatgttctaattatagattttagagttaggtagtacaggtaagggggaaattgtaaagaattagcagaattaggcatatgtacaaaaccaaaattttgtcatgaaattttgcctttccacgcttccctcagttcaccaaagttaccaaaatgtaaaataaaataagactggctcaggtaagtagtgctgccaaccctgatataggggagttgtatggaaaaatagtagaattacacagcatgaaaagcagcccatggtttaaattattggacaatttaaattgtgggtaaatatttaaaactcctgaacaatgtttctgatggtcttctatccaccctacttggtaacaaagttctcagatgttaggtcatgtttcatttgctcagtcggggatcactcaaaactactagacaaaaaagtgagaggatagatttagaaaacatcagtgatgctcagataaacttttaggacctcatattaagagctaagcaaatggccacatttcctatattttgacagagatactgctggaaaaattaaaattaaaatgccataatagctacctaacaaatatatatgtttaatgtttatcataggccagacattgtgctatgtgcatatcatatgtattatttcatttaattctcacaacaattctgtgaaatggttacagctattatagtcatttcacagatgatgaaactaagattcagagcagctgatcttgtgaggcagctggaattggaactcagatttgttgaactctagaactaaagatcataatgttgtcttgtaatatatttatttacaaaacacttcattatttataaagaatttactaacagtttatcttatttatacccatacatctgctactttgggaggccctttacatagaaaacagcattctttttgctaaatatgaccaaattacttttatttataatttttgatttatatttcagctagatctaaaaagcatctgaaggaatttacaatgaaagatacctatgcaataacatttaggataatctttgacattttggaaaaataagaattgaggaaaaaaagtgtatctttcaagtagatgcaaagcattataatgactgacacttgtatctaactccagtcttacagataactaaggcaaaaagctaaataaacaatatgtaacctctaacatttggtaaaaggaagtatactggtctgttagcagagacaaactttttttagaattgaagtctgaaacaaacaaaagcaattcaatgtcaatagacattaagcaacataatagacaaacatctcctaagggaacatttgttacagctgctccttccctgaactgtgctttggaagataagctctgtcctgagtccaaaccaagcccttccaagagagaacaaaggtcagagatgttgaagattccagcaaatttctcctcttatttctaccaagcctttgtgaacattgctcttcattttggcctgtacttctccctcagggacgtagaacaatggaatgtcagtcagtctctgtagttaaaactttttctttaaaattcaattaaggtacttctccctcagggacgtagaacaatggaatgtcagtcagtctctgtagttaaaactttttctttaaaattcaattaagttacaccagaatttacaggcaagattttttttttcattgctcccataagcaaatttgttttaaaataattgtaaatgaggtatatacttagttcttggttaaaaaatatattgctttgttaagtattaaagattatttgtaagtcattgtattaataatactaataaaatttatcaagcctttatagcaagggtcagtgaattaccactgcctgtgggccaaatctagctcactatctgtttttgtaaataaaattttataatagtacacagccacactcattcatttattttctgtggttgctttcaagctacaattgtagagttggg

SEQ ID NO: 288510 - DNA, 795 bp, Homo sapiens
catggtaaactatttgtgtattcagggagttaaaggaagacaaaggtttttaaatggggaaaaaatacaattacataattgttttgaaataattatataaagagcaataacaagggtgatgccagtctgagattggacagttactgagcagatgttcttgtagaagtcatttttgtgtaagattatgatggtctttgtgtaaggtggtggtttttgtagtttttgttatcaggcacacatcatgagaacccgctctttctggcctttcccaattctatttgtcgggtttcttaacattagtgactccatctagattctgacagttttcatgagaacttgcttttcttttctctctcaagtccttattcagtattcaacacccttaacagattagtcccactgctgagtcaggcctcttgcatgaagcagcaatgagaaagacacacttggccaatgttatcctggagtaattctcaatgatgccttctctgtgtttcttcaagacaactgtccttagtgtgagaaaatgtccagatttctcatcctctggccaatggaaggttgtcactcagagcaacggcaaggagcagagtgctgtctttgacgcagttatggtttgcagtggccaccacattctacctcatatcccactgaagtcatttccaggtgagacccgctgggattcccagctttttggagtaggtttccaggtactttatatgtagtttggattgacaagcaggattcattgctgcaactgggcagaacttggctcaataagattgagacagagct

SEQ ID NO: 288511 - DNA, 776 bp, Homo sapiens
ttcagctggaagaatgctggaggaatacggaactcctcccatttctcacagccacctccaactcttaaaaacgcttccaactgcctcccagcacacaaccaagggagaaaactattctgtcaaagagacggtgccaaaaggcaaaaacaaaggagctgatggcaaagaaggtagctgtgattggagctggggtcagtggcctaatttctctgaagtgctgtgtggatgagggacttgagcccacttgctttgagagaactgaagatattggaggagtgtggaggttcaaagagaatgtggaagatggccgagcaagtatctatcaatctgtcgttaccaacaccagcaaagaaatgtcctgtttcagtgactttccaatgcctgaagattttccaaacttcctgcataattctaaacttctggaatatttcaggatttttgctaaaaaatttgatctgctaaaatatattcagttccagacaactgtccttagtgtgagaaaatgtccagatttctcatcctctggccaatggaaggttgtcactcagagcaacggcaaggagcagagtgctgtctttgacgcagttatggtttgcagtggccaccacattctacctcatatcccactgaagtcatttccaggtatggagaggttcaaaggccaatatttccatagccgccaatacaagcatccagatggatttgagggagcttgataggattgctgttcaggttttattcgaccagcatgggacctgggtcatgagcccgtcttt

SEQ ID NO: 288512 - DNA, 3189 bp, Homo sapiens
gataatgtccatcatcatagttctctctgagggcaggctacacaagcctttgaaaactcttgtcacccaacgagcttgaagttcagcagttgggaaaatggaacctaggggctggatgagaccaatgcacgcgagggttgacttgtccaggtgagcggggaatatgtatttatacagtgagccgtatctctgaagatggctatccttgggactcagtgttccacacccggtttcgttctatgctccgcaatgtactgccacgaacagctgtaaaatggatgatagaacaacagatgaatcggtggttcaaccatgaaaattatggccttgagcctcaaaacaaatacattatgaaggaacctgtactaaatgatgatgtcccaagtcgtctactctgtggagccatcaaggtgaaatctacagtgaaagagctcacagaaacttctgccatctttgaggatggaacagtggaggagaacattgatgtcatcatttttgcaacaggatatagtttctcttttcccttccttgaagattcactcgttaaagtagagaataatatggtctcactgtataaatacatattccccgctcacctggacaagtcaaccctcgcgtgcattggtctcatccagcccctaggttccattttcccaactgctgaacttcaagctcgttgggtgacaagagttttcaaaggcttgtgtagcctgccctcagagagaactatgatgatggacattatcaaaaggaatgaaaaaagaattgacctgtttggagaaagccagagccagacgttgcagaccaattatgttgactacttggacgagctcgccttagagataggtgcgaagccagatttctgctctctcttgttcaaagatcctaaactggctgtgagactctatttcggaccctgcaactcctattagtatcgcctggttgggcctgggcaatgggaaggagccagaaatgccatcttcacccagaaacaaagaatactgaagccactcaagactcgggccctgaaggattcatctaatttctcagtttcttttctgttgaaaatcctgggccttcttgctgttgttgtggcctttttttgccaacttcaatggtcctagtcagcataatgctttgggctttattatcttgtcagtcactacctcctaaagaaaaaaaaaaaggctagaagaaaaaacattacattcatgttctaattatagattttagagttaggtagtacaggtaagggggaaattgtaaagaattagcagaattaggcatatgtacaaaaccaaaattttgtcatgaaattttgcctttccacgcttccctcagttcaccaaagttaccaaaatgtaaaataaaataagactggctcaggtaagtagtgctgccaaccctgatataggggagttgtatggaaaaatagtagaattacacagcatgaaaagcagcccatggtttaaattattggacaatttaaattgtgggtaaatatttaaaactcctgaacaatgtttctgatggtcttctatccaccctacttggtaacaaagttctcagatgttaggtcatgtttcatttgctcagtcggggatcactcaaaactactagacaaaaaagtgagaggatagatttagaaaacatcagtgatgctcagataaacttttaggacctcatattaagagctaagcaaatggccacatttcctatattttgacagagatactgctggaaaaattaaaattaaaatgccataatagctacctaacaaatatatatgtttaatgtttatcataggccagacattgtgctatgtgcatatcatatgtattatttcatttaattctcacaacaattctgtgaaatggttacagctattatagtcatttcacagatgatgaaactaagattcagagcagctgatcttgtgaggcagctggaattggaactcagatttgttgaactctagaactaaagatcataatgttgtcttgtaatatatttatttacaaaacacttcattatttataaagaatttactaacagtttatcttatttatacccatacatctgctactttgggaggccctttacatagaaaacagcattctttttgctaaatatgaccaaattacttttatttataatttttgatttatatttcagctagatctaaaaagcatctgaaggaatttacaatgaaagatacctatgcaataacatttaggataatctttgacattttggaaaaataagaattgaggaaaaaaagtgtatctttcaagtagatgcaaagcattataatgactgacacttgtatctaactccagtcttacagataactaaggcaaaaagctaaataaacaatatgtaacctctaacatttggtaaaaggaagtatactggtctgttagcagagacaaactttttttagaattgaagtctgaaacaaacaaaagcaattcaatgtcaatagacattaagcaacataatagacaaacatctcctaagggaacatttgttacagctgctccttccctgaactgtgctttggaagataagctctgtcctgagtccaaaccaagcccttccaagagagaacaaaggtcagagatgttgaagattccagcaaatttctcctcttatttctaccaagcctttgtgaacattgctcttcattttggcctgtacttctccctcagggacgtagaacaatggaatgtcagtcagtctctgtagttaaaactttttctttaaaattcaattaaggtacttctccctcagggacgtagaacaatggaatgtcagtcagtctctgtagttaaaactttttctttaaaattcaattaagttacaccagaatttacaggcaagattttttttttcattgctcccataagcaaatttgttttaaaataattgtaaatgaggtatatacttagttcttggttaaaaaatatattgctttgttaagtattaaagattatttgtaagtcattgtattaataatactaataaaatttatcaagcctttatagcaagggtcagtgaattaccactgcctgtgggccaaatctagctcactatctgtttttgtaaataaaattttataatagtacacagccacactcattcatttattttctgtggttgctttcaagctacaattgtagagttggg

SEQ ID NO: 288513 - DNA, 978 bp, Homo sapiens
ggcgggggggggccgggccgggccgggccgggccgggggcgcgcgctctgcgagctggatgtccaggctgcgggcgctgctgggcctcgggctgctggttgcgggctcgcgcctgccgcggatcaaaagccagaccatcgcctgtcgctcgggacccacctggtggggaccgcagcggctgaactcgggtggccgctgggactcagaggtcatggcgagcacggtggtgaagtacctgagccaggaggaggcccaggccgtggaccaggagctatttaacgaataccagttcagcgtggaccaacttatggaactggccgggctgagctgtgctacagccatcgccaaggcatatccccccacgtccatgtccaggagcccccctactgtcctggtcatctgtggcccggggaataatggaggagatggtctggtctgtgctcgacacctcaaactctttggctacgagccaaccatctattaccccaaaaggcctaacaagcccctcttcactgcattggtgacccagtgtcagaaaatggacatccctttccttggggaaatgcccgcagagcccatgacgattgatgaactgtatgagctggtggtggatgccatctttggcttcagcttcaagggcgatgttcgggaaccgttccacagcatcctgagtgtcctgaagggactcactgtgcccattgccagcatcgacattccctcaggatgggacgtggagaagggaaatgctggagggatccagccagacttgctcatctccctcacagcccccaaaaaatctgcaacccagtttaccggtcgctaccattacctggggggtcgttttgtgccacctgctctggaaaagaagtaccagctgaacctgccaccctaccctgacactgagtgtgtctatcgtctgcagtgagggaaggtgggtgggtattctccccaataaagacttagagcccctctcttcca

SEQ ID NO: 288514 - DNA, 1427 bp, Homo sapiens
ggcgggggggggccgggccgggccgggccgggccgggggcgcgcgctctgcgagctggatgtccaggctgcgggcgctgctgggcctcgggctgctggttgcgggctcgcgcctgccgcggatcaaaagccagaccatcgcctgtcgctcgggacccacctggtggggaccgcagcggctgaactcgggtggccgctgggactcagaggtcatggcgagcacggtggtgaagtacctgagccaggaggaggcccaggccgtggaccaggagctatttaacgaataccagttcagcgtggaccaacttatggaactggccgggctgagctgtgctacagccatcgccaaggcatatccccccacgtccatgtccaggagcccccctactgtcctggtcatctgtggcccggggaataatggaggagatggtctggtctgtgctcgacacctcaaactctttggctacgagccaaccatctattaccccaaaaggcctaacaagcccctcttcactgcattggtgacccagtgtcagaaaatggacatccctttccttggggaaatgcccgcagagcccatgacgattgatgaactgtatgagctggtggtggatgccatctttggcttcagcttcaagggcgatgttcgggaaccgttccacagcatcctgagtgtcctgaagggactcactgtgcccattgccagcatcgacattccctcaggatgggacgtggagaagggaaatgctggagggatccagccagacttgctcatctccctcacagcccccaaaaaatctgcaacccagtttaccggtcgctaccattacctggggggtcgttttgtgccacctgctctggaaaagaagtaccagctgaacctgccaccctaccctgacactgagtgtgtctatcgtctgcagtgagggaaggtgggtgggtattctccccaataaagacttagagcccctctcttccagaactgtggattcctgggagctcctctggcaataaaagtcagtgaatggtggaagtcagagagcaaccctggggattgggtgccatctctctaggggtaacacaaagggcaagaggttgctatggtatttggaaacaatgaaaatggactgttagatgccaaaaaaaaaaaaaaaaaaaaaaaaaaaaatttttgggccccttgggccctgcaaaaagtttttaagaaccatttgctttggggccccgggggccccatgtgggttactggtgaccctggcgctcatacgcgtgttccctagggaagaacccgggccagagcattagttgctgggtttctcgcctattaaacacgccccgggggaccggggtgtttttgcacaatccccgagcgcgtccggaggccatagggggtctacacgcggggtcccaggaactcatctatgcccg

SEQ ID NO: 288515 - DNA, 1436 bp, Homo sapiens
cttcgtgctagcgtcgaggctcgtttgtattcgcgcgacgtacgggggcgcgcgctctgcgagctggatgtccaggctgcgggcgctgctgggcctcgggctgctggttgcgggctcgcgcctgccgcggatcaaaagccagaccatcgcctgtcgctcgggacccacctggtggggaccgcagcggctgaactcgggtggccgctgggactcagaggtcatggcgagcacggtggtgaagtacctgagccaggaggaggcccaggccgtggaccaggagctatttaacgaataccagttcagcgtggaccaacttatggaactggccgggctgagctgtgctacagccatcgccaaggcatatccccccacgtccatgtccaggagcccccctactgtcctggtcatctgtggcccggggaataatggaggagatggtctggtctgtgctcgacacctcaaactctttggctacgagccaaccatctattaccccaaaaggcctaacaagcccctcttcactgcattggtgacccagtgtcagaaaatggacatccctttccttggggaaatgcccgcagagcccatgacgattgatgaactgtatgagctggtggtggatgccatctttggcttcagcttcaagggcgatgttcgggaaccgttccacagcatcctgagtgtcctgaagggactcactgtgcccattgccagcatcgacattccctcaggatgggacgtggagaagggaaatgctggagggatccagccagacttgctcatctccctcacagcccccaaaaaatctgcaacccagtttaccggtcgctaccattacctggggggtcgttttgtgccacctgctctggaaaagaagtaccagctgaacctgccaccctaccctgacactgagtgtgtctatcgtctgcagtgagggaaggtgggtgggtattctccccaataaagacttagagcccctctcttccagaactgtggattcctgggagctcctctggcaataaaagtcagtgaatggtggaagtcagagagcaaccctggggattgggtgccatctctctaggggtaacacaaagggcaagaggttgctatggtatttggaaacaatgaaaatggactgttagatgccaaaaaaaaaaaaaaaaaaaaaaaaaaaaatttttgggccccttgggccctgcaaaaagtttttaagaaccatttgctttggggccccgggggccccatgtgggttactggtgaccctggcgctcatacgcgtgttccctagggaagaacccgggccagagcattagttgctgggtttctcgcctattaaacacgccccgggggaccggggtgtttttgcacaatccccgagcgcgtccggaggccatagggggtctacacgcggggtcccaggaactcatctatgcccg

SEQ ID NO: 288516 - DNA, 1028 bp, Homo sapiens
ctgctctggagaagaagtaccagctgaacctgccaccctaccctgacacctcaaactctttggctacgagccaaccatctattaccccaaaaggcctaacaagcccctcttcactgcattggtgacccagtgtcagaaaatggacatccctttccttggggaaatgcccgcagagcccatgacgattgatgaactgtatgagctggtggtggatgccatctttggcttcagcttcaagggcgatgttcgggaaccgttccacagcatcctgagtgtcctgaagggactcactgtgcccattgccagcatcgacattccctcaggatgggacgtggagaagggaaatgctggagggatccagccagacttgctcatctccctcacagcccccaaaaaatctgcaacccagtttaccggtcgctaccattacctggggggtcgttttgtgccacctgctctggaaaagaagtaccagctgaacctgccaccctaccctgacactgagtgtgtctatcgtctgcagtgagggaaggtgggtgggtattctccccaataaagacttagagcccctctcttccagaactgtggattcctgggagctcctctggcaataaaagtcagtgaatggtggaagtcagagagcaaccctggggattgggtgccatctctctaggggtaacacaaagggcaagaggttgctatggtatttggaaacaatgaaaatggactgttagatgccaaaaaaaaaaaaaaaaaaaaaaaaaaaaatttttgggccccttgggccctgcaaaaagtttttaagaaccatttgctttggggccccgggggccccatgtgggttactggtgaccctggcgctcatacgcgtgttccctagggaagaacccgggccagagcattagttgctgggtttctcgcctattaaacacgccccgggggaccggggtgtttttgcacaatccccgagcgcgtccggaggccatagggggtctacacgcggggtcccaggaactcatctatgcccg

SEQ ID NO: 288517 - DNA, 1380 bp, Homo sapiens
cttcgtgctagcgtcgaggctcgtttgtattcgcgcgacgtacgggggcgcgcgctctgcgagctggatgtccaggctgcgggcgctgctgggcctcgggctgctggttgcgggctcgcgcctgccgcggatcaaaagccagaccatcgcctgtcgctcgggacccacctggtggggaccgcagcggctgaactcgggtggccgctgggactcagaggtcatggcgagcacggtggtgaagtacctgagccaggaggaggcccaggccgtggaccaggagctatttaacgaataccagttcagcgtggaccaacttatggaactggccgggctgagctgtgctacagccatcgccaaggcatatccccccacgtccatgtccaggagcccccctactgtcctggtcatctgtggcccggggaataatggaggagatggtctggtctgtgctcgacacctcaaactctttggctacgagccaaccatctattaccccaaaaggcctaacaagcccctcttcactgcattggtgacccagtgtcagaaaatggacatccctttccttggggaaatgcccgcagagcttcaagggcgatgttcgggaaccgttccacagcatcctgagtgtcctgaagggactcactgtgcccattgccagcatcgacattccctcaggatgggacgtggagaagggaaatgctggagggatccagccagacttgctcatctccctcacagcccccaaaaaatctgcaacccagtttaccggtcgctaccattacctggggggtcgttttgtgccacctgctctggaaaagaagtaccagctgaacctgccaccctaccctgacactgagtgtgtctatcgtctgcagtgagggaaggtgggtgggtattctccccaataaagacttagagcccctctcttccagaactgtggattcctgggagctcctctggcaataaaagtcagtgaatggtggaagtcagagagcaaccctggggattgggtgccatctctctaggggtaacacaaagggcaagaggttgctatggtatttggaaacaatgaaaatggactgttagatgccaaaaaaaaaaaaaaaaaaaaaaaaaaaaatttttgggccccttgggccctgcaaaaagtttttaagaaccatttgctttggggccccgggggccccatgtgggttactggtgaccctggcgctcatacgcgtgttccctagggaagaacccgggccagagcattagttgctgggtttctcgcctattaaacacgccccgggggaccggggtgtttttgcacaatccccgagcgcgtccggaggccatagggggtctacacgcggggtcccaggaactcatctatgcccg

SEQ ID NO: 288518 - DNA, 1311 bp, Homo sapiens
cttcgtgctagcgtcgaggctcgtttgtattcgcgcgacgtacgggggcgcgcgctctgcgagctggatgtccaggctgcgggcgctgctgggcctcgggctgctggttgcgggctcgcgcctgccgcggatcaaaagccagaccatcgcctgtcgctcgggacccacctggtggggaccgcagcggctgaactcgggtggccgctgggactcagaggtcatggcgagcacggtggtgaagtacctgagccaggaggaggcccaggccgtggaccaggagctatttaacgaataccagttcagcgtggaccaacttatggaactggccgggctgagctgtgctacagccatcgccaaggcatatccccccacgtccatgtccaggagcccccctactgtcctggtcatctgtggcccggggaataatggaggagatggtctggtctgtgctcgacacctcaaactctttggctacgagccaaccatctattaccccaaaaggcctaacaagcccctcttcactgcattggtgacccagtgtcagaaaatggacatccctttccttggggaaatgcccgcagagcccatgacgattgatgaactgtatgagctggtggtggatgccatctttggcttcagcttcaagggcgatgttcgggaaccgttccacagcatcctgagtgtcctgaagggactcactgtgcccattgccagcatcgacattccctcaggctgggatccagaaggtggggtgggagagattggggccctaccctcctgactcttgcccacaccaggtctaaaataattttagtctagaggggcagaacacagctttctggacccccatcagggctggggaacagtgttcagaagtcccctttacatgttggccccatgaagagaccacggcccaagggtacgtggagctcgttggacgagagttcctcaggtgggaactgaggggacttcccactcctctgggactagggtaaactaaggtgtagaaggggacgagacatctggcctcttcctgaacaccaccctcttttcaggatgggacgtggagaagggaaatgctggagggatccagccagacttgctcatctccctcacagcccccaaaaaatctgcaacccagtttaccggtcgctaccattacctggggggtcgttttgtgccacctgctctggaaaagaagtaccagctgaacctgccaccctaccctgacactgagtgtgtctatcgtctgcagtgagggaaggtgggtgggtattctccccaataaagacttagagcccctctcttcca

SEQ ID NO: 288519 - DNA, 937 bp, Homo sapiens
cttcgtgctagcgtcgaggctcgtttgtattcgcgcgacgtacgggggcgcgcgctctgcgagctggatgtccaggctgcgggcgctgctgggcctcgggctgctggttgcgggctcgcgcctgccgcggatcaaaagccagaccatcgcctgtcgctcgggacccacctggtggggaccgcagcggctgaactcgggtggccgctgggactcagaggtcatggcgagcacggtggtgaagtacctgagccaggaggaggcccaggccgtggaccaggagctatttaacgaataccagttcagcgtggaccaacttatggaactggccgggctgagctgtgctacagccatcgccaaggcatatccccccacgtccatgtccaggagcccccctactgtcctggtcatctgtggcccggggaataatggaggagatggtctggtctgtgctcgacacctcaaactctttggctacgagccaaccatctattaccccaaaaggcctaacaagcccctcttcactgcattggtgacccagtgtcagaaaatggacatccctttccttggggaaatgcccgcagaggtaggtggctccagttgaatacctccatcctacagtaaccactgcctgtgctctgctcttccttcgtgtttccaggctgagctcattttagtgcctggtacggaaggtgcctaacggatggtattcgaataagtgtgcaagagccttctcctccttcataaagtgtgctccatgagtcccacacaccaccttctctaaagcttccttgccctttcatctccctggtccctccttccactctgtagtcagatcctcttgccctagcatgcagtaaacacatgatctacccctcaggggccggagtggctgccctatctgaaacccttcctgcagatgcatggattaagggatggg

SEQ ID NO: 288520 - DNA, 537 bp, Homo sapiens
tcaggctgccctctgaatgagacacaatacttgtgcctctgagaatggtctgcaggtgcagaggacagccctctccagttaaggctgtttgtgcagctgctggctctgacatccttttcctgctccaccacagcccatgacgattgatgaactgtatgagctggtggtggatgccatctttggcttcagcttcaagggcgatgttcgggaaccgttccacagcatcctgagtgtcctgaagggactcactgtgcccattgccagcatcgacattccctcaggatgggacgtggagaagggaaatgctggagggatccagccagacttgctcatctccctcacagcccccaaaaaatctgcaacccagtttaccggtcgctaccattacctggggggtcgttttgtgccacctgctctggaaaagaagtaccagctgaacctgccaccctaccctgacactgagtgtgtctatcgtctgcagtgagggaaggtgggtgggtattctccccaataaagacttagagcccctctcttcca

SEQ ID NO: 288521 - DNA, 866 bp, Homo sapiens
ggcgggggggggccgggccgggccgggccgggccgggggcgcgcgctctgcgagctggatgtccaggctgcgggcgctgctgggcctcgggctgctggttgcgggctcgcgcctgccgcggatcaaaagccagaccatcgcctgtcgctcgggacccacctggtggggaccgcagcggctgaactcgggtggccgctgggactcagaggtcatggcgagcacggtggtgaagtacctgagccaggaggaggcccaggccgtggaccaggagctatttaacgaataccagttcagcgtggaccaacttatggaactggccgggctgagctgtgctacagccatcgccaaggcatatccccccacgtccatgtccaggagcccccctactgtcctggtcatctgtggcccggggaataatggaggagatggtctggtctgtgctcgacacctcaaactctttggctacgagccaaccatctattaccccaaaaggcctaacaagcccctcttcactgcattggtgacccagtgtcagaaaatggacatccctttccttggggaaatgcccgcagagcccatgacgattgatgaactgtatgagctggtggtggatgccatctttggcttcagcttcaagggcgatgttcgggaaccgttccacagcatcctgagtgtcctgaagggactcactgtgcccattgccagcatcgacattccctcaggatgggacgtggagaagggaaatgctggagggatccagccagacttgctcatctccctcacagcccccaaaaaatctgcaacccagtttaccggtcgctaccattacctgtcggctaactcggggggcatcctctaagtcacct

SEQ ID NO: 288522 - DNA, 1301 bp, Homo sapiens
cttcgtgctagcgtcgaggctcgtttgtattcgcgcgacgtacgggggcgcgcgctctgcgagctggatgtccaggctgcgggcgctgctgggcctcgggctgctggttgcgggctcgcgcctgccgcggatcaaaagccagaccatcgcctgtcgctcgggacccacctggtggggaccgcagcggctgaactcgggtggccgctgggactcagaggtcatggcgagcacggtggtgaagtacctgagccaggaggaggcccaggccgtggaccaggagctatttaacgaataccagttcagcgtggaccaacttatggaactggccgggctgagctgtgctacagccatcgccaagcccaaaaggcctaacaagcccctcttcactgcattggtgacccagtgtcagaaaatggacatccctttccttggggaaatgcccgcagagcccatgacgattgatgaactgtatgagctggtggtggatgccatctttggcttcagcttcaagggcgatgttcgggaaccgttccacagcatcctgagtgtcctgaagggactcactgtgcccattgccagcatcgacattccctcaggatgggacgtggagaagggaaatgctggagggatccagccagacttgctcatctccctcacagcccccaaaaaatctgcaacccagtttaccggtcgctaccattacctggggggtcgttttgtgccacctgctctggaaaagaagtaccagctgaacctgccaccctaccctgacactgagtgtgtctatcgtctgcagtgagggaaggtgggtgggtattctccccaataaagacttagagcccctctcttccagaactgtggattcctgggagctcctctggcaataaaagtcagtgaatggtggaagtcagagagcaaccctggggattgggtgccatctctctaggggtaacacaaagggcaagaggttgctatggtatttggaaacaatgaaaatggactgttagatgccaaaaaaaaaaaaaaaaaaaaaaaaaaaaatttttgggccccttgggccctgcaaaaagtttttaagaaccatttgctttggggccccgggggccccatgtgggttactggtgaccctggcgctcatacgcgtgttccctagggaagaacccgggccagagcattagttgctgggtttctcgcctattaaacacgccccgggggaccggggtgtttttgcacaatccccgagcgcgtccggaggccatagggggtctacacgcggggtcccaggaactcatctatgcccg

SEQ ID NO: 288523 - DNA, 1760 bp, Homo sapiens
cttcgtgctagcgtcgaggctcgtttgtattcgcgcgacgtacgggggcgcgcgctctgcgagctggatgtccaggctgcgggcgctgctgggcctcgggctgctggttgcgggctcgcgcctgccgcggatcaaaagccagaccatcgcctgtcgctcgggacccacctggtggggaccgcagcggctgaactcgggtggccgctgggactcagaggtcatggcgagcacggtggtgaagtacctgagccaggaggaggcccaggccgtggaccaggagctatttaacgaataccagttcagcgtggaccaacttatggaactggccgggctgagctgtgctacagccatcgccaaggcatatccccccacgtccatgtccaggagcccccctactgtcctggtcatctgtggcccggggaataatggaggagatggtctggtctgtgctcgacacctcaaactctttggctacgagccaaccatctattaccccaaaaggcctaacaagcccctcttcactgcattggtgacccagtgtcagaaaatggacatccctttccttggggaaatgcccgcagagcccatgacgattgatgaactgtatgagctggtggtggatgccatctttggcttcagcttcaagggcgatgttcgggaaccgttccacagcatcctgagtgtcctgaagggactcactgtgcccattgccagcatcgacattccctcaggctgggatccagaaggtggggtgggagagattggggccctaccctcctgactcttgcccacaccaggtctaaaataattttagtctagaggggcagaacacagctttctggacccccatcagggctggggaacagtgttcagaagtcccctttacatgttggccccatgaagagaccacggcccaagggtacgtggagctcgttggacgagagttcctcaggtgggaactgaggggacttcccactcctctgggactagggtaaactaaggtgtagaaggggacgagacatctggcctcttcctgaacaccaccctcttttcaggatgggacgtggagaagggaaatgctggagggatccagccagacttgctcatctccctcacagcccccaaaaaatctgcaacccagtttaccggtcgctaccattacctggggggtcgttttgtgccacctgctctggaaaagaagtaccagctgaacctgccaccctaccctgacactgagtgtgtctatcgtctgcagtgagggaaggtgggtgggtattctccccaataaagacttagagcccctctcttccagaactgtggattcctgggagctcctctggcaataaaagtcagtgaatggtggaagtcagagagcaaccctggggattgggtgccatctctctaggggtaacacaaagggcaagaggttgctatggtatttggaaacaatgaaaatggactgttagatgccaaaaaaaaaaaaaaaaaaaaaaaaaaaaatttttgggccccttgggccctgcaaaaagtttttaagaaccatttgctttggggccccgggggccccatgtgggttactggtgaccctggcgctcatacgcgtgttccctagggaagaacccgggccagagcattagttgctgggtttctcgcctattaaacacgccccgggggaccggggtgtttttgcacaatccccgagcgcgtccggaggccatagggggtctacacgcggggtcccaggaactcatctatgcccg

SEQ ID NO: 288524 - DNA, 313 bp, Homo sapiens
gcacaactctcgacctttgggagcagccagggaggagtcactgtcccagccccctggcctaggcacaaaggggtgggagagacagctgggccaatatggtctattaccgcctgaaaccccgccgaaccacccttgactctgccttcaggcatatccccccacgtccatgtccaggagcccccctactgtcctggtcatctgtggcccggggaataatggaggagatggtctggtctgtgctcgacacctcaaactctttgtgagtatgtggggaggggctgtgggggaggagggcgtgagggctctgggatct

SEQ ID NO: 288525 - DNA, 1147 bp, Homo sapiens
cggcctttcgaggggaaacatcgcttcacgggcagaaggcatgtaggccaagtaggcgaaggaaacgcacgcgaactgtctaccgtctacgtccaccgatccaagactctcgccatgtcacctcgccccagaaagtgtctgcaaaggacacgcaaccacgctcactcagcgccgggccctatttccttctccacagccggttttccccgaagactataaaatgcgaacctcttccggctgtggaacatggcggcgcccgtggaaaggaccacatttgggggcggggcctggcggtacttccgtccaggtccagcgggtgctgtgatcttcaagtatggggtctgctggcttgtcgcggctgcatgggcttttcgcggtctataagcccccggggctaaaatggaagcacctgcgggatacagtggagctacaacttctgaagggtctcaatgccaggaagcctcccgctcctaaacagcgtgttcgcttcttgctgggccccatggaaggcagcgaagagaaggagctgaccctcacagccaccagcgtaccctctttcatcaaccatccactggtatgtggaccagcattcgcccatctcaaggttggcgtgggacatcggttggatgcccaggcttctggagtacttgtgctcggcgtgggacatggatgcaggctcctcaccgatatgtacaatgctcatcttaccaaggattacacagtgcgtggcctcctgggcaaagctacagatgacttccgtgaggacgggaggctggtagagaagacaacctatgaccacgtgaccagagagaagctggaccgcattctggccgttatccaaggctcccatcagaaggccctggtgatgtactccaacctcgacctgaagacccaggaggcctatgagatggccgtgagaggcctgatccggcccatgaacaagtccccgatgctgataactggcatccgatgcctctactttgcacctccggaattcctcttagagggggccgcatggtgggacaccgacaagggtgcggaatgggccaggaaaaggcgcggaaaaagacccggttgtgggcccccaggggggcacccgagggtttacccaaaagggcccctggccggggctcccacacacgggtcg

SEQ ID NO: 288526 - DNA, 671 bp, Homo sapiens
gcagaatccaatgaaatggtgaggaaagctgggtgggagtggagggtatcagcaaaactcagttctttggaaaaattaggtaacttgaacgtagggcacatgggctgtcacaccaccccatttagagcccttattggcatagagatgataaaagtggactctgtgatggcctctcatgatctcaggatagcaggataggggaactctgagtcatggccaaaataattggtcaatgtacagcctcagacagctgggaataccaccccaaatcacttggataaggagatgttttccttatcctgtgtctttaactctgagacggatggagttgaacaatcaacgattgttaaaaatgtaccaaatgtgtaagcatcatgaggtgtttaagctgagcttttaaattaaaattctgctgggtgtggcggctcatgcctgtaatcccagcactttgcgatccccacacaggaggattgcttgagcccagaagttttagacggcgcctgtgaatagccactgcactctagtctggggaacatatgagacccctgccatctcaaaaaaaaaaaaatttttcaataaattatgtgcccacgaaatttaaatttaaaaaattgggttttggcgggtctttaccagggtaatttcatggtttacagagagccttaaaagaa

SEQ ID NO: 288527 - DNA, 1662 bp, Homo sapiens
cggcctttcgaggggaaacatcgcttcacgggcagaaggcatgtaggccaagtaggcgaaggaaacgcacgcgaactgtctaccgtctacgtccaccgatccaagactctcgccatgtcacctcgccccagaaagtgtctgcaaaggacacgcaaccacgctcactcagcgccgggccctatttccttctccacagccggttttccccgaagactataaaatgcgaacctcttccggctgtggaacatggcggcgcccgtggaaaggaccacatttgggggcggggcctggcggtacttccgtccaggtccagcgggtgctgtgatcttcaagtatggggtctgctggcttgtcgcggctgcatgggcttttcgcggtctataagcccccggggctaaaatggaagcacctgcgggatacagtggagctacaacttctgaagggtctcaatgccaggaagcctcccgctcctaaacagcgtgttcgcttcttgctgggccccatggaaggcagcgaagagaaggagctgaccctcacagccaccagcgtaccctctttcatcaaccatccactggtatgtggaccagcattcgcccatctcaaggttggcgtgggacatcggttggatgcccaggcttctggagtacttgtgctcggcgtgggacatggatgcaggctcctcaccgatatgtacaatgctcatcttaccaaggattacacagtgcgtggcctcctgggcaaagctacagatgacttccgtgaggacgggaggctggtagagaagacaacctatgaccacgtgaccagagagaagctggaccgcattctggccgttatccaaggctcccatcagaaggccctggtgatgtactccaacctcgacctgaagacccaggaggcctatgagatggccgtgagaggcctgatccggcccatgaacaagtccccgatgctgataactggcatccgatgcctctactttgcacctccggaattcctcttagaggtgcagtgcatgcatgagacgcagaaagagctgcggaagttggttcatgaaatcggcctggaactaaagaccactgctgtctgcacccaagtgcggcgcacgcgcgacggcttcttcacgctagacagtgccctcctgaggacccagtgggacctaaccaacatccaggatgctatccgggctgctacccctcaggtagctgcagagctggagaagagcttgagcccggggctggacaccaagcagctccccagtccgggatggtcctgggactcccagggcccgagctctaccttggggctggagaggggtgcggggcagtgaatgcccaggcagctcctggggcagtggatggataaatagaagaactgctatgagctggacctgatagctgtgcagaaagtgagagcaggggcaccttttctacgtaagacacaaaactcaagctgtaacagaaaggtcaatggacttgacccaactgagaaggatggcagaccaggcgtggtggcgggcacttgtaatcccagctactcccaaggctgaggcaggagaattgcttgagcccaggagtttaaggttgtagtgcgctagacggcgcctgtgaatagccactgcactctagtctggggaacatatgagacccctgccatctcaaa

SEQ ID NO: 288528 - DNA, 1641 bp, Homo sapiens
cggcctttcgaggggaaacatcgcttcacgggcagaaggcatgtaggccaagtaggcgaaggaaacgcacgcgaactgtctaccgtctacgtccaccgatccaagactctcgccatgtcacctcgccccagaaagtgtctgcaaaggacacgcaaccacgctcactcagcgccgggccctatttccttctccacagccggttttccccgaagactataaaatgcgaacctcttccggctgtggaacatggcggcgcccgtggaaaggaccacatttgggggcggggcctggcggtacttccgtccaggtccagcgggtgctgtgatcttcaagtatggggtctgctggcttgtcgcggctgcatgggcttttcgcggtctataagcccccggggctaaaatggaagcacctgcgggatacagtggagctacaacttctgaagggtctcaatgccaggaagcctcccgctcctaaacagcgtgttcgcttcttgctgggccccatggaaggcagcgaagagaaggagctgaccctcacagccaccagcgtaccctctttcatcaaccatccactggtgctcggcgtgggacatggatgcaggctcctcaccgatatgtacaatgctcatcttaccaaggattacacagtgcgtggcctcctgggcaaagctacagatgacttccgtgaggacgggaggctggtagagaagacaacctatgaccacgtgaccagagagaagctggaccgcattctggccgttatccaaggctcccatcagaaggccctggtgatgtactccaacctcgacctgaagacccaggaggcctatgagatggccgtgagaggcctgatccggcccatgaacaagtccccgatgctgataactggcatccgatgcctctactttgcacctccggaattcctcttagaggtgcagtgcatgcatgagacgcagaaagagctgcggaagttggttcatgaaatcggcctggaactaaagaccactgctgtctgcacccaagtgcggcgcacgcgcgacggcttcttcacgctagacagtgccctcctgaggacccagtgggacctaaccaacatccaggatgctatccgggctgctacccctcaggtagctgcagagctggagaagagcttgagcccggggctggacaccaagcagctccccagtccgggatggtcctgggactcccagggcccgagctctaccttggggctggagaggggtgcggggcagtgaatgcccaggcagctcctggggcagtggatggataaatagaagaactgctatgagctggacctgatagctgtgcagaaagtgagagcaggggcaccttttctacgtaagacacaaaactcaagctgtaacagaaaggtcaatggacttgacccaactgagaaggaaaaacttctgtatggaggaaaagacagtaaacatgacagactgatagaaagtattggcagaccaggcgtggtggcgggcacttgtaatcccagctactcccaaggctgaggcaggagaattgcttgagcccaggagtttaaggttgtagtgcgctagacggcgcctgtgaatagccactgcactctagtctggggaacatatgagacccctgccatctcaaa

SEQ ID NO: 288529 - DNA, 1180 bp, Homo sapiens
ttggccaacgggaggccaagaagagcaagagaaccaagctgtcctgctgagagtatatgatctaatggcaaggaaaccagggaccacatcattggagcacagagcccaagggcaagagcagccaaggagttaagagcttgggctctggagccagcttgcctgggtttcctgactctaccaggcacctggtgatgaaggagggcaggaaaggtggctggaggagccacggtggcagggcacacaaagcaagtgaggagcttccagagaggcacctcatgtgggggaaagggtaggtgggccacccagctgcagcccccttcctgatctgcaggtactccaacctcgacctgaagacccaggaggcctatgagatggccgtgagaggcctgatccggcccatgaacaagtccccgatgctgataactggcatccgatgcctctactttgcacctccggaattcctcttagaggtgcagtgcatgcatgagacgcagaaagagctgcggaagttggttcatgaaatcggcctggaactaaagaccactgctgtctgcacccaagtgcggcgcacgcgcgacggcttcttcacgctagacagtgccctcctgaggacccagtgggacctaaccaacatccaggatgctatccgggctgctacccctcaggtagctgcagagctggagaagagcttgagcccggggctggacaccaagcagctccccagtccgggatggtcctgggactcccagggcccgagctctaccttggggctggagaggggtgcggggcagtgaatgcccaggcagctcctggggcagtggatggataaatagaagaactgctatgagctggacctgatagctgtgcagaaagtgagagcaggggcaccttttctacgtaagacacaaaactcaagctgtaacagaaaggtcaatggacttgacccaactgagaaggaaaaacttctgtatggaggaaaagacagtaaacatgacagactgatagaaagtattggcagaccaggcgtggtggcgggcacttgtaatcccagctactcccaaggctgaggcaggagaattgcttgagcccaggagtttaaggttgtagtgcgctagacggcgcctgtgaatagccactgcactctagtctggggaacatatgagacccctgccatctcaaa

SEQ ID NO: 288530 - DNA, 1736 bp, Homo sapiens
gcagaatccaatgaaatggtgaggaaagctgggtgggagtggagggtatcagcaaaactcagttctttggaaaaattaggtaacttgaacgtagggcacatgggctgtcacaccaccccatttagagcccttattggcatagagatgataaaagtggactctgtgatggcctctcatgatctcaggatagcaggataggggaactctgagtcatggccaaaataattggtcaatgtacagcctcagacagctgggaataccaccccaaatcacttggataaggagatgttttccttatcctgtgtctttaactctgagacggatggagttgaacaatcaacgattgttaaaaatgtaccaaatgtgtaagcatcatgaggtgtttaagctgagcttttaaattaaaattctgctgggtgtggcggctcatgcctgtaatcccagcactttgcgatccccacacaggaggattgcttgagcccagaagtttgagaccagcctgggcaacacaaggagaccctgtctctacaaaaaacaaacaaacaaacaaaaaagccgggggtgttggtgtgtgcctgtagtcccagctactagggaggctgagatgggaggatcgcttgaacctagcaagtcaaggcggcagtaaatggagatctgtactccagcctgggcaacagagcgagaccctatgtcagaaaaaaagaaaaagccacccagcaggctgagcgtggtggctcacgcctgtaatccctgcactttgggaagccaaagcaggtgaatcacttgaggtcaggagttcgagaccagcctggccaatatggtgaaaccctgtctctaccaaaaatacaaaaattagccgggcatggtggcgcttgtctgtagtccagctacagctactccagatctgggctgaggtgggagaatcatttgaacccaggaggtggaggttgcagtgagctgaaatcacacgactgtactctagcctgggtgacagggtgagaccctatctcaaaacaaacaaacaaaaaccccaccagcaaccttgctgacaaatccacaggcccccacgtctgccaattgcctgcctgtatgaactgggcacctgggggaggggcgtggcccccaggctactcatcttggctttcacagccaaagggcctgggtggaacctcagcttactgtgtttactgactgggtaatgtggcctctgaagctgtcacctatctataaaatggggattaaaacgacactcacttgctcattgtctttcatcccacccacgtgtgttaatcgcgtgctcctgtaggccagccactgctctgggtgctgggacttggtactcaaggacagatgaggctctaggtctcacagagattatgacgtagggggatcaggcaagaaaataatggagtgatgagcacagggaggagatctggctggtcagtgaagcagaggcttgggagctgattcattttatatataagtatgtacgtaatttttttttttttttgagacagagtctcactttgtcacctaggctggagtgtagtggcgctagacggcgcctgtgaatagccactgcactctagtctggggaacatatgagacccctgccatctcaaaaaaaaaaaaatttttcaataaattatgtgcccacgaaatttaaatttaaaaaattgggttttggcgggtctttaccagggtaatttcatggtttacagagagccttaaaagaa

SEQ ID NO: 288531 - DNA, 1160 bp, Homo sapiens
tttttttctgagacggagtctcactccgtcatccaggttggagtgcagtggcacaatctcagctcactgcaacctctgcctcccaggttcaagcgattctcctgcctcagcttctcaagtagctgggattacagatgtgtaccaccatgcctggctaatttttgtatttttagtagagacagggtttcaccatgttggccaggctggtctggaactcctgacctcaggtgatccgcccacctcagcctcccagagcgctgggattatgccaacctctgcctcccaaagcactgggatggcaggcatgagccaccacacccggcctgtttttgttttttagacagggtcttgctctgtcacccaggctggagttgcagtgagctgaaatcacacgactgtactctagcctgggtgacagggtgagaccctatctcaaaacaaacaaacaaaaaccccaccagcaaccttgctgacaaatccacaggcccccacgtctgccaattgcctgcctgtatgaactgggcacctgggggaggggcgtggcccccaggctactcatcttggctttcacagccaaagggcctgggtggaacctcagcttactgtgtttactgactgggtaatgtggcctctgaagctgtcacctatctataaaatggggattaaaacgacactcacttgctcattgtctttcatcccacccacgtgtgttaatcgcgtgctcctgtaggccagccactgctctgggtgctgggacttggtactcaaggacagatgaggctctaggtctcacagagattatgacgtagggggatcaggcaagaaaataatggagtgatgagcacagggaggagatctggctggtcagtgaagcagaggcttgggagctgattcattttatatataagtatgtacgtaatttttttttttttttgagacagagtctcactttgtcacctaggctggagtgtagtggcgctagacggcgcctgtgaatagccactgcactctagtctggggaacatatgagacccctgccatctcaaaaaaaaaaaaatttttcaataaattatgtgcccacgaaatttaaatttaaaaaattgggttttggcgggtctttaccagggtaatttcatggtttacagagagccttaaaagaa

SEQ ID NO: 288532 - DNA, 840 bp, Homo sapiens
gatgaaaatgagatgatttttgttgtttttctgttgttgcccaggctggagttgcagtgagctgaaatcacacgactgtactctagcctgggtgacagggtgagaccctatctcaaaacaaacaaacaaaaaccccaccagcaaccttgctgacaaatccacaggcccccacgtctgccaattgcctgcctgtatgaactgggcacctgggggaggggcgtggcccccaggctactcatcttggctttcacagccaaagggcctgggtggaacctcagcttactgtgtttactgactgggtaatgtggcctctgaagctgtcacctatctataaaatggggattaaaacgacactcacttgctcattgtctttcatcccacccacgtgtgttaatcgcgtgctcctgtaggccagccactgctctgggtgctgggacttggtactcaaggacagatgaggctctaggtctcacagagattatgacgtagggggatcaggcaagaaaataatggagtgatgagcacagggaggagatctggctggtcagtgaagcagaggcttgggagctgattcattttatatataagtatgtacgtaatttttttttttttttgagacagagtctcactttgtcacctaggctggagtgtagtggcgctagacggcgcctgtgaatagccactgcactctagtctggggaacatatgagacccctgccatctcaaaaaaaaaaaaatttttcaataaattatgtgcccacgaaatttaaatttaaaaaattgggttttggcgggtctttaccagggtaatttcatggtttacagagagccttaaaagaa

SEQ ID NO: 288533 - DNA, 1204 bp, Homo sapiens
tttttttctgagacggagtctcactccgtcatccaggttggagtgcagtggcacaatctcagctcactgcaacctctgcctcccaggttcaagcgattctcctgcctcagcttctcaagtagctgggattacagatgtgtaccaccatgcctggctaatttttgtatttttagtagagacagggtttcaccatgttggccaggctggtctggaactcctgacctcaggtgatccgcccacctcagcctcccagagcgctgggattatgccaacctctgcctcccaaagcactgggatggcaggcatgagccaccacacccggcctgtttttgttttttagacagggtcttgctctgtcacccaggctggagtgcagtgatgcaaacatgactcactgcagctttgtcctctcaggcttaaccatcttcccacctcagcttccagaatagctgggactgcaggcgtgcacacagtatctggctaatttatttattttattttatttttgagacagggcctcgcactgtcgcccaggctagagtgcagtggcgcggtttcaactcattgcagcctcgaccctcctgggtcaagcgattcttcctgccttagtctccagagttgctgggattaccggtgtgcaccaccaagcctggctaatttttgtatttttagtagagacagggtttcactatgttggccaggctggtctggaactcctgacctgaggtgatccgcctacctcggccttccaaagtactgggaatataggcatgagccactgtttccggcctgttttttttagacagagtcttgctctgtcacccaggctggagtgcaatggtgcaaacatgactcactgcaccgtcatcctcccaggctcaaccatcttcccacctcaccctccagaatagctgggactacaggcgtgcaccacgatgcctggctaaatatttttttccagctaattttattatttttttttgagaatggcttgagcccaggagtttaaggtttgtagtgcgctagacggcgcctgtgaatagccactgcactctagtctggggaacatatgagacccctgccatctcaaaaaaaaaaaaatttttcaataaattatgtgcccacgaaatttaaatttaaaaaattgggttttggcgggtctttaccagggtaatttcatggtttacagagagccttaaaagaa

SEQ ID NO: 288534 - DNA, 252 bp, Homo sapiens
gagacagagtctcactttgtcacctaggctggagtgtagtggcgcaatcttagctcactgcaacctctgcctcccaggctcaagtgattctcccacctcagcctcccaagtagctgagactacagatgcacaccgtgacacctggctaattaagaccctcaactcttaaaaaaaaaaggctaaaatgataaattttacattatgcacattttatcacacccacataaaaaccataaaaacaaaacaaaagct

SEQ ID NO: 288535 - DNA, 481 bp, Homo sapiens
cattgacaaccccctgccttttccagaccacgtgaccagagagaagctggaccgcattctggccgttatccaaggctcccatcagaaggccctggtgatgtgagtagggccctcagggaggtactgggagagcagtaagtgcccttggctcccgtaggctcccccaaacctggggcagattccatggatcttgtttttagagcccagaaccagacgggagctacctgtttctttcttggcattaagaaatggttctgtgtgccaggtcttgggttggccaacgggaggccaagaagagcaagagaaccaagctgtcctgctgagagtatatgatctaatggcaaggaaaccagggaccacatcattggagcacagagcccaagggcaagagcagccaaggagttaagagcttgggctctggagccagcttgcctgggtttcctgactctaccaggcacctggtgatgaaggagggcaggaa

SEQ ID NO: 288536 - DNA, 1716 bp, Homo sapiens
cggcctttcgaggggaaacatcgcttcacgggcagaaggcatgtaggccaagtaggcgaaggaaacgcacgcgaactgtctaccgtctacgtccaccgatccaagactctcgccatgtcacctcgccccagaaagtgtctgcaaaggacacgcaaccacgctcactcagcgccgggccctatttccttctccacagccggttttccccgaagactataaaatgcgaacctcttccggctgtggaacatggcggcgcccgtggaaaggaccacatttgggggcggggcctggcggtacttccgtccaggtccagcgggtgctgtgatcttcaagtatggggtctgctggcttgtcgcggctgcatgggcttttcgcggtctataagcccccggggctaaaatggaagcacctgcgggatacagtggagctacaacttctgaagggtctcaatgccaggaagcctcccgctcctaaacagcgtgttcgcttcttgctgggccccatggaaggcagcgaagagaaggagctgaccctcacagccaccagcgtaccctctttcatcaaccatccactggtatgtggaccagcattcgcccatctcaaggttggcgtgggacatcggttggatgcccaggcttctggagtacttgtgctcggcgtgggacatggatgcaggctcctcaccgatatgtacaatgctcatcttaccaaggattacacagtgcgtggcctcctgggcaaagctacagatgacttccgtgaggacgggaggctggtagagaagacaacctatgaccacgtgaccagagagaagctggaccgcattctggccgttatccaaggctcccatcagaaggccctggtgatgtactccaacctcgacctgaagacccaggaggcctatgagatggccgtgagaggcctgatccggcccatgaacaagtccccgatgctgataactggcatccgatgcctctactttgcacctccggaattcctcttagaggtgcagtgcatgcatgagacgcagaaagagctgcggaagttggttcatgaaatcggcctggaactaaagaccactgctgtctgcacccaagtgcggcgcacgcgcgacggcttcttcacgctagacagtgccctcctgaggacccagtgggacctaaccaacatccaggatgctatccgggctgctacccctcaggtagctgcagagctggagaagagcttgagcccggggctggacaccaagcagctccccagtccgggatggtcctgggactcccagggcccgagctctaccttggggctggagaggggtgcggggcagtgaatgcccaggcagctcctggggcagtggatggataaatagaagaactgctatgagctggacctgatagctgtgcagaaagtgagagcaggggcaccttttctacgtaagacacaaaactcaagctgtaacagaaaggtcaatggacttgacccaactgagaaggaaaaacttctgtatggaggaaaagacagtaaacatgacagactgatagaaagtattggcagaccaggcgtggtggcgggcacttgtaatcccagctactcccaaggctgaggcaggagaattgcttgagcccaggagtttaaggttgtagtgcgctagacggcgcctgtgaatagccactgcactctagtctggggaacatatgagacccctgccatctcaaa

SEQ ID NO: 288537 - DNA, 1001 bp, Homo sapiens
cggcctttcgaggggaaacatcgcttcacgggcagaaggcatgtaggccaagtaggcgaaggaaacgcacgcgaactgtctaccgtctacgtccaccgatccaagactctcgccatgtcacctcgccccagaaagtgtctgcaaaggacacgcaaccacgctcactcagcgccgggccctatttccttctccacagccggttttccccgaagactataaaatgcgaacctcttccggctgtggaacatggcggcgcccgtggaaaggaccacatttgggggcggggcctggcggtacttccgtccaggtccagcgggtgctgtgatcttcaagtatggggtctgctggcttgtcgcggctgcatgggcttttcgcggtctataagcccccggggctaaaatggaagcacctgcgggatacagtggagctacaacttctgaagggtgagtgcctcgaaccagacccacgttcccgctctcgttctcttggaagtccatctccgcttctggtccttaccccaaaacaaaatcacgtgacctattcacctgggcagagcgctttcccaaacgcctgttctctgtgctttcttactcctcactttcctctgttttccgagggggaaactgactcagtattgttccttgtcacacggttactacgttgtagagtctgtttgaatccgcctgtttcttaactactgctatactgccctctgcaccatgggcttctgctttgtcttctacatcatacttccctgttgtctaatcccccaagtgtttggacagaacaagatattcctggtcagcatcgtggtgcacgcctgtaatcccagctactctggaggctgaggcaggaggatcgcttgagcccaagagtttgacgttacagtgagctatgatggcgccattgcacttcagcctgggctacagaacgaggccctgtctcttaaaaaatattttatatgtacatatatttgtatgtatgtgtgtatatattatctc

SEQ ID NO: 288538 - DNA, 1669 bp, Homo sapiens
cggcctttcgaggggaaacatcgcttcacgggcagaaggcatgtaggccaagtaggcgaaggaaacgcacgcgaactgtctaccgtctacgtccaccgatccaagactctcgccatgtcacctcgccccagaaagtgtctgcaaaggacacgcaaccacgctcactcagcgccgggccctatttccttctccacagccggttttccccgaagactataaaatgcgaacctcttccggctgtggaacatggcggcgcccgtggaaaggaccacatttgggggcggggcctggcggtacttccgtccaggtccagcgggtgctgtgatcttcaagtatggggtctgctggcttgtcgcggctgcatgggcttttcgcggtctataagcccccggggctgtctcaatgccaggaagcctcccgctcctaaacagcgtgttcgcttcttgctgggccccatggaaggcagcgaagagaaggagctgaccctcacagccaccagcgtaccctctttcatcaaccatccactggtatgtggaccagcattcgcccatctcaaggttggcgtgggacatcggttggatgcccaggcttctggagtacttgtgctcggcgtgggacatggatgcaggctcctcaccgatatgtacaatgctcatcttaccaaggattacacagtgcgtggcctcctgggcaaagctacagatgacttccgtgaggacgggaggctggtagagaagacaacctatgaccacgtgaccagagagaagctggaccgcattctggccgttatccaaggctcccatcagaaggccctggtgatgtactccaacctcgacctgaagacccaggaggcctatgagatggccgtgagaggcctgatccggcccatgaacaagtccccgatgctgataactggcatccgatgcctctactttgcacctccggaattcctcttagaggtgcagtgcatgcatgagacgcagaaagagctgcggaagttggttcatgaaatcggcctggaactaaagaccactgctgtctgcacccaagtgcggcgcacgcgcgacggcttcttcacgctagacagtgccctcctgaggacccagtgggacctaaccaacatccaggatgctatccgggctgctacccctcaggtagctgcagagctggagaagagcttgagcccggggctggacaccaagcagctccccagtccgggatggtcctgggactcccagggcccgagctctaccttggggctggagaggggtgcggggcagtgaatgcccaggcagctcctggggcagtggatggataaatagaagaactgctatgagctggacctgatagctgtgcagaaagtgagagcaggggcaccttttctacgtaagacacaaaactcaagctgtaacagaaaggtcaatggacttgacccaactgagaaggaaaaacttctgtatggaggaaaagacagtaaacatgacagactgatagaaagtattggcagaccaggcgtggtggcgggcacttgtaatcccagctactcccaaggctgaggcaggagaattgcttgagcccaggagtttaaggttgtagtgcgctagacggcgcctgtgaatagccactgcactctagtctggggaacatatgagacccctgccatctcaaa

SEQ ID NO: 288539 - DNA, 1584 bp, Homo sapiens
cggcctttcgaggggaaacatcgcttcacgggcagaaggcatgtaggccaagtaggcgaaggaaacgcacgcgaactgtctaccgtctacgtccaccgatccaagactctcgccatgtcacctcgccccagaaagtgtctgcaaaggacacgcaaccacgctcactcagcgccgggccctatttccttctccacagccggttttccccgaagactataaaatgcgaacctcttccggctgtggaacatggcggcgcccgtggaaaggaccacatttgggggcggggcctggcggtacttccgtccaggtccagcgggtgctgtgatcttcaagtatggggtctgctggcttgtcgcggctgcatgggcttttcgcggtctataagcccccggggctaaaatggaagcacctgcgggatacagtggagctacaacttctgaaggtatgtggaccagcattcgcccatctcaaggttggcgtgggacatcggttggatgcccaggcttctggagtacttgtgctcggcgtgggacatggatgcaggctcctcaccgatatgtacaatgctcatcttaccaaggattacacagtgcgtggcctcctgggcaaagctacagatgacttccgtgaggacgggaggctggtagagaagacaacctatgaccacgtgaccagagagaagctggaccgcattctggccgttatccaaggctcccatcagaaggccctggtgatgtactccaacctcgacctgaagacccaggaggcctatgagatggccgtgagaggcctgatccggcccatgaacaagtccccgatgctgataactggcatccgatgcctctactttgcacctccggaattcctcttagaggtgcagtgcatgcatgagacgcagaaagagctgcggaagttggttcatgaaatcggcctggaactaaagaccactgctgtctgcacccaagtgcggcgcacgcgcgacggcttcttcacgctagacagtgccctcctgaggacccagtgggacctaaccaacatccaggatgctatccgggctgctacccctcaggtagctgcagagctggagaagagcttgagcccggggctggacaccaagcagctccccagtccgggatggtcctgggactcccagggcccgagctctaccttggggctggagaggggtgcggggcagtgaatgcccaggcagctcctggggcagtggatggataaatagaagaactgctatgagctggacctgatagctgtgcagaaagtgagagcaggggcaccttttctacgtaagacacaaaactcaagctgtaacagaaaggtcaatggacttgacccaactgagaaggaaaaacttctgtatggaggaaaagacagtaaacatgacagactgatagaaagtattggcagaccaggcgtggtggcgggcacttgtaatcccagctactcccaaggctgaggcaggagaattgcttgagcccaggagtttaaggttgtagtgcgctagacggcgcctgtgaatagccactgcactctagtctggggaacatatgagacccctgccatctcaaa

SEQ ID NO: 288540 - DNA, 1791 bp, Homo sapiens
cggcctttcgaggggaaacatcgcttcacgggcagaaggcatgtaggccaagtaggcgaaggaaacgcacgcgaactgtctaccgtctacgtccaccgatccaagactctcgccatgtcacctcgccccagaaagtgtctgcaaaggacacgcaaccacgctcactcagcgccgggccctatttccttctccacagccggttttccccgaagactataaaatgcgaacctcttccggctgtggaacatggcggcgcccgtggaaaggaccacatttgggggcggggcctggcggtacttccgtccaggtccagcgggtgctgtgatcttcaagtatggggtctgctggcttgtcgcggctgcatgggcttttcgcggtctataagcccccggggctaaaatggaagcacctgcgggatacagtggagctacaacttctgaagggtctcaatgccaggaagcctcccgctcctaaacagcgtgttcgcttcttgctgggccccatggaaggcagcgaagagaaggagctgaccctcacagccaccagcgtaccctctttcatcaaccatccactggtatgtggaccagcattcgcccatctcaaggttggcgtgggacatcggttggatgcccaggcttctggagtacttggtgtcagaatcctgtggagagcttggcagggatcctaggccccctccaaccatgagtcagattcagtgcatatggtgctcggcgtgggacatggatgcaggctcctcaccgatatgtacaatgctcatcttaccaaggattacacagtgcgtggcctcctgggcaaagctacagatgacttccgtgaggacgggaggctggtagagaagacaacctatgaccacgtgaccagagagaagctggaccgcattctggccgttatccaaggctcccatcagaaggccctggtgatgtactccaacctcgacctgaagacccaggaggcctatgagatggccgtgagaggcctgatccggcccatgaacaagtccccgatgctgataactggcatccgatgcctctactttgcacctccggaattcctcttagaggtgcagtgcatgcatgagacgcagaaagagctgcggaagttggttcatgaaatcggcctggaactaaagaccactgctgtctgcacccaagtgcggcgcacgcgcgacggcttcttcacgctagacagtgccctcctgaggacccagtgggacctaaccaacatccaggatgctatccgggctgctacccctcaggtagctgcagagctggagaagagcttgagcccggggctggacaccaagcagctccccagtccgggatggtcctgggactcccagggcccgagctctaccttggggctggagaggggtgcggggcagtgaatgcccaggcagctcctggggcagtggatggataaatagaagaactgctatgagctggacctgatagctgtgcagaaagtgagagcaggggcaccttttctacgtaagacacaaaactcaagctgtaacagaaaggtcaatggacttgacccaactgagaaggaaaaacttctgtatggaggaaaagacagtaaacatgacagactgatagaaagtattggcagaccaggcgtggtggcgggcacttgtaatcccagctactcccaaggctgaggcaggagaattgcttgagcccaggagtttaaggttgtagtgcgctagacggcgcctgtgaatagccactgcactctagtctggggaacatatgagacccctgccatctcaaa

SEQ ID NO: 288541 - DNA, 2078 bp, Homo sapiens
agcagttttgagtagtgtgatgctgaactttacatgaatggctttctgtagtgagaaggcgcctgtcacccgcggcctgcagaggctgcgtggcttggagggggaaccagaggcccaaccatgggcctccttcccctggtctctacagcagcttttcccaaacccactgagatgggtcaggctcctagagagcctgagaacaaagcccctttgtgacttttgttttgaatcaggcttgtgacaaaggggaggagccactgggttgggtggatgggggtgcccggagcgcgctgttgttgcaggggaagaaaacaaaattgtgtcttttttttggcaatgttgtcttgccaatccctccctcccccagctctccgaacagcaggatttcccaacggcagcttgggaaaaagacccagtggcagcttggggaaaagacccagcgctccgtttagaagcaacgtgtatcagccaactgagatggccgtcgtgctcaacggtgggaccatcccaactgctccgccaagtcacacaggaagacacctttggtgaaagactttaagttccagagaatcagaatttctcttaccgatttgcctccctggctgtgtctttcttgagggagaaatcggtaacagttgccgaaccaggccgcctcacagccaggaaatttggaaatcctagccaaggggatttcgtgtaaatgtgaacactgacgaactgaaaagctaacaccgactgcccgcccctcccctgccacacacacagacacgtaataccagaccaacctcaatccccgcaaactaaagcaaagctaattgcaaatagtattaggctcactggaaaatgtggctgggaagactgtttcatcctctgggggtagaacagaaccaaattcacagctggtgggccagactggtgttggttggaggtggggggctcccactcttatcacctctccccagcaagtgctggaccccaggtagcctcttggagatgaccgttgcgttgaggacaaatggggactttgccaccggcttgcctggtggtttgcacatttcaggggggtcaggagagttaaggaggttgtgggtgggattccaaggtgaggcccaactgaatcgtggggtgagctttatagccagtagaggtggagggaccctggcatgtgccaaagaagaggccctctgggtgatgaagtgaccatcacatttggaaagtgatcaaccactgttccttctatggggctcttgctctagtgtctatggtgagaacacaggccccgccccttcccttgtagagccatagaaatattctggcttggggcagcagtcccttcttcccttgatcatctcgccctgttcctacacttacgggtgtatctccaaatcctctcccaattttattcccttattcatttcaagagctccaatggggtctccagctgaaagcccctccgggaggcaggttggaaggcaggcaccacggcaggttttccgcgatgatgtcacctagcagggcttcaggggttcccactaggatgcagagatgacctctcgctgcctcacaagcagtgacacctcgggtcctttccgttgctatggtgaaaattcctggatggaatggatcacatgagggtttcttgttgcttttggagggtgtgggggatattttgttttggtttttctgcaggttccatgaaaacagcccttttccaagcccattgtttctgtcatggtttccatctgtcctgagcaagtcattcctttgttatttagcatttcgaacatctcggccattcaaagcccccatgttctctgcactgtttggccagcataacctctagcatcgattcaaagcagagttttaacctgacggcatggaatgtataaatgagggtgggtccttctgcagatactctaatcactacattgctttttctataaaactacccataagcctttaacctttaaagaaaaatgaaaaaggttagtgtttgggggccgggggaggactgaccgcttcataagccagtacgtctgagctgagtatgtttcaataaaccttttgatatttctcaa

SEQ ID NO: 288542 - DNA, 857 bp, Homo sapiens
acctttttcaccctttttataatttgtttatatttttccctcttaggtggtctttaattcttctctttgggtggtggttttgtccccctctttttgttccccctccctccgacaagtaaggggtcctcttttccccacgaggttcccccggtgtctccctttttccccctcttctggccgctgttttataacccccgcgctcccccgtccctctatcgtttattatatatatcccctctctcctcttatttgggcgccccctttgttccacacacaaaactcgcggggtgcgcgtcggcgttaactagctgtgggcccccccgggggaatttttggccccccccccctcttttttttttttttttttttttttttttttttttttttttttttttttttttttgcatgggcagataggttttattttcaaaatgctgttcttaacacaaaaataaaggctttactatttacttaagacgtgtggtagcttgtcaaaacaacccagtgcaactaactactaggctttcggatctgccttgagggtcggtctgtggcattttaaatgggagaatcttggttaacagcaaaccacagaacatattaaggtaataagtttacccataaaagcaggaactttctatataatactttgggacttagacaacaaaaatcctttgttacatctgtctgggtttaagtgtctcatcttgttgggtttgcagtaaaagttaaggagtggtctcctttggaaatgatcattaagtataaggtcttttttataaagagagtagtcagtcactaggtaaacttaaaaccaaattcagaggttggggacttaaattagaatatggatcttt

SEQ ID NO: 288543 - DNA, 4542 bp, Homo sapiens
agcgggccacggccgctgcagcagcgcgggccgggccaggggcgcctcgcgcggcagcgactctggcaggcgctgcagtgaagctggacccgcaggcgggcgtgcgtggagcgggggccgcggccgcgccgcagagatgtgactcgggccgaaggccagctggagcgtcggcgctgcggggccgcgggggtcgaatgttcgtggcatcagagagaaagatgagagctcaccaggtgctcaccttcctcctgctcttcgtgatcacctcggtggcctctgaaaacgccagcacatcccgaggctgtaggctggacctcctccctcagtacgtgtccctgtgcgacctggacgccatctggggcattgtggtggaggcggtggccggggcgggcgccctgatcacactgctcctgatgctcatcctcctggtgcggctgcccttcatcaaggagaaggagaagaagagccctgtgggcctccactttctgttcctcctggggaccctgggcctctttgggctgacgtttgccttcatcatccaggaggacgagaccatctgctctgtccgccgcttcctctggggcgtcctctttgcgctctgcttctcctgcctgctgagccaggcatggcgcgtgcggaggctggtgcggcatggcacgggccccgcgggctggcagctggtgggcctggcgctgtgcctgatgctggtgcaagtcatcatcgctgtggagtggctggtgctcaccgtgctgcgtgacacaaggccagcctgcgcctacgagcccatggactttgtgatggccctcatctacgacatggtactgcttgtggtcaccctggggctggccctcttcactctgtgcggcaagttcaagaggtggaagctgaacggggccttcctcctcatcacagccttcctctctgtgctcatctgggtggcctggatgaccatgtacctcttcggcaatgtcaagctgcagcagggggatgcctggaacgaccccaccttggccatcacgctggcggccagcggctgggtcttcgtcatcttccacgccatccctgagatccactgcacccttctgccagccctgcaggagaacacgcccaactacttcgacacgtcgcagcccaggatgcgggagacggccttcgaggaggacgtgcagctgccgcgggcctatatggagaacaaggccttctccatggatgaacacaatgcagctctccgaacagcaggatttcccaacggcagcttgggaaaaagacccagtggcagcttggggaaaagacccagcgctccgtttagaagcaacgtgtatcagccaactgagatggccgtcgtgctcaacggtgggaccatcccaactgctccgccaagtcacacaggaagacacctttggtgaaagactttaagttccagagaatcagaatttctcttaccgatttgcctccctggctgtgtctttcttgagggagaaatcggtaacagttgccgaaccaggccgcctcacagccaggaaatttggaaatcctagccaaggggatttcgtgtaaatgtgaacactgacgaactgaaaagctaacaccgactgcccgcccctcccctgccacacacacagacacgtaataccagaccaacctcaatccccgcaaactaaagcaaagctaattgcaaatagtattaggctcactggaaaatgtggctgggaagactgtttcatcctctgggggtagaacagaaccaaattcacagctggtgggccagactggtgttggttggaggtggggggctcccactcttatcacctctccccagcaagtgctggaccccaggtagcctcttggagatgaccgttgcgttgaggacaaatggggactttgccaccggcttgcctggtggtttgcacatttcaggggggtcaggagagttaaggaggttgtgggtgggattccaaggtgaggcccaactgaatcgtggggtgagctttatagccagtagaggtggagggaccctggcatgtgccaaagaagaggccctctgggtgatgaagtgaccatcacatttggaaagtgatcaaccactgttccttctatggggctcttgctctagtgtctatggtgagaacacaggccccgccccttcccttgtagagccatagaaatattctggcttggggcagcagtcccttcttcccttgatcatctcgccctgttcctacacttacgggtgtatctccaaatcctctcccaattttattcccttattcatttcaagagctccaatggggtctccagctgaaagcccctccgggaggcaggttggaaggcaggcaccacggcaggttttccgcgatgatgtcacctagcagggcttcaggggttcccactaggatgcagagatgacctctcgctgcctcacaagcagtgacacctcgggtcctttccgttgctatggtgaaaattcctggatggaatggatcacatgagggtttcttgttgcttttggagggtgtgggggatattttgttttggtttttctgcaggttccatgaaaacagcccttttccaagcccattgtttctgtcatggtttccatctgtcctgagcaagtcattcctttgttatttagcatttcgaacatctcggccattcaaagcccccatgttctctgcactgtttggccagcataacctctagcatcgattcaaagcagagttttaacctgacggcatggaatgtataaatgagggtgggtccttctgcagatactctaatcactacattgctttttctataaaactacccataagcctttaacctttaaagaaaaatgaaaaaggttagtgtttgggggccgggggaggactgaccgcttcataagccagtacgtctgagctgagtatgtttcaataaaccttttgatatttctcaaaggccctagtctctgctgtctcccctccccaccccatccttgcaaagcactggggaaagtaaggccaatctggccctccctgtgtgacccgccttcgagttttccttaacagttagtacatttccttgtgttaccacgcatggggaagaaaacgcatggccccagaatgccacccccacctgacctccccggaagcaccccgcctctgcccagagcatgtgcttgcttctagagaatcccgttccagtcattgcgtggacagaaaacgtaagagtcctggggaggggtgggagggaatgaagctaggacctggggtgggggtgggggcggttgcatgcggacccggtattctgaaaagaaagaaatcttcaaacacctcggtcctgtccggtgaaaaaacgacagcattacacattctcgtgccaggaaatggttactcacccccgctctctggagtcctttggagctttctgataccattcacacgatggagcaattcacacgttcgttttctaagttctttattgtccaagcatataaggtgagcacagcacaaatggctgccatggaaagtcgtgcttccccagcataagaacagagccatctttgagccatgggaagcctcatttaatgagacctttttccccccttttaaatctgatatgttatcgcacttagggttttgttttattttggcttttaaggttgagagtgggctgaacgccttcataatgggggcggaggcgggagtgagaggagaagggagagagctgttctttttctaatgactacacctgaaaagtatcaagagacatctttgccaagagactgtagcagccagctgccccccgtggagcaaggtttaaagacaaaattaaatggcacctctgtttaagatctgcgtgtgtaaacaagactcgtttggggaaaacgacccgggaggagagcatctgtgatcaaaatctctcattgtaagcacaaattgttccgtgtctggttattaaaatcgctttgggtctataacagccactcttgtccccccttttaatagaaaattgtcattctagcctggatttctccccactggaggtggagggtgggaagagaagggagtcagctctgacagcttacaaactgggaagttctgtgcatctccagggattccagagttgaagatctggttgttggaagctgggcgcccagtgcttttttttttttttttttttagcccagtaccccaattgccgtgggcccccttgaccgggggtgaccccgggggggggccccgggggggccggggttgtttgacgcctgggcaaccccttttggggggccttggggggtttataatcccatgttgctgtgttgttccagctgacaggagttctcacccagggcttttattaccggtggaaaagcaggcgcccttggcaaaaaatttttttctcaaaggctacgggtgttaaaagaacctaattcccccggaggtggcatcttaacagaagctcgaattcggaacattttcctaaggctttattcacttaaagggaccgggaagtttccacgcgtccacaagcttcttttaaaaaaaaacagaaaaaccgtgg

SEQ ID NO: 288544 - DNA, 2861 bp, Homo sapiens
agcgggccacggccgctgcagcagcgcgggccgggccaggggcgcctcgcgcggcagcgactctggcaggcgctgcagtgaagctggacccgcaggcgggcgtgcgtggagcgggggccgcggccgcgccgcagagatgtgactcgggccgaaggccagctggagcgtcggcgctgcggggccgcgggggtcgaatgttcgtggcatcagagagaaagatgagagctcaccaggtgctcaccttcctcctgctcttcgtgatcacctcggtggcctctgaaaacgccagcacatcccgaggctgtaggctggacctcctccctcagtacgtgtccctgtgcgacctggacgccatctggggcattgtggtggaggcggtggccggggcgggcgccctgatcacactgctcctgatgctcatcctcctggtgcggctgcccttcatcaaggagaaggagaagaagagccctgtgggcctccactttctgttcctcctggggaccctgggcctctttgggctgacgtttgccttcatcatccaggaggacgagaccatctgctctgtccgccgcttcctctggggcgtcctctttgcgctctgcttctcctgcctgctgagccaggcatggcgcgtgcggaggctggtgcggcatggcacgggccccgcgggctggcagctggtgggcctggcgctgtgcctgatgctggtgcaagtcatcatcgctgtggagtggctggtgctcaccgtgctgcgtgacacaaggccagcctgcgcctacgagcccatggactttgtgatggccctcatctacgacatggtactgcttgtggtcaccctggggctggccctcttcactctgtgcggcaagttcaagaggtggaagctgaacggggccttcctcctcatcacagccttcctctctgtgctcatctgggtggcctggatgaccatgtacctcttcggcaatgtcaagctgcagcagggggatgcctggaacgaccccaccttggccatcacgctggcggccagcggctgggtcttcgtcatcttccacgccatccctgagatccactgcacccttctgccagccctgcaggagaacacgcccaactacttcgacacgtcgcagcccaggatgcgggagacggccttcgaggaggacgtgcagctgccgcgggcctatatggagaacaaggccttctccatggatgaacacaatgcagctctccgaacagcaggatttcccaacggcagcttgggaaaaagacccagtggcagcttggggaaaagacccagcgctccgtttagaagcaacgtgtatcagccaactgagatggccgtcgtgctcaacggtgggaccatcccaactgctccgccaagtcacacaggaagacacctttggtgaaagactttaagttccagagaatcagaatttctcttaccgatttgcctccctggctgtgtctttcttgagggagaaatcggtaacagttgccgaaccaggccgcctcacagccaggaaatttggaaatcctagccaaggggatttcgtgtaaatgtgaacactgacgaactgaaaagctaacaccgactgcccgcccctcccctgccacacacacagacacgtaataccagaccaacctcaatccccgcaaactaaagcaaagctaattgcaaatagtattaggctcactggaaaatgtggctgggaagactgtttcatcctctgggggtagaacagaaccaagtgctggaccccaggtagcctcttggagatgaccgttgcgttgaggacaaatggggactttgccaccggcttgcctggtggtttgcacatttcaggggggtcaggagagttaaggaggttgtgggtgggattccaaggtgaggcccaactgaatcgtggggtgagctttatagccagtagaggtggagggaccctggcatgtgccaaagaagaggccctctgggtgatgaagtgaccatcacatttggaaagtgatcaaccactgttccttctatggggctcttgctctagtgtctatggtgagaacacaggccccgccccttcccttgtagagccatagaaatattctggcttggggcagcagtcccttcttcccttgatcatctcgccctgttcctacacttacgggtgtatctccaaatcctctcccaattttattcccttattcatttcaagagctccaatggggtctccagctgaaagcccctccgggaggcaggttggaaggcaggcaccacggcaggttttccgcgatgatgtcacctagcagggcttcaggggttcccactaggatgcagagatgacctctcgctgcctcacaagcagtgacacctcgggtcctttccgttgctatggtgaaaattcctggatggaatggatcacatgagggtttcttgttgcttttggagggtgtgggggatattttgttttggtttttctgcaggttccatgaaaacagcccttttccaagcccattgtttctgtcatggtttccatctgtcctgagcaagtcattcctttgttatttagcatttcgaacatctcggccattcaaagcccccatgttctctgcactgtttggccagcataacctctagcatcgattcaaagcagagttttaacctgacggcatggaatgtataaatgagggtgggtccttctgcagatactctaatcactacattgctttttctataaaactacccataagcctttaacctttaaagaaaaatgaaaaaggttagtgtttgggggccgggggaggactgaccgcttcataagccagtacgtctgagctgagtatgtttcaataaaccttttgatatttctcaa

SEQ ID NO: 288545 - DNA, 4488 bp, Homo sapiens
agcgggccacggccgctgcagcagcgcgggccgggccaggggcgcctcgcgcggcagcgactctggcaggcgctgcagtgaagctggacccgcaggcgggcgtgcgtggagcgggggccgcggccgcgccgcagagatgtgactcgggccgaaggccagctggagcgtcggcgctgcggggccgcgggggtcgaatgttcgtggcatcagagagaaagatgagagctcaccaggtgctcaccttcctcctgctcttcgtgatcacctcggtggcctctgaaaacgccagcacatcccgaggctgtaggctggacctcctccctcagtacgtgtccctgtgcgacctggacgccatctggggcattgtggtggaggcggtggccggggcgggcgccctgatcacactgctcctgatgctcatcctcctggtgcggctgcccttcatcaaggagaaggagaagaagagccctgtgggcctccactttctgttcctcctggggaccctgggcctctttgggctgacgtttgccttcatcatccaggaggacgagaccatctgctctgtccgccgcttcctctggggcgtcctctttgcgctctgcttctcctgcctgctgagccaggcatggcgcgtgcggaggctggtgcggcatggcacgggccccgcgggctggcagctggtgggcctggcgctgtgcctgatgctggtgcaagtcatcatcgctgtggagtggctggtgctcaccgtgctgcgtgacacaaggccagcctgcgcctacgagcccatggactttgtgatggccctcatctacgacatggtactgcttgtggtcaccctggggctggccctcttcactctgtgcggcaagttcaagaggtggaagctgaacggggccttcctcctcatcacagccttcctctctgtgctcatctgggtggcctggatgaccatgtacctcttcggcaatgtcaagctgcagcagggggatgcctggaacgaccccaccttggccatcacgctggcggccagcggctgggtcttcgtcatcttccacgccatccctgagatccactgcacccttctgccagccctgcaggagaacacgcccaactacttcgacacgtcgcagcccaggatgcgggagacggccttcgaggaggacgtgcagctgccgcgggcctatatggagaacaaggccttctccatggatgaacacaatgcagctctccgaacagcaggatttcccaacggcagcttgggaaaaagacccagtggcagcttggggaaaagacccagcgctccgtttagaagcaacgtgtatcagccaactgagatggccgtcgtgctcaacggtgggaccatcccaactgctccgccaagtcacacaggaagacacctttggtgaaagactttaagttccagagaatcagaatttctcttaccgatttgcctccctggctgtgtctttcttgagggagaaatcggtaacagttgccgaaccaggccgcctcacagccaggaaatttggaaatcctagccaaggggatttcgtgtaaatgtgaacactgacgaactgaaaagctaacaccgactgcccgcccctcccctgccacacacacagacacgtaataccagaccaacctcaatccccgcaaactaaagcaaagctaattgcaaatagtattaggctcactggaaaatgtggctgggaagactgtttcatcctctgggggtagaacagaaccaaattcacagctggtgggccagactggtgttggttggaggtggggggctcccactcttatcacctctccccagcaagtgctggaccccaggtagcctcttggagatgaccgttgcgttgaggacaaatggggactttgccaccggcttgcctggtggtttgcacatttcaggggggtcaggagagttaaggaggttgtgggtgggattccaaggtgaggcccaactgaatcgtggggtgagctttatagccagtagaggtggagggaccctggcatgtgccaaagaagaggccctctgggtgatgaagtgaccatcacatttggaaagtgatcaaccactgttccttctatggggctcttgctctagtgtctatggtgagaacacaggccccgccccttcccttgtagagccatagaaatattctggcttggggcagcagtcccttcttcccttgatcatctcgccctgttcctacacttacgggtgtatctccaaatcctctcccaattttattcccttattcatttcaagagctccaatggggtctccagctgaaagcccctccgggaggcaggttggaaggcaggcaccacggcaggttttccgcgatgatgtcacctagcagggcttcaggggttcccactaggatgcagagatgacctctcgctgcctcacaagcagtgacacctcgggtcctttccgttgctatgggtgtgggggatattttgttttggtttttctgcaggttccatgaaaacagcccttttccaagcccattgtttctgtcatggtttccatctgtcctgagcaagtcattcctttgttatttagcatttcgaacatctcggccattcaaagcccccatgttctctgcactgtttggccagcataacctctagcatcgattcaaagcagagttttaacctgacggcatggaatgtataaatgagggtgggtccttctgcagatactctaatcactacattgctttttctataaaactacccataagcctttaacctttaaagaaaaatgaaaaaggttagtgtttgggggccgggggaggactgaccgcttcataagccagtacgtctgagctgagtatgtttcaataaaccttttgatatttctcaaaggccctagtctctgctgtctcccctccccaccccatccttgcaaagcactggggaaagtaaggccaatctggccctccctgtgtgacccgccttcgagttttccttaacagttagtacatttccttgtgttaccacgcatggggaagaaaacgcatggccccagaatgccacccccacctgacctccccggaagcaccccgcctctgcccagagcatgtgcttgcttctagagaatcccgttccagtcattgcgtggacagaaaacgtaagagtcctggggaggggtgggagggaatgaagctaggacctggggtgggggtgggggcggttgcatgcggacccggtattctgaaaagaaagaaatcttcaaacacctcggtcctgtccggtgaaaaaacgacagcattacacattctcgtgccaggaaatggttactcacccccgctctctggagtcctttggagctttctgataccattcacacgatggagcaattcacacgttcgttttctaagttctttattgtccaagcatataaggtgagcacagcacaaatggctgccatggaaagtcgtgcttccccagcataagaacagagccatctttgagccatgggaagcctcatttaatgagacctttttccccccttttaaatctgatatgttatcgcacttagggttttgttttattttggcttttaaggttgagagtgggctgaacgccttcataatgggggcggaggcgggagtgagaggagaagggagagagctgttctttttctaatgactacacctgaaaagtatcaagagacatctttgccaagagactgtagcagccagctgccccccgtggagcaaggtttaaagacaaaattaaatggcacctctgtttaagatctgcgtgtgtaaacaagactcgtttggggaaaacgacccgggaggagagcatctgtgatcaaaatctctcattgtaagcacaaattgttccgtgtctggttattaaaatcgctttgggtctataacagccactcttgtccccccttttaatagaaaattgtcattctagcctggatttctccccactggaggtggagggtgggaagagaagggagtcagctctgacagcttacaaactgggaagttctgtgcatctccagggattccagagttgaagatctggttgttggaagctgggcgcccagtgcttttttttttttttttttttagcccagtaccccaattgccgtgggcccccttgaccgggggtgaccccgggggggggccccgggggggccggggttgtttgacgcctgggcaaccccttttggggggccttggggggtttataatcccatgttgctgtgttgttccagctgacaggagttctcacccagggcttttattaccggtggaaaagcaggcgcccttggcaaaaaatttttttctcaaaggctacgggtgttaaaagaacctaattcccccggaggtggcatcttaacagaagctcgaattcggaacattttcctaaggctttattcacttaaagggaccgggaagtttccacgcgtccacaagcttcttttaaaaaaaaacagaaaaaccgtgg

SEQ ID NO: 288546 - DNA, 2853 bp, Homo sapiens
actaacctatgaggattttttaatttgagagccctcaaatgggccagtggtctagtcagcattgggaaatgaagatgatgagatcctgtaactcggaaaagatatcagaggaatgttcgtggcatcagagagaaagatgagagctcaccaggtgctcaccttcctcctgctcttcgtgatcacctcggtggcctctgaaaacgccagcacatcccgaggctgtaggctggacctcctccctcagtacgtgtccctgtgcgacctggacgccatctggggcattgtggtggaggcggtggccggggcgggcgccctgatcacactgctcctgatgctcatcctcctggtgcggctgcccttcatcaaggagaaggagaagaagagccctgtgggcctccactttctgttcctcctggggaccctgggcctctttgggctgacgtttgccttcatcatccaggaggacgagaccatctgctctgtccgccgcttcctctggggcgtcctctttgcgctctgcttctcctgcctgctgagccaggcatggcgcgtgcggaggctggtgcggcatggcacgggccccgcgggctggcagctggtgggcctggcgctgtgcctgatgctggtgcaagtcatcatcgctgtggagtggctggtgctcaccgtgctgcgtgacacaaggccagcctgcgcctacgagcccatggactttgtgatggccctcatctacgacatggtactgcttgtggtcaccctggggctggccctcttcactctgtgcggcaagttcaagaggtggaagctgaacggggccttcctcctcatcacagccttcctctctgtgctcatctgggtggcctggatgaccatgtacctcttcggcaatgtcaagctgcagcagggggatgcctggaacgaccccaccttggccatcacgctggcggccagcggctgggtcttcgtcatcttccacgccatccctgagatccactgcacccttctgccagccctgcaggagaacacgcccaactacttcgacacgtcgcagcccaggatgcgggagacggccttcgaggaggacgtgcagctgccgcgggcctatatggagaacaaggccttctccatggatgaacacaatgcagctctccgaacagcaggatttcccaacggcagcttgggaaaaagacccagtggcagcttggggaaaagacccagcgctccgtttagaagcaacgtgtatcagccaactgagatggccgtcgtgctcaacggtgggaccatcccaactgctccgccaagtcacacaggaagacacctttggtgaaagactttaagttccagagaatcagaatttctcttaccgatttgcctccctggctgtgtctttcttgagggagaaatcggtaacagttgccgaaccaggccgcctcacagccaggaaatttggaaatcctagccaaggggatttcgtgtaaatgtgaacactgacgaactgaaaagctaacaccgactgcccgcccctcccctgccacacacacagacacgtaataccagaccaacctcaatccccgcaaactaaagcaaagctaattgcaaatagtattaggctcactggaaaatgtggctgggaagactgtttcatcctctgggggtagaacagaaccaaattcacagctggtgggccagactggtgttggttggaggtggggggctcccactcttatcacctctccccagcaagtgctggaccccaggtagcctcttggagatgaccgttgcgttgaggacaaatggggactttgccaccggcttgcctggtggtttgcacatttcaggggggtcaggagagttaaggaggttgtgggtgggattccaaggtgaggcccaactgaatcgtggggtgagctttatagccagtagaggtggagggaccctggcatgtgccaaagaagaggccctctgggtgatgaagtgaccatcacatttggaaagtgatcaaccactgttccttctatggggctcttgctctagtgtctatggtgagaacacaggccccgccccttcccttgtagagccatagaaatattctggcttggggcagcagtcccttcttcccttgatcatctcgccctgttcctacacttacgggtgtatctccaaatcctctcccaattttattcccttattcatttcaagagctccaatggggtctccagctgaaagcccctccgggaggcaggttggaaggcaggcaccacggcaggttttccgcgatgatgtcacctagcagggcttcaggggttcccactaggatgcagagatgacctctcgctgcctcacaagcagtgacacctcgggtcctttccgttgctatggtgaaaattcctggatggaatggatcacatgagggtttcttgttgcttttggagggtgtgggggatattttgttttggtttttctgcaggttccatgaaaacagcccttttccaagcccattgtttctgtcatggtttccatctgtcctgagcaagtcattcctttgttatttagcatttcgaacatctcggccattcaaagcccccatgttctctgcactgtttggccagcataacctctagcatcgattcaaagcagagttttaacctgacggcatggaatgtataaatgagggtgggtccttctgcagatactctaatcactacattgctttttctataaaactacccataagcctttaacctttaaagaaaaatgaaaaaggttagtgtttgggggccgggggaggactgaccgcttcataagccagtacgtctgagctgagtatgtttcaataaaccttttgatatttctcaa

SEQ ID NO: 288547 - DNA, 1706 bp, Homo sapiens
agcgggccacggccgctgcagcagcgcgggccgggccaggggcgcctcgcgcggcagcgactctggcaggcgctgcagtgaagctggacccgcaggcgggcgtgcgtggagcgggggccgcggccgcgccgcagagatgtgactcgggccgaaggccagctggagcgtcggcgctgcggggccgcgggggtcgaatgttcgtggcatcagagagaaagatgagagctcaccaggtgctcaccttcctcctgctcttcgtgatcacctcggtggcctctgaaaacgccagcacatcccgaggctgtaggctggacctcctccctcagtacgtgtccctgtgcgacctggacgccatctggggcattgtggtggaggcggtggccggggcgggcgccctgatcacactgctcctgatgctcatcctcctggtgcggctgcccttcatcaaggagaaggagaagaagagccctgtgggcctccactttctgttcctcctggggaccctgggcctctttgggctgacgtttgccttcatcatccaggaggacgagaccatctgctctgtccgccgcttcctctggggcgtcctctttgcgctctgcttctcctgcctgctgagccaggcatggcgcgtgcggaggctggtgcggcatggcacgggccccgcgggctggcagctggtgggcctggcgctgtgcctgatgctggtgcaagtcatcatcgctgtggagtggctggtgctcaccgtgctgcgtgacacaaggccagcctgcgcctacgagcccatggactttgtgatggccctcatctacgacatggtactgcttgtggtcaccctggggctggccctcttcactctgtgcggcaagttcaagaggtggaagctgaacggggccttcctcctcatcacagccttcctctctgtgctcatctgggtggcctggatgaccatgtacctcttcggcaatgtcaagctgcagcagggggatgcctggaacgaccccaccttggccatcacgctggcggccagcggctgggtcttcgtcatcttccacgccatccctgagatccactgcacccttctgccagccctgcaggagaacacgcccaactacttcgacacgtcgcagcccaggatgcgggagacggccttcgaggaggacgtgcagctgccgcgggcctatatggagaacaaggccttctccatggatgaacacaatgcagctctccgaacagcaggatttcccaacggcagcttgggaaaaagacccagtggcagcttggggaaaagacccagcgctccgtttagaagcaacgtgtatcagccaactgagatggccgtcgtgctcaacggtgggaccatcccaactgctccgccaagtcacacaggaagacacctttggtgaaagactttaagttccagagaatcagaatttctcttaccgatttgcctccctggctgtgtctttcttgagggagaaatcggtaacagttgccgaaccaggccgcctcacagccaggaaatttggaaatcctagccaaggggatttcgtgtaaatgtgaacactgacgaactgaaaagctaacaccgactgcccgcccctcccctgccacacactgtttgggggccgggggaggactgaccgcttcataagccagtacgtctgagctgagtatgtttcaataaaccttttgatatttctcaa

SEQ ID NO: 288548 - DNA, 2629 bp, Homo sapiens
tacaaggccgctgagtgatgggacatgcaaggaggagttcacagtcaacggcgacccagtcaagaaggtgatctgcaccgggcccaacgacacgtcgccgggcagcccccgccacacggtgcctcagtgttgctacggcttttgcatcgacctgctcatcaagctggcacggaccatgaacttcacctacgaggtgcacctggtggcagatggcaagttcggcacacaggagcgggtgaacaacagcaacaagaaggagtggaatgggatgatgggcgagctgctcagcgggcaggcagacatgatcgtggcgccgctaaccataaacaacgagcgcggggccttgtacgcagggccccgcgggctggcagctggtgggcctggcgctgtgcctgatgctggtgcaagtcatcatcgctgtggagtggctggtgctcaccgtgctgcgtgacacaaggccagcctgcgcctacgagcccatggactttgtgatggccctcatctacgacatggtactgcttgtggtcaccctggggctggccctcttcactctgtgcggcaagttcaagaggtggaagctgaacggggccttcctcctcatcacagccttcctctctgtgctcatctgggtggcctggatgaccatgtacctcttcggcaatgtcaagctgcagcagggggatgcctggaacgaccccaccttggccatcacgctggcggccagcggctgggtcttcgtcatcttccacgccatccctgagatccactgcacccttctgccagccctgcaggagaacacgcccaactacttcgacacgtcgcagcccaggatgcgggagacggccttcgaggaggacgtgcagctgccgcgggcctatatggagaacaaggccttctccatggatgaacacaatgcagctctccgaacagcaggatttcccaacggcagcttgggaaaaagacccagtggcagcttggggaaaagacccagcgctccgtttagaagcaacgtgtatcagccaactgagatggccgtcgtgctcaacggtgggaccatcccaactgctccgccaagtcacacaggaagacacctttggtgaaagactttaagttccagagaatcagaatttctcttaccgatttgcctccctggctgtgtctttcttgagggagaaatcggtaacagttgccgaaccaggccgcctcacagccaggaaatttggaaatcctagccaaggggatttcgtgtaaatgtgaacactgacgaactgaaaagctaacaccgactgcccgcccctcccctgccacacacacagacacgtaataccagaccaacctcaatccccgcaaactaaagcaaagctaattgcaaatagtattaggctcactggaaaatgtggctgggaagactgtttcatcctctgggggtagaacagaaccaaattcacagctggtgggccagactggtgttggttggaggtggggggctcccactcttatcacctctccccagcaagtgctggaccccaggtagcctcttggagatgaccgttgcgttgaggacaaatggggactttgccaccggcttgcctggtggtttgcacatttcaggggggtcaggagagttaaggaggttgtgggtgggattccaaggtgaggcccaactgaatcgtggggtgagctttatagccagtagaggtggagggaccctggcatgtgccaaagaagaggccctctgggtgatgaagtgaccatcacatttggaaagtgatcaaccactgttccttctatggggctcttgctctagtgtctatggtgagaacacaggccccgccccttcccttgtagagccatagaaatattctggcttggggcagcagtcccttcttcccttgatcatctcgccctgttcctacacttacgggtgtatctccaaatcctctcccaattttattcccttattcatttcaagagctccaatggggtctccagctgaaagcccctccgggaggcaggttggaaggcaggcaccacggcaggttttccgcgatgatgtcacctagcagggcttcaggggttcccactaggatgcagagatgacctctcgctgcctcacaagcagtgacacctcgggtcctttccgttgctatggtgaaaattcctggatggaatggatcacatgagggtttcttgttgcttttggagggtgtgggggatattttgttttggtttttctgcaggttccatgaaaacagcccttttccaagcccattgtttctgtcatggtttccatctgtcctgagcaagtcattcctttgttatttagcatttcgaacatctcggccattcaaagcccccatgttctctgcactgtttggccagcataacctctagcatcgattcaaagcagagttttaacctgacggcatggaatgtataaatgagggtgggtccttctgcagatactctaatcactacattgctttttctataaaactacccataagcctttaacctttaaagaaaaatgaaaaaggttagtgtttgggggccgggggaggactgaccgcttcataagccagtacgtctgagctgagtatgtttcaataaaccttttgatatttctcaa

SEQ ID NO: 288549 - DNA, 2114 bp, Homo sapiens
agcgggccacggccgctgcagcagcgcgggccgggccaggggcgcctcgcgcggcagcgactctggcaggcgctgcagtgaagctggacccgcaggcgggcgtgcgtggagcgggggccgcggccgcgccgcagagatgtgactcgggccgaaggccagctggagcgtcggcgctgcggggccgcgggggtcgaatgttcgtggcatcagagagaaagatgagagctcaccaggtgctcaccttcctcctgctcttcgtgatcacctcggtggcctctgaacacgcccaactacttcgacacgtcgcagcccaggatgcgggagacggccttcgaggaggacgtgcagctgccgcgggcctatatggagaacaaggccttctccatggatgaacacaatgcagctctccgaacagcaggatttcccaacggcagcttgggaaaaagacccagtggcagcttggggaaaagacccagcgctccgtttagaagcaacgtgtatcagccaactgagatggccgtcgtgctcaacggtgggaccatcccaactgctccgccaagtcacacaggaagacacctttggtgaaagactttaagttccagagaatcagaatttctcttaccgatttgcctccctggctgtgtctttcttgagggagaaatcggtaacagttgccgaaccaggccgcctcacagccaggaaatttggaaatcctagccaaggggatttcgtgtaaatgtgaacactgacgaactgaaaagctaacaccgactgcccgcccctcccctgccacacacacagacacgtaataccagaccaacctcaatccccgcaaactaaagcaaagctaattgcaaatagtattaggctcactggaaaatgtggctgggaagactgtttcatcctctgggggtagaacagaaccaaattcacagctggtgggccagactggtgttggttggaggtggggggctcccactcttatcacctctccccagcaagtgctggaccccaggtagcctcttggagatgaccgttgcgttgaggacaaatggggactttgccaccggcttgcctggtggtttgcacatttcaggggggtcaggagagttaaggaggttgtgggtgggattccaaggtgaggcccaactgaatcgtggggtgagctttatagccagtagaggtggagggaccctggcatgtgccaaagaagaggccctctgggtgatgaagtgaccatcacatttggaaagtgatcaaccactgttccttctatggggctcttgctctagtgtctatggtgagaacacaggccccgccccttcccttgtagagccatagaaatattctggcttggggcagcagtcccttcttcccttgatcatctcgccctgttcctacacttacgggtgtatctccaaatcctctcccaattttattcccttattcatttcaagagctccaatggggtctccagctgaaagcccctccgggaggcaggttggaaggcaggcaccacggcaggttttccgcgatgatgtcacctagcagggcttcaggggttcccactaggatgcagagatgacctctcgctgcctcacaagcagtgacacctcgggtcctttccgttgctatggtgaaaattcctggatggaatggatcacatgagggtttcttgttgcttttggagggtgtgggggatattttgttttggtttttctgcaggttccatgaaaacagcccttttccaagcccattgtttctgtcatggtttccatctgtcctgagcaagtcattcctttgttatttagcatttcgaacatctcggccattcaaagcccccatgttctctgcactgtttggccagcataacctctagcatcgattcaaagcagagttttaacctgacggcatggaatgtataaatgagggtgggtccttctgcagatactctaatcactacattgctttttctataaaactacccataagcctttaacctttaaagaaaaatgaaaaaggttagtgtttgggggccgggggaggactgaccgcttcataagccagtacgtctgagctgagtatgtttcaataaaccttttgatatttctcaa

SEQ ID NO: 288550 - DNA, 1850 bp, Homo sapiens
ttgcggcaagcctgcaaggagactctagagggttccctgtcgcagcccaggatgcgggagacggccttcgaggaggacgtgcagctgccgcgggcctatatggagaacaaggccttctccatggatgaacacaatgcagctctccgaacagcaggatttcccaacggcagcttgggaaaaagacccagtggcagcttggggaaaagacccagcgctccgtttagaagcaacgtgtatcagccaactgagatggccgtcgtgctcaacggtgggaccatcccaactgctccgccaagtcacacaggaagacacctttggtgaaagactttaagttccagagaatcagaatttctcttaccgatttgcctccctggctgtgtctttcttgagggagaaatcggtaacagttgccgaaccaggccgcctcacagccaggaaatttggaaatcctagccaaggggatttcgtgtaaatgtgaacactgacgaactgaaaagctaacaccgactgcccgcccctcccctgccacacacacagacacgtaataccagaccaacctcaatccccgcaaactaaagcaaagctaattgcaaatagtattaggctcactggaaaatgtggctgggaagactgtttcatcctctgggggtagaacagaaccaaattcacagctggtgggccagactggtgttggttggaggtggggggctcccactcttatcacctctccccagcaagtgctggaccccaggtagcctcttggagatgaccgttgcgttgaggacaaatggggactttgccaccggcttgcctggtggtttgcacatttcaggggggtcaggagagttaaggaggttgtgggtgggattccaaggtgaggcccaactgaatcgtggggtgagctttatagccagtagaggtggagggaccctggcatgtgccaaagaagaggccctctgggtgatgaagtgaccatcacatttggaaagtgatcaaccactgttccttctatggggctcttgctctagtgtctatggtgagaacacaggccccgccccttcccttgtagagccatagaaatattctggcttggggcagcagtcccttcttcccttgatcatctcgccctgttcctacacttacgggtgtatctccaaatcctctcccaattttattcccttattcatttcaagagctccaatggggtctccagctgaaagcccctccgggaggcaggttggaaggcaggcaccacggcaggttttccgcgatgatgtcacctagcagggcttcaggggttcccactaggatgcagagatgacctctcgctgcctcacaagcagtgacacctcgggtcctttccgttgctatggtgaaaattcctggatggaatggatcacatgagggtttcttgttgcttttggagggtgtgggggatattttgttttggtttttctgcaggttccatgaaaacagcccttttccaagcccattgtttctgtcatggtttccatctgtcctgagcaagtcattcctttgttatttagcatttcgaacatctcggccattcaaagcccccatgttctctgcactgtttggccagcataacctctagcatcgattcaaagcagagttttaacctgacggcatggaatgtataaatgagggtgggtccttctgcagatactctaatcactacattgctttttctataaaactacccataagcctttaacctttaaagaaaaatgaaaaaggttagtgtttgggggccgggggaggactgaccgcttcataagccagtacgtctgagctgagtatgtttcaataaaccttttgatatttctcaa

SEQ ID NO: 288551 - DNA, 1193 bp, Homo sapiens
ctataggtctagtacgaggctggtgtgctggtgttggttggaggtggggggctcccactcttatcacctctccccagcaagtgctggaccccaggtagcctcttggagatgaccgttgcgttgaggacaaatggggactttgccaccggcttgcctggtggtttgcacatttcaggggggtcaggagagttaaggaggttgtgggtgggattccaaggtgaggcccaactgaatcgtggggtgagctttatagccagtagaggtggagggaccctggcatgtgccaaagaagaggccctctgggtgatgaagtgaccatcacatttggaaagtgatcaaccactgttccttctatggggctcttgctctagtgtctatggtgagaacacaggccccgccccttcccttgtagagccatagaaatattctggcttggggcagcagtcccttcttcccttgatcatctcgccctgttcctacacttacgggtgtatctccaaatcctctcccaattttattcccttattcatttcaagagctccaatggggtctccagctgaaagcccctccgggaggcaggttggaaggcaggcaccacggcaggttttccgcgatgatgtcacctagcagggcttcaggggttcccactaggatgcagagatgacctctcgctgcctcacaagcagtgacacctcgggtcctttccgttgctatggtgaaaattcctggatggaatggatcacatgagggtttcttgttgcttttggagggtgtgggggatattttgttttggtttttctgcaggttccatgaaaacagcccttttccaagcccattgtttctgtcatggtttccatctgtcctgagcaagtcattcctttgttatttagcatttcgaacatctcggccattcaaagcccccatgttctctgcactgtttggccagcataacctctagcatcgattcaaagcagagttttaacctgacggcatggaatgtataaatgagggtgggtccttctgcagatactctaatcactacattgctttttctataaaactacccataagcctttaacctttaaagaaaaatgaaaaaggttagtgtttgggggccgggggaggactgaccgcttcataagccagtacgtctgagctgagtatgtttcaataaaccttttgatatttctcaa

SEQ ID NO: 288552 - DNA, 1054 bp, Homo sapiens
ataagctaaggtagctgctggctgatcggacgaggtctctctctctctcccccgctcccgtcctcccccctcatttaatgagacctttttccccccttttaaatctgatatgttatcgcacttagggttttgttttattttggcttttaaggttgagagtgggctgaacgccttcataatgggggcggaggcgggagtgagaggagaagggagagagctgttctttttctaatgactacacctgaaaagtatcaagagacatctttgccaagagactgtagcagccagctgccccccgtggagcaaggtttaaagacaaaattaaatggcacctctgtttaagatctgcgtgtgtaaacaagactcgtttggggaaaacgacccgggaggagagcatctgtgatcaaaatctctcattgtaagcacaaattgttccgtgtctggttattaaaatcgctttgggtctataacagccactcttgtccccccttttaatagaaaattgtcattctagcctggatttctccccactggaggtggagggtgggaagagaagggagtcagctctgacagcttacaaactgggaagttctgtgcatctccagggattccagagttgaagatctggttgttggaagctgggcgcccagtgcttttttttttttttttttttagcccagtaccccaattgccgtgggcccccttgaccgggggtgaccccgggggggggccccgggggggccggggttgtttgacgcctgggcaaccccttttggggggccttggggggtttataatcccatgttgctgtgttgttccagctgacaggagttctcacccagggcttttattaccggtggaaaagcaggcgcccttggcaaaaaatttttttctcaaaggctacgggtgttaaaagaacctaattcccccggaggtggcatcttaacagaagctcgaattcggaacattttcctaaggctttattcacttaaagggaccgggaagtttccacgcgtccacaagcttcttttaaaaaaaaacagaaaaaccgtgg

SEQ ID NO: 288553 - DNA, 2935 bp, Homo sapiens
agcgggccacggccgctgcagcagcgcgggccgggccaggggcgcctcgcgcggcagcgactctggcaggcgctgcagtgaagctggacccgcaggcgggcgtgcgtggagcgggggccgcggccgcgccgcagagatgtgactcgggccgaaggccagctggagcgtcggcgctgcggggccgcgggggtcgaatgttcgtggcatcagagagaaagatgagagctcaccaggtgctcaccttcctcctgctcttcgtgatcacctcggtggcctctgaaaacgccagcacatcccgaggctgtaggctggacctcctccctcagtacgtgtccctgtgcgacctggacgccatctggggcattgtggtggaggcggtggccggggcgggcgccctgatcacactgctcctgatgctcatcctcctggtgcggctgcccttcatcaaggagaaggagaagaagagccctgtgggcctccactttctgttcctcctggggaccctgggcctctttgggctgacgtttgccttcatcatccaggaggacgagaccatctgctctgtccgccgcttcctctggggcgtcctctttgcgctctgcttctcctgcctgctgagccaggcatggcgcgtgcggaggctggtgcggcatggcacgggccccgcgggctggcagctggtgggcctggcgctgtgcctgatgctggtgcaagtcatcatcgctgtggagtggctggtgctcaccgtgctgcgtgacacaaggccagcctgcgcctacgagcccatggactttgtgatggccctcatctacgacatggtactgcttgtggtcaccctggggctggccctcttcactctgtgcggcaagttcaagaggtggaagctgaacggggccttcctcctcatcacagccttcctctctgtgctcatctgggtggcctggatgaccatgtacctcttcggcaatgtcaagctgcagcagggggatgcctggaacgaccccaccttggccatcacgctggcggccagcggctgggtcttcgtcatcttccacgccatccctgagatccactgcacccttctgccagccctgcaggagaacacgcccaactacttcgacacgtcgcagcccaggatgcgggagacggccttcgaggaggacgtgcagctgccgcgggcctatatggagaacaaggccttctccatggatgaacacaatgcagctctccgaacagcaggatttcccaacggcagcttgggaaaaagacccagtggcagcttggggaaaagacccagcgctccgtttagaagcaacgtgtatcagccaactgagatggccgtcgtgctcaacggtgggaccatcccaactgctccgccaagtcacacaggaagacacctttggtgaaagactttaagttccagagaatcagaatttctcttaccgatttgcctccctggctgtgtctttcttgagggagaaatcggtaacagttgccgaaccaggccgcctcacagccaggaaatttggaaatcctagccaaggggatttcgtgtaaatgtgaacactgacgaactgaaaagctaacaccgactgcccgcccctcccctgccacacacacagacacgtaataccagaccaacctcaatccccgcaaactaaagcaaagctaattgcaaatagtattaggctcactggaaaatgtggctgggaagactgtttcatcctctgggggtagaacagaaccaaattcacagctggtgggccagactggtgttggttggaggtggggggctcccactcttatcacctctccccagcaagtgctggaccccaggtagcctcttggagatgaccgttgcgttgaggacaaatggggactttgccaccggcttgcctggtggtttgcacatttcaggggggtcaggagagttaaggaggttgtgggtgggattccaaggtgaggcccaactgaatcgtggggtgagctttatagccagtagaggtggagggaccctggcatgtgccaaagaagaggccctctgggtgatgaagtgaccatcacatttggaaagtgatcaaccactgttccttctatggggctcttgctctagtgtctatggtgagaacacaggccccgccccttcccttgtagagccatagaaatattctggcttggggcagcagtcccttcttcccttgatcatctcgccctgttcctacacttacgggtgtatctccaaatcctctcccaattttattcccttattcatttcaagagctccaatggggtctccagctgaaagcccctccgggaggcaggttggaaggcaggcaccacggcaggttttccgcgatgatgtcacctagcagggcttcaggggttcccactaggatgcagagatgacctctcgctgcctcacaagcagtgacacctcgggtcctttccgttgctatggtgaaaattcctggatggaatggatcacatgagggtttcttgttgcttttggagggtgtgggggatattttgttttggtttttctgcaggttccatgaaaacagcccttttccaagcccattgtttctgtcatggtttccatctgtcctgagcaagtcattcctttgttatttagcatttcgaacatctcggccattcaaagcccccatgttctctgcactgtttggccagcataacctctagcatcgattcaaagcagagttttaacctgacggcatggaatgtataaatgagggtgggtccttctgcagatactctaatcactacattgctttttctataaaactacccataagcctttaacctttaaagaaaaatgaaaaaggttagtgtttgggggccgggggaggactgaccgcttcataagccagtacgtctgagctgagtatgtttcaataaaccttttgatatttctcaa

SEQ ID NO: 288554 - DNA, 4315 bp, Homo sapiens
agcgggccacggccgctgcagcagcgcgggccgggccaggggcgcctcgcgcggcagcgactctggcaggcgctgcagtgaagctggacccgcaggcgggcgtgcgtggagcgggggccgcggccgcgccgcagagatgtgactcgggccgaaggccagctggagcgtcggcgctgcggggccgcgggggtcgaatgttcgtggcatcagagagaaagatgagagctcaccaggtgctcaccttcctcctgctcttcgtgatcacctcggtggcctctgaaaacgccagcacatcccgaggctgtaggctggacctcctccctcagtacgtgtccctgtgcgacctggacgccatctggggcattgtggtggaggcggtggccggggcgggcgccctgatcacactgctcctgatgctcatcctcctggtgcggctgcccttcatcaaggagaaggagaagaagagccctgtgggcctccactttctgttcctcctggggaccctgggcctctttgggctgacgtttgccttcatcatccaggaggacgagaccatctgctctgtccgccgcttcctctggggcgtcctctttgcgctctgcttctcctgcctgctgagccaggcatggcgcgtgcggaggctggtgcggcatggcacgggccccgcgggctggcagctggtgggcctggcgctgtgcctgatgctggtgcaagtcatcatcgctgtggagtggctggtgctcaccgtgctgcgtgacacaaggccagcctgcgcctacgagcccatggactttgtgatggccctcatctacgacatggtactgcttgtggtcaccctggggctggccctcttcactctgtgcggcaagttcaagaggtggaagctgaacggggccttcctcctcatcacagccttcctctctgtgctcatctgggtggcctggatgaccatgtacctcttcggcaatgtcaagctgcagcagggggatgcctggaacgaccccaccttggccatcacgctggcggccagcggctgggtcttcgtcatcttccacgccatccctgagatccactgcacccttctgccagccctgcaggagaacacgcccaactacttcgacacgtcgcagcccaggatgcgggagacggccttcgaggaggacgtgcagctgccgcgggcctatatggagaacaaggccttctccatggatgaacacaatgcagctctccgaacagcaggatttcccaacggcagcttgggaaaaagacccagtggcagcttggggaaaagacccagcgctccgtttagaagcaacgtgtatcagccaactgagatggccgtcgtgctcaacggtgggaccatcccaactgctccgccaagtcacacaggaagacacctttggtgaaagactttaagttccagagaatcagaatttctcttaccgatttgcctccctggctgtgtctttcttgagggagaaatcggtaacagttgccgaaccaggccgcctcacagccaggaaatttggaaatcctagccaaggggatttcgtgtaaatgtgaacactgacgaactgaaaagctaacaccgactgcccgcccctcccctgccacacacacagacacgtaataccagaccaacctcaatccccgcaaactaaagcaaagctaattgcaaatagtattaggctcactggaaaatgtggctgggaagactgtttcatcctctgggggtagaacagaaccaaattcacagctggtgggccagactggtgttggttggaggtggggggctcccactcttatcacctctccccagcaagtgctggaccccaggtagcctcttggagatgaccgttgcgttgaggacaaatggggactttgccaccggcttgcctggtggtttgcacatttcaggggggtcaggagagttaaggaggttgtgggtgggattccaaggtgaggcccaactgaatcgtggggtgagctttatagccagtagaggtggagggaccctggcatgtgccaaagaagaggccctctgggtgatgaagtgaccatcacatttggaaagtgatcaaccactgttccttctatggggctcttgctctagtgtctatggtgagaacacaggccccgccccttcccttgtagagccatagaaatattctggcttggggcagcagtcccttcttcccttgatcatctcgccctgttcctacacttacgggtgtatctccaaatcctctcccaattttattcccttattcatttcaagagctccaatggggtctccagctgaaagcccctccgggaggcaggttggaaggcaggcaccacggcaggttttccgcgatgatgtcacctagcagggcttcaggggttcccactaggatgcagagatgacctctcgctgcctcacaagcagtgacacctcgggtcctttccgttgctatggtgaaaattcctggatggaatggatcacatgagggtttcttgttgcttttggagggtgtgggggatattttgttttggtttttctgcaggttccatgaaaacagcccttttccaagcccattgtttctgtcatggtttccatctgtcctgagcaagtcattcctttgttatttagcatttcgaacatctcggccattcaaagcccccatgttctctgcactgtttggccagcataacctctagcatcgattcaaagcagagttttaacctgacggcatggaatgtataaatgagggtgggtccttctgcagatactctaatcactacattgctttttctataaaactacccataagcctttaacctttaaagaaaaatgaaaaaggttagtgtttgggggccgggggaggactgaccgcttcataagccagtacgtctgagctgagtatgtttcaataaaccttttgatatttctcaaaggccctagtctctgctgtctcccctccccaccccatccttgcaaagcactggggaaagtaaggccaatctggccctccctgtgtgacccgccttcgagttttccttaacagttagtacatttccttgtgttaccacgcatggggaagaaaacgcatggccccagaatgccacccccacctgacctccccggaagcaccccgcctctgcccagagcatgtgcttgcttctagagaatcccgttccagtcattgcgtggacagaaaacgtaagagtcctggggaggggtgggagggaatgaagctaggacctggggtgggggtgggggcggttgcatgcggacccggtattctgaaaagaaagaaatcttcaaacacctcggtcctgtccggtgaaaaaacgacagcattacacattctcgtgccaggaaatggttactcacccccgctctctggagtcctttggagctttctgataccattcacacgatggagcaattcacacgttcgttttctaagttctttattgtccaagcatataaggtgagcacagcacaaatggctgccatggaaagtcgtgcttccccagcataagaacagagccatctttgagccatgggaagcctcatttaatgagacctttttccccccttttaaatctgatatgttatcgcacttagggttttgttttattttggcttttaaggttgagagtgggctgaacgccttcataatgggggcggaggcgggagtgagaggagaagggagagagctgttctttttctaatgactacacctgaaaagtatcaagagacatctttgccaatgactgttgcatacttataaaaaagaagttaaagaaatttcaagacaatcaatatgtaccataaacgactatataaatattacaaatttaaaaggctgtaaagcatgggcagataggttttattttcaaaatgctgttcttaacacaaaaataaaggctttactatttacttaagacgtgtggtagcttgtcaaaacaacccagtgcaactaactactaggctttcggatctgccttgagggtcggtctgtggcattttaaatgggagaatcttggttaacagcaaaccacagaacatattaaggtaataagtttacccataaaagcaggaactttctatataatactttgggacttagacaacaaaaatcctttgttacatctgtctgggtttaagtgtctcatcttgttgggtttgcagtaaaagttaaggagtggtctcctttggaaatgatcattaagtataaggtcttttttataaagagagtagtcagtcactaggtaaacttaaaaccaaattcagaggttggggacttaaattagaatatggatcttt

SEQ ID NO: 288555 - DNA, 2856 bp, Homo sapiens
cgcccgggcaggttagaattcagcggccgctgaattctacgcggccgcgccgcagagatgtgactcgggccgaaggccagctggagcgtcggcgctgcggggccgcgggggtcgaatgttcgtggcatcagagagaaagatgagagctcaccaggtgctcaccttcctcctgctcttcgtgatcacctcggtggcctctgaaaacgccagcacatcccgaggctgtaggctggacctcctccctcagtacgtgtccctgtgcgacctggacgccatctggggcattgtggtggaggcggtggccggggcgggcgccctgatcacactgctcctgatgctcatcctcctggtgcggctgcccttcatcaaggagaaggagaagaagagccctgtgggcctccactttctgttcctcctggggaccctgggcctctttgggctgacgtttgccttcatcatccaggaggacgagaccatctgctctgtccgccgcttcctctggggcgtcctctttgcgctctgcttctcctgcctgctgagccaggcatggcgcgtgcggaggctggtgcggcatggcacgggccccgcgggctggcagctggtgggcctggcgctgtgcctgatgctggtgcaagtcatcatcgctgtggagtggctggtgctcaccgtgctgcgtgacacaaggccagcctgcgcctacgagcccatggactttgtgatggccctcatctacgacatggtactgcttgtggtcaccctggggctggccctcttcactctgtgcggcaagttcaagaggtggaagctgaacggggccttcctcctcatcacagccttcctctctgtgctcatctgggtggcctggatgaccatgtacctcttcggcaatgtcaagctgcagcagggggatgcctggaacgaccccaccttggccatcacgctggcggccagcggctgggtcttcgtcatcttccacgccatccctgagatccactgcacccttctgccagccctgcaggagaacacgcccaactacttcgacacgtcgcagcccaggatgcgggagacggccttcgaggaggacgtgcagctgccgcgggcctatatggagaacaaggccttctccatggatgaacacaatgcagctctccgaacagcaggatttcccaacggcagcttgggaaaaagacccagtggcagcttggggaaaagacccagcgctccgtttagaagcaacgtgtatcagccaactgagatggccgtcgtgctcaacggtgggaccatcccaactgctccgccaagtcacacaggaagacacctttggtgaaagactttaagttccagagaatcagaatttctcttaccgatttgcctccctggctgtgtctttcttgagggagaaatcggtaacagttgccgaaccaggccgcctcacagccaggaaatttggaaatcctagccaaggggatttcgtgtaaatgtgaacactgacgaactgaaaagctaacaccgactgcccgcccctcccctgccacacacacagacacgtaataccagaccaacctcaatccccgcaaactaaagcaaagctaattgcaaatagtattaggctcactggaaaatgtggctgggaagactgtttcatcctctgggggtagaacagaaccaaattcacagctggtgggccagactggtgttggttggaggtggggggctcccactcttatcacctctccccagcaagtgctggaccccaggtagcctcttggagatgaccgttgcgttgaggacaaatggggactttgccaccggcttgcctggtggtttgcacatttcaggggggtcaggagagttaaggaggttgtgggtgggattccaaggtgaggcccaactgaatcgtggggtgagctttatagccagtagaggtggagggaccctggcatgtgccaaagaagaggccctctgggtgatgaagtgaccatcacatttggaaagtgatcaaccactgttccttctatggggctcttgctctagtgtctatggtgagaacacaggccccgccccttcccttgtagagccatagaaatattctggcttggggcagcagtcccttcttcccttgatcatctcgccctgttcctacacttacgggtgtatctccaaatcctctcccaattttattcccttattcatttcaagagctccaatggggtctccagctgaaagcccctccgggaggcaggttggaaggcaggcaccacggcaggttttccgcgatgatgtcacctagcagggcttcaggggttcccactaggatgcagagatgacctctcgctgcctcacaagcagtgacacctcgggtcctttccgttgctatggtgaaaattcctggatggaatggatcacatgagggtttcttgttgcttttggagggtgtgggggatattttgttttggtttttctgcaggttccatgaaaacagcccttttccaagcccattgtttctgtcatggtttccatctgtcctgagcaagtcattcctttgttatttagcatttcgaacatctcggccattcaaagcccccatgttctctgcactgtttggccagcataacctctagcatcgattcaaagcagagttttaacctgacggcatggaatgtataaatgagggtgggtccttctgcagatactctaatcactacattgctttttctataaaactacccataagcctttaacctttaaagaaaaatgaaaaaggttagtgtttgggggccgggggaggactgaccgcttcataagccagtacgtctgagctgagtatgtttcaataaaccttttgatatttctcaa

SEQ ID NO: 288556 - DNA, 1977 bp, Homo sapiens
tatttttgttttctctcctctgtgttggtcgcctgtctcgctccctctcatgctctctttctctcctctattttgtctctcactattcgtgttttgtgtttgtttctaggtttggctcaattggtaagggtgggattgaatttgctgagccccctagtgtaacagtcttctgcctttgtgggtaaagagtggagagggggagggggacgacagacagacatcccttcttcccacccccctccccacctgccccccggcaaccgagggtgcccatttggtttggtttctattgtacagacatctcaggatggctcacataggcgggaaggagggaagtcgtcacagggcagttttcttggctgtgacctccttccccacccctccctggctggtgttctggaggggaaggctgtggagaggtgttaattctcgacaggaggaaggagaggaggaaatcccctctgcacctccacctgctccatccaggaagaatgggactctggagctttaagtgctcgggtgatcactcagaacagtcccaccccactatttacaaggatctcctgggactcccatccctccatcctctcttggcccggccagcggaaccaggagggtggagagctggtggcagccccaaatgagcaggagggaagcagcaaagggggtgcaaggcctgtaacaatatgtgattctcagaataggccctgctgcccacctccccccagtcctgctttgccccaggctgacccctctttgaagacctggcttctcctcaaccacatcaggtgggacacagactccatgatttgcatggaggattcaagctaataaggattcaagctaataaggattcaataaaggttcaggtcaggttgagaggggtgcagggagtcgggcactgcatgggaggagcagctcttccctccaccagtctctcctcctgcctcacgccctttcctgctcctttaaatagcagacacactactctggcgcccccacttccacaaccagaaaatccagcccaagaactactccctaaatataatgcccatagtgatgaaggtgggggtttgaccctttaccccagtattagtcccctcctcacattttcactgagaatggggatacattccatcaataatttgagatgtttctttggaggagtgggggagagggcctccagatgcctgaagaggaatggagggaccatccaaatattcctccccctacttctccccagaaggatggtgtccccaaagctgggctggtaggggcaggggcagggggaagggaagaaagacaaagacaaggaacaagacagagctgggagtgacagccaccaaaagaaagcaaagcaaagagctggagggaaaggaaagagttgaggaaagggaagatcccaaaggaagggaagataggcggagagagtgaagggaaacactgcgggggacaggggcagagaggaggactcctctccagattcctctagcccagctttgtggggacagatggcttctgagcctttcagccacagaaacgattgacatgcttctctccccaacccctagaagatctatgcaacttctgataggactccaactcccttacactgctggaaactggtgacagtttcccaaacaggatatgggggtggggtgggaggtaaagggtcatgttaggaggtcggaggtcaggaccagagggcttagggattgcaaagagcacctctagatacaggtggtaattctccctctcccttttacccaccccctcctcggaagaaggggtggagtgacacacagcgggggaggtgggcagagggcgtcagaatgccttagtggccacctctggcaaaacaaaagtttctcttagctgcttccagatttaagggtgtgttgaggtatcagagttgtaactctagtaaaattttcagtctggccccctcccaatctttccaggacagggtgaccagag

SEQ ID NO: 288557 - DNA, 4404 bp, Homo sapiens
tatttttgttttctctcctctgtgttggtcgcctgtctcgctccctctcatgctctctttctctcctctattttgtctctcactattcgtgttttgtgtttgtttctaggtttggctcaattgctgccccggggacgatgaacggaggataaatggtgcccaaggcagacagcggcgccttcctgctgctcttcctgctcgtgctcactgtcaccgagccgctgcggccagagctgcggtgcaaccctgggcagtttgcgtgtcgcagcggcaccatccagtgcatccccctcccctggcagtgtgacggctgggcgacttgcgaggatgagagcgacgaagccaactgtccagaagtgaccggggaggtgcgtcctcatcatgggaaggaggctgtggatccgcggcaggggcgggccagaggaggcgacccttcgcacttccacgcggtgaacgtggcgcagcccgttcgcttcagcagtttcctagggaagtgcccgacagggtggcaccactacgaaggcacggccagctgctaccgggtctacctgagcggggagaactactgggatgccgcgcagacctgccagcgcctgaatggctctctcgccaccttctccactgaccaggagctgcgctttgtcctggcccaggaatgggaccagcccgagcggagctttggttggaaggaccagcgcaagttgtgggttggctatcagtatgttatcactggccggaaccgctccttggaaggtcgctgggaggtggcattcaaaggctcttcagaggtgttcctgcccccagaccccatctttgcctcggccatgtctgagaacgacaacgtgttctgtgcccagcttcagtgcttccatttccccaccctgcggcaccacgacctccacagctggcacgccgagagctgctacgagaagtcttcatttctgtgtaaaagaagtcaaacatgtgttgacatcaaggacaacgtggtggatgaagggttctacttcacccctaagggggacgacccatgcctgagctgcacctgccatggaggggagcctgagatgtgtgtggctgctctctgtgagaggccccagggctgccaacagtaccgcaaggaccccaaagagtgctgcaagttcatgtgtctggacccagatggcaacagtctgtttgactccatggccagcgggatgcgcctggtcgtcagctgcatctcctccttcctcatcctgtcactgctgctcttcatggtccaccggctgcgccagcggcgccgggagcgcatcgagtccctgattggagcaaacttgcaccacttcaacctcggccgcaggatccctggctttgattacggcccagacgggtttggcacgggcctcacgccgctgcatctttctgacgacggagagggtgggactttccatttccacgaccctccacctccctacacggcatacaagtacccggacatcggccagcccgacgaccctccgccgccctacgaggcctccatccacccggacagtgtgttctatgaccctgcagacgatgatgcttttgagcctgtggaggtcagcctgccagcccctggggatggtgggagtgaaggtgcattactccggcgcctggagcagcctctgcccactgcgggggcctctctggcagacctggaagactctgccgacagcagcagcgccctgctcgtgccccctgaccctgcccagagcgggagcaccccagctgcagaggcactgccagggggtggccgccacagccgcagctccctcaatactgtggtgtagacggcctggcctgtaccccaacggtctgggagcacctgtctgttgcagaaaacaccggtccctggggagacttgaaaggcccctgtcccagcctggacgccacgcactgccgcacgtcactggcgggctcgcgtgtgtacatagagaccacagcccgccttctgccaaaagaagtgatggcctgcaccgagcttccttgagggcttcagaaacatgcatagctttggatcactgtcttctcctttataaatggcagaagagtgacaaaattcattcagaccgcacatgttagaggcagggaatgaagaaggtactgtgggccatggccacacctgatgcgtttttggtgggcctacttggtgcagtgtgctgtccagagagacctgctgacccagtctgggacaggcacagtgggagctgccacagtgccccttgctggccgccctcaggagggggcctctggaccgtcagtgtggcgtaggcagtgggtctgcttcagggaggcagcctcttgactttgtcacaacggttgcactgaagatggcccccacaagcccagttgtgaatatcaaggtgaccctgcccctggctgggagctcccctggggctctggaacctgaagccctgagaaggagagcttggaaggaggttgagctcttcactgtgtctttccatctgggctctgcagcccagctctgtggcaggaggcctgaccccaccccatcagtccctctcccagcattgctgtgcatggctccctcaggaagaagctctggagtggggccgaggccccagatgctctgctggggtctggggactgagctgcctcctgtctctccactctggagccctgggctcttgcctcctgttgaattgcccctgggcctgcccccggccccatttgtgccataaagggttgcttcattgcaggaggggtggctgaaaccaccatcctgggctgcatctatctccttaaagtccactccttacatcaccgccactactgcagctcagtgcccagtggccgcatgcacacctcccggcccctcctcagcagcgcaggggctgggggcccttcctggcacccttttgcctgacggaccctgttgcctgctcctgggcagtggttttgttgcctgacacagggcctttaacatttctgaggtttggagattaagcgggttctgtgcgatttttagcacatccatatcttttctacgttgaatgtctggatctttcctttgtatgtttgtgtctctgtgtgtgtatgtggccaagcgtctgcaggtgagggtggcacatgaaacttcacgggtcactgggggcccactcttccagggtcatcgatgcatcctgggctgtgctgaggcagtgctgtctcgctcagtctttccagaccagcggggcagcacctgggaggcctgtctgaagcatgcagttctgtggtgctgctcggggatggactccatgcacagtccacttcttgacacattctcacactgtggctggagacccattttttccatcccatgtggaatgagaatcttgagttgcccacagacagacttgacctttgtgccagaactgtccagagctgtgagttttgttactgaattgcctgtccctgagcttggcctgctggagcatgatgctggaggctgtgtgcgggcaggcttgtgctccccttggagaagggctgctacttaacaaggaagtcctggccacaagagtcccctactggctgcagaggacgaagcaggaagcatgccgtggatcccacatgcactggggcagggcagccaggttccagagcagcaggcatgtgcattatgggtgccaggtggccagtgagggcccgaggaccacgcagcagagtcccccacgggcctgagcctgagagctcagaggattcctgccaggcctcagaactgtgtgtgcgggacagggtggctggcacgagatgtgtgggactgggacgcttcctttggggaccagaggaacattaggggccggtcagacacgtagggggcagtgaggaaacggggtaaagtggaccatgcaggctgcagagggtgggccttgggctggccggggttgctgggtggccccttccccatgggcctccacaagcactcgggcctccacaagcactcaggccactggcacgttgggccaggcagaaggtccacatggcagggctgcctggaacaccgctgccactgtggctccaggaggcccttgggagcatgaggagagctggactcgctcatctgttcttgcaccaccatccagaatgccccctttgcaaggcctgctgcagtccccagtctgaccagcaagtcccggggtcacccttgctgaaccttgtgctccaggggtcctcctcctctaggaccagcttgccacggtttctcagagcccaggtgccctctgacctgccatgcggaggtgggatttgatactgtacattgtcttgatgcctgtttttttatgttttcattaagggtttttagtttttggttgggttgacactaacttttcttaagatgctgtgagaatcatttcatccaaatgccaaataaacttgtgttccggaaaa

SEQ ID NO: 288558 - DNA, 1483 bp, Homo sapiens
cttaacagagtgaatcagaatattgaaaactggcaaattcaataaaggtttaaaaattatgacaataatatgttgaataaccactgctattttaatgttttatttatttatttgtttgtaatttttgtagagacagggtttcaccatgttgtccaggctggtctcaaactcctgggctcaagcaatctgcccacctcggcctcccaaaatgctgggattacaggggtgagccactgtgtccggcaaaccattgctattttaaaactagactatttcttaaactcctaaatagctttctcagataatagtagaaagggtacaataaatccaaaacaaacacaagtctgaaatttttcatctctagcctaccttaagcttatatattaaatatataattatttataattatataacaattaacaaataaacaatgtttatttctcaaaccaagtaactttctataaaaagaatatttatactgctagaacaagaaactggctgaacaaaagcaattgtctgataaatggctaaataagtaaggtttatttttaccatattaggtttctagaatgaaacaattttatagctaatctgacatctgtaatgtgacaactgtcttctcacataaatctctggtaactgtttatatacttttgggtaatacagaaaaatgacaaatattccaatttttaaaatgcaaaatatgtatgtagatgtatgtagagaatgcattaaaactttaaaagaattttcacacatttgatattttgatatacactgaattcataattattttgcccaaccccctaaaatttccaaagaaaatagacgagcaaggccttttctaccatatgagaggaaaaaaactagctaataaaatcagagtataatatataacaacttgcaagttcaaatataccatgcatactagatttttctccttgtttacttttagaaattttgagaagttttaattaattttaaaagaaaaaaacagccacagacaaaaccagcttataataaaaaggcaaaaagggaagttaatggttaaacccatgcatgcacctagccactcagcaaacctctctgaaagccccacaatattgccttctcaaaccatttcattgtcataaactcaggaataatatcctagctgtaatctagaaaaatgtctgtagtcctatgccccgcctgagggtggacaaaaactgggtcataaatgaatatttgctactcactcttcagtttccttgtcttctgctgaagtgcctggcaagtgttcgataattcagtatttatagtttgaaggttccgttgttccgaaattgcttcctctaatttatgcagtaaagacgtagctttttcactggcagtgtgggcttctcgatctcgatccttaccctggacatggatagttagtgctggattgtagcagtgtggccaggaaagaaagcaatggagtgctcactcttatgatgcaggc

SEQ ID NO: 288559 - DNA, 714 bp, Homo sapiens
aacccacttcctcccaggccctctagggggatggtcaggcttctgcagagatggggaggatcctttcctgactgcttcagctgccataacaaaatatcacagactggatggattaaacaacaaaaatttatttctcacagttctggaggctgggaagtccaagatcaaggtgtcagcaaggtgaagacactgacagtaagaaaaggcaaaccacaggtccaagacaaagtggtcaagtcaagaaggaactcaggctgtgtagtcctggtgcaaggctccttgcccccagcgtggggtcacactggctggctgtgctcccacgacacttagtgcatactgggctcctgacttaataacacgtgtttgaaatggcccctgattcccaatctgctgcaggattctgcagatgcgcaacaggccacagtggaaggtcttggagagaattcagagtggcttgcctacgttcccatgaccgtttgtcctaatgggagaatcaccattttggaaaattcttttggaggccaggcgcggtggctcatgcctgtaatttcagcactttgggaggctgaggcaggcagatcacctgaggtcagaagttcgagaccagcctgggcaacatagtgaaaccccatctctactaaaaatacaaaacttagcctggcatggtggtgcacacctgtagtcccagctacccgggaggctgaggcaagagaa

SEQ ID NO: 288560 - DNA, 1175 bp, Homo sapiens
ataaagcagccaaatggattttgtgataactattcagctcagaagtatgggataattgaaaatgtaaacaaacataattttcaagccaagccccagagtggacattatgatcctgaggaaggtccaaagcatttagatggcttatcacaaaatacataccaagatctactggagtcacagggtcattctaatagccacagaacgagaggtggagacaatagccgtgtgaatcgcacacaagtgtcatgcttttctaataattatatgatgggagatttaaggcataatcagtgttttcaacaacttggttcaaatgggtttcccctaagatccacccacccatttggccattcagttgttccactgttggattcctatgacttactttcttatgatgacttaagccatttgtacccttattttaatatgatgtatggtgataattctttttctggtctcatgccaacttttggatttcaaagaccaattaaaacccgtagtggaccagccagtgaacttcatattcgtctagaagagtgctgtgaacaatggagagcattagaaaaagagagaaaaaagactgaattagcccttgccaagaattatcctggaaaaaaagtatccagtactaacaacactccagttccaaggctgacttccaacccatctagagttgatcgcttaattgtggatgaacttcgagaactagccagagttgtgactttactaggcaaaatggaacgtcttcggagttctcttcttcatgccagtatctctactgctcttgatagacacttggagtctattcacattgtacagtcacgtagaaaggatgaaattgttaatgcttccaatcggcaaaggcaaggagttcctagatgccaagatgacagagatgtttttgcccttgcttctgcaattaaagagatgtgtgtggctactcggaaaacacgcactgccctgtggtgtgcactgcagatgaccttgccaaaaacagccagtacagctgatgtgcattagtttgagagtatacttaactgtgacatacatagcagagtcccagaagaaagaactgactactaacaaattgaaacaagtacccttcaggggaccgtggatataacctgactccttcagtgacaaaaatcaaggctgaaactttcaaaatcccaaaa

SEQ ID NO: 288561 - DNA, 2568 bp, Homo sapiens
  misc_feature (2316)..(2316): n is a, c, g, or t
  misc_feature (2333)..(2333): n is a, c, g, or t
tactccaaaagtatttccattttattaattttgtctgttataactgtttcaagacagtctgtgttctactcaaactatagtcactattgtacaagtcagaaataaagtatcaatacttttaaatattttaatgataaaggacaggactttggttcaatcaataactatcctttttttacaaaaataacatttgatcatttagtagcaaaagcactgggttttgtaagatttaacagatatttaaatggcatttaatatgaaatgaccctgaatgtttattttacagatgtttttgcccttgcttctgcaattaaagagatgtgtgtggctactcggaaaacacgcactgccctgtggtgtgcactgcagatgaccttgccaaaaacagccagtacagctgatgtggtaaagcctttacaagatacagtaaactgtgaagataaagtccatgaaagcataaatagtagcaatccaatgaaccagagaggtgaaacaaacaaacattaaggaaatgccagcagaaagaagaataaaaagctgataaatatatcaagacatgctaaaaatgttttaatgaacttgtcaaactttcagtatgttttctttcagatttaaagttaataccagtaccttaatgaagtctaacttctatttaaaaatcttctatttgaagtgaatccgatatagttttaagtaaacgcaaaggtacagttgactactcagagttctgagtagtcagataacaagtttaagtaaattaaatatttcctaacagctaaaatgtgcttaaactcattctgccatgcaggtaaatgcaaatgtgaaattcttctaggagataaatttcatttaggtttgtcttagttaagtataattccaaataatgaatctaagtgactgtaacccaattacggctacagcctagtaaccaagacaagttttgattgtgatatcaaagtgttttccttacaaaactggataatacctgggaaacaaaggaaaatacggataaacccaatattcatgtacaaacttaatatttaaaatactatactaccatatttataaatttggaatcttaatgcctaggtatatggagggaaatgcatctgattctcctaaattaatgataaaagtgtcagtgtaaaaaccatgcaagttactgaatataaaacctattcagatcatttgtgtatattctttaaattttaattatattatcaattgttaaatgtttccaattttaaagttatttaaattgaatcacaaaacattccctttatctggatcttttagacttgatgcacagtaactgaaataatgactactgttttaatacccttagtttgctgccttttatgagggtgtcacgaagttctaaaatgtatttttttaaaggttaatctctaactagtttagcttgcaattggttagtgtatattttgtgtagttgtgttcattagtttgcttctaagttctaaaatgtattttttaaaggttaatctctaactagtttagcttgcaattggttagcctatattttgcgtagttgtgttcattagtttgcttctgtatttttttaaaactattgaaagcttaactttttctgtttctcatcacttagtatctttgtatagaacttgagtaatttattcgttaatatgaaatgttggtattatgtgactcagaagatcttgggttttaacatttctagcatgagttaaactataatgtactgatgaaatttaattgaaatatccttgactagaaacactgatgttttaaatgttagtgtttttcttagttttagaaattctggtattaaaaaaaaaaagagtgtaatcataccacataaattttctttagatgatgtgcagaagaaactgattgagaatgcaagagtaactgtagggagaaacattttgatcactgatatgccttagaactacccaaatgaattacattgagggtagtcaaataaaatagatcatctcaccacagtcactgcatagaaagtggttaagtttaacataagacatgttggatgttataaaaacaaatactgtactgaatttagtctcaggaaaaaaataaattactttgttgaaaacatttggtttcatttttctaaattcatatgtttctaaccttaagagtcactcatatcagaaagtcaaatgaatttcatttaagaacttatactaagttttagatttcattattaacgcacaagtaataatgttggtttataaatcaatgccattcagatatccatggatctaaccagatctccttcaaagatgaaatttttgctcnatctttatgctaatccntgtaaaccagaataaaaattttagggaagcttttacatgatactggtcagaaatgaaataccagtccgttaataagaaccaaacacttaaaaaaattctttgaaatattgttaatcatatcacccaatagataatttttaaattagtcggttgtccctttcagtggcatatcctctaacagatggttcttatgtacttgtatttctgaattacaacctataaaacattgtacttc

SEQ ID NO: 288562 - DNA, 2716 bp, Homo sapiens
ataaagcagccaaatggattttgtgataactattcagctcagaagtatgggataattgaaaatgtaaacaaacataattttcaagccaagccccagagtggacattatgatcctgaggaaggtccaaagcatttagatggcttatcacaaaatacataccaagatctactggagtcacagggtcattctaatagccacagaacgagaggtggagacaatagccgtgtgaatcgcacacaagtgtcatgcttttctaataattatatgatgggagatttaaggcataatcagtgttttcaacaacttggttcaaatgggtttcccctaagatccacccacccatttggccattcagttgttccactgttggattcctatgacttactttcttatgatgacttaagccatttgtacccttattttaatatgatgtatggtgataattctttttctggtctcatgccaacttttggatttcaaagaccaattaaaacccgtagtggaccagccagtgaacttcatattcgtctagaagagtgctgtgaacaatggagagcattagaaaaagagagaaaaaagactgaattagcccttgccaagaattatcctggaaaaaaagtatccagtactaacaacactccagttccaaggctgacttccaacccatctagagttgatcgcttaattgtggatgaacttcgagaactagccagagttgtgactttactaggcaaaatggaacgtcttcggagttctcttcttcatgccagtatctctactgctcttgatagacacttggagtctattcacattgtacagtcacgtagaaaggatgaaattgttaatgcttccaatcggcaaaggcaaggagttcctagatgccaagatgacagagatgtttttgcccttgcttctgcaattaaagagatgtgtgtggctactcggaaaacacgcactgccctgtggtgtgcactgcagatgaccttgccaaaaacagccagtacagctgatgtggtaaagcctttacaagatacagtaaactgtgaagataaagtccatgaaagcataaatagtagcaatccaatgaaccagagaggtgaaacaaacaaacattaaggaaatgccagcagaaagaagaataaaaagctgataaatatatcaagacatgctaaaaatgttttaatgaacttgtcaaactttcagtatgttttctttcagatttaaagttaataccagtaccttaatgaagtctaacttctatttaaaaatcttctatttgaagtgaatccgatatagttttaagtaaacgcaaaggtacagttgactactcagagttctgagtagtcagataacaagtttaagtaaattaaatatttcctaacagctaaaatgtgcttaaactcattctgccatgcaggtaaatgcaaatgtgaaattcttctaggagataaatttcatttaggtttgtcttagttaagtataattccaaataatgaatctaagtgactgtaacccaattacggctacagcctagtaaccaagacaagttttgattgtgatatcaaagtgttttccttacaaaactggataatacctgggaaacaaaggaaaatacggataaacccaatattcatgtacaaacttaatatttaaaatactatactaccatatttataaatttggaatcttaatgcctaggtatatggagggaaatgcatctgattctcctaaattaatgataaaagtgtcagtgtaaaaaccatgcaagttactgaatataaaacctattcagatcatttgtgtatattctttaaattttaattatattatcaattgttaaatgtttccaattttaaagttatttaaattgaatcacaaaacattccctttatctggatcttttagacttgatgcacagtaactgaaataatgactactgttttaatacccttagtttgctgccttttatgagggtgtcacgaagttctaaaatgtatttttttaaaggttaatctctaactagtttagcttgcaattggttagtgtatattttgtgtagttgtgttcattagtttgcttctaagttctaaaatgtattttttaaaggttaatctctaactagtttagcttgcaattggttagcctatattttgcgtagttgtgttcattagtttgcttctgtatttttttaaaactattgaaagcttaactttttctgtttctcatcacttagtatctttgtatagaacttgagtaatttattcgttaatatgaaatgttggtattatgtgactcagaagatcttgggttttaacatttctagcatgagttaaactataatgtactgatgaaatttaattgaaatatccttgactagaaacactgatgttttaaatgttagtgtttttcttagttttagaaattctggtattaaaaaaaaaaagagtgtaatcataccacataaattttctttagatgatgtgcagaagaaactgattgagaatgcaagagtaactgtagggagaaacattttgatcactgatatgccttagaactacccaaatgaattacattgagggtagtcaaataaaatagatcatctcaccacagtcactgcatagaaagtggttaagtttaacataagacatgttggatgttataaaaacaaatactgtactgaatttagtctcaggaaaaaaataaattactttgttga

SEQ ID NO: 288563 - DNA, 2403 bp, Homo sapiens
taatcagtcaagtacttctctttttagctcaaaactttttccattagattacaatacttcctaacaatgctgtttgcaggctggtctcttatttgtcaaaaacagtatcagatcttgtatttgcagttaatgacatggtaatgtttgaatatttaacattttcattgatgcttattttcagtaatcaactaccacatatttttagaattaacatagacaagtagatagaaaacactttccatttttgtttcccccagcatggtgtcaggacacagtaagcattctttgatttattgaatgaatattattgctgtcatctctattctgcttcactgaagatttgtttttacttaagttaatggcaggacatgtcttatcaaaatttaaaatgcttccctcaggttgtgactttactaggcaaaatggaacgtcttcggagttctcttcttcatgccagtatctctactgctcttgatagacacttggagtctattcacattgtacagtcacgtagaaaggatgaaattgttaatgcttccaatcggcaaaggcaaggagttcctagatgccaagatgacagagatgtttttgcccttgcttctgcaattaaagagatgtgtgtggctactcggaaaacacgcactgccctgtggtgtgcactgcagatgaccttgccaaaaacagccagtacagctgatgtggtaaagcctttacaagatacagtaaactgtgaagataaagtccatgaaagcataaatagtagcaatccaatgaaccagagaggtgaaacaaacaaacattaaggaaatgccagcagaaagaagaataaaaagctgataaatatatcaagacatgctaaaaatgttttaatgaacttgtcaaactttcagtatgttttctttcagatttaaagttaataccagtaccttaatgaagtctaacttctatttaaaaatcttctatttgaagtgaatccgatatagttttaagtaaacgcaaaggtacagttgactactcagagttctgagtagtcagataacaagtttaagtaaattaaatatttcctaacagctaaaatgtgcttaaactcattctgccatgcaggtaaatgcaaatgtgaaattcttctaggagataaatttcatttaggtttgtcttagttaagtataattccaaataatgaatctaagtgactgtaacccaattacggctacagcctagtaaccaagacaagttttgattgtgatatcaaagtgttttccttacaaaactggataatacctgggaaacaaaggaaaatacggataaacccaatattcatgtacaaacttaatatttaaaatactatactaccatatttataaatttggaatcttaatgcctaggtatatggagggaaatgcatctgattctcctaaattaatgataaaagtgtcagtgtaaaaaccatgcaagttactgaatataaaacctattcagatcatttgtgtatattctttaaattttaattatattatcaattgttaaatgtttccaattttaaagttatttaaattgaatcacaaaacattccctttatctggatcttttagacttgatgcacagtaactgaaataatgactactgttttaatacccttagtttgctgccttttatgagggtgtcacgaagttctaaaatgtatttttttaaaggttaatctctaactagtttagcttgcaattggttagtgtatattttgtgtagttgtgttcattagtttgcttctaagttctaaaatgtattttttaaaggttaatctctaactagtttagcttgcaattggttagcctatattttgcgtagttgtgttcattagtttgcttctgtatttttttaaaactattgaaagcttaactttttctgtttctcatcacttagtatctttgtatagaacttgagtaatttattcgttaatatgaaatgttggtattatgtgactcagaagatcttgggttttaacatttctagcatgagttaaactataatgtactgatgaaatttaattgaaatatccttgactagaaacactgatgttttaaatgttagtgtttttcttagttttagaaattctggtattaaaaaaaaaaagagtgtaatcataccacataaattttctttagatgatgtgcagaagaaactgattgagaatgcaagagtaactgtagggagaaacattttgatcactgatatgccttagaactacccaaatgaattacattgagggtagtcaaataaaatagatcatctcaccacagtcactgcatagaaagtggttaagtttaacataagacatgttggatgttataaaaacaaatactgtactgaatttagtctcaggaaaaaaataaattactttgttga

SEQ ID NO: 288564 - DNA, 442 bp, Homo sapiens
acccgagggccaggaagaactgctctcagatagccttgttccggaagtatcggttccacttcttttgttccatgcgctgcagggcttgggtttccctggaggagttggaagagatccaggcttatgacccagagcactgggtgtgggcgcgagatcgcgcccacctttcctagagctccagggaccgtggaggcctgaggtcatcggcctgagagaagaacaccggacccaggggagatgtggattttcagcaggaactttattccaatgctaatggcagacatcaggaaggaggagaggaaccatttgtgcagatcatctagaagaacctggaccattcttgacagagctgaatacagtgatcacgttgtcctccaaggagcaggggtggggtggggtacttctaggagtccttggagaaaagtaagaaaccaggagtgtt

SEQ ID NO: 288565 - DNA, 220 bp, Homo sapiens
  misc_feature (3)..(3): n is a, c, g, or t
tgngtgattattatgcattgcatgcctgtgtcaaaacatctcatgtgcctcataaatacatatacccactatgtacccacgaaaattaaaaataaaagatggaaagccttggggagggggagaagaatgggtgtgaccattggagtggtgatggctctgtgcagtgtaatcaccagactttgtcagtgtcagtcccacagtgactcgggcaggtgcaggg

SEQ ID NO: 288566 - DNA, 273 bp, Homo sapiens
atctaggaatctgcccaccactcaagcctgggaaagctggcagaggatgcacgtgttttactcacctgagtgtttacaatgctcgtgaggtgcctccctgatagtacagaggaatgaagaaggaataaacagaccttctggataattgcatcagccttccccactattccaatgccatgctaacatttcaagtaatgtcccttttgtcttgctgagaaaaaatcatttcatgatttattacactggattaaaggctatgcacactctggagtt

SEQ ID NO: 288567 - DNA, 1547 bp, Homo sapiens
  misc_feature (724)..(724): n is a, c, g, or t
  misc_feature (753)..(753): n is a, c, g, or t
  misc_feature (1013)..(1013): n is a, c, g, or t
  misc_feature (1547)..(1547): n is a, c, g, or t
gcaataattaaaggatagaatggaagtgaaaaaactttctctattatgtgttattataaacctttttataaataaattttatgatatagcagatttatgaaatgttttatatttacttaatagactttgaattaaagtactttttgtgttgctgtagttttagaatgatcattttatgcgtaacagcagggacattcaaaataagctgttaagatgtgttgtgatttgcttaaagtctgatggcaagagagaaatcataaaatttaattttatcattcatagagcagcaaatcattggtgctcagggagaatatgttatacaactcttggtcgtatattgtggtataatgttagtttaaagacactaaagtatgggaatggattgtgtatgttcagtttacatattttgttttcctgtttacctcctttttgttttttccttttctcctttgtgttaagggttccagcatgaggcagggaattagttagacaggaagacactagaaggaaatggagtcacgatggcccaccctatcctaaatcaagaaaaatggtactgagtagttggatgctaaattttgaaacttagactgatcctgggatttaattctgacatttgcttgccagagtttgcctttatcacacattttctacttcttgcttaacaaaacaaatacacacacacacacacacacacacacacacacaccctcatgaagaactnatatttgcccatgtgatgaaagtgggggntaggacactttcactgtgtgtcattgtagcaagtatgtaagcttagacttcacctccctactttaaaaattgttcttccacttcctcttctgtagtcatgagtagcagtgcccccttgtagcccaaattctccactctagtcagccttactttcagctccaaattggatgtacttttactgaacttctttcaactttttattttgggtgctgtcacttgtactctatgtatcgatcaaatttatttttgtcagcctcaantaatactgctctatagtagggcaacattcattgcttaaaaacatacaaagttagtcacagaacaccatgacagatgtttgaatttttgattgaggatgttcttctgtaattatttttcaaatatcatgaataagcatataaggtatttaattcaacatttctgataaaagatttttgaaaaaattattttccaagtattttttggttttgtgctcaattcagtgtccttccaacatgtgtcagaaacccattgggccgggcgtggtggctcatgcctgtaatcccagcactttgggaggccgagtcgggtggatcacgaggtcaggagattgagaccatcctggctaacacagtgaaaccccatctctactaaaaatacaaaaaattagccaggcatggtggcgtgcgcctgtagtcccagctactcaggaggctgagccaggagaatggcgtgaacccaggaggcggatcttgtagtgagccgagatcacgccactgcactccagcctgggcgacagagcaagactctgtctn

SEQ ID NO: 288568 - DNA, 1876 bp, Homo sapiens
agcgggaggctctcacgccgcctcctccgcccgggcttccctccaccctccgcccgcccgcctgctctcagccgcgctctccccgcccctcaccgcagcctgcagccgcgctcacctccgcggtccgccccggcgccccgggacccgttagtgcccagcctgcgggccgaccgcgaccaccgcccggcgcgagcctgcccccagctctgccgacacttgacccagaccagtcccaacgcccagtgcggccgcccggggagccgcgggagaggcggcggcggggggaggagggagaggagggccgagccggcggcacgggaggcccggttttgaagccgcttctctgcccgagttaggtttcgcccagcgcaatttctttctctatgtactttgcgaataagtttcggagcatcggttaacagcctatgggtgaaatttggctttcattcatgaatgagaaattattcttgacagaagtattttaaaagaaaaatctttacgatggcctcagcagtacttagttctgttcccaccaccgcttctcgttttgccctgttacaagtggatagtggcagtggctctgattctgaacctggaaaaggtaaaggtcgaaatactggaaagtctcaaactttaggaagcaagtcaactacaaatgagaaaaaaagagagaaaagaagaaaaaagaaggaacagcaacagagtgaagcaaatgagctcaggaatcttgcttttaagaaaattccccagaaatcctcccatgctgtttgtaacgctcaacatgatcttccattgtcaaacccagtacagaaggattcacgagaagaaaattggcaagagtggagacaaagagatgagcagctgacatctgaaatgtttgaagcagatcttgagaaggcattgttactaagtaaactagaatatgaagagcacaaaaaggagtatgaagatgctgaaaatacttcaactcagtccaaagttatgaataaaaaagataaaagaaagaatcatcagggaaaagacagacctctcacagtatcactaaaagattttcattcggaagatcacattagtaaaaagactgaggaattgagttcttctcagactttatcacatgatggaggattcttcaatagactggaagatgatgttcataaaattcttattagagaaaaacgaagagaacagcttacagaatataatggaacagataattgtacagctcatgaacacaaccaggaagtggttctgaaagatggaagaattgaaagactaaagttagagcttgaaaggaaagatgctgaaatccagaagctgaaaaatgtaatcactcaatgggaggcaaagtataaggaagtaaaggcaagaaatgcacaattattgaaaatgcttcaggaaggtgaaatgaaagataaggcagaaatacttctgcaagttgatgaatcacaaagtatcaagaatgagctcactattcaggtgacttcacttcatgctgcattagaacaagaaagatctaaagtgaaagtattacaagcagagttagccaaataccagggtggcagaaaagggaaaagaaactctgaatccgaccagtgtaggtgattacattagcctttgaagtcaacacaaagtttaaaacttccaggattttgcaaagttgtatatatttaatgctgtgcaactgctaaactatgcagtttttgttgaaggaactaaaagcaactagctccctaatggtctataattttatttcttttggcttaaagtgaaaaagaagaaatagagaattccagcagaattcagtggttgtctactatccatacttcttatcactttagtttttcatcagtcaataaaattaatttactcttccact

SEQ ID NO: 288569 - DNA, 1721 bp, Homo sapiens
agcgggaggctctcacgccgcctcctccgcccgggcttccctccaccctccgcccgcccgcctgctctcagccgcgctctccccgcccctcaccgcagcctgcagccgcgctcacctccgcggtccgccccggcgccccgggacccgttagtgcccagcctgcgggccgaccgcgaccaccgcccggcgcgagcctgcccccagctctgccgacacttgacccagaccagtcccaacgcccagtgcggccgcccggggagccgcgggagaggcggcggcggggggaggagggagaggagggccgagccggcggcacgggaggcccggttttgaagccgcttctctgcccgagttaggtttcgcccagcgcaatttctttctctatgtactttgcgaataagtttcggagcatcggttaacagcctatgggtgaaatttggctttcattcatgaatgagaaattattcttgacagaagtattttaaaagaaaaatctttacgatggcctcagcagtacttagttctgttcccaccaccgcttctcgttttgccctgttacaagtggatagtggcagtggctctgattctgaacctggaaaaggtaaaggtcgaaatactggaaagtctcaaactttaggaagcaagtcaactacaaatgagaaaaaaagagagaaaagaagaaaaaagaaggaacagcaacagagtgaagcaaatgagctcaggaatcttgcttttaagaaaattccccagaaatcctcccatgctgtttgtaacgctcaacatgatcttccattgtcaaacccagtacagaaggattcacgagaagaaaattggcaagagtggagacaaagagatgagcagctgacatctgaaatgtttgaagcagatcttgagaaggcattgttactaagtaaactagaatatgaagagcacaaaaaggagtatgaagatgctgaaaatacttcaactcagtccaaagttatgaataaaaaagataaaagaaagaatcatcagggaaaagacagacctctcacagtatcactaaaagattttcattcggaagatcacattagtaaaaagactggaagtggttctgaaagatggaagaattgaaagactaaagttagagcttgaaaggaaagatgctgaaatccagaagctgaaaaatgtaatcactcaatgggaggcaaagtataaggaagtaaaggcaagaaatgcacaattattgaaaatgcttcaggaaggtgaaatgaaagataaggcagaaatacttctgcaagttgatgaatcacaaagtatcaagaatgagctcactattcaggtgacttcacttcatgctgcattagaacaagaaagatctaaagtgaaagtattacaagcagagttagccaaataccagggtggcagaaaagggaaaagaaactctgaatccgaccagtgtaggtgattacattagcctttgaagtcaacacaaagtttaaaacttccaggattttgcaaagttgtatatatttaatgctgtgcaactgctaaactatgcagtttttgttgaaggaactaaaagcaactagctccctaatggtctataattttatttcttttggcttaaagtgaaaaagaagaaatagagaattccagcagaattcagtggttgtctactatccatacttcttatcactttagtttttcatcagtcaataaaattaatttactcttccact

SEQ ID NO: 288570 - DNA, 2160 bp, Homo sapiens
  misc_feature (529)..(529): n is a, c, g, or t
  misc_feature (817)..(817): n is a, c, g, or t
  misc_feature (1763)..(1763): n is a, c, g, or t
atatgtgaggtgatactttaagattgtatgaatacccttttcatctagtggctttagcatccattgatatttgtgcctttttttgtgattgcaaaatagtgattttctaactctatcatttcttctgcatttacaagctagcattgagcagtttgttccaggatgaagcaattaaaaataccagtgcttttgtgtgtgtgtgtgtgtgtgtgtgtgtgtgtgagagatatatttatgtgtgtgtatatatatgtgtttctaaatcataatataaaatacattaactggaatcatagccaaaaaatctcaaaagccactcatggtgtggagaacatagcagttgattagccgtggctttaaaattgaatcagtcctagaaagagaattccctttacctgggataccttgaaaagattcttgtgtgtttgttgttttggatttttaagaaatctcatcgagaagcatggtaggagttttatgtatagtgggtgggtatctatttcaaaaaatatttttgctaagtttattnttatttttctgctaactggaaataaatcttgtttttaatacatgtcattacacatctcctgttccaaaaaacctattcatactgtttttctctgaataaatattggcaaaatttttatatggtcaggagtgaatgacagcattcttatgtgcgagtattgtttcattttgttttataatgttgatgttgaaatggttattatagtcagaaaaagaatgaaagaaacaaagagaaactgccatcattatcaaatgagtctgagctccatatgcccctgatacaaccacntctctttaagagatgcacttccacagaaaaggtagttcccaaacttggctgatcattggaatcacttggaaactttgaattaaagattgttagccaattaaataggtgtgggacaaagcctagatgtcagaattctaaaaatattactgcttaggtaattctgatgatcaactaagtttggacaccattgccatagttttataaaaatgggaaaaactatacatacaactattataaagtaaatacattaaaccattatttatggttaaattgaagggggtagagtagctattgatgattttaattttattctttgcatgtttgtactttccatatttctataatgaatgttttttaaatcagaataaaacagaaaatgttatgttatgttatgttatgttaaaatatttatgtaaaacccttcttgtcctttatgctgcctttcctttgctttggctcaagtcaaataccacaaatgatgtttcatatggagcaaattaaatacaaatttatatatgcaactaagcaatatgaaaagcataacctagttttcaatccactaatgaacaaaatcaaatttctaatgctaatgtgagcaaaacgcaacagaacttgaattataaattgaattacccaaaaggtaatgaactgaattactaaatttgctgatcatatggaacaaatttaagtgtactgtttattttagtattgatcaaaaactttatttttaattctagaacagtcaaaatgagttctaaaaaaataagatatcggtgagcttactaaggcaagactcttattcaaatagaagtaacttttctaaaaccaaccttaaccatttataaaaaataaccatattaaaataatgtaacagtatgtagactcaaatttacaacaaaatcaaaaaagaaattgcttccttctcataccccaagatgcctttggnctatattttttaaatgaagtggtcccaaaatggtatgttgtaaataattttccctatttttttttttttttacagggtggcagaaaagggaaaagaaactctgaatccgaccagtgtaggtgattacattagcctttgaagtcaacacaaagtttaaaacttccaggattttgcaaagttgtatatatttaatgctgtgcaactgctaaactatgcagtttttgttgaaggaactaaaagcaactagctccctaatggtctataattttatttcttttggcttaaagtgaaaaagaagaaatagagaattccagcagaattcagtggttgtctactatccatacttcttatcactttagtttttcatcagtcaataaaattaatttactcttccact

SEQ ID NO: 288571 - DNA, 701 bp, Homo sapiens
  misc_feature (48)..(48): n is a, c, g, or t
agatcagatataagaataatttttttctattattaataatatataatnaaaatattcctccagggaagtggttctgaaagatggaagaattgaaagactaaagttagagcttgaaaggaaagatgctgaaatccagaagctgaaaaatgtaatcactcaatgggaggcaaagtataaggaagtaaaggcaagaaatgcacaattattgaaaatgcttcaggaaggtgaaatgaaagataaggcagaaatacttctgcaagttgatgaatcacaaagtatcaagaatgagctcactattcaggtgacttcacttcatgctgcattagaacaagaaagatctaaagtgaaagtattacaagcagagttagccaaataccagggtggcagaaaagggaaaagaaactctgaatccgaccagtgtaggtgattacattagcctttgaagtcaacacaaagtttaaaacttccaggattttgcaaagttgtatatatttaatgctgtgcaactgctaaactatgcagtttttgttgaaggaactaaaagcaactagctccctaatggtctataattttatttcttttggcttaaagtgaaaaagaagaaatagagaattccagcagaattcagtggttgtctactatccatacttcttatcactttagtttttcatcagtcaataaaattaatttactcttccact

SEQ ID NO: 288572 - DNA, 687 bp, Homo sapiens
  misc_feature (40)..(40): n is a, c, g, or t
tctcttatttattttgtttttttccaacaatacaacccanctcattctcagaagtggttctgaaagatggaagaattgaaagactaaagttagagcttgaaaggaaagatgctgaaatccagaagctgaaaaatgtaatcactcaatgggaggcaaagtataaggaagtaaaggcaagaaatgcacaattattgaaaatgcttcaggaaggtgaaatgaaagataaggcagaaatacttctgcaagttgatgaatcacaaagtatcaagaatgagctcactattcaggtgacttcacttcatgctgcattagaacaagaaagatctaaagtgaaagtattacaagcagagttagccaaataccagggtggcagaaaagggaaaagaaactctgaatccgaccagtgtaggtgattacattagcctttgaagtcaacacaaagtttaaaacttccaggattttgcaaagttgtatatatttaatgctgtgcaactgctaaactatgcagtttttgttgaaggaactaaaagcaactagctccctaatggtctataattttatttcttttggcttaaagtgaaaaagaagaaatagagaattccagcagaattcagtggttgtctactatccatacttcttatcactttagtttttcatcagtcaataaaattaatttactcttccact

SEQ ID NO: 288573 - DNA, 1616 bp, Homo sapiens
acccgactcccaggccggcgaccgctgagcctcccgagacccccgtgggggccgctcgagtgacaggttttgaagccgcttctctgcccgagttaggtttcgcccagcgcaatttctttctctatgtactttgcgaataagtttcggagcatcggttaacagcctatgggtgaaatttggctttcattcatgaatgagaaattattcttgacagaagtattttaaaagaaaaatctttacgatggcctcagcagtacttagttctgttcccaccaccgcttctcgttttgccctgttacaagtggatagtggcagtggctctgattctgaacctggaaaaggtaaaggtcgaaatactggaaagtctcaaactttaggaagcaagtcaactacaaatgagaaaaaaagagagaaaagaagaaaaaagaaggaacagcaacagagtgaagcaaatgagctcaggaatcttgcttttaagaaaattccccagaaatcctcccatgctgtttgtaacgctcaacatgatcttccattgtcaaacccagtacagaaggattcacgagaagaaaattggcaagagtggagacaaagagatgagcagctgacatctgaaatgtttgaagcagatcttgagaaggcattgttactaagtaaactagaatatgaagagcacaaaaaggagtatgaagatgctgaaaatacttcaactcagtccaaagttatgaataaaaaagataaaagaaagaatcatcagggaaaagacagacctctcacagtatcactaaaagattttcattcggaagatcacattagtaaaaagactgaggaattgagttcttctcagactttatcacatgatggaggattcttcaatagactggaagatgatgttcataaaattcttattagagaaaaacgaagagaacagcttacagaatataatggaacagataattgtacagctcatgaacacaaccaggaagtggttctgaaagatggaagaattgaaagactaaagttagagcttgaaaggaaagatgctgaaatccagaagctgaaaaatgtaatcactcaatgggaggcaaagtataaggaagtaaaggcaagaaatgcacaattattgaaaatgcttcaggaaggtgaaatgaaagataaggcagaaatacttctgcaagttgatgaatcacaaagtatcaagaatgagctcactattcaggtgacttcacttcatgctgcattagaacaagaaagatctaaagtgaaagtattacaagcagagttagccaaataccagggtggcagaaaagggaaaagaaactctgaatccgaccagtgtaggtgattacattagcctttgaagtcaacacaaagtttaaaacttccaggattttgcaaagttgtatatatttaatgctgtgcaactgctaaactatgcagtttttgttgaaggaactaaaagcaactagctccctaatggtctataattttatttcttttggcttaaagtgaaaaagaagaaatagagaattccagcagaattcagtggttgtctactatccatacttcttatcactttagtttttcatcagtcaataaaattaatttactcttccact

SEQ ID NO: 288574 - DNA, 1628 bp, Homo sapiens
gggcgcgcccggggagcccggggagacgtcgcaggtggggaggagggaaacgtgagctgcgcgcaaagcttatggcccgttttgaagccgcttctctgcccgagttaggtttcgcccagcgcaatttctttctctatgtactttgcgaataagtttcggagcatcggttaacagcctatgggtgaaatttggctttcattcatgaatgagaaattattcttgacagaagtattttaaaagaaaaatctttacgatggcctcagcagtacttagttctgttcccaccaccgcttctcgttttgccctgttacaagtggatagtggcagtggctctgattctgaacctggaaaaggtaaaggtcgaaatactggaaagtctcaaactttaggaagcaagtcaactacaaatgagaaaaaaagagagaaaagaagaaaaaagaaggaacagcaacagagtgaagcaaatgagctcaggaatcttgcttttaagaaaattccccagaaatcctcccatgctgtttgtaacgctcaacatgatcttccattgtcaaacccagtacagaaggattcacgagaagaaaattggcaagagtggagacaaagagatgagcagctgacatctgaaatgtttgaagcagatcttgagaaggcattgttactaagtaaactagaatatgaagagcacaaaaaggagtatgaagatgctgaaaatacttcaactcagtccaaagttatgaataaaaaagataaaagaaagaatcatcagggaaaagacagacctctcacagtatcactaaaagattttcattcggaagatcacattagtaaaaagactgaggaattgagttcttctcagactttatcacatgatggaggattcttcaatagactggaagatgatgttcataaaattcttattagagaaaaacgaagagaacagcttacagaatataatggaacagataattgtacagctcatgaacacaaccaggaagtggttctgaaagatggaagaattgaaagactaaagttagagcttgaaaggaaagatgctgaaatccagaagctgaaaaatgtaatcactcaatgggaggcaaagtataaggaagtaaaggcaagaaatgcacaattattgaaaatgcttcaggaaggtgaaatgaaagataaggcagaaatacttctgcaagttgatgaatcacaaagtatcaagaatgagctcactattcaggtgacttcacttcatgctgcattagaacaagaaagatctaaagtgaaagtattacaagcagagttagccaaataccagggtggcagaaaagggaaaagaaactctgaatccgaccagtgtaggtgattacattagcctttgaagtcaacacaaagtttaaaacttccaggattttgcaaagttgtatatatttaatgctgtgcaactgctaaactatgcagtttttgttgaaggaactaaaagcaactagctccctaatggtctataattttatttcttttggcttaaagtgaaaaagaagaaatagagaattccagcagaattcagtggttgtctactatccatacttcttatcactttagtttttcatcagtcaataaaattaatttactcttccact

SEQ ID NO: 288575 - DNA, 1620 bp, Homo sapiens
  misc_feature (18)..(18): n is a, c, g, or t
  misc_feature (34)..(34): n is a, c, g, or t
  misc_feature (70)..(70): n is a, c, g, or t
gcccgccggggagcgcgnaggagcgggtggtaanggagggagaggagggccagcgcggcagtaggcgctngttttgaagccgcttctctgcccgagttaggtttcgcccagcgcaatttctttctctatgtactttgcgaataagtttcggagcatcggttaacagcctatgggtgaaatttggctttcattcatgaatgagaaattattcttgacagaagtattttaaaagaaaaatctttacgatggcctcagcagtacttagttctgttcccaccaccgcttctcgttttgccctgttacaagtggatagtggcagtggctctgattctgaacctggaaaaggtaaaggtcgaaatactggaaagtctcaaactttaggaagcaagtcaactacaaatgagaaaaaaagagagaaaagaagaaaaaagaaggaacagcaacagagtgaagcaaatgagctcaggaatcttgcttttaagaaaattccccagaaatcctcccatgctgtttgtaacgctcaacatgatcttccattgtcaaacccagtacagaaggattcacgagaagaaaattggcaagagtggagacaaagagatgagcagctgacatctgaaatgtttgaagcagatcttgagaaggcattgttactaagtaaactagaatatgaagagcacaaaaaggagtatgaagatgctgaaaatacttcaactcagtccaaagttatgaataaaaaagataaaagaaagaatcatcagggaaaagacagacctctcacagtatcactaaaagattttcattcggaagatcacattagtaaaaagactgaggaattgagttcttctcagactttatcacatgatggaggattcttcaatagactggaagatgatgttcataaaattcttattagagaaaaacgaagagaacagcttacagaatataatggaacagataattgtacagctcatgaacacaaccaggaagtggttctgaaagatggaagaattgaaagactaaagttagagcttgaaaggaaagatgctgaaatccagaagctgaaaaatgtaatcactcaatgggaggcaaagtataaggaagtaaaggcaagaaatgcacaattattgaaaatgcttcaggaaggtgaaatgaaagataaggcagaaatacttctgcaagttgatgaatcacaaagtatcaagaatgagctcactattcaggtgacttcacttcatgctgcattagaacaagaaagatctaaagtgaaagtattacaagcagagttagccaaataccagggtggcagaaaagggaaaagaaactctgaatccgaccagtgtaggtgattacattagcctttgaagtcaacacaaagtttaaaacttccaggattttgcaaagttgtatatatttaatgctgtgcaactgctaaactatgcagtttttgttgaaggaactaaaagcaactagctccctaatggtctataattttatttcttttggcttaaagtgaaaaagaagaaatagagaattccagcagaattcagtggttgtctactatccatacttcttatcactttagtttttcatcagtcaataaaattaatttactcttccact

SEQ ID NO: 288576 - DNA, 2183 bp, Homo sapiens
agcgggaggctctcacgccgcctcctccgcccgggcttccctccaccctccgcccgcccgcctgctctcagccgcgctctccccgcccctcaccgcagcctgcagccgcgctcacctccgcggtccgccccggcgccccgggacccgttagtgcccagcctgcgggccgaccgcgaccaccgcccggcgcgagcctgcccccagctctgccgacacttgacccagaccagtcccaacgcccagtgcggccgcccggggagccgcgggagaggcggcggcggggggaggagggagaggagggccgagccggcggcacgggaggcccggttttgaagccgcttctctgcccgagttaggtttcgcccagcgcaatttctttctctatgtactttgcgaataagtttcggagcatcggttaacagcctatgggtgaaatttggctttcattcatgaatgagaaattattcttgacagaagtattttaaaagaaaaatctttacgatggcctcagcagtacttagttctgttcccaccaccgcttctcgttttgccctgttacaagtggatagtggcagtggctctgattctgaacctggaaaaggtaaaggtcgaaatactggaaagtctcaaactttaggaagcaagtcaactacaaatgagaaaaaaagagagaaaagaagaaaaaagaaggaacagcaacagagtgaagcaaatgagctcaggaatcttgcttttaagaaaattccccagaaatcctcccatgctgtttgtaacgctcaacatgatcttccattgtcaaacccagtacagaaggattcacgagaagaaaattggcaagagtggagacaaagagatgagcagctgacatctgaaatgtttgaagcagatcttgagaaggcattgttactaagtaaactagaatatgaagagcacaaaaaggagtatgaagatgctgaaaatacttcaactcagtccaaagttatgaataaaaaagataaaagaaagaatcatcagggaaaagacagacctctcacagtatcactaaaagattttcattcggaagatcacattagtaaaaagactgaggaattgagttcttctcagactttatcacatgatggaggattcttcaatagactggaagatgatgttcataaaattcttattagagaaaaacgaagagaacagcttacagaatataatggaacagataattgtacagctcatgaacacaaccaggaagtggttctgaaagatggaagaattgaaagactaaagttagagcttgaaaggaaagatgctgaaatccagaagctgaaaaatgtaatcactcaatgggaggcaaagtataaggaagtaaaggcaagaaatgcacaattattgaaaatgcttcaggaaggtgaaatgaaagataaggcagaaatacttctgcaagttgatgaatcacaaagtatcaagaatgagctcactattcaggtgacttcacttcatgctgcattagaacaagaaagatctaaagtgaaagtattacaagcagagttagccaaataccagggtggcagaaaagggaaaagaaactctgaatccgaccagtgtaggtgattacattagcctttgaagtcaacacaaagtttaaaacttccaggattttgcaaagttgtatatatttaatgctgtgcaactgctaaactatgcagtttttgttgaaggaactaaaagcaactagctccctaatggtctataattttatttcttttggcttaaagtgaaaaagaagaaatagagaattccagcagaattcagtggttgtctactatccatacttcttatcactttagtttttcatcagtcaataaaattaatttactcttccactgaaaagaaaaaaaccatggcctcacctgcactcatccgccggcacatattacgaacccctatctttaccgctggaacgcgacactcgacctctactccctagctcacttccccccaccccgatccactcgtcgccacacacctcaggagccgttccgagcgtacccgagcgctcgcgacactgccccacgagccgcaccaagttgagaactcatgactatcgtccgagcggaggtagcacacagccatacgaagcgaatccccaagacggctgccctgcgcctaaagcggaagctgaacccctactg

SEQ ID NO: 288577 - DNA, 1943 bp, Homo sapiens
agcgggaggctctcacgccgcctcctccgcccgggcttccctccaccctccgcccgcccgcctgctctcagccgcgctctccccgcccctcaccgcagcctgcagccgcgctcacctccgcggtccgccccggcgccccgggacccgttagtgcccagcctgcgggccgaccgcgaccaccgcccggcgcgagcctgcccccagctctgccgacacttgacccagaccagtcccaacgcccagtgcggccgcccggggagccgcgggagaggcggcggcggggggaggagggagaggagggccgagccggcggcacgggaggcccggttttgaagccgcttctctgcccgagttaggtttcgcccagcgcaatttctttctctatgtactttgcgaataagtttcggagcatcggttaacagcctatgggtgaaatttggctttcattcatgaatgagaaattattcttgacagaagtattttaaaagaaaaatctttacgatggcctcagcagtacttagttctgttcccaccaccgcttctcgttttgccctgttacaagtggatagtggcagtggctctgattctgaacctggaaaaggtaaaggtcgaaatactggaaagtctcaaactttaggaagcaagtcaactacaaatgagaaaaaaagagagaaaagaagaaaaaagaaggaacagcaacagagtgaagcaaatgagctcaggaatcttgcttttaagaaaattccccagaaatcctcccatgctgtttgtaacgctcaacatgatcttccattgtcaaacccagtacagaaggattcacgagaagaaaattggcaagagtggagacaaagagatgagcagatggggagtaggaggcaatgaggaagtcaagaggaaggggatctgaagtactccatcttggacacatctgacatctgaaatgtttgaagcagatcttgagaaggcattgttactaagtaaactagaatatgaagagcacaaaaaggagtatgaagatgctgaaaatacttcaactcagtccaaagttatgaataaaaaagataaaagaaagaatcatcagggaaaagacagacctctcacagtatcactaaaagattttcattcggaagatcacattagtaaaaagactgaggaattgagttcttctcagactttatcacatgatggaggattcttcaatagactggaagatgatgttcataaaattcttattagagaaaaacgaagagaacagcttacagaatataatggaacagataattgtacagctcatgaacacaaccaggaagtggttctgaaagatggaagaattgaaagactaaagttagagcttgaaaggaaagatgctgaaatccagaagctgaaaaatgtaatcactcaatgggaggcaaagtataaggaagtaaaggcaagaaatgcacaattattgaaaatgcttcaggaaggtgaaatgaaagataaggcagaaatacttctgcaagttgatgaatcacaaagtatcaagaatgagctcactattcaggtgacttcacttcatgctgcattagaacaagaaagatctaaagtgaaagtattacaagcagagttagccaaataccagggtggcagaaaagggaaaagaaactctgaatccgaccagtgtaggtgattacattagcctttgaagtcaacacaaagtttaaaacttccaggattttgcaaagttgtatatatttaatgctgtgcaactgctaaactatgcagtttttgttgaaggaactaaaagcaactagctccctaatggtctataattttatttcttttggcttaaagtgaaaaagaagaaatagagaattccagcagaattcagtggttgtctactatccatacttcttatcactttagtttttcatcagtcaataaaattaatttactcttccact

SEQ ID NO: 288578 - DNA, 1967 bp, Homo sapiens
agcgggaggctctcacgccgcctcctccgcccgggcttccctccaccctccgcccgcccgcctgctctcagccgcgctctccccgcccctcaccgcagcctgcagccgcgctcacctccgcggtccgccccggcgccccgggacccgttagtgcccagcctgcgggccgaccgcgaccaccgcccggcgcgagcctgcccccagctctgccgacacttgacccagaccagtcccaacgcccagtgcggccgcccggggagccgcgggagaggcggcggcggggggaggagggagaggagggccgagccggcggcacgggaggcccggttttgaagccgcttctctgcccgagttaggtttcgcccagcgcaatttctttctctatgtactttgcgaataagtttcggagcatcggttaacagcctatgggtgaaatttggctttcattcatgaatgagacggtgtttcgccttgttggccaggctggtctggaactcctgacctcgtgatctgcccgcctctgcctcccaaagtgctgggattacaagtaaattattcttgacagaagtattttaaaagaaaaatctttacgatggcctcagcagtacttagttctgttcccaccaccgcttctcgttttgccctgttacaagtggatagtggcagtggctctgattctgaacctggaaaaggtaaaggtcgaaatactggaaagtctcaaactttaggaagcaagtcaactacaaatgagaaaaaaagagagaaaagaagaaaaaagaaggaacagcaacagagtgaagcaaatgagctcaggaatcttgcttttaagaaaattccccagaaatcctcccatgctgtttgtaacgctcaacatgatcttccattgtcaaacccagtacagaaggattcacgagaagaaaattggcaagagtggagacaaagagatgagcagctgacatctgaaatgtttgaagcagatcttgagaaggcattgttactaagtaaactagaatatgaagagcacaaaaaggagtatgaagatgctgaaaatacttcaactcagtccaaagttatgaataaaaaagataaaagaaagaatcatcagggaaaagacagacctctcacagtatcactaaaagattttcattcggaagatcacattagtaaaaagactgaggaattgagttcttctcagactttatcacatgatggaggattcttcaatagactggaagatgatgttcataaaattcttattagagaaaaacgaagagaacagcttacagaatataatggaacagataattgtacagctcatgaacacaaccaggaagtggttctgaaagatggaagaattgaaagactaaagttagagcttgaaaggaaagatgctgaaatccagaagctgaaaaatgtaatcactcaatgggaggcaaagtataaggaagtaaaggcaagaaatgcacaattattgaaaatgcttcaggaaggtgaaatgaaagataaggcagaaatacttctgcaagttgatgaatcacaaagtatcaagaatgagctcactattcaggtgacttcacttcatgctgcattagaacaagaaagatctaaagtgaaagtattacaagcagagttagccaaataccagggtggcagaaaagggaaaagaaactctgaatccgaccagtgtaggtgattacattagcctttgaagtcaacacaaagtttaaaacttccaggattttgcaaagttgtatatatttaatgctgtgcaactgctaaactatgcagtttttgttgaaggaactaaaagcaactagctccctaatggtctataattttatttcttttggcttaaagtgaaaaagaagaaatagagaattccagcagaattcagtggttgtctactatccatacttcttatcactttagtttttcatcagtcaataaaattaatttactcttccact

SEQ ID NO: 288579 - DNA, 1648 bp, Homo sapiens
tgccatggtggtttcctgcacctattgacccgtcctctaagttcccttccctaaccctccaccccgctacaggccctggtgtttgttgttcatgtgttctcactgttcaacttccaactatgagttaggtttcgcccagcgcaatttctttctctatgtactttgcgaataagtttcggagcatcggttaacagcctatgggtgaaatttggctttcattcatgaatgagaaattattcttgacagaagtattttaaaagaaaaatctttacgatggcctcagcagtacttagttctgttcccaccaccgcttctcgttttgccctgttacaagtggatagtggcagtggctctgattctgaacctggaaaaggtaaaggtcgaaatactggaaagtctcaaactttaggaagcaagtcaactacaaatgagaaaaaaagagagaaaagaagaaaaaagaaggaacagcaacagagtgaagcaaatgagctcaggaatcttgcttttaagaaaattccccagaaatcctcccatgctgtttgtaacgctcaacatgatcttccattgtcaaacccagtacagaaggattcacgagaagaaaattggcaagagtggagacaaagagatgagcagctgacatctgaaatgtttgaagcagatcttgagaaggcattgttactaagtaaactagaatatgaagagcacaaaaaggagtatgaagatgctgaaaatacttcaactcagtccaaagttatgaataaaaaagataaaagaaagaatcatcagggaaaagacagacctctcacagtatcactaaaagattttcattcggaagatcacattagtaaaaagactgaggaattgagttcttctcagactttatcacatgatggaggattcttcaatagactggaagatgatgttcataaaattcttattagagaaaaacgaagagaacagcttacagaatataatggaacagataattgtacagctcatgaacacaaccaggaagtggttctgaaagatggaagaattgaaagactaaagttagagcttgaaaggaaagatgctgaaatccagaagctgaaaaatgtaatcactcaatgggaggcaaagtataaggaagtaaaggcaagaaatgcacaattattgaaaatgcttcaggaaggtgaaatgaaagataaggcagaaatacttctgcaagttgatgaatcacaaagtatcaagaatgagctcactattcaggtgacttcacttcatgctgcattagaacaagaaagatctaaagtgaaagtattacaagcagagttagccaaataccagggtggcagaaaagggaaaagaaactctgaatccgaccagtgtaggtgattacattagcctttgaagtcaacacaaagtttaaaacttccaggattttgcaaagttgtatatatttaatgctgtgcaactgctaaactatgcagtttttgttgaaggaactaaaagcaactagctccctaatggtctataattttatttcttttggcttaaagtgaaaaagaagaaatagagaattccagcagaattcagtggttgtctactatccatacttcttatcactttagtttttcatcagtcaataaaattaatttactcttccact

SEQ ID NO: 288580 - DNA, 1442 bp, Homo sapiens
tctatattcatgaaatggcatattgtgtttaataatgcttattgagttattttttagtattcttatatttttgagtaataatcactcataatttttagtgtcctaaactgaatgttgcctttgacatctattatagtgccaattatttggtaagatttttttattaaggtaaaaagtaagattatatcatatataatagataacaatgaagaggagaaatggaaatctcaaaattggaagtttgtattttgatgtcttctatagaatataggcttcctagtttggcatggttagataactttggagaatccatattgttttttaacatatttgctttcttttcctctgtatatagtaatatgtatggttattttgctcatgtgatgtaatgatactgtctgtttattgtgaaactttttttttgtagctgacatctgaaatgtttgaagcagatcttgagaaggcattgttactaagtaaactagaatatgaagagcacaaaaaggagtatgaagatgctgaaaatacttcaactcagtccaaagttatgaataaaaaagataaaagaaagaatcatcagggaaaagacagacctctcacagtatcactaaaagattttcattcggaagatcacattagtaaaaagactgaggaattgagttcttctcagactttatcacatgatggaggattcttcaatagactggaagatgatgttcataaaattcttattagagaaaaacgaagagaacagcttacagaatataatggaacagataattgtacagctcatgaacacaaccaggaagtggttctgaaagatggaagaattgaaagactaaagttagagcttgaaaggaaagatgctgaaatccagaagctgaaaaatgtaatcactcaatgggaggcaaagtataaggaagtaaaggcaagaaatgcacaattattgaaaatgcttcaggaaggtgaaatgaaagataaggcagaaatacttctgcaagttgatgaatcacaaagtatcaagaatgagctcactattcaggtgacttcacttcatgctgcattagaacaagaaagatctaaagtgaaagtattacaagcagagttagccaaataccagggtggcagaaaagggaaaagaaactctgaatccgaccagtgtaggtgattacattagcctttgaagtcaacacaaagtttaaaacttccaggattttgcaaagttgtatatatttaatgctgtgcaactgctaaactatgcagtttttgttgaaggaactaaaagcaactagctccctaatggtctataattttatttcttttggcttaaagtgaaaaagaagaaatagagaattccagcagaattcagtggttgtctactatccatacttcttatcactttagtttttcatcagtcaataaaattaatttactcttccact

SEQ ID NO: 288581 - DNA, 1287 bp, Homo sapiens
tctatattcatgaaatggcatattgtgtttaataatgcttattgagttattttttagtattcttatatttttgagtaataatcactcataatttttagtgtcctaaactgaatgttgcctttgacatctattatagtgccaattatttggtaagatttttttattaaggtaaaaagtaagattatatcatatataatagataacaatgaagaggagaaatggaaatctcaaaattggaagtttgtattttgatgtcttctatagaatataggcttcctagtttggcatggttagataactttggagaatccatattgttttttaacatatttgctttcttttcctctgtatatagtaatatgtatggttattttgctcatgtgatgtaatgatactgtctgtttattgtgaaactttttttttgtagctgacatctgaaatgtttgaagcagatcttgagaaggcattgttactaagtaaactagaatatgaagagcacaaaaaggagtatgaagatgctgaaaatacttcaactcagtccaaagttatgaataaaaaagataaaagaaagaatcatcagggaaaagacagacctctcacagtatcactaaaagattttcattcggaagatcacattagtaaaaagactggaagtggttctgaaagatggaagaattgaaagactaaagttagagcttgaaaggaaagatgctgaaatccagaagctgaaaaatgtaatcactcaatgggaggcaaagtataaggaagtaaaggcaagaaatgcacaattattgaaaatgcttcaggaaggtgaaatgaaagataaggcagaaatacttctgcaagttgatgaatcacaaagtatcaagaatgagctcactattcaggtgacttcacttcatgctgcattagaacaagaaagatctaaagtgaaagtattacaagcagagttagccaaataccagggtggcagaaaagggaaaagaaactctgaatccgaccagtgtaggtgattacattagcctttgaagtcaacacaaagtttaaaacttccaggattttgcaaagttgtatatatttaatgctgtgcaactgctaaactatgcagtttttgttgaaggaactaaaagcaactagctccctaatggtctataattttatttcttttggcttaaagtgaaaaagaagaaatagagaattccagcagaattcagtggttgtctactatccatacttcttatcactttagtttttcatcagtcaataaaattaatttactcttccact

SEQ ID NO: 288582 - DNA, 690 bp, Homo sapiens
cctaatctccatctattctttctccacgcgcctccctcaatatccccttctcagaagtggttctgaaagatggaagaattgaaagactaaagttagagcttgaaaggaaagatgctgaaatccagaagctgaaaaatgtaatcactcaatgggaggcaaagtataaggaagtaaaggcaagaaatgcacaattattgaaaatgcttcaggaaggtgaaatgaaagataaggcagaaatacttctgcaagttgatgaatcacaaagtatcaagaatgagctcactattcaggtgacttcacttcatgctgcattagaacaagaaagatctaaagtgaaagtattacaagcagagttagccaaataccagggtggcagaaaagggaaaagaaactctgaatccgaccagtgtaggtgattacattagcctttgaagtcaacacaaagtttaaaacttccaggattttgcaaagttgtatatatttaatgctgtgcaactgctaaactatgcagtttttgttgaaggaactaaaagcaactagctccctaatggtctataattttatttcttttggcttaaagtgaaaaagaagaaatagagaattccagcagaattcagtggttgtctactatccatacttcttatcactttagtttttcatcagtcaataaaattaatttactcttccact

SEQ ID NO: 288583 - DNA, 705 bp, Homo sapiens
  misc_feature (10)..(10): n is a, c, g, or t
  misc_feature (19)..(19): n is a, c, g, or t
  misc_feature (50)..(52): n is a, c, g, or t
tttagggaanaaaaaaggnaggaaatttgataattggtaatttattatgnnnaaatggattctagtaagaagtggttctgaaagatggaagaattgaaagactaaagttagagcttgaaaggaaagatgctgaaatccagaagctgaaaaatgtaatcactcaatgggaggcaaagtataaggaagtaaaggcaagaaatgcacaattattgaaaatgcttcaggaaggtgaaatgaaagataaggcagaaatacttctgcaagttgatgaatcacaaagtatcaagaatgagctcactattcaggtgacttcacttcatgctgcattagaacaagaaagatctaaagtgaaagtattacaagcagagttagccaaataccagggtggcagaaaagggaaaagaaactctgaatccgaccagtgtaggtgattacattagcctttgaagtcaacacaaagtttaaaacttccaggattttgcaaagttgtatatatttaatgctgtgcaactgctaaactatgcagtttttgttgaaggaactaaaagcaactagctccctaatggtctataattttatttcttttggcttaaagtgaaaaagaagaaatagagaattccagcagaattcagtggttgtctactatccatacttcttatcactttagtttttcatcagtcaataaaattaatttactcttccact

SEQ ID NO: 288584 - DNA, 2302 bp, Homo sapiens
agcgggaggctctcacgccgcctcctccgcccgggcttccctccaccctccgcccgcccgcctgctctcagccgcgctctccccgcccctcaccgcagcctgcagccgcgctcacctccgcggtccgccccggcgccccgggacccgttagtgcccagcctgcgggccgaccgcgaccaccgcccggcgcgagcctgcccccagctctgccgacacttgacccagaccagtcccaacgcccagtgcggccgcccggggagccgcgggagaggcggcggcggggggaggagggagaggagggccgagccggcggcacgggaggcccggttttgaagccgcttctctgcccgagttaggtttcgcccagcgcaatttctttctctatgtactttgcgaataagtttcggagcatcggttaacagcctatgggtgaaatttggctttcattcatgaatgagcttcagttgtggagggccaaaagggtatcattcttcgagctattcaagaaatatttcaaagcatctctgaacatcctagcattgactttaatgtgaaagtatcttatatagaagtgtacaaggaagacctaagagatcttctagaattggagacatccatgaaagatcttcacatccgaaaagatgaaaaaggaaacacagtgtgtgcttgctgctgatgaagtagtatttaatcagaaggaactggaggttaaggaactgaagaatcaagtgcagatgatggtacaggaaaacaaagggcatgctgtatctttgaaagaagcgcaaaaagtgaatagactgcaggatctcattctgttgctcaggctggtgtgcgctggcacaatcacagctcactgcagtctcgaccttccaggctcaagtgatcctcccgcctcagcctcctaactgtgaccacaggtgcatgccaccgcgcccggctaattttctgatttttttgtggagacggggtctcactgtgttgctcaagctggtctcgaactcctgggctcagtgatcctaccacctcagcttcccaaagtgctgagattgattacagaatgaaaaaataatagaacaacaacttcttgtggatcaactgagtgaagaactaacaaaacttaacctgtcagtgacttcttcagctaaagaaaattgtggagacgggccagatgccaggatccctgaaaagagaccatatactgtaccatttgatactcatttggggcattatatttatatcccatcaagacaagattccaggagggggaatcacttgcaaggtccacacaagtccgcctatgtactctctggatcgaatatttgctggatttcgaacacaaagtcagatgctgttggatcacgtagaagaacgagatgaggtcctccactgccaattttctgataacagtgatgatgaagaatcagaaggccaagagaaatctggaactagatgtagaagtcgttcatggattcagaagccagactctgttcccttgttgaattgagtgatactcaggatgaaacacaaaagtcagattcggagaatgaagatttaaagattgattgtctccaggagagtcaagaattgaatttgcaaaaattaaagaattcagaacgcatacttactgaagccaaacaaaaaatgagagaacttacagttaacatcaagatgaaggaagatctgattaaagaattaataaaaacaggtaacgatgccaagtctgtaagcaagcagtatactttgaaagtaacaaagctagagcatgatgcagaacaggcaaaagtcgaactaactgaaacacaaaagcagctacaggagctggaaaacaaagatctttctgatgttgcaatgaaggtaaaattacagaaagagtttcgtaaaaaggtggatgctgcaaagctgagagttcaggtcttacagaagaagcaacaagatagtaagaaactggcatcactgtcaatccaaaatgagaaacgtgctaatgaactagagcagagtgtagatcacatgaaatatcaaaagatacagctacaaagaaaactacgagaagaaaatgaaaaaaggaagcaactggatgcagtaattaagcgggaccagcaaaaaatcaaagtaatattgtcatacattcctgctaagtataatatgaaatgttaaacggctcagagctaacgaatccatggtcttcattcagttggcttgtgaagtatctatccttgacttgcccttcactgctgtccttattcactttaaagctttgttcatctacatagtaaaacctatttattgaattttgaaaaatatc

SEQ ID NO: 288585 - DNA, 2298 bp, Homo sapiens
agcgggaggctctcacgccgcctcctccgcccgggcttccctccaccctccgcccgcccgcctgctctcagccgcgctctccccgcccctcaccgcagcctgcagccgcgctcacctccgcggtccgccccggcgccccgggacccgttagtgcccagcctgcgggccgaccgcgaccaccgcccggcgcgagcctgcccccagctctgccgacacttgacccagaccagtcccaacgcccagtgcggccgcccggggagccgcgggagaggcggcggcggggggaggagggagaggagggccgagccggcggcacgggaggcccggttttgaagccgcttctctgcccgagttaggtttcgcccagcgcaatttctttctctatgtactttgcgaataagtttcggagcatcggttaacagcctatgggtgaaatttggctttcattcatgaatgagcttcagttgtggagggccaaaagggtatcattcttcgagctattcaagaaatatttcaaagcatctctgaacatcctagcattgactttaatgtgaaagtatcttatatagaagtgtacaaggaagacctaagagatcttctagaattggagacatccatgaaagatcttcacatccgaaaagatgaaaaaggaaacacagtgtgtgcttgctgctgatgaagtagtatttaatcagaaggaactggaggttaaggaactgaagaatcaagtgcagatgatggtacaggaaaacaaagggcatgctgtatctttgaaagaagcgcaaaaagtgaatagactgcaggatctcattctgttgctcaggctggtgtgcgctggcacaatcacagctcactgcagtctcgaccttccaggctcaagtgatcctcccgcctcagcctcctaactgtgaccacaggtgcatgccaccgcgcccggctaattttctgatttttttgtggagacggggtctcactgtgttgctcaagctggtctcgaactcctgggctcagtgatcctaccacctcagcttcccaaagtgctgagattgattacagaatgaaaaaataatagaacaacaacttcttgtggatcaactgagtgaagaactaacaaaacttaacctgtcagtgacttcttcagctaaagaaaattgtggagacgggccagatgccaggatccctgaaaagagaccatatactgtaccatttgatactcatttggggcattatatttatatcccatcaagacaagattccaggagggggaatcacttgcaaggtccacacaagtccgcctatgtactctctggatcgaatatttgctggatttcgaacacaaagtcagatgctgttggatcacgtagaagaacgagatgaggtcctccactgccaattttctgataacagtgatgatgaagaatcagaaggccaagagaaatctggaactagatgtagaagtcgttcatggattcagaagccagactctgttcccttgttgaattgagtgatactcaggatgaaacacaaaagtcagattcggagaatgaagatttaaagattgattgtctccaggagagtcaagaattgaatttgcaaaaattaaagaattcagaacgcatacttactgaagccaaacaaaaaatgagagaacttacagttaacatcaagatgaaggaagatctgattaaagaattaataaaaacaggtaacgatgccaagtctgtaagcaagcagtatactttgaaagtaacaaagctagagcatgatgcagaacaggcaaaagtcgaactaactgaaacacaaaagcagctacaggagctggaaaacaaagatctttctgatgttgcaatgaaggtaaaattacagaaagagtttcgtaaaaaggtggatgctgcaaagctgagagttcaggtcttacagaagaagcaacaagatagtaagaaactggcatcactgtcaatccaaaatgagaaacgtgctaatgaactagagcagagtgtagatcacatgaaatatcaaaagatacagctacaaagaaaactacgagaagaaaatgaaaaaaggaagcaactggatgcagtaattaagcgggaccagcaaaaaatcaaacaaaaagaatgtttccagctgctacatttaagagagagctggccgagcacggtggctcatgcctgtaatcgcagcactttgggaggctgatgcaggcggatcacgaagtcaggagatcgagaccatcctggctaacacggtgaaaccctgtctctactaaaaatacaaaaacaaaattagccaggtgtg

SEQ ID NO: 288586 - DNA, 1895 bp, Homo sapiens
agcgggaggctctcacgccgcctcctccgcccgggcttccctccaccctccgcccgcccgcctgctctcagccgcgctctccccgcccctcaccgcagcctgcagccgcgctcacctccgcggtccgccccggcgccccgggacccgttagtgcccagcctgcgggccgaccgcgaccaccgcccggcgcgagcctgcccccagctctgccgacacttgacccagaccagtcccaacgcccagtgcggccgcccggggagccgcgggagaggcggcggcggggggaggagggagaggagggccgagccggcggcacgggaggcccggttttgaagccgcttctctgcccgagttaggtttcgcccagcgcaatttctttctctatgtactttgcgaataagtttcggagcatcggttaacagcctatgggtgaaatttggctttcattcatgaatgagcttcagttgtggagggccaaaagggtatcattcttcgagctattcaagaaatatttcaaagcatctctgaacatcctagcattgactttaatgtgaaagtatcttatatagaagtgtacaaggaagacctaagagatcttctagaattggagacatccatgaaagatcttcacatccgaaaagatgaaaaaggaaacacagtgtgtgcttgctgctgatgaagtagtatttaatcagaaggaactggaggttaaggaactgaagaatcaagtgcagatgatggtacaggaaaacaaagggcatgctgtatctttgaaagaagcgcaaaaagtgaatagactgcaggatctcattctgttgctcaggctggtgtgcgctggcacaatcacagctcactgcagtctcgaccttccaggctcaagtgatcctcccgcctcagcctcctaactgtgaccacaggtgcatgccaccgcgcccggctaattttctgatttttttgtggagacggggtctcactgtgttgctcaagctggtctcgaactcctgggctcagtgatcctaccacctcagcttcccaaagtgctgagattgattacagaatgaaaaaataatagaacaacaacttcttgtggatcaactgagtgaagaactaacaaaacttaacctgtcagtgacttcttcagctaaagaaaattgtggagacgggccagatgccaggatccctgaaaagagaccatatactgtaccatttgatactcatttggggcattatatttatatcccatcaagacaagattccaggagggggaatcacttgcaaggtccacacaagtccgcctatgtactctctggatcgaatatttgctggatttcgaacacaaagtcagatgctgttggatcacgtagaagaacgagatgaggtcctccactgccaattttctgataacagtgatgatgaagaatcagaaggccaagagaaatctggaactagatgtagaagtcgttcatggattcagaagccagactctgttcccttgttgaattgagtgatactcaggatgaaacacaaaagtcagattcggagaatgaaggtacatagatcttcttaaataatgtagacctaatggttataggacacttatctttttcctcagttgataatttaagaaacatccaggaattctcaaagaccagaatttggtacaaatggtttcctagttgatagaacttcttttatgttctctgttttacctcttttactccttaataaaaaaagattttctatcaattaattatggctagagatataggctaactccctcagaataaggatttttatattcagacctgaattgatatgctttgtattcctgatgatgttaaaatacagtataaataattgtactaggtgtctactccttcactgggacttgtgcc

SEQ ID NO: 288587 - DNA, 1738 bp, Homo sapiens
agcgggaggctctcacgccgcctcctccgcccgggcttccctccaccctccgcccgcccgcctgctctcagccgcgctctccccgcccctcaccgcagcctgcagccgcgctcacctccgcggtccgccccggcgccccgggacccgttagtgcccagcctgcgggccgaccgcgaccaccgcccggcgcgagcctgcccccagctctgccgacacttgacccagaccagtcccaacgcccagtgcggccgcccggggagccgcgggagaggcggcggcggggggaggagggagaggagggccgagccggcggcacgggaggcccggttttgaagccgcttctctgcccgagttaggtttcgcccagcgcaatttctttctctatgtactttgcgaataagtttcggagcatcggttaacagcctatgggtgaaatttggctttcattcatgaatgagcttcagttgtggagggccaaaagggtatcattcttcgagctattcaagaaatatttcaaagcatctctgaacatcctagcattgactttaatgtgaaagtatcttatatagaagtgtacaaggaagacctaagagatcttctagaattggagacatccatgaaagatcttcacatccgaaaagatgaaaaaggaaacacagtgtgtgcttgctgctgatgaagtagtatttaatcagaaggaactggaggttaaggaactgaagaatcaagtgcagatgatggtacaggaaaacaaagggcatgctgtatctttgaaagaagcgcaaaaagtgaatagactgcaggatctcattctgttgctcaggctggtgtgcgctggcacaatcacagctcactgcagtctcgaccttccaggctcaagtgatcctcccgcctcagcctcctaactgtgaccacaggtgcatgccaccgcgcccggctaattttctgatttttttgtggagacggggtctcactgtgttgctcaagctggtctcgaactcctgggctcagtgatcctaccacctcagcttcccaaagtgctgagattgattacagaatgaaaaaataatagaacaacaacttcttgtggatcaactgagtgaagaactaacaaaacttaacctgtcagtgacttcttcagctaaagaaaattgtggagacgggccagatgccaggatccctgaaaagagaccatatactgtaccatttgatactcatttggggcattatatttatatcccatcaagacaagattccaggagggggaatcacttgcaaggtccacacaagtccgcctatgtactctctggatcgaatatttgctggatttcgaacacaaagtcagatgctgttggatcacgtagaagaacgagatgaggtcctccactgccaattttctgataacagtgatgatgaagaatcagaaggccaagagaaatctggaactagatgtagaagtcgttcatggattcagaagccagactctgttcccttgttgaattgagtgatactcaggatgaaacacaaaagtcagattcggagaatgaagatttaaagattgattgtctccaggagagtcaagaattgaatttgcaaaaattaaagaattcagaacgcatacttactgaagccaaacaaaaaatgagagaacttacagttaacatcaagatgaaggaagatctgattaaagaattaataaaaacaggtaatagtatcttgtgaaccagcttatatgaga

SEQ ID NO: 288588 - DNA, 539 bp, Homo sapiens
aaaaatggaaatgtatgatagtaagcaattgtttgtgaacctgtcaaaaataaatgaaaatctagggaaaatttcttcttttaccatcaaatgaaaagattaagtttagttgaggattgtgagagattcagtttttcattttgaaatattccatatgatctcaggtcttacagaagaagcaacaagatagtaagaaactggcatcactgtcaatccaaaatgagaaacgtgctaatgaactagagcagagtgtagatcacatgaaatatcaaaagatacagctacaaagaaaactacgagaagaaaatgaaaaaaggaagcaactggatgcagtaattaagcgggaccagcaaaaaatcaaagtaatattgtcatacattcctgctaagtataatatgaaatgttaaacggctcagagctaacgaatccatggtcttcattcagttggcttgtgaagtatctatccttgacttgcccttcactgctgtccttattcactttaaagctttgttcatctacatagtaaaacctatttattg

SEQ ID NO: 288589 - DNA, 1472 bp, Homo sapiens
  misc_feature (26)..(26): n is a, c, g, or t
tgtcttctcccggaaatggtctaagncccagctcctggcggagcgagctagcctgcgaatttcagcatgagtgtactgctgaggtcaggtttggggccgttgtgtgccgtggcgcgcgcagccattccttttatttggagagggaaatacttcagctccgggaatgagcctgcagaaaacccggtgacgccgatgctgcggcatcttatgtacaaaataaagtctactggtcccatcactgtggccgagtacatgaaggaggtgttgactaatccagccaagggttattatgtgtaccgtgacatgctaggcgaaaaaggagatttcattacttcacctgaaataagtcaaatctttggggagctactaggtatatggttcattagtgaatggatggccactggaaaaagcacagctttccagctggtggaactgggcccaggtaggggaaccctcgtgggagatattttgagggtgttcactcaacttggatctgtgctgaaaaattgtgacatttcagtacatctggtagaggtaagccaaaaattaagtgagattcaagcattgacactgactaaagagaaggtcccgttagagcgaaatgctggatccccagtgtatatgaaaggtgtcactaagtctgggattccaatttcctggtaccgagatctgcacgatgttccaaaagggtacagcttttatcttgcacatgaattttttgatgttcttcctgtgcataaatttcagaaaacaccacagggatggcgagaagtatttgttgacattgatccacaggtttctgataaactgaggtttgttttggcaccttctgccaccccagcagaagccttcatacaacatgacgaaacaagggatcatgttgaagtgtgtcctgatgctggtgttatcatcgaggaactttctcaacgcattgcattaactggaggtgctgcactggttgctgattatggtcatgatggaacaaagacagataccttcagagggttttgcgaccacaagcttcatgatgtcttaattgccccaggaacagcagatctaacagctgatgtggacttcagttatttgcgaagaatggcacagggaaaagtagcctctctgggcccaataaaacaacacacatttttaaaaaatatgggtattgatgtccggctgaaggttcttttagataaatcaaatgagccatcagtgaggcagcagttacttcaaggatatgatatgttaatgaatccaaagaagatgggagagagatttaacttttttgccttgctacctcatcagagacttcaaggtggaagatatcagaggaatgcacgtcagtcaaaaccctttgcatccgttgtagctgggtttagtgaacttgcttggcagtgatatttcagcttggacattttacccttcagtcggcccaagaaatcaaaataaaggaaacacatttcatatactgcaggtaa

SEQ ID NO: 288590 - DNA, 907 bp, Homo sapiens
agcgggtcagtcccctcgaagcccggttgccgtggaagccgcgtggggcgccttcctcagctcttcagttgagggtaccgggggatcaagggctcgggggctcacttccaccttgaagctactaggtatatggttcattagtgaatggatggccactggaaaaagcacagctttccagctggtggaactgggcccaggtgttcactcaacttggatctgtgctgaaaaattgtgacatttcagtacatctggtagaggtaagccaaaaattaagtgagattcaagcattgacactgactaaagagaaggtcccgttagagcgaaatgctggatccccagtgtatatgaaaggtgtcactaagtctgggattccaatttcctggtaccgagatctgcacgatgttccaaaagggtacagcttttatcttgcacatgaattttttgatgttcttcctgtgcataaatttcagaaaacaccacagggatggcgagaagtatttgttgacattgatccacaggtttctgataaactgaggtttgttttggcaccttctgccaccccagcagaagccttcatacaacatgacgaaacaagggatcatgttgaagtgtgtcctgatgctggtgttatcatcgaggaactttctcaacgcattgcattaactggaggtgctgcactggttgctgattatggtcatgatggaacaaagacagataccttcagagtatgtataattcagtaacatgatttatcagaatttcagtgttagatctgaagcccattgaagagctttgatttctacagtgcctggtattgttgtattacattattttatagttaacattaattcatgttattgtaattccccttaaccctagttcttactgctaacactgagtctactgt

SEQ ID NO: 288591 - DNA, 491 bp, Homo sapiens
  misc_feature (26)..(26): n is a, c, g, or t
  misc_feature (370)..(370): n is a, c, g, or t
  misc_feature (372)..(372): n is a, c, g, or t
  misc_feature (382)..(382): n is a, c, g, or t
  misc_feature (438)..(438): n is a, c, g, or t
  misc_feature (443)..(443): n is a, c, g, or t
  misc_feature (447)..(447): n is a, c, g, or t
  misc_feature (452)..(452): n is a, c, g, or t
  misc_feature (462)..(462): n is a, c, g, or t
  misc_feature (486)..(486): n is a, c, g, or t
tgtcttctcccggaaatggtctaagncccagctcctggcggagcgagctagcctgcgaatttcagcatgagtgtactgctgaggtcaggtttggggccgttgtgtgccgtggcgcgcgcagccattccttttatttggagagggaaatacttcagctccgggaatgagcctgcagaaaacccggtgacgccgatgctgcggcatcttatgtacaaaataaagtctactggtcccatcactgtggccgagtacatgaaggaggtgttgactaatccagccaagggttattatgtgtaccgtgacatgctaggcgaaaaaggagatttcattacttcacctgaaataagtcaaatctttggggagtgcggcncntgcgttgggngcagcacatgcgttaggagcggcacatagttgggatcggcacatggaaacctaacntaagngtcnggacntactagttangtagcgggagaaagcccagttttncccct

SEQ ID NO: 288592 - DNA, 2200 bp, Homo sapiens
  misc_feature (26)..(26): n is a, c, g, or t
tgtcttctcccggaaatggtctaagncccagctcctggcggagcgagctagcctgcgaatttcagcatgagtgtactgctgaggtcaggtttggggccgttgtgtgccgtggcgcgcgcagccattccttttatttggagagggaaatacttcagctccgggaatgagcctgcagaaaacccggtgacgccgatgctgcggcatcttatgtacaaaataaagtctactggtcccatcactgtggccgagtacatgaaggaggtgttgactaatccagccaagggttattatgtgtaccgtgacatgctaggcgaaaaaggagatttcattacttcacctgaaataagtcaaatctttggggagctactaggtatatggttcattagtgaatggatggccactggaaaaagcacagctttccagctggtggaactgggcccaggtaggggaaccctcgtgggagatattttgagggtgttcactcaacttggatctgtgctgaaaaattgtgacatttcagtacatctggtagaggtaagccaaaaattaagtgagattcaagcattgacactgactaaagagaaggtcccgttagagcgaaatgctggatccccagtgtatatgaaaggtgtcactaagtctgggattccaatttcctggtaccgagatctgcacgatgttccaaaagggtacagcttttatcttgcacatgaattttttgatgttcttcctgtgcataaatttcagaaaacaccacagggatggcgagaagtatttgttgacattgatccacaggtttctgataaactgaggtttgttttggcaccttctgccaccccagcagaagccttcatacaacatgacgaaacaagggatcatgttgaagtgtgtcctgatgctggtgttatcatcgaggaactttctcaacgcattgcattaactggaggtgctgcactggttgctgattatggtcatgatggaacaaagacagataccttcagagggttttgcgaccacaagcttcatgatgtcttaattgccccaggaacagcagatctaacagctgatgtggacttcagttatttgcgaagaatggcacagggaaaagtagcctctctgggcccaataaaacaacacacatttttaaaaaatatgggtattgatgtccggctgaaggttcttttagataaatcaaatgagccatcagtgaggcagcagttacttcaaggatatgatatgttaatgaatccaaagaagatgggagagagatttaacttttttgccttgctacctcatcagagacttcaaggtggaagatatcagaggaatgcacgtcagtcaaaaccctttgcatccgttgtagctgggtttagtgaacttgcttggcagtgatatttcagcttggacattttacccttcagtcggcccaagaaatcaaaataaaggaaacacatttcatatactgcaggtaacaaaagtcaaagtattttatcttttcacagcaagaacagtccatgttgtatataatacaaccaacattatagaacttttagggttgtgactggctttggtgcaaatgtgtgctcaagctaataagttattgtgaaactgagtttcctttaacttacaaagctagttgccatatttctattttattttaaaaagtaaacatgcggctgggcgtggtggctcatgcctgtaatcccagcactttgggaggctgaggtgggcatatcacctgaggtcagcagttaaagaccagcctgaccaaaatggagaaaccccatctctactaaaaatacaaaactagccgggtatggtggtacatgcctgtaatcccagctactcaggaggctgagacaggagaatcacttgaacctgggaggtggaggttgcggtgagctgagatcgtgccactgcactccagcctgggcaacaagagcaaaaatccctctcaaaaaaaaaaagtaaacatgggcactgattgttttaataaaaatgggaaacagactaaatggctattcacaggaaactgataagatatatgttatttttttaaatgagctagggcaatatgttttgacagaaaactctctaagatttagtaagtgaaaaaaagtaggatgcaagagtttttatagttgattccatttttgttgaaggagaaaaactaaataaatacgagtaatttcatagaaac

SEQ ID NO: 288593 - DNA, 2330 bp, Homo sapiens
  misc_feature (26)..(26): n is a, c, g, or t
tgtcttctcccggaaatggtctaagncccagctcctggcggagcgagctagcctgcgaatttcagcatgagtgtactgctgaggtcaggtttggggccgttgtgtgccgtggcgcgcgcagccattccttttatttggagagggaaatacttcagctccgggaatgagcctgcagaaaacccggtgacgccgatgctgcggcatcttatgtacaaaataaagtctactggtcccatcactgtggccgagtacatgaaggaggtgttgactaatccagccaagggttattatgtgtaccgtgacatgctaggcgaaaaaggagatttcattacttcacctgaaataagtcaaatctttggggagctactaggtatatggttcattagtgaatggatggccactggaaaaagcacagctttccagctggtggaactgggcccaggtaggggaaccctcgtgggagatattttgagggtgttcactcaacttggatctgtgctgaaaaattgtgacatttcagtacatctggtagaggtaagccaaaaattaagtgagattcaagcattgacactgactaaagagaaggtcccgttagagcgaaatgctggatccccagtgtatatgaaaggtgtcactaagtctgggattccaatttcctggtaccgagatctgcacgatgttccaaaagggtacagcttttatcttgcacatgaattttttgatgttcttcctgtgcataaatttcagaaaacaccacagggatggcgagaagtatttgttgacattgatccacaggtttctgataaactgaggtttgttttggcaccttctgccaccccagcagaagccttcatacaacatgacgaaacaagggatcatgttgaagtgtgtcctgatgctggtgttatcatcgaggaactttctcaacgcattgcattaactggaggtgctgcactggttgctgattatggtcatgatggaacaaagacagataccttcagagggttttgcgaccacaagcttcatgatgtcttaattgccccaggaacagcagatctaacagctgatgtggacttcagttatttgcgaagaatggcacagggaaaagtagcctctctgggcccaataaaacaacacacatttttaaaaaatatgggtattgatgtccggctgaaggttcttttagataaatcaaatgagccatcagtgaggcagcagttacttcaaggatatgatatgttaatgaatccaaagaagatgggagagagatttaacttttttgccttgctacctcatcagagacttcaaggtggaagatatcagaggaatgcacgtcagtcaaaaccctttgcatccgttgtagctgggtttagtgaacttgcttggcagtgatatttcagcttggacattttacccttcagtcggcccaagaaatcaaaataaaggaaacacatttcatatactgcaggtaacaaaagtcaaagtattttatcttttcacagcaagaacagtccatgttgtatataatacaaccaacattatagaacttttagggttgtgactggctttggtgcaaatgtgtgctcaagctaataagttattgtgaaactgagtttcctttaacttacaaagctagttgccatatttctattttattttaaaaagtaaacatgcggctgggcgtggtggctcatgcctgtaatcccagcactttgggaggctgaggtgggcatatcacctgaggtcagcagttaaagaccagcctgaccaaaatggagaaaccccatctctactaaaaatacaaaactagccgggtatggtggtacatgcctgtaatcccagctactcaggaggctgagacaggagaatcacttgaacctgggaggtggaggttgcggtgagctgagatcgtgccactgcactccagcctgggcaacaagagcaaaaatccctctcaaaaaaaaaaagtaaacatgggcactgattgttttaataaaaatgggaaacagactaaatggctattcacaggaaactgataagatatatgttatttttttaaatgagctagggcaatatgttttgacagaaaactctctaagatttagtaagtgaaaaaaagtaggatgcaagagtttttatagttgattccatttttgttgaaggagaaaaactaaataaatacgagtaatttcatagaaaccgagaagaaaaatggttccctattcacttgaatttgcctttgtttggcaaaagaactcgagggggggcccggcacccaattcgcccttatgtgggtggtttacaattaactggccgcgttttaccacgcc

SEQ ID NO: 288594 - DNA, 1943 bp, Homo sapiens
  misc_feature (26)..(26): n is a, c, g, or t
tgtcttctcccggaaatggtctaagncccagctcctggcggagcgagctagcctgcgaatttcagcatgagtgtactgctgaggtcaggtttggggccgttgtgtgccgtggcgcgcgcagccattccttttatttggagagggaaatacttcagctccgggaatgagcctgcagaaaacccggtgacgccgatgctgcggcatcttatgtacaaaataaagtctactggtcccatcactgtggccgagtacatgaaggaggtgttgactaatccagccaagggttattatgtgtaccgtgacatgctaggcgaaaaaggagatttcattacttcacctgaaataagtcaaatctttggggagctactaggtatatggttcattagtgaatggatggccactggaaaaagcacagctttccagctggtggaactgggcccaggtaggggaaccctcgtgggagatattttgagggtgttcactcaacttggatctgtgctgaaaaattgtgacatttcagtacatctggtagagggtacagcttttatcttgcacatgaattttttgatgttcttcctgtgcataaatttcagaaaacaccacagggatggcgagaagtatttgttgacattgatccacaggtttctgataaactgaggtttgttttggcaccttctgccaccccagcagaagccttcatacaacatgacgaaacaagggatcatgttgaagtgtgtcctgatgctggtgttatcatcgaggaactttctcaacgcattgcattaactggaggtgctgcactggttgctgattatggtcatgatggaacaaagacagataccttcagagggttttgcgaccacaagcttcatgatgtcttaattgccccaggaacagcagatctaacagctgatgtggacttcagttatttgcgaagaatggcacagggaaaagtagcctctctgggcccaataaaacaacacacatttttaaaaaatatgggtattgatgtccggctgaaggttcttttagataaatcaaatgagccatcagtgaggcagcagttacttcaaggatatgatatgttaatgaatccaaagaagatgggagagagatttaacttttttgccttgctacctcatcagagacttcaaggtggaagatatcagaggaatgcacgtcagtcaaaaccctttgcatccgttgtagctgggtttagtgaacttgcttggcagtgatatttcagcttggacattttacccttcagtcggcccaagaaatcaaaataaaggaaacacatttcatatactgcaggtaacaaaagtcaaagtattttatcttttcacagcaagaacagtccatgttgtatataatacaaccaacattatagaacttttagggttgtgactggctttggtgcaaatgtgtgctcaagctaataagttattgtgaaactgagtttcctttaacttacaaagctagttgccatatttctattttattttaaaaagtaaacatgcggctgggcgtggtggctcatgcctgtaatcccagcactttgggaggctgaggtgggcatatcacctgaggtcagcagttaaagaccagcctgaccaaaatggagaaaccccatctctactaaaaatacaaaactagccgggtatggtggtacatgcctgtaatcccagcccagcctccgggccacccagcctgtggaggttggtcaggtggtcacccatcttcttgataagcttcacttcctcatctaggaagtgagtctccaggaagtcacagagatgggggtccgtgcgggcagaacccagggcatgaagatccaaaagggcctggttcagctttttctccagggccatggcagctttcatggcgtctggggttttaccccactcatcttcagctggcttcttgatgtcctggaagagagc

SEQ ID NO: 288595 - DNA, 2019 bp, Homo sapiens
  misc_feature (26)..(26): n is a, c, g, or t
tgtcttctcccggaaatggtctaagncccagctcctggcggagcgagctagcctgcgaatttcagcatgagtgtactgctgaggtcaggtttggggccgttgtgtgccgtggcgcgcgcagccattccttttatttggagagggaaatacttcagctccgggaatgagcctgcagaaaacccggtgacgccgatgctgcggcatcttatgtacaaaataaagtctactggtcccatcactgtggccgagtacatgaaggaggtgttgactaatccagccaagggttattatgtgtaccgtgacatgctaggcgaaaaaggagatttcattacttcacctgaaataagtcaaatctttggggagctactaggtatatggttcattagtgaatggatggccactggaaaaagcacagctttccagctggtggaactgggcccaggtaggggaaccctcgtgggagatattttgagggtgttcactcaacttggatctgtgctgaaaaattgtgacatttcagtacatctggtagaggtaagccaaaaattaagtgagattcaagcattgacactgactaaagagaaggtcccgttagagcgaaatgctggatccccagtgtatatgaaaggtgtcactaagtctgggattccaatttcctggtaccgagatctgcacgatgttccaaaagggtacagcttttatcttgcacatgaattttttgatgttcttcctgtgcataaatttcagaaaacaccacagggatggcgagaagtatttgttgacattgatccacaggtttctgataaactgaggtttgttttggcaccttctgccaccccagcagaagccttcatacaacatgacgaaacaagggatcatgttgaagtgtgtcctgatgctggtgttatcatcgaggaactttctcaacgcattgcattaactggaggtgctgcactggttgctgattatggtcatgatggaacaaagacagataccttcagagggttttgcgaccacaagcttcatgatgtcttaattgccccaggaacagcagatctaacagctgatgtggacttcagttatttgcgaagaatggcacagggaaaagtagcctctctgggcccaataaaacaacacacatttttaaaaaatatgggtattgatgtccggctgaaggttcttttagataaatcaaatgagccatcagtgaggcagcagttacttcaaggatatgatatgttaatgaatccaaagaagatgggagagagatttaacttttttgccttgctacctcatcagagacttcaaggtggaagatatcagaggaatgcacgtcagtcaaaaccctttgcatccgttgtagctgggtttagtgaacttgcttggcagtgatatttcagcttggacattttacccttcagtcggcccaagaaatcaaaataaaggaaacacatttcatatactgcaggtaaaaaaaaaaaaaaaaaaaaaaaaaaaaaaaaaaaaaaaaaaaaaaagggggggcccccaaaaaaccccccggggggccccagatttgaaccgctcccgccgcgttttttggtgtaaaacaagggtggccccctaagagagaagacggcattattaatgaacagcagagaccgtgggccggcgggtttaaaacaagagtcgggagaagcgaggacaaaagtggtcgcaacactggagggacctctgcggcgagagaggagaacccactcatacatcagcggcgcggggggcaaccaatatattgtgcggcggaaacaaacatatctcccctcaaaggagaaaatatttttttaagacccctctcacagaggggggggaaataatatttacaatttttcaagagacgggggtgactaatacgtgtgggtggtacacccaccacacgcggcaattatttgactcctcggccgtcgtctgctaaaaaaattactcttgtgtgctacaagcgggagggatatacttattctcctcgccaaacacttttttctc

SEQ ID NO: 288596 - DNA, 1946 bp, Homo sapiens
  misc_feature (26)..(26): n is a, c, g, or t
tgtcttctcccggaaatggtctaagncccagctcctggcggagcgagctagcctgcgaatttcagcatgagtgtactgctgaggtcaggtttggggccgttgtgtgccgtggcgcgcgcagccattccttttatttggagagggaaatacttcagctccgggaatgagcctgcagaaaacccggtgacgccgatgctgcggcatcttatgtacaaaataaagtctactggtcccatcactgtggccgagtacatgaaggaggtgttgactaatccagccaagggttattatgtgtaccgtgacatgctaggcgaaaaaggagatttcattacttcacctgaaataagtcaaatctttggggagctactaggtatatggttcattagtgaatggatggccactggaaaaagcacagctttccagctggtggaactgggcccaggtaggggaaccctcgtgggagatattttgagggtgttcactcaacttggatctgtgctgaaaaattgtgacatttcagtacatctggtagaggtaagccaaaaattaagtgagattcaagcattgacactgactaaagagaaggtcccgttagagcgaaatgctggatccccagtgtatatgaaaggtgtcactaagtctgggattccaatttcctggtaccgagatctgcacgatgttccaaaagggtacagcttttatcttgcacatgaattttttgatgttcttcctgtgcataaatttcagaaaacaccacagggatggcgagaagtatttgttgacattgatccacaggtttctgataaactgaggtttgttttggcaccttctgccaccccagcagaagccttcatacaacatgacgaaacaagggatcatgttgaagtgtgtcctgatgctggtgttatcatcgaggaactttctcaacgcattgcattaactggaggtgctgcactggttgctgattatggtcatgatggaacaaagacagataccttcagagggttttgcgaccacaagcttcatgatgtcttaattgccccaggaacagcagatctaacagctgatgtggacttcagttatttgcgaagaatggcacagggaaaagtagcctctctgggcccaataaaacaacacacatttttaaaaaatatgggtattgatgtccggctgaaggttcttttagataaatcaaatgagccatcagtgaggcagcagttacttcaaggatatgatatgttaatgaatccaaagaagatgggagagagatttaacttttttgccttgctacctcatcagagacttcaaggtggaagatatcagaggaatgcacgtcagtcaaaaccctttgcatccgttgtagctgggtttagtgaacttgcttggcagtgatatttcagcttggacattttacccttcagtcggcccaagaaatcaaaataaaggaaacacatttcatatactgcaggtaacactgcagatgacaatctacaaagaacaagttacacagcaaaatatcagtccataaaatgaaatccttccttatttaggttagctcagtgattaaggatcttcttccatatcatctggattaggagccataatgaagtgctttgggtatacaaggttatgtgtgtatgcatgtatttcccagcgagcatcatcactttcatgtgtaatgtaacgttctccaatgcgagtttcaaattctctaaggtcaagccaagtctgatagtcctaggagaaaatgaaattgtaatgatgaaacaaaagaaacaaaatactgtcaacctggtttttgttttgtgtttttttttgttgttgtttagtgccctagtcaaataattgacaggcgctactcataagtatctactatgtactaagttctacttgtgatattttaaatgagcaatttaaagaaatttttcaaactcagagtctccaat

SEQ ID NO: 288597 - DNA, 1184 bp, Homo sapiens
  misc_feature (26)..(26): n is a, c, g, or t
tgtcttctcccggaaatggtctaagncccagctcctggcggagcgagctagcctgcgaatttcagcatgagtgtactgctgaggtcaggtttggggccgttgtgtgccgtggcgcgcgcagccattccttttatttggagagggaaatacttcagctccgggaatgagcctgcagaaaacccggtgacgccgatgctgcggcatcttatgtacaaaataaagtctactggtcccatcactgtggccgagtacatgaaggaggtgttgactaatccagccaagggttattatgtgtaccgtgacatgctaggcgaaaaaggagatttcattacttcacctgaaataagtcaaatctttggggagctactaggtatatggttcattagtgaatggatggccactggaaaaagcacagctttccagctggtggaactgggcccaggtaggggaaccctcgtgggagatattttgagggtgttcactcaacttggatctgtgctgaaaaattgtgacatttcagtacatctggtagaggtaagccaaaaattaagtgagattcaagcattgacactgactaaagagaaggtcccgttagagcgaaatgctggatccccagtgtatatgaaaggtgtcactaagtctgggattccaatttcctggtaccgagatctgcacgatgttccaaaagggtacagcttttatcttgcacatgaattttttgatgttcttcctgtgcataaatttcagaaaacaccacagggatggcgagaagtatttgttgacattgatccacaggtttctgataaactgaggtttgttttggcaccttctgccaccccagcagaagccttcatacaacatgacgaaacaagggatcatgttgaagtgtgtcctgatgctggtgttatcatcgaggaactttctcaacgcattgcattaactggaggtgctgcactggttgctgattatggtcatgatggaacaaagacagataccttcagagtatgtataattcagtaacatgatttatcagaatttcagtgttagatctgaagcccattgaagagctttgatttctacagtgcctggtattgttgtattacattattttatagttaacattaattcatgttattgtaattccccttaaccctagttcttactgctaacactgagtctactgt

SEQ ID NO: 288598 - DNA, 2197 bp, Homo sapiens
agcgggtcagtcccctcgaagcccggttgccgtggaagccgcgtggggcgccttcctcagctcttcagttgagggtaccgggggatcaagggctcgggggctcacttccaccttgaagccattccttttatttggagagggaaatacttcagctccgggaatgagcctgcagaaaacccggtgacgccgatgctgcggcatcttatgtacaaaataaagtctactggtcccatcactgtggccgagtacatgaaggaggtgttgactaatccagccaagggttattatgtgtaccgtgacatgctaggcgaaaaaggagatttcattacttcacctgaaataagtcaaatctttggggagctactaggtatatggttcattagtgaatggatggccactggaaaaagcacagctttccagctggtggaactgggcccaggtaggggaaccctcgtgggagatattttgagggtgttcactcaacttggatctgtgctgaaaaattgtgacatttcagtacatctggtagaggtaagccaaaaattaagtgagattcaagcattgacactgactaaagagaaggtcccgttagagcgaaatgctggatccccagtgtatatgaaaggtgtcactaagtctgggattccaatttcctggtaccgagatctgcacgatgttccaaaagggtacagcttttatcttgcacatgaattttttgatgttcttcctgtgcataaatttcagaaaacaccacagggatggcgagaagtatttgttgacattgatccacaggtttctgataaactgaggtttgttttggcaccttctgccaccccagcagaagccttcatacaacatgacgaaacaagggatcatgttgaagtgtgtcctgatgctggtgttatcatcgaggaactttctcaacgcattgcattaactggaggtgctgcactggttgctgattatggtcatgatggaacaaagacagataccttcagagggttttgcgaccacaagcttcatgatgtcttaattgccccaggaacagcagatctaacagctgatgtggacttcagttatttgcgaagaatggcacagggaaaagtagcctctctgggcccaataaaacaacacacatttttaaaaaatatgggtattgatgtccggctgaaggttcttttagataaatcaaatgagccatcagtgaggcagcagttacttcaaggatatgatatgttaatgaatccaaagaagatgggagagagatttaacttttttgccttgctacctcatcagagacttcaaggtggaagatatcagaggaatgcacgtcagtcaaaaccctttgcatccgttgtagctgggtttagtgaacttgcttggcagtgatatttcagcttggacattttacccttcagtcggcccaagaaatcaaaataaaggaaacacatttcatatactgcaggtaacaaaagtcaaagtattttatcttttcacagcaagaacagtccatgttgtatataatacaaccaacattatagaacttttagggttgtgactggctttggtgcaaatgtgtgctcaagctaataagttattgtgaaactgagtttcctttaacttacaaagctagttgccatatttctattttattttaaaaagtaaacatgcggctgggcgtggtggctcatgcctgtaatcccagcactttgggaggctgaggtgggcatatcacctgaggtcagcagttaaagaccagcctgaccaaaatggagaaaccccatctctactaaaaatacaaaactagccgggtatggtggtacatgcctgtaatcccagctactcaggaggctgagacaggagaatcacttgaacctgggaggtggaggttgcggtgagctgagatcgtgccactgcactccagcctgggcaacaagagcaaaaatccctctcaaaaaaaaaaagtaaacatgggcactgattgttttaataaaaatgggaaacagactaaatggctattcacaggaaactgataagatatatgttatttttttaaatgagctagggcaatatgttttgacagaaaactctctaagatttagtaagtgaaaaaaagtaggatgcaagagtttttatagttgattccatttttgttgaaggagaaaaactaaataaatacgagtaatttcatagaaac
